United States Patent Application Publication US 2014/0057251 A1 - sequence listing, part 21

SEQ ID NO: 22338 - DNA, 1177 bp, Cannabis sativa
ctgaatcaaaccatttgaacaagctagcttattcggtggattgggaaagccaaatgcaccaagttccgcaagcaagtatatgtggctgccatggcagctcttgtgtacgtaccaaatttagcgtgctagaaatgacatagtgtggaattcgagtacaaccaagaaatcattgatcataagcaagataaaaaataatgttaatggtagaattacttgtttttggcctaagaaaactaatgttatagatacaatttggttctccaagttgtaaaaaaaagagaagatagaagcggagaatagaatacttttttttttgaaaagacaaagtgtttatcttagattagcaactgagaaaatgggatccacagggggaaatccctcccctttacaacaaggagtttcgctctcagaacagcgagcacttttggccaaagagtctacaaaggctagataagtgcgattgaaatgaaaaaaggaaacattcgagaaactgtgtttaagttttgtggcagcgtcaaaccaagagagacacttccagctgggggatctgtcattagcgaaagctttaaggacaattgaggaatcggaaatcagcgcaaagtcgtcccacttgtaggtgctattgcttgtaaagttgttttaatgaaaagcttgttgattcataaaaaaaatgattaaatactcaagatcatgagcccaccaactttcatatcttgttctactaaacttctttttatcggtaaatgagaatgaaaattagttaaaatattgagcaatagaatttattttctaaattcgacaatgtgaaaaatatagcaatgatctcatgtagaaccatgtaaaaataaggcacttcaaacatttacaagataagtagtataattataattttttattaattggtataacaaaacgagtatgctatataatttatgggtcaaattaatggatttattgcatgtacttaagcatttaaaaacaaattcaagagctgcattgataacaaaacgagtatgctatacaatcatattgttactaaaattaacacaaatttaaaatctaacagaaccaacgtgtaatatccaacccaatggctggtggaacttaatgataaattgtgatataacaataggagatttgtaaattacaaaatttaaatttaatataatattaatta

SEQ ID NO: 22339 - DNA, 2201 bp, Cannabis sativa
cttcaccgtcaatggatgggtgcaaaagttaatatatttgtaatgaatatatatatttattgtattgaactgaaatgtagttagatctagttttggtggtgtagatctgattccggcggtgagatattatttcaggtgtgtaattttttttttaactttgtgagtgtttgggacataggcatactcaactatttttaaccaatacgtttttcattccatttttacgatagttgaacatgcgtcagtttcgtggccccaggataatacctttacccaaccgtttaaaacaattgggaaatcaacaatttagtagttaatcaacatatcatcaacatacaaaagtagtattatgaactcaccctgatgaatgtttttttgatgaaaacacatttatcagaagttgtccttcgatatccatgctcaaccatgaataagcaaacttcttgtagcattgtcgtagtgcctgcttaagtccatataaacttttctttagtccacgtaccaaatcttccttgcctttgactttgacacctattgactactccatataaatctcttcttcaaggtcaccgtgaagaaaagcagtcttcacatctacttgttcaacatctatacataagcttgtagctaaaccaagaactacccaaatagatgacatcttgaccacgggtgagaaaatctcttcaaatttgattcctttcttttgattgaaaaaaaaaaaccttcagaactatccttgccttgtatcttggttgtaagttcctctcgttgatctttaatttatgcacccattttttactgagtgccttcctaccatgaggtaatttgactagatcatacgttttgttgtcatgaaaggattccatttcatcttgcatggcttttaaccactcatctttatactcatgtgtcaatacttcttcgtagcactttggttctcccctatctgtgagtagtatatattcgattataagatatttagtctatagttttaactaatggctcttaaggatcttgttctccattatccaaatcatcaaccatagtattgtcatctctattgtcattacctgcttacggagctcgatcatcataaattacggtctcattctttacatccccaacatattctattatatctcccccataaatatctagaagataaactaaatctaacttgattggatattcactaggaatagcaggcttcatacctttctgaacatcttatatattttgaccttcgaagaagacaacatctttgcttcttataatctttttctcaactggatcccatagcatgcacttgaattcttcatttgcgtagctcaagaaactattttgtcttccagtcaaacttcgaccattcatccttgggaacatgaacaaacactctaaaaccttcaaatggttgtaagatacatctttttctgtcaaatttttcttggaacatcaccattcaaaggagctgaaggagaaaagttgattagatcaactacagtcatcaaagcttcaccccaaaagctttcgttaagctttgtattagacaacattattctgttcatcctcttagctactttattatgatggtgcgctttaagagcaaaatattcatgtctcattctagtatttttacagtaatgtttgaatgctcccatatattctcctccattgtctgtacgaatgcacttcaagtttatgccagtttctcgttccagtctagcatgaaacaccttaaacactctagacacttgatattttattttaagtgtatatgcttaaacctttcaagagtgatcatcaataaatgtaacaaagtgtcttgcgcctccatgagtactagttgccattggaaaacaaacatcaggatgcaccaagtctaagatatttgatcgtctctgtggggccttgtcatgaaaagtagctctatgtttctttccagccaaacaatgaatacacaactttggaagtgtatattttcccttaacaccagttactttttctcttttagctagaatatgtagtcccttcttgctcatatgactgagtcatttgtgtcataacttgattgatgaatcttgtctcagagcattcatatatccattacaaattttagcttccatcatgtaaagggtatttgccttcttccctcaggctatcaccatggaattttcagttagcttctatttattatccccaaa

SEQ ID NO: 22340 - DNA, 4150 bp, Cannabis sativa
  modified_base (2745)..(2753): a, c, t, g, unknown or other
atcaatgattgagcacccagcgcccatattgacaatctgtcaatatgggtgccttccatgtatcatatcagagatccaacttttgcatcttcttcttcttcatcaaaaatatggaaataggtccttttgtggaagaagcaacactttatgggtgccaaagatgaggcccaacgatgggccattttcgatgatgtttttcaagaaatcttccgagcatcttctctattttcagaaaatattgagattcaactatttttggggaccaaacaaaatttctgaagggctagaaatgggacctagcttgcaggttgacatattttcaacctgggttgtttctgatcaagttcagaaaaaagtgttccatgcatttttttatgtatgtagttcaaactctttgaactctagactatactcaataaaccacagaagccctgtggcacacatattttgattagacatggatataatataataaacgaactagaaaattgatagaaatagcaaatcttcataaaaaataatgaagatttaagcaaacttagggagaaaaccacaaacccgagcccctagaaataggggacggtcgccaggttgacaattagcttgagacactaccttcaattgctcaaatactaaatttgattcgaccagtgaatttgaaatgatcaaaaatagggtaagagaactggtccttaagtttagaaaccttagaagtatcaaaacaagatctcgggagatcacaaatagggtacccaacgcctaggttgacaaatggcctggtgcgctgggttctgcttatccaattctaattctattttgaccgtccgtctagtttttcataataactaagatccatgaagtcagaaaagtaaaaatcacaactttgcatttcccatttccaacataagaaactcactcaaaaatgaagagttatgagtctcacattttcgtagaacaacatcttcgagaactcgtgaccagcttcaccaaaaaacagaaacaggctaagtgatgtcaaaatatcacttatgcatcttaaagtacttcccttgaatatttttacacttacccagcgtccagattgacgtcatatgtcaacctaggtgtcgggacatcaacatggacgctcgatgtcaacttgggcgttggatcatgaactaccttcaataaaatagccataactaactcattattatccaattgacgcgattcaacttgtattttgaagctaattcaatgctttatcaagtcatgtctcacactttaatgttaattttgaagctcccaaagaaattacaaaaatattctccaagttacctacaaatatttttgtataattataaactatttttctaaataaaacatcagaaattcataagtgttttacaatctcatatctaaacctaccttatattttaatttagtgtaatcattatgttgtgtagttacactagtaattacacaattattctcaataaagaatagaatagaatgtaattacaagtataaggttactattgtaatatatgtttacataattatttttactttgtaacaaatgtagtgttgcttttgttaggaatagtactatactgttatttaaggttcattaaatgaataatggtgagaattatttaaataatggagtgcttaaatatgataaatattttttttttagggaaaggtgcccattaagaagaaaagaaatcccataatcacaagggtcatcaccaatctagattgctacttcatctaaccctttagcccaggctaccagattgtgcgcgaacgaatttgcagatcgattgacatgggtaacataggctccaaggatgagagataaaattgccttaatttgcttgattaggtcaccaaaaggcgaaagaaaataaaaacaattgtcaaatcaaagtggtacatcttcggaaaatactgaaaataaaacaatacaattgtcctgcttataataagtctcaatattgataatgtacttgtgaattgtgattaatcatgcttccgttgttattattaattgagcaatggtggtgttcggtcctttcaaatcaaataaataaatataaataaatgatgttcaaccacttgtctatacactaattataacacgaataaaatttaacacttttcaacaccaaatatttgatgacacttggatcgtatttgcagttcaagccggcttattcttttggttcccgctctcatttgtttcccattctttaatggggttatctcatttgtttaatatttgtaacaaattgggacaaataattttaataaaattttaagaacttaactttcgaagatataacaacaaggaaaaggttacacaaggcagaaccaaatacgcccttacaaaactcacgtgactctcttatctaataatctaaatcacgtgctgtagttccagccttatgtgcctcgcagtcacagatcaaaaagatcaacagtcccagccttagtccccactttcatccacaactccacatgtcgctggagagtcaatatcaatcactgtaacggcgcgtggacttatcattccttaatcctgttctcggccgttaagttaactccagcgtggttaacatgaattacattctgtatgcactacaagaccaaactagccaataaataagcataagtaatgttagggaaatgctaaaaactctctcttacttattaatattgtaattagtttaattaattatcaaatctcatataatttaatannnnnnnnnttaaaaaatattgttaaccaattacaagacgacacgtctaaaagttactaggcactattaatgtccaataacaacgctcataatattagcataaatatttaatgtcttctaaatagttagtaatattttataatagttattaaaataaattatataacttaatatttaattacactaataacgatatgatatctctaagtagtgctaggtgtaacgtgtcggtcaagatgacacgatacaatacatgtgatgtccacaaagtggtcaagtagtgaaacatgttggtgtacatactcgtggtatagtaatacataatttatatgatagatgacaatattttcataaatatttttaatattgtccaaattgagataggacttggttttagtagggttgaacatattgattgggtttgacccggacctggccaacgcgctcggacccgatctagtgagcccgaaaaattaaaaaaaaaatctgttttattcaggcaggttgagttcaacctgttacacttttgggcaggttcgcgggttggttttttatggtcatcgggtttcgggttgaacccgaacccacctgccaaaccggtcattttttattttttatttttattacatatataacatattaaaaaaaaccctaaaatctaatcattttatttttattacatagataatatattaaaaataacaatgtataatatattacatatagtttggaacttgacttttgtattttagatttgaaattaatgtattttttattttaatctaacgaatataaattatggtgttataagtttattacttatatgcttaatttaatatatagaaaaaccacataaaatttgatttttttttaaaaaaaaattaatgagttgacccggccaacccggtcatctcgaacccgcaaacccgcgaacccgaaccatctcatgggtcgggttcgggtataattttttgaactgaaaacccgtgaatccaaaacctataaacctgaaacccggtcaaatccgctcgatgttcagccttaagttttggggctgacactgaaaaaggaaatattattttagataaatacatgcattagataacatatgaggttttttatttatattattttcaagagtacatgtttcacttaatgaattactatattatatatatatatatatatttaaaaaaaattggcacttgttggttaaaaaatataacccttgtgtttcataaaaatgtgccttggtaattgggagccttgtacaatggcttacgctgctcaatacttaggtcaatcctgttcactatttatttaggttaaagaatacaataacgccattggatttgaaaaactctaagaattgatatatggtaatgaccatatgtttacagagaaaa

SEQ ID NO: 22341 - DNA, 2940 bp, Cannabis sativa
ataatcctatagtgttatttatttatgccataaaaaagtaaaccataccctcaattctcatatttatgaaaattgctcaattgaatattcaaaaataatatctaaatcccatcacaattagatatctaatatttaactcggttataattagatccatcatttgtaaattagataaatttatgcatatccttaattaatacctacctaacatgttcaaaaaaaaaaaagttaatacctacccaaccttaaggtgattttatcataaaaaaaaaacttatgtttgtcacacaaccctaaaaatagggctaaatatcataaaaaaaaaaaatcattttatttttgtcaaaacacaaaatttaccaaatacagagatggtcttaggtagcccattgcgtttttattcctaagcccaatatttctagtccaatagatcatcactctttccctcttccattccagccgatctcaacctctctcccccgctctcagctgcagcagcacacacctcgacgacggcgtctctcacctcctcaagtcgacggtgcccccagccaagacattctatttttcgaatcaagcttctctttaccctctttgttggttttaagaggtattttggctttcatttcttgagagtttttttttccctttcttttctttgaagatcttagatgggttcaatttctttacttaggcacatttgtttcgttcagtttatccagtactggcctatgctttatttatcgattgtaatgtaactgtagtaaaatagtaggagaaaatacatgtcttgtatctgtttgattaatttgctgtgagaaaatatgggtttttgttttctgttactgggatttgcattataattgttaaatttaatgtattttgagctttgacaaagtaattgaagagtttgattgttgattgtgtatagtaacatgtaatcagaacaactaaacaaagattggctttttatgtatatcatacatgttaaattaaaacttgcattatttttctagaccgttgaggtatgagctgattaagttgagggttgttcttaaattaaaccgttttttaattctaaaataaattgaggttcaaaattagagaaaactcaatcttttgcgaatgtgtataaggtttagaatttgtattgggtttgtgagcataatattatagtttacattaaagcttggttaactagactaaatattacaaaatcgatcaatgtggtcttcttgcaggtagaattgccctagaaattagatgagcggtggtggtttcacatctagtagcttgcgggcatcgttctcctattgtgtacaacaagtaagaagctatgattaccatcactacctttgccttctggaacttcccctcaacatgaggaaggctgcatttgcaattcgtgctttcaacatcgaaacagccagagctatggatgttgcttctgatccgaagataggccttatgcgcctcttgtggtggcaagaagccatagacaaaatctatgctaaaaaggctattgaacaccctacagctcaggctctctcctcagttatacatgagaacaaaatcaccaaagggtggttaaaacgatcagtggaagctcgaattaatgatgccaggagagagagcactgaaatccccgaaaaaattaaagagttggagcagtatgcagaggacactgcctcaactattctttacactacacttcaagctggtggtataaggtccactattgctgatcatgcagcctcgcacgttggcaaagcgagtggccttcttttgctgatcaagtcactaccttaccacgctaggcgcaaccgccacttttcttacatacccaccgaggtagcagccaagcatggtttattgtctaaacagggaggtcaaatagaactacatttggattctcgagaaaatctatgtagcgcggtgtttgacatggcttctatagctaatgttcatttacagaaggcccgtgagttggctggaaaagtgcctgctgaggctcgtccggtgctgctgcctgcggtgcctgctcaagttctgttggattctttgagtcaagcgcattttgatgtctttgatcccaggttatcaagaggggtacttggcttgcctcctttgtggttccaagtgaaattgaagtggcattcgtggagaggaaaatactgatgttgttttcataattctttttcccattacacttccaataagtgataaatctcttatttgcatttaagataaatttcatctcaacagttatgttgtgaacatagttagttaactttaattctttggtttgttttctttatgtttggccgttttgtgccttaaaataaatataatatcattgtacacaatttcaatgaaagacttagtcgatattacaattcaagaaacataggaaaaggaaaaatttgccatgaatagaaacaaacagatgggcatggagcgatacaatgtttcctcagtgaaaggtgaaaaccaatccaaaaaaagcttaattgaaaaaccctttgcataaatttaataatgttttttttttttttttatattttgttgctttataaaaaaataaagaaataaaaacttcaaattcgctagaggaaggggtcgaacctccgaccttgtggttaacagccacacgctctaaccaactgagctactccagctgtttggaagatccaaatgcacttaattatataaaacaaatgttaaagaaaaacataagaatatgtttctgtcgaaaacgacaacttagaaaatcttaacttgggggaatcattggttgaattgtgttaacctacgaacaaggatgtaagacacaactcatattatatataatctatccaggaccagctcaagttgttgggttttgaaatctcaaccttttaattaattgttaaactaatttaactaaagaattattacata

SEQ ID NO: 22342 - DNA, 4990 bp, Cannabis sativa
  modified_base (1907)..(1909): a, c, t, g, unknown or other
aatagatatatatatatatatcttgcacttttaataagtgttactcatgaataagtattattaaaaaattgattttttctatttaattttattgtttaattaaaaaaataatcacattttatattatctctattattgtatgggttggaattgttccatcgattaagaaaaataaaaaaaaaaaattaagtttgagttagatattttttgctatagtataaaaatagagttatttttaaattaaattgcaagcttgttgacactaattggtcaacactgtctcgctaaatttgcaaaacagtaatagaagaaatatagtaaataagagagacaccgcaatttataatagttcactctccatgtcaatagaaatggagctacgtccgcttcaaatttttatttctcacgagaataacaaggcaattagctaaggaaaagctcttaaattctagaaagagagaaagaagctctaaccttatggaaacttagcataatgtaaaaaatgagctagtggagctccctttttataggcataagatccattaaactcttaataaaataatacaaaaaatatgaaaaaatcattctaggctaatcttgaccattaatggagatctaatgattaaaagaattccaattgataattttcgatttttagagcttgaatcccgtttgttgaattattttcaagcttttcacagaaaaaaattatacttgacttgtggacgaattttttacttcaaatcttcagaacatatgagtgtaagacatgcatagaaagacctttcaaacacacttaaaatcacatcaatcagagcaacattaaatgagttatggtcgttttactgaaggttgttcaacaaatggggcccaggttgacattctaacgtcaacatagaattatatttttttatgcctaagtaatattctaacatcacttattcaatttcttagttctggtgaagttgttcagtagttctcagagatgttgcttttttacaaaatcaggtagactcgaaacttctcgatttgtgactagtttgtcgatattcaactttactggaaaggtgaaatttcaaagagtgaatttgacttgtcacaagtcatagctctcgtttactataaaaaataatcaaatgtttgagacagaactgggatcggataagcaggatccaatacaccacgtcacatgtcaacctgggcgctggatgctcattgttgagcttcctaggattcatttttctacttctatggcatttgatattgcaaaagacgtctcctaccatgttttaaaccaagataagaagaatgcccatagtagaattttcgtttgcgtaacaaaaatatatgaactaggttgaacgtcaatctaggtgcagagcccaacaccagtgacaacctcggcgctaggtccatattttgacccctaaatgtttttgtttacttttcgagaacacttatatcttaattattgatgaaaatggagaaatatctaggagacttcatgggaaaaatgcttggaattggcccaagttcacaaaatatcaacttgggcgttaggaccctagcaccaggtcgtcctgggcgttgagtccttattttggccaccaaatggatactctaaaaggtgaatatatcatgaagactttgtcaaaattatcgttggaaatttctaaggttgacaaaatgtcaccttgggcgttggtgaccaggccaagtgtcaacctaggccttgggtcagtcttctagcctctaggtcgaactatttatttcctaaagtacttgttttcattttagatgaagacaaaaattctcgggaaatgttagggtttatgccctaaaagcaagtatttaatggataatatattataaaatgtatgaaatacaattataagataaatgaatannntaattatagaagtataattgataaatatctaaaaattccttattcatatagagatggtatagtcttgttaggtcatacaagagaattaagataatataatatgaataaaataagtcagtagtgtattaaagtaaggaatcttaaatatagaatcaccaagtacggtttactatgcactatactctaatgcgtgtgattttaattcagatcacatatgtggataaacatgtagtaaaggtactgtgtgtaatttgtttatacaagtctggaccgatatgtaatattatctctcatgaacatgtcgtttaccataaaaaagttattcatatcataatgatgattattagtagattagtctgaatcctgagtatacatgaacttttgtttgtgtttgttgacctcaaaaagtgatcaaccaacagcagggtcatatggatctgatgcttaccacatgttacacaaatagaatgaaaaagtagagaacacacagatttgttatagaggtttgactccctttgatagtaggtaatgacctattttcctttttgttgtattaataacgagagttaatattattcaaatcactataggtggaatctgatatagcaccctaaaagatacaaggttgaatcgagattagaaaatctcaagtgtagagatagcttgtatgggcatgagagagtgtggagaagagagttattagacttgaacttagagcttggaggctagtataaggcttaaacttaacttaggtttctaggttagagttaaggcatttatataggaagcctaaaaccctaatttacacttaaaaacctagatatttgtatatttaattaattaattacaaaagaccaaatcatgttatccacgtgtaggattgcccaatgaaccctgtaggtctttccttggccggccaaacccctatagagagtaggtttgtcatccatggtgttgtccaaaggctggccgaccatagggccaaccagcttctgtggggaagtttgtctatcacttaaagcttgtttaagtgttgggatctctatttgctaaggtattgacttaaccttcccgttggtgagctatacccacgtggcactaattttgtccatgtaagcattatcatgtcagaggacaaaaattaggataacattttcccccaagtccctatgcagtcgtctgtatggatagggacttaccagccgtattattgcagttagtactgccgcaacttttattgaataatagttcctgaattttagcgttttgaaaaaatttcccttgactatttgatctcatttgctgtagaaaaataactgtttcagttgtctctttgttgtgtaagtgaagtaagtgaagaaagggtgccatatctactatataagggcttttggaggaaaagcctttttcacttttcactttttacattttactttctctcactagatatatgcatttgaagaagctcctccttctctctagagggccaaccaatcaagcaccattctcttgtgatttttgtatcgttttgacaatccaagcttcccacattcttcctgaacggtttcttataatgggtaagctttctattcccactatttcacttaatttggttgattttatcatggatgcatgaacattatttcttactttgaacaccctttgattcctgtgttagattattgtcatttcgatattttgatctatacgatagccttaggatatgtcatgtgtgatttctagacgaaaaagatctgaatctgacctttattgtgattcttggctctttaagtgacgaagaacacaatgaccacaaagaacatgtttgagttcttgaaaaaaacataagttttgctctgtacaggtcctggccggcgatagagttcttatttaagacctggctggctaagggaggttgtcaagggatttggttggccaaggggatgtaccccataggctagccgacctatgcctggaacaagggctcctggccggtcactaggctgggtcagggggtctggctagccacttaggcctagaaccctagctgaccaaggccaaggctccaagggggtagtcagttttcttccctctattgacctcagctagggtcttgtgacggcctttgaggcatataaaattgtagccttatgcgtggttcctcttgggaactctatataaggttcggtagtgagtccattatagtccatagtataattaatgactttctatgtatcttagtaagtgtacctaagacggtactaggttcatgactgtccttgtacattgtgatttacctagaagataccattgggtactgatgactagaatgtctttgtagctttgttaggttgctcacctccctttatctcttttatgcaggtagcactaggtgttgaataggggaggtgacaaccacttatgagttcaagctgtgtaaccccaaagctaatttgtcatacatgggcagtgaggcttttgtggagaacatgttagcctaaggaaaggcgctcttcgagagtcggatggaggcagaccaggccgccgcctatcgagaggggtcatcgtcagggcaccatgatgagggactagtcggcccacctgctgaggaggtggctggccaagttactaaccaccagggcgaccttcttggtactgctatggccaacctggacttcgacaatcctaatctcgcggcttcagactcgtctccacctgcctctgcagacacatagacagtatttttcattagtagaattcaacatcatatttgtataatataaacaatattttcatgttctgtatggtctgtggccttttatttttagaacactacttctttccgtgttccatgtggcctgtgtcctttttagaacgctacttgttttaagacccagggacttcatgtttgtatccttggcatataggccctctttttttgaacactactattgcttggccctgttgctattttatcatagatcgtgtgaccaaccaagcagtatttaatcctggctatcttcttatggccttgacaagaaagggtttagatttactttgtcaagccaaagtatgcccgca

SEQ ID NO: 22343 - DNA, 6503 bp, Cannabis sativa
tcgcccagccactggtaacattctcctcccttcttggattcgatgcaataacatggtcatgtcttggcttgtcaattccgtttcgtctgaaatagcacaaatcattatgtactttgatcttgctaccgatatgtggcatgatttgcaagaaagattcagtgagggaaatgaccctcgaatctttcagcttcaaacccaattaacacatcttcaacaaggtgatcaatccctcacctcttatttcaccaagctcgaaaccatttgggatgagctaaaagaattccaacctaacactacttgcacttgtggtgccatgaaagttttcttggaatattacaatcaaaaccaggtccttcagttccttactggtttaaacaagtcttatgcatctgttcgggctcaaattcttctcaatgaacccatccccaacctctctcgggtgtttgctatgattgttcaagaagagaggcaacccactcttggttcttcaactacttcacttgctgcctctgcccgtgcttcttcgaacaatccacctcccaaatctaagaagccaagaccttcttgcaccaattgtggcaaaccgggtcactatgtggataaatgctattttctacatggctttcctcccggttatggctataaaaagaagcaagacaaagcaaaacctgctgcaaatcacaccagcaccagcaccaccacggatgtgattccctcttcaacaaccaattccgacttgactactcaatgtcaacaccttatctctcttctcagccaacagctgaatcaagctacatctcgtgaggacatcaacaaccctcctgttgcctctaacatggctggtaactctccttttcccatacttttacttggattattgatggtggggcaacacatcacatgtgtgctacaagaaattattttcacactttttccagcaatgtttttcttcctactagtgcaaatattcctgtaaaaggaataggagtagttcagttaaaccagcacattactcttcacaatgtgctctatgttccaacttttactatcaatcttttttctctttctgcattcattgataacagccttaataaggttttcttttctaatgattcttgctctatacaggctccttctccgagcatggtgattgggacagctaaacggcttgggaaactctatgcaattcaacaagagcaaagtcccataattcagcctagttgttgtctttcttttcacaataatgtagatcaatggcattcacgccttggtcacccctcaatgtatattttcaatacattcaataaaagaattaactttggtttttccattccagcagatcaattttgccacatttgtcaccttgcaaaacaaaggaaattaccatttttatcaaaccataattttgctgaaagtgcctttgatcgaatccatttggacatttggggtccatttcatgtaactagcatagaaggctacagatattttctcacaatggttgatgatgcatctcggttcacttggacctttatgcttaaaactaaagctgaagcacaaactatcatccccatgtattataacatgattttcacaatacaatagccccaattaaagcaattcaatccgataattctaaagaacttgcaatgtccgccttttatgcctctaaagggataattcattaccactcttgtgtagaacgtccacaacaaaactctgttgttgaacgcaaacatcaacacatactcaacattgcacgtgctttgtgttttcaatctcatttaccccttgcttataggggatatctcattgctattgcaacatacttaatgaacagaactccttctgctctacttcatggaagtacttcatacgaaaaacttcactccaaaccccccaattatgatcatcttcgagtttttggatgcctagcatatgcttccactcttacctccactaggcataaattttccccaagaagctgtgcatccgtgttcattggctacccccatggaatgaagggttacacccttcttgacatccaaacaacacaaatttaccattcaagagatgtcattttccatgaaaatgtgtttcccttttttgggcaaggttccaacaatgaaattgatgtgttcttccaaccacattgcatacctgctaacacttctattaatagaaccaatcccactaccaacacagctcatttccactacatcgggtccacactcagcacttcctgctgattcttacactgtaatgcccaactctgatgcagccagttctgttggtgttgttcctacaccagaaaatactacaaaacataaaaatactggtgttattcccacaccagaaaccattataaaaactactggtgttgttcccacactagcagctaccacacaacataaaaatactagtgtccttcccacaccagcaacattctttgaccataactccactgctgatgttaacacccacacaacatcagcaaccactggtgttgttcccacacctaacacactcgtcgacaacaattcaactagtgttgatcctacaatcactaaaacaacctccaccattccttccaatattgaagccactggtgtcactcccacaccaagtccttacccattactggtagcaattctggcatcacaccagatattacacacccagccccagcacaaaaatctaaagctggtcgcctgatacacaaaccatcccatctcaaggattatgtttgtcatactcattccactgcttaccccattgaagagttcatctcctatgcaaaacttagccttcacttccgagcggctgttttagcagcatactcccacatcgagcctacatcctatagtgaagcttcccaattcaaacattgattactcgctatggataatgaaactcaggctctcgaaaacaatcatacttggactgtcacaaaattacccctggccataaagccattagatgcaaatgggtatacaaagttaagtataatgaacaaggtgagctatacgattcaaagctcgtctcatagccaaagggttcaaccaaaaataaggcattgattaccttcaaacatatgctactgtggcgaaaatcaatacactcaagatcttattagcacttgcagctatgaataactggaacgttcaccaactagatatcaataacgcattcctacatggtgaccttcatgaagaagtgtatatgaaattacctccaggttacaaggcaccacccgattcgttttgcaaacttcataaaagcatctatggattaaaacaagcctcttgtcagtggtatgaaaaacttagtaccaccctcacaactgcaggctttatcagatccttatccgacaactcccttttcatcaaaaaagcaaaaactttttttctagctattttgatctatgtcgatgacatcattgtagctagcaacaacgacatggcaatcacccatttcaaaattttcttagataaacaattcaaactcaaagacataggaactctaaaattcttccttggtcttgaaattggtagaacaaagaatgggaattctatatcccaacgaccattcactctccaattactcactgacacggggtatcttggagctaagcctgaatccacacctatggaaactaacctcaagcttagcaaagataaaggcaagctcctgcccgatcctactgtctatagaagccttataggcaaattgatttatctaaccataacaaggcctgatatcacctatgccgtgaatcacctaagccaattcctatcatgtcctcgagcaccacatcttcaagctgctcataggatccttcagtatctaaagggaacccctggacagggtatttttttccctgccatttcttctccccaactttctgcattttcttagacaagtttttcctccacgaatgttcaactgtcattcttttccgatgcattggggcgcttgtcaagacacacgacgttccatttcaggttattgtgtctttcttggacaagccttagtatcttggaaattaaaaaaaaataacaggttgtctctcgctcttcagccgaagccgaatatagagccatggccaatgccacttctgaagtaacttagatcctttcattactgaaagacttcgacatctcactcaacaaacctgtctctctctattgcgacaacactgctgccattcacatcagtgaaaaccccttctaccatgatcgcaccaaacatgttgagatcgattgccatttcattcgagagaaagttcaacaaggcgtcctcaagttgcttcatgttccatctcaaaacaacctggctgacatttttaccgaggctctgctaccagcacctttcaacaacattgtctccaagctgaacgtttcgaatatctacactacagcttgaggggggctattacgagattaccctccttcatactctgttacctaattaggttaactaattcttgactcttgctgttatatttcagccgagttagttattcccaactaactcagctctctatataaagagtccttctcatgtaaattgtattaattcagttcagtaataataaaagagttcaatacagagtattttctctgtttttctcttcactttcatctcttttcactcatagtaatgaaatggaatggaataaaaaagaaataatttttattctatttctttatttggttgcatttcaataaagtattggaatgacattacaatagaatgcactttacaccaaaatagtagaatgactattccattttaaaaaggaaggaaagaccattctaatgtaacaagagaaaaaatttaatgattttttgatcaattttttttatgcatcttaaattttatttcattccattcctattcctattctcattctcatttctattcctatatttttcattcctcccaaccaaacactacttaagataagatgaatgaggttccatctcaaaactaattggtaatgggaggagtagcctatttatcttatatattctattatctttccacacattagcaatatggaactctctaacatctccactaataagattgtagctattttatttgtttaccatcttagacaactcgatcataatcataagcgactctttttgaattttcggtggcctcactcactatttccaaatcacaagtggctttttcgacttttggctcttggatcaattttttttatatatttttggtggctcctttactttttggctctacttcgatcgatttttttctttttttgggatcggatagtcgccagaggttttgtattgctctgatactatgttagaatttgagataagataaataaggtcccatcccaaaatcaattggaaatgggaagagtagcccacttatctatacattctattatttattttttcacacattagcaatgtgggactcaattagaggtgtaggtctccacttctaataccagtaaaaactggaactaatattattactagcgggattctactgctattgctttggcgataataatcgattactattatgtggtattagcaccggactcacacacaaaccactaataaaaagaaatagtatcaacaaattattagggacaggctccattggtattttcatcaaattttaatctgaatcaataattgtggaatcgtgtctcaattaattcgttggtattatatttttaaaataaaatatatatatatatatttaatttttaaatttatttaaaaatatataatatataataatttatgaaaataatattttaaataaacataattacttatccaacacaatacaaaaaaacataattaattatccaataatacacttaaaaattaaaatattcttaatttaattaaaaaacttcaactaacataaactaattattattgttcgaatcaagataattcttccattagaatctttaattgttgaggacatcatcaaaaaacaagcatgatttttcaatattgtcaaacttttattaatcaccatctaaagtgttataaaagtgtatgagtttaaataatgtaaattggactggatattatatatatacatataaatattttttgtgttaattattaaaatattatgctattttatgaattttttagtaaattagtcatctatatttctctgaattaactctcatcacttccctctacaaatctcctaaacccaatcttatctttatcccaaatcttctcaatatcaatatgtatcctgtttatagttagattcattatacaattgatgaaactcataacaataggaacctcttgataccaaaggcacctatttcgagagctccaaactaagtaaacacaattattaaaagtcaagagtataattttctattgggattttttctataataaactgaaaatggaaaaaatttacatttatgacctacatagagaaaataaacaaaaatagaaactaaaagttgttattta

SEQ ID NO: 22344 - DNA, 2351 bp, Cannabis sativa
aaaaaaaaaaaaccaaaaaccaaatctttcctactggttaatatttcatttttattttacatatgaagtaaaaattaaaatcaaagctcaaagctgagagttgagagcagaaataactcaaatatctcagcaaacaacaaaataagaaaactcggtcagctccattaaatattaagaggaagaagaagaagaaggaaacccagaaaagctgattcacaaaacacattggaaaaacagaaaaccccatttgagaaaccacacacacaaaagtacacaggtctcgaaacaaagcagtaacaagcagaaaattcaaactgattggagagaaaacgaaagagataaagacccacattgcaaattcaacaccaacagctagaatgtgagaggctttgcttgcagctccggttccgatctgacaagatctccgacacccttctcttctttctctctcttgaatctatctaagcccctctctctctcttaaaatatgttcttttttttctttctttaccttctcaagttgaggttctccaaaacagttttcgacctcttttttgttttatatgctcctctgtttgggttttggatatatatagagcgcttccttcggtttcaaacgccgtccaatcgaaaagaaaaaaaaaaaataaaaaaaattccttcaattttttgacttttttatttcagttttttttccattaacatattccattcgtaaagataccatttttttttttttgagaaaagagtaatttcaccatttttgtagtagtttagtatttggattatgctgaattaggtgaacccaacataatacccttttattttcaaataataatatgcaattttttgtcacttacgacaaagtttttgattcttaatttttattaaactaagtacttaggtactaggttaaactagacaaaattttaggattaattataattaattaatagactttcatttttgttataaaaaaaagacttcctttatcgaaaaaaaaataatagactttcttgagtatgtatgtatttatacatttaaattttgtggtagagcaactttaaaaataaaaatcatatggttgagatagtttatctaagatatcaaacattttaccatataatatataacaacagaaaatttataagtatgaaagacctttcaatgtgttaattattaaaaatcacaagtctttttttagagtatgtgagatatatttatataaatggcccaactaatatgatacgatcttgaaaataacatgtttttttctttcatacaaaaataaattaactaatcatgcgtcacatttgtctattataagttttagtgtcacaataacacgttagtactaatctaggattattaggtaaacgatatcatagttaattaaatactttaattaattttaagaatatagagtctttttctctaaaacactttatttttattttctttttaatttttgtaacgcgtggtttccaccgtatcgtcaaacgtagaaaggtattaagtgacggtgctgggaggttgacggcgttaactaacggcgaaaacgtggtgggcttaattgtttttgcgcccaatgaatccaaatttctgcctccggatcttgttaaagatttttcttttttaaatttatttcttttctttttatttttacttttttaatttcacaaaaataaaaattgtattttcagacgtgtttacagtgaactcatcttttttatggggcaatttgtcggagattcctcaaaagggacaagttctttaactgacaataatgcccttgctctaccccttccaccttttatttattattcagtttattttttctgttggtttattaactaaaaaaaattattttgttaatgatactaattatataacagaaattgtggagatttgcacgcatgtcggtatgatctagttttatatatttatttattgagatattaattttaaagctttttagttgactatgtactatgtagtgcttttgtaatctacaattagttttttttttaatggaaatttttatttttatataagaataataatacaaaacagcaataaattaccctaatatattttcttccttcaattcttctacattgaatattaaataaatgatatttaactgttatatttaccagcgtcaagtacaaaaaatactatttttattgctgaagtatatgaaaaatacttaataatatgcagttgatataaagtaccaatcaaaaatgtataagattgaatgaaatcaaaaccaaaggtgcttataacaatatataatatatgtactattttgaaagtcgggcataagaatcacatttctttttcttttt

SEQ ID NO: 22345 - DNA, 2993 bp, Cannabis sativa
gtggtaagacaacactattgaaagctctatcagccaatctagactcgtcccttaaggtatcatatgttgctttttcagagtattataccttaatcatcaaccctattatatatccagaaactgagaaacatatgtggatgtgaaaatagtggaaacatgatgctacttttttggttcatattctttaatagttgacaggggaaatttcttacaatggatacaaagtggaggagtttgttcctgagaaaactgctgcttatgtaagccaatttgatcagctcatccctgaaatgacagtaagggaaacacttgacttttcagcccgttgtcagggtgttggaagccgagctggtatgtttttgagccatatatagtatgtatcatgactcatatgttgggtatcagactgatgatgtcttttctgatcatgtagagattatgaaggaggtcagtagaagagagaaagaagctggaattgtacctgatcctgacattgatactttcatgaaggtgcatttcagtttctaaaaggataatactttagctggatgttgttctaaaaatatgtattgacaaattgctaatctgtttttgacagggaatttcggtgaagggactgaaaagaaccctccttacagactatatactgaaggtcatcctctccaaccgaactaataacttctttgtatttgtacaactccaaatgctaatgtatgttttttcactcatctgatgtgtgatgtgcccattcagattcttggacttgatatatgtgctgacacttggattggagatgccatgagaagaggcatttctggtggtcagaagaagagattgacaacaggggagatgattgttggtccaactaaagctttgttcatggatgagataacaaatggcttagacagctctactgcatttcagattgttgcttgtattcatcagttggcacacattacagattgtacagtactcatttcgctccttcagcctgcaccagaaacatttgaactatttgatgacctcattttaatatcagaagggaatgttgtgtaccatggtcctcgtgatcacgttcttgaatttttcgaaggttgtggatttaggtgtccagagagaaaaggagtagctgattttgtccaagaggtaagcattataaattatcaacataatttttctcttttatacctttgaaattcttatgtcatatactcttaaaaaacacacttactttaccatctggtatgtaggtaatctctaagaaagatcaagagcagtactggtactccgcggaaaaggctttccggtatgtatcagtggaggaattctccaaaaagtttaaggcatctcgttttgggaagaagctagatgaggatctcacacagtcatatgataaatctcaaggccatgagaatgctctttccttcagtgtgtattccatctctaaatgggaacttcttaaagcttgtgcatcaagggaacttcttctcatgaagagaaattcttttgtctacatattcaaaacaagccaggtcatgatatatcagattcaaatcgtttcttgtatatttgaatgttagaactagagttaaatctgaaacataatttgcatctttgcagcttatcatcattgctttcatgaccatgactatgttcctgaggactagaatggaagttgatgttgttcatgctaatttctatatgggtgctctgtactatgctcttagcatactttttcttaatggaattcctgagatgtcaatgactattcaaaggcttaatattttctacaaacagaaagaattgcgtttttacccagcttgggcttatgcaattccagctgctttgttaaagattcctctttcacttttggaatctgtggtttggacttgtcttacttattacgtgataggatacagtcctgagatcccgaggtgagtttaaattgaaatcaccataacttcttgataaatttagacattgttatataagaagtcacaatatctttgatatggtttatctcactcatttctaggttcttgcggcaattctttctgtattttgttcttcacttggcatcattgtccatgttccgtttcttggcatcattctttcagactatggttgctactacgacagctggtagttttacaatactgtttgtgttactctttgctggattcattataccacaacgtaaggatattttgcttggtcttccatgttgagtaataaagaagaaccaactagaaagttaactcgattttgttttattgatgattaaagcgtcaatgccagtttggttgaaatggggtttctgggtttcacccttgacatacggagaaataggcctttcagtaaatgaatttctttcaccacgatggcaaaaggtgattctgcattttcaatttaacccttcctttactgatttcctaccattatggagtttgagtatatatatgatctaccttcggtgttcacttttagatgttaaccactaatactacaattggacaagaaacacttatgagccgtggcctgaactttgatggatatctttattggatatcagttggtgccttatttggtttcgcaatacttttcaatgttgggtttatactggctttgagtttctttaagtgtaagttttctgttgttttcatgatactttagcttaaaaaccaactttatattatacatgctattttcatatatgtgcagctcctaaatcatcatctggtgcaattatttcacaagaaaatctctcccaacttcaaagaactggtgtgcatcagaaagaagattctaacgtttggactcctaaaactgatgaatgttagtactcaaacttcccatccccatttaggcaatctatctcactgacagaattcaaaaagcccttctgagttgtttttctttcttcttttttcaatgtacacaggcaagatggtcttacctttcactcccttgacaatggtgtttcaggatgtgca

SEQ ID NO: 22346 - DNA, 9611 bp, Cannabis sativa
  modified_base (96)..(120): a, c, t, g, unknown or other
gacttttatatctaccaaatcatacccctcaaactttgatatgtactaaatcatgccctgaactttcatccgtgttagaatttttttactaaaatnnnnnnnnnnnnnnnnnnnnnnnnnatctcaatagttcaggagaattttgaacagcaaaaaaagtttaagaagtatgatttagtacatgtcaaagttcgggcgaaaaaaatcctaattaacttttttttttttgttattgattaattttttaataatcagactacaagtataggcaaccaaaaagatagtattagaggcgataattttatggacgacaaataattatccctaataatatgttattagaggcgatatttattagtcgcccctaaattcttgtttttattttttattttaatttaaaaattaagataattacataaaacaccaaattttatatttttatgttcatttttttttttatattttacggtaatctataaaagtacaagaaaacaacattctataaaagtacaagaaaataacatgaaattaataagaatttaacatcaaaataatatataaataataaaaaatcaacaacaaaataacaagagtacaactaaaaaatacataaaaagaccgcattttatgtaaataaaagctaaaatctttaaaaaagtaaaaaatttcgtactatttttataattttttttttgttgtctttattttttattttttgaaattatcccttaaaaatttagtaggaacaatatttaatgtttttagggatggcttatcacccttaataattgaacaataaatattttatttaaaataattatataaaaaaagacttttaggaaataattagtattatgggcgctttttttaaatttttaggaacaatttttgtcacttttaaaattatttttcatttattattaatattattttaataatatctctattttgttaataattaatatttatatttttaattattaaataatttttttttctcattttataaatagtgatatttttttttttaaaaaaagaaatagggttaaaattttcaatacaattaatattatataatccaaacaaataattgactaaaacctattcaagggccttggctttcggaaatctataaaaatgaatcaagcgtttctagcaaaatggggttggtctcttttaacgggcaaccaatccctttgttgtcggatcttggaagccaaatatttgaaagaaaagccttttcctaactgtacctctaaagactctgactcctgattttgaaaagatgtgatgaagactaaacgtatcataagaaaaggggcttgcaagttagtggttgatggaaatgatacttttatttgggaagacccttggattgcccataaaaaagattttttccctagacctaagggatcttccttgcttggggtgaataaagttgctgagctcctgtacgatgatggtgggtggaatatcttgaagttaaatagtctatttgaccaagagactgtgtctgcaattttgaaaggagggctccatctggccaggacaatgatagatggatctggactttggaaagtaatggtctattctcgagcaagtcggcttatctggcccaagcttttgatcgggcacctcattgtgaggtcgccccctcactctgaaacaaattgtggaatagtaaaattttagagaggctgaagatcctttggtggtgcttattgtccaatgcaattccagttcgcttggagatttgtaaaagatttcctatagaggatgttaaatgccctctttgtggatcagaggatgaatccattgaacatctttttctttcctgtcatgtggcgtttcacttgtggcggtcatctcattggggtatttaccctatttgtggcaccggtatttggatgtgggattgggtcaaattcttatggaaccttaaatataaatgaatcaactctgatgaggtcttccattatgcctcgttaactgttgacaacatctggcaaatctgtaatgataaggtacacaataattgtccagttgatgtttttacttgtatcgacactattcgttattcttttgcagatcaccatgcctcgatgctcccttattcacctccgattggggcagttgtctggtgccccctcctcaagactggattaagctgacttgtaatgttaaagtcgatcttgacagcatgtgcgctgcgattgtgacaagtgatcatcttggtaaggtgatttgggttcatacttctagattagagtttactgatgtgttatgcagtgaagcggcgacatgctgctatgctttggatgttgcattggacagaggctggaagtttatcttagttgagagtgattcgagggtagttatcaacgctcttaacagggaggagtctcgttgggagattgagaactatgtctcattttgtactaagtcctctctttcttttaataattgtattttcgctaatatcagtcgtaactgtaattttgtcgcccacaatgtagctaagtgggcgttatctaccaaatattcagttgtattccggtttcttctatccctgaacacatcttttgtaatgaccattcggtctaacagatatttgctattgaatgaacgcttttcttcaaaaaaaaaataaaaacctattcaggacttcaaaaaaaagaaaaacatattcaggaaaaaaaatgacaaaaatccaaaacccatttcagtgttcattcccatttcgtgttccctctattatttctactcaccttcgatggagctccctaacccctaaaatccaaaacgcctacgctttttatctccctcgtggccatttcttatcgttgacggcattggcagtgtgtgattggcgaaggcaaaggtcgattgaaggagatatagagtaaattagtaaggtaaaccccgttcacatctttttgattttaaattttgaattttgatatatgtcggctgcagctaaaaaaaattcttgaactctaagctcacatcaccacaatactaccttagcacaatttcattttgttatttgatttatatattatatatttcatgactttctactatttgaactggtttttatacttgtgtatgattttattagttttggggattcgcttcaaatatctcggaaggattggtgttgtttaaaaattttgaattgttggctttgaggtaaattttatgattaatgttgaaaaatttctcaataatatgtaagtttgatgatgaatttattgatgttttcttgtttatgcaatactaaaagcttgatagcatttttttttttttcgaaatgttctgcttctttcactcctaagtggtatacgttttgcctcttttacaacagtccgattgattctcagggttacattgtcctggaggaggttttttccctcttattttgctactacgatcacaacttttaggggattaatgctcaatatattggttgtgataaggattaggagaaaacaaagaactgatgaagaagaatagttcttcatctttcctgtgagttttttttttcttatactaattgatttagtgttggctatacacatatagatatagagatatcctatgaattttatcaggaagtggtccccaaattaaaataatcaaaggccttctttgagatatgagttcaagaaactggaaatgtacaataaatgtacttgtggttcttgttcggtttttcttttcaacaaaacttacatgtgtcatttaagcttgttgatgccaaaagtaatgtgagtgtttgtattagttctctttctttttctttttctttaaaacatatactaaaaaaataaatgttttcaggtctatacttgggaggaaagaagcatggtgaaccagaagctaacaaaaaaattcaacataaatttctagtcaacatgttaggaaggtttgtttcgttgacctctttctctaccaactaataaattatattaagctgagctgagcttttttttttttgttgctttgcactatatatggtaaagaatgatgggggcattatgacttgctttgtataaaaatatgatatacttaagtgagtaagtctgttgttgtcaaaattgatgtttacctggtagtttcaagagaaacatgctaagttcacgtcattaagtcaacctcacacaagtgtaaagttaacttggggggtaaatatttatacaaaaagtagccttgatgatgtggacatcaatgtttgacacgtgagtagttccgagtcatagcaagtcaacctgggaggggtccctagccctgcccctaggttggcttcgggaactttgaaatggaagtttggactttggcaacttgtttccactcactattttttagtattctataccatgaggacatggagcaatcaaatccaggccttaggagctgaaattacatgaacctgcaccacaagagttaacttgggcacctagggttttgcctaacacgcaggttgacatccctaagatttgagtttctaggaccgtcttaatgcaaataggtcaaattttgcattggaacatcaagtagacataccacggacatatttgaggcatctgaatcaaattcaaaaaaagttcatttttgagcacccagagcacccggtgcccgggcacccagcgaccaggttgataatttgtcaatcttggcgctttccaagtatcagattggtgatccaacttttgcatcatcttcttcttcattaaaaatgggtaaataagtactttcaaggaagaaacaacacttcatgggtgccagaacaacgcccagcgcccaggttgacatttcatcagcctgggccaatttcgatgatgtttcctgagaactcttctaagaatcttctcctttttcagcaaagattgagactcaactattttgggggaccgaacggaacttttgaagggccataaaagggacccagtgcctatgttgacacttagcactaggcccagcgcccatattgacatattgtcaacctggactgtttccaatcaagttcttgaaaaattgtttcgggtattttttctatcataaaaaataatgaagatttaagaaaactcagggagaaaaccataatcttgagactttggaaacagggcgcccaacgcctaggttgacaatcacctggtgagctagtttcgatcactcaaataccaaatttgattcgaccattgaattcgaaatggtcaaaaacagggtgaaagatctcgttctcaagttctagaacattggaagtatcaaaacgacatcccaaaagctccgaattgagtacccaacacctaggttgacaaatggcctggtgcgctgggttctgcttatccgatttgattctgtttcaactgtttgtctagtttttcacaataactaagatctatgaagtcatagaagtcaaattcacaatttcacatttctcattccaacatgggaaactcactcgaaaataaagagtttctagtctctcatttctgcaaaacatctccgagaatcggtaaccaactttaccaaagcatagaaacagactatgcgatgtcaaaatatcacttaggcatcataaaatacaacatctggaggttttttcacttacccagcgtccaagttgacgtcatatgtcaacttgggcactgggatgtcaacctggacactggatgtcaacttaggcgttgggttgtgaactgccttgagtaaaacgaccataactcactcaatattaattcgattgatgcgattcaacttgagtttcaaagttaattcaatgctatatcaagcaataactcatacttcaatcgtaattatgaagttatcgacctcaaaattcaccccaagggagttacgaaaaataagttgcgagttacccgcagcgagtcccgcttggctccaaaaattgattatcagcttcagaattagttttgatctttgaatcatcatctagagtaaaaattggccaatttatatatatatatatatttatattttgatttttttcctatttttgtggatctccttcacctataaaaggacagttcccttagctcatttttcacattcagaaaactatccataaggtcagagcatctttctctagaaattagagtttacatacttagtctttttctatattaccatcttatgagaaataaaaactcaaaatagacgtagttatattaccatcacgacatgaggagtgaagtactataaattgtgtgtctctctaaattatatgcttacaatcataattcattttgccaatccagcgagctggtgtttgccacttttcagcgtcaatagtaagttttaatttttgatttgtgtgttcaactatggaccttttttcgagggagagttgagttttgtttatgtgttaaacttttgttaaaattagcattgtaaattggcgtgcttttcaggaggagtttatttctatgattttgctatcttcattttgtaggtatttgaaaattaaaaaatattttgattatctaaagtgccaaagggggagattgttaggtctttttttgaaatttagttgtcaaaatattatttaatttttattgtactattaaattaattttattgtgttaatttcgtggctttgattattctttttcttctagaaaacttttattcacaactgcgatttttgtttagaaaacttgtctttcaagagaaggaattctctttatggaaaactgcctatttttggacaaattgactttatctttctctaaagattaattttagttttgctatatatatataacaaattaaataatctttgtttgataggtattgaagatcgaatcatgatcttggttcttttttgaaagtttctcgtttggtcataatctgctgctacagaacacgaatttgatgctgcatattaggaattttttaagaaagttttgtatagctttaaaaatgtgtttgtggttgtttatgttatataaataggacctagagaacagccaagcgtttcttatctcttctagtcttatattttcatatctacctatttgagaagagtgtttcatttgtaaaaacctagagtgttcaactagatttatgtttttttatcatattattcatagaataggttgaagagaagttttgaacaagcctgggtctttgggagaagactttttcaagtctcatttcgggaagaagtaaacatatatctttaggagaacatttgtttaagccttacttcacgaagaagtaagcacacatcaataagtgaagagagtttactacttgatgtggttcagagattaaattagcaagatggattacaaaaggttgcggtaaagtgagtctaaatttatttaagtcaattgcttgtataatatttaatactttactaattgattacattgtttgagcgtgactctatgggctaagagtgtttaaaagaatactggtaccacttatagattttttgtatcaagtttttaaattttgcactatctaaatttgtttttgttatgttaatacagtaacaaattttcattatgttactgtaaatcgtgacagttgtatttttaattaatgaaatttaataaatataatagtgtttgtaaaaatagagtttttcaaatattaatataaaatatataaatttgtaaattttccaaaaataaagtagaagaagtccaaactccataatccagattccagcctaataaggggaaggcccttccatgtcagatcactctaataaaactaaactgtgacccaaactgaacttaaaccgtccatgactctaatgaccaaactatatatatatacaatttttacagttatctacatgaaactttttcacccacaccacacactcccatttaccctaaattttactgctctacctacatgttcgtagtacgttattcaactgttaaccgtccctctactcttctttcaacgatgattacaattacatttacaaatcccataaaggcctaaacaaggccatgatgaaacgacgtcgtcgtcgttgatgggtaaaacgcttctcgaagcttgttgtacttttgtatatcaaagctatgaatctccatgagccgtttttgcctggagagaaagcggcgttggaagtagccttggaaagttggctccgtcgaggtacggagaaagaagccgtagcccaaagcgaaatggatcgatgtcacaaagaagcatatgggctccatcacgtcccaactcagctcccaaaaggttagtctcatggccgcaagtgtttgggccagtacgaagcccagcccaatataaagctccccacggaccaattctcttgctttctggtcgatcatcgatttttgtttctccatttcctccagtacctttcttcttggatcgtttggattggtcactgcctcacaaattatggcctccatagatttcgccacctagattatccataataataaaaaattaattaaaaaaacaagataaaattgaaaataatatatatttttttcctgattattatacaattctctatcacactcacaaaaaaaaattggtgaaatgacgtaaatgacattaaaaaaaaataatgtatacctgttctgggcggaggaaaacgacgtttcccaaaacgatgacgtttccagtatcgtctagtgtctttgcgaactccgctccttgattttcgttctcacaatcttcaacgcagattcgaaagaactcagaataggaaatcaagttctctgggattgctctgagcttcgatttcagcttctccatttgtgcaagccttagaatcttcttagcgtcgtctaccgataagccgaaaatatcagattcatcatcggctctgatgagttctggcgctggaggactgatcagacaatcgagtcggatgcgatcgctgctaataatgtcgcttcctctgagcttctcccggagtttttcgccgaccggcaaggacagaaattccggcagccgagtggctgatttgtcaggagctctccggtgaaagaatcgccggaaaaatcctttctctgctgaatccggcgaggttatatattcccggtgaaatttcgcgttgcaggcgtcgttgattggaacgatcgtattaattgaaagagagatttctggagtgattagtctgcgaccggttaacagacgcttcgctagcattttccgaagcgccattactgatgatagagagagagagagagagagagagtatttggtttgaagttagaacaatgggaaagagtagtcatatatatataaggtcggaggtgagaggaacttactaacatagaacagaagaatcttcaaggcttacgcctttctcctttattgtcttctttctatttttatttatttttataataacctataatttatttaattattttttttgcggttgtttttgttttggaattaaaattgcatggtatcttttgtgagaaaaaagaatctacattttattttttaaagaagagaataaaaaaaaattgtgtatatataaattatggtatgtaacagtgaggagtaaaaaaatatatataaaatagggaaaaaaacaaaaaaatacaaaaaaggaaaaaaaattacaaaaatactttgggccggcc

SEQ ID NO: 22347 - DNA, 1755 bp, Cannabis sativa
tgaataatattatttataaattacatttttgtaggggcccaaattttaaattagaacagggcctccaaaatgtttaagacggccctaattgtaattcgtacaaaaaatatattattattattattttaaaaaagaaaataaaaaatgtataatatatattaatttctaaaacatatgagtattataggttaaactaaattataattaacaatttcttttttgaatattattatattttattttacaaatagtatttaaattaaaaaaaattaattaaataataatattattatatatatatatttgcacgtaattactatatatattatcttaactaatttgctgcttgtttaattagtaaaatttcatgtcgagagagtatatataatctcaaaacacaaagtattgttacttaaattaataatttaattttctcgaaaacaaaaaaacaaaagaaaaaaataataatttaattaattaataagtttatcttacgggcgattactcgctgtttaaaaaaaatcatgaaagaataaattatgaagttgacgaatgggttgaagacaaagctaagtcaacacatattttatgctcataataatggattggtcaaaatagttttatataaggagaggagtctcatgcagagcaattaagcatgagatatattagaatatattataatatataaaaataaaaaaaaaaaatcatgacaggctctcctcttgtgctaagaggctcaaaaaaattgtaaatttagttggcacagtactatactaggacataacggtagctggaggccatgcatcacatcatgtgtagttgacatttattaattttattaaaatgatatttcagaatatattcatggattgcgattaactttcatatatatcttaatttatagaatttataattcatacatgctactttgttttttttgatagagttatacactacattagctgtattatatatacttttcgtttagtggaggagtgtatgtgtacggttaagttaattaataacatatatgcaactccttattaatcatataagcttatatggatatatgtggaaattttctgatgggaaggacccggtaaagaccctttttttgggaatctcttcagaaaattaaataagctacatacgtttataatatatgtgtataaatattaagtaaataaatgaataaatataggaattcctcatcctattttgaatgagaaatgtacgaagatagaacgtggaaacgacgattagaatgattaatgagaaattcggtttgcatgcctaaaacctactgtaattattaacattaattataacaagtctacgattgtccttcttaatttacttagccattagcatataattattattaagaaaaattaaactataaacggctaaatgtaagaaagaaaaatgatatgtactcggtttggtcggtttatgctatacagatcgggttataaaaatttaagtgcaacccgcccaattaaaaaaaaatagtaaccagcccaatgaattaacccgtctaaaccgaccactaatatttttttttttatttttacatacaattattatattttagttaattgtaataataaaacaaatatatatagattaaatttaatgttaaaatcaatcatcatacaaaatatattagtttgaaatttatatttttaaaatagtcatataaattatatgatataaatatatataataaaaatatgtaaataaatatatata

SEQ ID NO: 22348 - DNA, 3147 bp, Cannabis sativa
atattatttcctgaagagtagggtctctcagggacctaaactaaaagctcatcctataaaccattatctaggtatgttcaactgtcattggtcctgaaattaaagattctcaaaatatcattatattctagttttctatatcttgaggttctttactaaggctatgtttggaagtcggatttgggtgaggaaagaaaaatgtaagaaaaaaaaaagtgtggataacaaaaatgtaaattaatttttcatgtttgatatggaaaattttgttgaattgagtgtttttccatacaatttttctttctatactaaatatgagaattttttatgttttattttccacttctttcttttttttcctacatttttctttccccaccaaaatccaacttccaaacatagggttaagcttctagttttctcctaaaaaatattatcatgtgcatgttctatctccatgaatttagatttatattgggttgggtcttcatagtcatagccatgcctcaaggcatcccttgcctcatcacacaatctaactttcctagcctcatcaaaccttgggacttcacttattcaccgtttttggactataagtaaacctcaaaggtcactcatcatcccaaaagtctaaaaagaattcagaagtctaaaatcatttagttttctccgcatgtagtatcacccatattttgaaattatggtaataaagccacacactaacaccttgcaaccaatttttgaattatctctaagaatcacatatatagatcatcatcagattatccaattcaaatccatgcatagtgtaacatagctaaacattaattaaatataaatgaaacaaacacaatataaaagacaacatgaatgttataggcctatacttaataacacatgaagagagggatgaataaggacacaatcggcacttataataaataagaagatctaaatgtttggtaggaattagttaccacttgtatttctttaattagtctataaatagccgaagtaggcttggatttacttactcagattttggtgtaatgtttcgagagcccagctcttgttggctaaacctctcaaaagtttgatggagttttactttgtattttcattcattttcaataaaacattcagagattatttttttccagtgtagaaatgacattgacaagagaaattcctatcagaatgtaaataaaaaatcctctttaattaaatcattaaacgaagttctaaaaaaacgagatagactaaagggaatcaatacaaaatttcatattcaacataaagttataaagactttcttaacatgtatacccaattaacctttaaaatacagccaataaaaaagtctccttattgttacttaatactactgttcatcccttcaccaaaaccaaaacctttcttagttatggttccacaaaagaagaaactatcatttttcttttttatttttatttaagaaaaaacaagatgaatggaatttcaaataagcaacaaatatatgacttttcacaagttacataaagtgtatctcaaaaggtaccacaaatactaattcatcagtagttaatgttcacaagacaatggagccacttaaaatcaaagaatcaagtggattattatgtaaacagaaaagtttcaaagatgacattaattttcacatgacaatactgacaaaaatgacattgagtttagcaaatgtttaaagatgctgtgacaaaaataacagacaggtacagaaatatcatacagcactgtaagttgcatcatctgatatcccaagctgcccaaaatcattcagaccagtggcatagacgcgtccagtttctgtcaaagtaggagacagtttatgagccactacctgaaaataactgacaatcttcacaactgttgacagatattgtaaaatctaataatctctattctaccataatcaaagtggatgatgctagacaaacaataacagtaagtacccagacgttaaaaattcaaactgatctatacaataaaccaactaaacttatatgtcataatagaaatttgaccctccaagtacttcaaagtggtcaaatttgaccccaaacacaaagctagttttttccttctccatgtttccttaaatgctcaatctgtgcattaaggaaaataattcaagagagtgatagaggctgttatgttaaccactaccttgtgttaatactctgacagtgaataacagcaaacatgaaatgcaaagaataggtgaaaacatattacctgttagaaatagggtatgagcaccaccgcatgcaatggctcgaaggccttgatcacgaaaggccgaacagagcacgggagcagggctccaatgtgagtccaggctccccaacccaagcctgccatagtcaccattgccccaaagaaccgcgaacctctgaccagtgtcgctcttactccacaaccaccttttgactaacccaaaccctaaactcagtgaagagcttctaactgatccgattctgctcaacatttgaaagattcggtagaagcggaaggaatgggtgaagcgtggagcgattgaaggctgggatagatgatatgggacaaattgaaagaagttttagtgtggaagatgatgaaatgtaagagaattgatgtggctaaatttagtgtttgggaattgagaaactgagagaagtaaaatgcagaatggtttttttgaatgttaggcaggcaacattgcaacgtctcccctttaaattattttattaattaatttatttatttattttggagagactccggagaaatatgttatacttgttataaaataatataaaataaataaaaaaaaaaagtcaatccgaatttttcagttatttattttagtgggatgaattcttatttctacaaaaatataactaaaaaatgggaaactaaatcaatataataaaaagaaatacaatcaagcattaatgatgataattaatttagtgatttggacatttataaataatatttcataacactccccttggatgtccataaaaattgtttcattaaaaattttgctgaaaaacttggtcaaaaaaaaatagtgcggtatgaattaactccccctcatttaggcattcgtggagatcttttaatcga

SEQ ID NO: 22349 - DNA, 2242 bp, Cannabis sativa
ttttttttttttttataaaactctttatgtttacttttctttataaatttgagacattagttaaatagttagataccactattatttattaattagattaccacggtaatctaattaataaataatagttagcatttaatattaatatttatctcgtatcttaaatttatataaaataaataaataagaaaaatttactattaaacataaaaataaaaatattaaatatataaaaattaaaatatacgagaattttgacactaattatcctaaaaaaataattaagactcggtaaatgggttaccataacgcaaagtcatacttacgccgttttatgtagacaacaaattaccgctgtattatttattaagtaattaattagttaattaatcacagtaataattaatgagaattactgctatacgttccgtttttcgctctactgtaattaatggattagaaaattcattactaaactaacagtttgtctaaagcatttctttctgtgttaattttatccaaaaataaaaaataaattggaaacaaattaatccggataagattctttttctttaattgattgttgagataagtccaaggctacaaaaatccgagtttgaattgacctaaaatatggccatacattaataaaattttacataatttctttcgaaattttatgaattaactctatgtcactaacttttatattctctatcttcaatgttaggagttataattaattatttttttcaatcaaaataaacttttaaatccaggaatattacaaggctttctttttgagttaacaccatattaattacactatttacattattttctttttgttgtatcgagtaaaattgcaacacgtaaggcatgtattggttagtgaaaattttattacaattttggttcacttaattatagctaaaagtgaatgaaattgaattctttttattgttaggacaactaatattctatttctgtacgagataatattttaatactttggtaatagttgatctttaatttaataaaatatttacttaaaaataaacatctcaataaatagtctaaccaatgtttataatttaatatttttgatcttgcgaattttatgtattaaatcatatttttgaatttttaagatcgttaaaatttttggttgaatagttgaaattattggatttaagaactttgtctcaattttaataagaaaagccttttaaaaaaaaaatataagccaaaatttttcaaagaaagtctaacatggataaaagttcaagaaatatgatttagtgcctatcgaaattcgagagaaagaatttgataaatatcaaagtctgaaaaatataatttagaatatatataaacaattactgaattagtaaatttaaaagaaatttgataaaaacttttaaattcaacaatctcagtagtttgagaaatttttaacggtaaaaaaaaattaaaattataatttagtacatgtcaaattttgaaaaaaaaaattataattaattttttatatatatttatataaaaaagatatattataaatatgttatatatatttgttgtgacaaaagtattaatttaattttgggaagcaaaatgagcctcccaaactttaattttattttgttatttgaggtggtcgttggactttttcctacttggctaaatcaaaacaacaggacagataacatgtgacattctaaaacaaaaatgttagtaattattaaactatagaaaaattgaattatatattatgcttactaacttatctactttactaaaaataataattttgaatttgcaatattagttttagtaaaaagtatgtaaaataaattaagtaattaatttaatttttacaaatttatttaattataaaattattaaatttattcaaagtattatatttaataaaacaccataaaatttaaattattattttccttataccataatatagtttggaatcatcgattatagtttggaattgctgacaatttgtaaatttttgctatgtattaccgacgattgtacaccatcacatagcttagaattaccgacggttaaaaaccgtaggctaaagtatagccaacagtttaaccatcagctaaaggggcatattataaaaccccaatgtcacttttttctcgttctagctgcaccataacctaaatcgcattcttccttctcatattctatctctctctctctctctctctct

SEQ ID NO: 22350 - DNA, 1777 bp, Cannabis sativa
acccattttttccttggaacacctggttgacaacctgaccaacaccctcactcttactgaacaagaaaatgcactctctttcagagccatggcatttcagcatcatcacattgttttttctcggccatatttactattcaagaagtgggctgaagctttacacagatgccgtttttgattcgaatgaaatgtttggtgttgaggttgttctacgaggctctggaatggctgtacttgcagttatctccaagcctgttatggacaatttcaagactgaagaaatggaagctaatcttactccttgatttgcaacaaacatttgactatgaaattgatttcattagttgtacatggagagtcaatcgaggtcatactcgtcctaatgagtttcattttcgtttgtctgataatagaatattgtatccaattttcttcgggcaaaaattctcctatgtaaatagatctgctcttattgtggcttatgttttggccgccttgtttgctctagcagtgatatacatttgtcatgctggatgataattctaccttcaattatatctgttgtatctcacgtgtttcaatgattaatacaactatcattttctctaggaaaaaaaaaaaagaaaaaaaatgaggatgcccacaatggactatttttggtgacaagagaaagaagagtatttgaacaaactcatgcttgaaaaggccaccaatgccaaacccaacgatagcacttccaaaagagttgggagatgatgaacaaataatttatgagattttttttttcattataagttaatttatattctattttggctttggtgttttaatcctttaccagtttagaacagtagtataatgtgtaaattatcattaggatctcatggtcaaaatatttttaaatattactaatatagtgatattattataaaataatataaaatcctaaaagaaataggagaagagaagataaattgaaggataatatttgagtacttatttaatgggtgattcgtgttgatgctaagaattggctaatatcgtctcgctagattgaggacaaaagtaagaaatgaaagtaaataagagactaaaattttatagtattttattctcggtgttgtaatgataatggagttacgtttatttagagcttttatttctcacgaaaattataaggcaattagtcagagaaaattaaattttaaaaagagatgttttgatcttacgaagttttttagaatgtaaaaaaagagtttagaggagcttccgatttataagaatggaggttcattaaaataacaataaaatattacaagggtaaatggcggcaaaactccaaaaattttcattttggtttcacttaacccaaaaccaaaatttgggcggtaaaactccaatactcatattctgttagcaatttaacatttctgtccattttaggtgttaagtgctatgttggactggacacgatgtacacgtgacaaaattttgattgtccacgtaaaaattatttaaaaaaattaataattaaaataaaattaatttaaaattaaaaaatatatataaataaataattaaataatttttctttgttttttctttgttttttccttttttttttcttttctttctttttcttttcgtctgaaacatctctctcgctctatcactctcgctctctcgatctcctcgacagccaccccggcagttctccgatcaccccaagccacctcgactcctctctctaacctagccgccaaccaccacccaccac

SEQ ID NO: 22351 - DNA, 3711 bp, Cannabis sativa
agataacccaagatcgatcccgttaaatcggctagacttatggattcagatccatgatttacaacacggattccgaactgaacgtacgctgcaaatgataggcaactatattggtaagtttattgaatccgatgagaataatttttctagtgtttggcgtgaatattttaagattcgggttactatcaaccttgatcaaccattgcaacgacgcatgaagattcgccggttggatagttcggacttgttctgggtgaattttaaatacgagcatgctccaactttctgtgttatatggggtattatcagccatgttgataaatcgtgcctggatattttcaaaatccctgaagaatacattgtcaagccgtatggagcctttatgagagccattattcaatggcaaaacaaactaatcggctcccagtggcttcggtatggaaggacggacaaaggtgatcgtaatgagggactttgttttcactccgccgcaaaaaatggaggtccgactactgctcaagaattagcgaggaataccgatcaattaatggcacataatgatggagatcacggacagggtgttaatagtgggattaaggagccaatcatggtgcagaaattgggtcctaattttgaggagaatttagaagggaatattgatattaatatgggcaaccatattgacgtggacatgcaatgaatgggttatgatgatctaacaatatctgaacttaaaagaaaaagatccaattcagttgggcatgggactttgggctcacaaaaaattggtatttctaaaaataaagaagttttagtaacaaaaaacttgtttggggcgggtctggatgcacagactcgccaggaatcatgagtactctaagttggaactgccggggcttgggaaccctcaggccttacagttccttaaggatgttgttgtccaaaagaagcatacatttatttttctttgtgaaactttatgtggaaaagttacacttgaaagggtctgattatcattgggctatgagggtttgtttgtggtggaggcccgtgggcatagtggtggacttgccatgttatggaaaaatagtgaagagggggagattattgatttttctgacaaacatatcaatattctcacccatgttccaaatatgcctacttggagacttattggaatttatggtgaagctaataggaatcaaagagagaacacctggggtcttattcgtcagctttcaagaaatgtttccatttgtgtttattggggatcttaacaatgttaccagtcatagtgataaacacggaggtcgaccgtatcctgagcggttgatccaggggtattgttatgttctttcggagtgcaatcttgttgacatggaacatcctggccaccctttcacgtgggaaagaggacgagggacatctaattggaccgaggtaagacttgatagagccttcgcttcactttctgggtttaataatttcttgaccgccaagttattcaatcttcatgcatcttcgtcagaccattgtccaatttttttggatcctattattcaaaacatttttaatggtgtgaatcatttttggtttgagaatgcttagttgagagagcccttttgtctccaagttgtgagtgattgttggcaagagtatgacacatttacacttagttcaaaaatctctaaatgtggtgatgttcttgcaaagtggggaaaagagataactggcaattttgaacaacaaattgctgattgcaagagtttgattcgacagttaaaggggaagaatgatcatgtgtctgttaaggcgcatcgaaatgcggaaagagatctttttgaagtgcttactaaaagagaagtgttttggagacaacaatccaagcaactttggctcaaagaaggagatagaaatagtaagtatttccatgcttcgacaagtgctcgtaaaggtaaaaatatgatacataagctacaagatgagaatgggagctggcttgattgggagtcaagtttgggggatcatatggtcagtttctacacagagttgttttccacatcgggtaatcttcataacgatattcttgaagacatcactcctgctattactctagaaatgaatactgatttgttggctccggttactaatgaagaagtgagaaagtctctttttcagatgcaccctgacaagtctctgggaccagatggcatgactccgagttttttccaaaagtgttgggacatagtgggttcggatgtggttaaacttgttcgtgaattttttgacaccgcctctattcctgaagatttgaacaacacaaatctggtgctcattcctaagaagaagaatcctaaaaatatgggtgatcttcgccctattgctctttgtaatgtggtctataaggtcagttctaaggtttggctaatagactcaagtttttcttggctgatattgtctttgagaaccagagtgcttttgtccctggtagactaattacggacaacattttggtgtcttttgagataatgcactatcttaaaagaaaaggcaagggtacggtgggacaaatggctttgaagttagacatgggtaaggcatatgatcgagttgaatggcctttcttggaagtgttgctcctgaagctggggtttcatcctagatgtgtgcagttgattatggctttggtagtttctgtccgttattagatctcttctggtggggtatacatcaaggtgatcctttatccccttatcttttcattatttgtactgaggttcttccctctctcattcgaaaatatgaaactaaagggtggattaaaggttgtcaagttgctcggggggctcctcacattactcatatgttctttgccaatgacaactacctttattgtcgggctcttgaacgcgaagcacaaacggttatgacacttcttgagaaatatgaacttgcttcgggtcagattgtgaatcaggagaagtcatctattttcttcagcaaaaatactcattcatctactcaggaaagtagttgctttattatggggatgcctgaagttggtgacgatggcttttatttggggctgcctaacataatgaaacacaataaaaatgcgatattaggatttcttaaagacaaaatgaggaaaagagttgaaagttgggatagtaagtttttgtctcgagcgggaaaagaagtgcttatcaaatcagttgcccaatctttaccaaactattcgatgagtgtgtttttaatcccaaaaggaatttgtgaagacttagagcaattgatgtgtaaattttggtggaaatcttcttcgaagaataaatcgggtatacattggatgaagtgggaccgaatgtgtgaagctaaagaccagggaggtatgggttttcgtcatctacatgattttaatatagctcttcttggcaaacaagcgtggagacttcatacattgacgaactctcttgttggtaaactttttaaagctaaatactatcctcgtggttcttttatcagtgtagaactgggaaataatcctagctatgtttggagcagcattcttgaagctaaggatttaataatcaaaggtggaagattattggttggttcggggagaatatttctattggtaaggatccttggctcctggatattgataatcctttcatcacttctttgttggaatttattttaccaagatctaga

SEQ ID NO: 22352 - DNA, 3706 bp, Cannabis sativa
agttcctggtaaaataacttccaacagaataatcaagttcaaacagtatcaaaaaaatttcaatcataatggtgacaaaggtgatggttagtgattgagcatcaccaaatttataatcaaaatagaccgtgaaaagagtgggttgttttctaagagatctggagccatgcaagcaactcatgtatggttccaggtgagccaacttcactccctgtggtaaaataaaattaccactcatagtagaaattgtcccctggaaaacatcactatgactatcttcatagtgatcgacactaagtctccttggaaggtcaacacccagcgacctccgagctatctcaattatctaccacttgtctgttgagttcttgacaatagatagtatcgaccgtctccttggcaaccaaagagcagaatgcaaatgttgcaacacatcgttgacatttgccaagaagacctcctcgactgttttgaagggatgaggaagacctccttcgctgtgataacattcgacggggagtggaagacctccttcactatcaagacagccaatgggatgaagaaggcctcttacattgtgaatacaacaagaggaacgatgaagacctctaaggttaaagaccaagaaaaaaatggagaccgcacctacaatcactctacggtgcacccaagactgggaagacattatcgccatcttaagtatactaatttgggagttggtcacatcctcaattaaccaaagaatagccaatgactgcttcaacaaattgttgacagttattaagaagacctccttcactatatagctgaggagatgatgaagacctccttttctgtgaatttgaggagatgatgaagacctccactgctataaagctgaggggatgatgaaggcatcctccactgcaaagcttaggggatgttggaggcctcctccgctgcaaatttaaggtgatgttgaaggcctcctacactgtaaagctaagaagttgatgaaggccttcttcgctatcaaacaaaggagatgaacaagaccacctttgctgaaacatagttgagggaatgataaagaactttagggctacaacctattagaagacacatactacatctacatcaagcataaacacacagtgtgacaagagagtcaatgctaagacaacaaccaaaatgttgacattccaatgttagcttgatttcacagtatctcaactcaaaggaaatcacgcaagaagtcatctaaattttaagttaaaaaggaaaaggtaaatgatacgacaagaagattactttctctcttctccttttatacttataattttgaagtctactattcaataggggatgggaaatttaactcctaatctcagtgggaaagcttgaagaacaaaaaaaaaattgtccaagattgtcaaaattgatgcccacctggtagttcaagagaaacaggcttagttcaagtcattaagtcaaccttacacaagtgtaaagctaacttgagggcaaatatttacaccaaaagtagccttgatgatgtggacatcaaggtttgacacgtggcaagaaatatgacatcttagagttgggtagtcccgagtcatagcaagtcgaccttggaggggtccctagccctacacccaggttgacttggggaaatcgagaatagaagttagacttcaataacttgaatccaactcactatctttcaatattatacaccatgaagacatggagcagtaaaatctaggccccgagagctaaaattatacgaacatgcaacctggaagccagcctgtgcacctagggtttcacctagtgcccaggttgacattcccaactagggtttcaatttctgggaccgtcttagtgaaaatgggtcaaaacttgcattgtgacatcaactagacataccacagacatatttgaggtattagaattagatttggagcacattcatttttgagcacctagggccttagcaccaaagcgcccaagttcacaatttgtcaatctgggggccttccaagtatcaaatcaatgatcaaacttttgcatcttctttgtcttcatcaaaaaatagggaaataggtcctttcaggaagaaacaacacttcctgggtgcctaaagcaaggcccaacgcccacgttgacacttggggctggcctagcgcccaagttgacattttgtcaacctgtgtctatttcgatgatattttccgagaactcttctgatcatcttctaaatttttataaaagaataagattcaactattttttttatgaccaaacgaaacttctgaagggccataactgggatccaacacccaggttgacacttggcacttggcacttggcccagcgcccaggttgacatattgtcaacctgggctatttctgatcaagttcaacaaaaagtgttcctggcatttttcgttcatcagaaataatgaatattcaagcaaacacgaggagaaaaccacatgcctgagtccttagaaatagggcccaatgccgaggttgacaataaacatgggaagctaccttcaattactcaaatgacatatctgattcaaccactgaatctagaatggttaaaaatctggtaggtgacctcaacctcaagttcataagccttagaagtatcataatgagatctcgggagctcaagaatgggtaccaagtgcccaggttgacaaatggcttggtgcgctgacttatctgattttgattacatttcgatcgtccatctagtttttttttttacaataactaagatccatgaaatcaaagaagtcaaattcacaactttgcatttctcatttttgacatgggaaagtcactcgaaaataaagagtttcgagtctctcatttttgcagaacaacaacatctccgaatactagtgaccagcttcaccagagcacaaaaattgactaagtgatgtcaaaatatcacttaggcatcataaaggacatcccttggaggtttttaaacttacccagtgtcaaggttgacatcatatgtcaacttgggtgctgggatgtgaacctaggcactggatgtcaacctaggggtcgggtcatgaactgtcttcagtaaaacgaccataactcactcaatattgattcgatttacgcaattcaacttgattttaaagctaattcaatgctctatcaagtcatctctcacactccaatcgcagttttgaagttatcagcatcaaatttcacccaaggaagtttcaaaaataagcttcaggttacccatagctggacccgccgcgctccaaaaaatggtcatcaccccagaagctaatgttttccattaaatcatcatctacggtcagaaacatgtaatttctattttctcctatttttgtgtgcctctttaatctataaaaagagagctcccttagctcatttttcatattcaatttttttttgatgaatcagccatttcattgcaaaacaaacaactttacaacctataagcacctccaaaaggcctttaatcttatctatacaatgctatttacaacccttcaaaccattctctatctttttgcttaattttctttggcattacaagtgttattctattcttaacactccatttaacttgttgtataatctcagaaactatcacctgttttgcattccagaattggataaaaccagccctgcccctctattattttatatttagtgg

SEQ ID NO: 22353 - DNA, 1634 bp, Cannabis sativa
  modified_base (1545)..(1549): a, c, t, g, unknown or other
tcactaatttacttttagtcacattaagtactgtgactaaaagtatatttagtcacagcaaattataatttttgtgattaaaatttttaataacggaccttttagatcaatagtgctgtgactaaaatataatttttagatctctaatttacttttagtcacaataaatattgtgactaaaagtatatttagtcaaagtaaattataatttttgtgattaaattttttaatgatggattttttaattacaacataaaaatgataatttataattaattacaacgtttttatttttatgtgactaaaagtaaaatttgtaaattttgtttgtagtgacaagattatggtgctcaatagtgcacaatgctctattattaatttgtgaaatcccatattgcattattaatggatatcttttcacttttttttcttcttttgaacaagataatgtttctctttattcgcaataataatagttttcataatgatgatactttgctcagttgctccatgaagaaattgattcttttctatatatatggcccttctctctcatgtatcacgtgtcgttgtaataatatattacatgtatcataataatcatatattgagtaagttgaatgaaaaataagagtgatagcatactaaaaaattttataatatccaaaaatataatatatatttttttttatgattaattttaattttttattaaaaaaaataaatagcatcaatactgcaacataacattcatacaaatttttagaatattccctccaatagtatagcatcttaatattttgccaagcaaccgttttcaataaagtgttgaactaataaatttttaaaagtgtgctaaaactatttttaatagtgtgacttgtgttggtttcacaaaagggatgtaatataaaatattttgctaaattaattttatatataataaataattacttttctatttacatttttttggttagttattattttcatttgatgtatttatatttttcgacaattatagtactttacatacaattaagaaaatttattagaatttaaatgcatactaataaaactatactcaaattattactaataaattttaaaaataaattaatatatatttttttattataaatagttgatattattatatatttttgagttttaatattagtttatatataattgataaataaatgtcatacattattaactattgtcgagctctttatctctctatcttttgaactagtttgatgcatgcttataacttgtattgtgtcgggtcaactagagaaatgttaagattcatcatgtggtctattattgttggagtaaataattattgagtgttatataatttgatttaataaataatataaaaaattactaattaatcgtaacacattatattaatataatgttgggcatatctgtacctataatggcaatgctccatcaattgctcgatcaattactctacaatatcatgacgagtcgagtgtgcttggcacaattccataaatatatatatatatnnnnntaaatatatatatatatatttagtattgtgtcaaataatttaaagtaatttgcggtataataacttaagtttaatttctagttgt

SEQ ID NO: 22354 - DNA, 3309 bp, Cannabis sativa
tataaaagaaaaaaaaaaggcttggacagtaaaaaagaaataattgccgtgtggcagtattattgtaaaatttgggaaaaaaacagtatttttgtaagtttccctaaaagaaaaggtcggccgctcaaatacacaactttacatttggctcatcaaatcgtgactgttttggctcatctttaaggaccggcaacacttggctcaaaacatctctctttcgctcaatattctaagcggctattttagttgtctttttggactagttattggatttaaatcgactactcattagatttttatttggctctaatactatgttagaatttaaaatgaatgcaagtatggtaaaactcatggaattccatttcaaaactaattagctatgataaaagtaactcatacattattatgttgccacacattatcaatgtgagtctacgtaaaagaataataaggaaatgaggtttaaatagccccatcgtaaaaaataataataaaataataaaaccggggaataaagaagaagtcggctttagctaaaagcagttaatggatcacattctatcatgtagttctagtctaaggtacagtttataattgattagataatactacagtctacttcgtcactagatgatgtctattatcaagggcaaaatgatcccaacatacatatacattttcttctactgagaaatgcaaacctataaattaacaacagtaagttcttactttaaagcaggtaattgagccaattgttgcagttgatgaacaacatgagacattcttgggcgcattgatggcacattttgagtacacgcataaacaagatctactaccttttgaatgacaccagcctcaggaatatcagaagaagatgctgttatgtgcggatccaagagctccgggtagcgatgagcctgcaccaaaggtgtagcccactcaaagatactttgcaaacctactgaatcaactgcctgtgcaggcctacggccgcttactatttctagtagcagcacaccgaagctgtacacatcactcttagttgtaagctcatttctgtacacaaactcaggagcaaggtatccatgtgtaccgcctgccatcactgttctttcatgcattacttcgtaaggaacaaattttgacagaccaactcccataagatgtgctccaaactcttcatcaagtagaacattactggcacagatgtcacgatgcacaacatgtggtttgaccttgtcatgcaggaacctgtcttcagaaaatttcaaggaagtcaattaaggcaaaaagtacgacacaaagataggataatgatgtacagccaaagaacttctgcaaaagaaagacggccctacccaaaaaaaaaaaaaaagaaagacgaaatagactcatcctacaagctttcatttggttaaagccttgagattttttattttttttataagggttaaagccttcagatttgataatgaagtaatgatacaaaaatgcaatagctatttgctcttaaaaaaagttaaggaatgctttaacccttaagtacaaataagtaagccttgctattttagactgttaagtatcaaagagcactaatcagcaaacagattcatacctatcacagtgctaaagtgctaaatattaacaaaaaaatgcacttcacttgcattaaaaagatagaataacttatctttctcaaaataaaaaaaaaaagatagaagaacttgaaaacatacgaggattagatatcaagcccataagtttattctacagagagatttggggttccatttcttaagggtacacgcctatgaatttgtcagctttttgatggcaactagagtggtcgtgggagggtaaagtgattaagtaacggaggaattgagaaggaatgagagggatcatgagaaatgtattgtaattaagcatttgtccttgggagagttgaggtctcttggatacctcactcttctagtttcttcttatcatttcctttattcaatatcacatactagatcggccacttattgcgttagaaagcgtcctaatttaaaaaaaggcacattaaacaaaagcttataagttggatcttgtttatttggagacattattttttttttcactgacagtttatgctttcttcattcaaaaggagaatatacaagaaaagggatagatacgtacgcaattccttgagcaagtgttgtggcaattttcattctcatggcccaatctaaactccgaccacctcttggtatgtggtgcagccatttgtccaacggcccattaactataaactcgtaaacaatgtagcggtcaccatgattgtagcaacatcctttcacggccaacaaatttggatggtggagccttgcaacccttttaatttctgaataaaactcatgttttctttgaaaactggacctcttcaaccttttaattgccacccttgaaccatcaggttgaagtccgctataggtccccccagtcttggcatcaccaagaagacggtttccttcactaaagttcttagtaattgatctaagttcctctttagtgaaaactttccaagatgggggtactagtgcagaagctgctgggttagattgtttacgggagcgtttccgcttcttgctccgcttgaatacaagaagccaaatgactacagctagtgttgtaaagagaattaatccactcactacagctagaatgataagatattccctgtggcaatgtatgtgggagcatttattccctgagaaacaacagcaaaatgaagaacagccagctagaaaattgtaagatctaactcaacatgaccagtctgaaacatataaataaaggcatacgacatacctatttcaaccttgcaaataaattcacgagacatgttgcatctatcgccaaatagatatttagttccgtttttaaccaatgtacataattcagtagaattattgctgtgacaagggactctgctactgctacaagtaaatagaaggggagctctagtaaagattgaaccattccacagggaagtattgtcagaccacttccaaccaagactggaagtagaattgatgctccttcccccaatccagcagccattagagctttcaccacaaagattttcagcaatgcttagttcttcagatgttgccaatgctgccaagtggccaccataatgttgacaatgcctctctgactcattccatgatagcatagttttaatatatccaaagcaattggttttgctaggaccaacagtccaattacttgggcatgctgctgttcacaaaattaaaa

SEQ ID NO: 22355 - DNA, 2261 bp, Cannabis sativa
tgtactttgtgtacaatatttgttttcttcttcaagattgttcgagggttctacttgatagatcatcatattctagtttaacatttgttctcaaaaaaaacaaaaattcaaatctgttttagacattgaaaattatttaaaaaatttatagaaatgatgttgtaatataagaatcatcgctatggattctctttttctttttaaataagaaattgtaattaatactcttctataatatataatattattggaagattttggttagagcttaataacataatagcgttcactctaatgtaagtgcaaagactcgaatctaaatttaagcaatgtataaagaatccctacattttggcttaaaatttaaaaatgttattaattttatgcatatttgtgtcgttgtgttttctctatttataggctcgaaggtgaacgatataaaattatacatgagtcaaatataatgtttaggaaacctttaaatgctttagttttcactgttagtcacaactgaagttgttttgatgtcatcgttctttatgcgttatttactcgtaactcgcaagtgtgactaaattacgtcattttttagttttttttttaaaaggtagtgttttttagatcgcaagctcattgtattattggatgagtgaggtttagatctcgctgttgtctgtgctcaccattttcattctagcgaggtggttctcgcggcatgaagtatgtcttttgtcatccgtctttatttgtcaaaacatattcaatgtcactaggtttgggtaattgtttgctttgcaccaagttcaactatattttgttttggtcgttcctaattattacagaaaacatttctaagaaaaaaaggggtagcttgtgtgcaatattaaaatcacatagacatcaattaggttagcttggttgtagaccttaagcagttatgtgattaggtttaatatagtgaatcatttcgtggccggcattcctgcccctttcttattcttaattattttattgtattaaaaaggagacaccaccagtcacttctatgctacaattcatttgaaataaataaataaaataatatttgtaaagtcttatctttatgaagtcttatctttatttaaaatcttaaaactaaaatatcacaatgaatgtgtgtgtagggaagggaagtaggattatagaaaattttgttattaggatatatattgtagaaagattatatgtcttcaaagacattgataagagattctctttttaattccgtaattagtgaaagttacaaatttgaattgagaaaatggaagatgaaataaagtttgatggaattaatgatgtgggcatgttatgtaatcatcatctactgatatggcatctttgaaatcattatcaacaacctatcgtttacctgtcaaacaaaaataaaaaagtaattagtggtggttactaaatattaataaagatgcacatacaatacaactctctattttcattttatttatttatttattttgtacgtgatacacatgaatgaggtcaaacaatgagaaattgtcatggacagaactaatgaaatttgaggattgaaaattgaaagttggttgctcgaacttgttgatgatgtggttccaacttccaagccattttaaaaaattaaataaaaaagtcaataataatttgatatgtggggtggccgtggggacaaattaaacccaatttatatgtttgaatagggatattggcggtaaaactacccgattttaaattttttttaacacttaaccacaaaaattaaaattttgacggcaaaacctactaaactcaggtttcattttgctctacacacttccatccgaaaatcttagttaaataccacattgaactgtctacgtgtacacaaatgtacacatgacaaatttttaggtccacgtaatattacttattaaaatattataaaaattaataaattataaaaaatattttattttattttattcttttcaatttttctttttcttttctttctttttcttatgcttcttcaaaaaaccctaatttctctcttcctctcctgataatctctctctttctctctacttgtgcaccgccggcgctgccaacggactaggagctccagcccaccaaagtcagactacgaaattggaatccccaaaccacgaaagctgaaatgaaggaaaagattgtttccacggtcaaggcaaacgatgatgtgttagcctggagtcattctgatatgactg

SEQ ID NO: 22356 - DNA, 4889 bp, Cannabis sativa
ttcaattcattcttgtaaaactgctatcattaattaacaatacatgttcattttttatcttaatgataaacatattttatacaaatattcgaaaaaaaatattttatttgtaaaaatagtgattggtgtaacaaatataaaatacaaaatgcagaagagagtgataaataccaaattatctattttgaaagcctttttaaccttttagtttttatttctttttattttaatttaaaaaaaattctgaagaagtgattttggggtgtcttgtaaactaaattagtattattaaataacaaatgccttaaaagatgatagaaaacaagtaaatcttttattaaaaaaaatgataataataaataagagtaaattgtatataatactaatagtgtactcgtataaaaaagaaaatgcattaaaaacaaaaagaaaactaacatttattgactttgtcaaatcatcactgtacactaaaaaaactaaattgcatagacttaagtgatatatgcatacctcttaccaaaaaaaaaaaaatacatatcttttatataaatcctaggggggtcatgacctctatacaatgtaatatacctccgcccttgaggacgacacatacaaattgagaaataaattgattgatactacctatatcaacaaagttcatcttattttcggtgacctattacttgaaaactcaaaagttaagcatgtttgacttagagtaatcttaggatgacctcctatataggaagccagaatgagaacaaagtgcgctgaaaacactcgtgttagtttgtaggactagtcatcattccacgaagtaaccaaagtgacaaacccatgtataagagtcgtaattccgtgactctgaggatccagtaaaagcttgaagcgaagacattacaaacttcctagactgaactaggaatctgaagtacttggtcgaaagaggtgataaaagctctatatgtagaaaataagcttgagtaacacaaataacttggtacgtggaataataaatttagttgatgtgctacatttttttttacatataacctatgataacatcaaaaagtaacccgaaattttctaaagtaacttagtaccatggaatattgaatttggttgagtatgctacattttaattggtttaaagcaaaagtaacatgtgtttccatttttgtcttttatcctgctttctaaagtaacttggtacctcgaataataaatttgattaatgtactatatttttttacacatgtaacttattagaaacatcaaaaaataacccaatattttctaaagtaacctagtacctagaatattaaatttggttgagtgtgctacattttgactggttttaatacaaaagtaacaagtttttctattatgtcttttatttttctttctaaagtaatttggtacctgaaatattaaatttggtcgtgtgctatatttttacacatataacttattagaaatatcaaaaagtaacccaatgtttgtaaagtaacctagtaccttgaatattaaatttggttgagtgtgttacattttaaccggttttaatgcaaaagtaacatacttttctgtttttctctttatcctgcgatttaaagtaacttggtacctagaatattaattttagttgatgtgctatattttttacacatgtaacctattagtaacatcgaaaagtaactcgatattttctaaaataacctggtacctgaattattaaatttagtttaatgtgttatattttgactggttttaatacaaaagtaacatattttgtgttttgtcttttatcttattttttaagtaacttgttacctgaaatattaaatgtaattgatgtgctacattttttttttttgttgtaatgcaaaagtaacctggctagattaaaaagtaatgttttctatatttttgctttttatcctccaatctaaagtaatatggtacatggtacattgtgtattttttactaatttagagattgaatttcattaatggtgcttacaacctaaatatgtgcaaaactttaccccaagacaaggcacataataaatcaagaaaaataaagaaaagaaatgattaatttagttttacttaaacatgtgtaataaagataataataaaaagtaacctagtatttataaattgacataatagttcttaaattgtatgttttaacaattaaaattatgttaattagtaattattcatattgggtgccatcattttatcttttttttttttttgttattaagtatattttttaagaattttggaacagaaattcgattaatatatactggttggatgcaatatttttattttactttgtcactatttgttcttatttgatacacacaatcataagagtctcattcttcctcagttattacaaatattaattacaatcatatgaggaaatttttttttgaaattaaaaatgagaaatgaaaaaaatcaccattgcattttttttttataaaatattatattaaatattaatttatattcaaataaataaaaaaaatactttgtaatgattaagtcaaaaataaaagaaccagatattaatataatatagattttttttggaaaaaaaaaaaacaaaataaaaatttaaagtaagaaaaaaataaaaatgtacagtagaaacaaataaaacaattattttaagaaaataatataaaagtatatacattaataatttgctctaaaaaaatattactaatctctaaacataagttaataaaataaagatgtagttttatttaataaaaacttataaatataaaaatagttttctacacaattaacttaaatttaaaaacaaaataagtcataagttaaataaatttctaatttttccatatttatgaaacttaaggaaaaaattcatattatacataatttcctctatttttatgttttggcaaataatagtatgtttctctatttgggaaattaaactttttgccgattttgacagaagatatttagtgtacaagtcataatgtccactatattatgtataatctattttggataagaataattatgaaaacttatatagtggttcaatcattttgcccccacccatatgggaatattttttgtgactattgatagctaaacacacgattaaaacttaggcagtttcactcaacttttggtaaatcagtacaaaaataaattgaactttctttcagggataacgaaaataattagggtaatttccggctaaatttccttaatttgaagtttgacacaaacaaatttctaaattagaaaaattatagctaagtttttcgatttctacaatcgttttgctctgtacttcttccgtccactttggtctgttaaatgccaaagtagattgccacaatacacaagtgcacacgtgacaaaattttcacataatattaataatttaaaatatcaaaaaaataaagaaaaaatataattatttttttgttcctttttttctttttctttttctttttctttttcttcttatcagcttcatattcatatactattagagacaattagtttcaccaactgtcatgttggccgttagtgttagttagctcatgttagttatgttagttggttgagctgagtttgttagggtgtttgtttcagttcagttgtatatatagtctgtactcattttgttaattaatgcaatctttagccctttcttttatctttgtcttctctttcctttctctcttttcttctctctgttttacttcatcaatggctaaacatttcaacatggtatcggagcactttcctcttttagttgctaacatggcgactgtaggtaatggtgctacgacaccctgttgctacgacactctggtgctaactcttcaaacattaccactgctaatggagctcctattagaaattgcccaaactaagaacctatcatgttcaaccacaacatctcgatcagattgaatgatcacaactttcttttatggaagcaacaagttcttgctgcaattagaggtgatcggttactgaaatacatcaaagaaccccctcctactgagttcttgagcaatgatgatcgactagctaacaaagtgaatccgatctactctgaatgggaagtacaagactagcttctcgtttcctggttactctcatccatgactgaaagtttgctaacaagaatggttgggggcaattcatcacaccagatttagaatttcttggagaaacacttctcattataggtctcataaaaaattttggagtttcgaaccaagctgtaaaacctgaaaaagggaacgatgagtctaaatgagtatcttctcaaagttaagcaaactgtagatcttcttactttaggtgtggtgaagttctctctatcgtgatcatgtagctgccatttttaaggggctcccaagtgaatatgacaccgttgtcatatcatcgaacaccagagtagaaatctacattgttggcgagattgaagccttgcttcatgctttagaatcaagaattgagaaattaagcaaggaaatcgatctaagtgccaatctgatgacacatgaaccagaccctgttgctaaagccaatgttgcctttcgaaggttcagaccctttaccaatggaaatgctcagtataacaatggtccatgcatgtaaattcaacaacagaagtcctggtagatttaatgaagctggctcgaatcctaaccagaattcctctggtagaggtaacttcaataccttcagaggtaacagtattggtaacttcaataacaggcctcctcaatgtcaactctgttgggttttgtgccctaaataaaactctttttcaatgtaatctctattcttttaaatatcaataa

SEQ ID NO: 22357 - DNA, 1237 bp, Cannabis sativa
caataacaatattgatatataaatgttctttttttgaggagcgtggggttgtgggtgtgatgagtgcgacgtatcaatcgacaaaagagaggatttctgaattgatttctctctgggtgggactgtatatatacatactgaatcaaaggaaagcactccattaattataattttaataattaatatataatattcatataatcaataataaacataatgaaaaaaaaggggctgcgcaatataaaattatttaatagattgacccaaagtgatgaaatagctcacctaacaaaaattatattctaaaatgtaaattttgtgtcaaattaatttttttatttatatttatacaatagtagagttagaccaaaatttagcaggagcctaatatatgtaaaattacattaagttattttgttttatttttttaagtatttttacgtataattataaaaaattaaaaatatttagcagggccatggcaccctcttgcctccctagtttggtcactacattataatatttgttgtatttaattataatattaaattataaaatatttatagatttattttattatttgataaattaaaataataataaaaatattaattaaatattaaattttacattaaattttgtaattgtgcacaacaatataatgctaaaaattgatgttaatctatctgaaaattatttttgtgacaaatatatcactaaacatggtcttaggttcgatctggtaaattattttttaatttttttttttttgatgtgtttgtgtggtcatattgttatatttcttaggtcaaaaagaattattgtgtctaataaatgctcttaataagttttgttttgtctcatagttacctaggattccacacactactggtggttaagtgtgtaggaccattaattaataatcgtgaagttggctccatcttattagtaaacatacccattaaaattgtagttgaaatatatgcatgatttgcccaaatattattgattttttttttttggagataataatatattatctgattgaagattatgttttcggtggtggattcattaacatatagcaacattatctcagattgatttttaatatttcgttctactataaaatttaatattaattaatacttctattaaaaatatataaaaatatttataataattttattatgaaaaacttaaaaagaaaaatataaaaaatttagagtaatttgcg

SEQ ID NO: 22358 - DNA, 2899 bp, Cannabis sativa
ttatcttaaatatagtttttttttcctatcacaaagattattctatgagaaaaattcaaaaaatataagttaaactacaatcggttacttcttaggttaactagttacttattttgtctttctcatattttcttaactatttttttttttttttgaattttttccataaaacaaattttaaaaaaactcaaacttttgtaaatttttaccttaaaaactataaaagtgaaaatttccctttgttttatatagttgttgaaaatttggtgttccaataactgcttggatgttatcaaataacattggagaagattattttgaagcattttggtgacttgtgaccaacattgaaaaatgacataattggcttaactctttgatggcttggccttggtgagtgctttgagcgtggcaataccccaaataacttgcaaattatctcattagttaatcccataaaactctcctaatgaaggagttgatatcatttgaaattcagagaaagtgatccagaactctaaatgtagacccataatgtttctcacttgatataagttgtacataatataagaaaactttgtaataatatgctcatccttagtgcacagtaggctgagggctgaggggagcacatatgtagggcttgataaataatttttagaactctattgttgagtgaaagaagaagtagcttttatatatgacaaatatattagaactttgtttgagcctctttctttatttcatttcttttttgatatttttcattgtattattttgtaaagtagtgctgtaatcttcacaacttgttaatttcaaacattctcttcatgtgtaatcgtttatatatatatatataaatttatatatttgatgtataaattatgatcaatgataaaattttaaaatatatatggtatctttattcctaaaactaatgtttatatgtttaatttaaataaattattagactaacttcagttacttaagaagacatgttctatattatgtacaacttctatcaatatattgtataggcacatcaaaatttaaactgtgtttaaaaagggaattatttcataaatatacaaaaataacataatttttacatttttccagatttgctgttttttttcttaaaagtttttatgattttttttaatattttttacaaaagtacagagtgttgtttttttgttattttcagaaaaatattgttttgacgttgctggtatggaaaagtaacatatataatttgtttttacaattatacaatgttattttttggttgtttcaaaacaatgttgttttgatgtttttgtatactatgtaaaagcaacataaaagcaacatttaaaaaaaaaatccataaaaaaatgttaaaaaaagtgtgtaaaaatgttaaaaaaatctgtaaaacttttaaaaaaaagttgtttttaagtgtattgtggactaagtgtaggttatgtttgtagggacaggattttgtcccgtgattgtattttcacggaatgtattccgtgatgtatgacaaccgttaaatgagggagttatttgatctgagggctgagattgatctaagagtaattagagtgaaaaaatggttgtaatgtatagatgttacagattttggtccaatacagaaaaaagttggagggaattggttacacgtacaaaaaatgttcccaatgcaaaattcttcaagatgttgggaaaagtagctatttaatcactcatataaatatatatataaatataaatacaaataaatttaaagtgctgtatatacatacatacataaatttttcttctaataaaggaaaattatgcatatgtgttatattattattccttccttgctttacataatggcagaatataataaagaatagatttggtatatgtttattcaagatctattctttgcctccttaacactcatcttaatttttcaatgagatatatatagctaaagagtactagctacttggtaaagtttccaattgaaatagcaataaactaatccaaattaaaaaccaaacattcacttcctctctctctttctctcaataataaattcaactactgtagtagtttaagctatatagcctatatagatatggatatgatcttatttcaacccaaacattctataggagctactatttctaattccctaaacacaagaaatgagagtttcaatatcataagcaaattccccactattaaaagtgctcaaacattatggaataataatgatgagaataagcattgtaggcctacttttcttccattgtggtcattgaaattaaaaagaaaagaatgggcagtgaaaaacatcggcggaggtggatggcgaattcagggcatcgacgacggttcatgtggcatcgcgccttacatggcgccatcccctattgatgtggttgaagattttcacaagtatgtcaacgagagaaacttggacaagttggaccaacttctcacaaataattgtcactatgaggatctccttttctatgttcccttcctaggaaaagaggtacgtacctagctactactacaaaatgtgtacatatattattttagctataatttgttcttaattagtcactccatttatataatgtgtatccttattaataaagttggaattttgatttgttattattatatgactaattatataattaattaattaattaaagtgtatgtgtgtagggtgtgaaaaggttttttgatagtgtgatagatgcaatgggtccaaatggtactattgtgattgacaaaatcacagaaggccagggattgactgcaagtgtattttgtcatttaggtacgtacttatcttcttcataaatatacactacacctctagtgtttttttttttttttt

SEQ ID NO: 22359 - DNA, 1232 bp, Cannabis sativa
  modified_base (34)..(72): a, c, t, g, unknown or other
ttatcgtttcagaaagttcatatttagggtgttnnnnnnnnnnnnnnnnnnnnnnnnnnnnnnnnnnnnnnnaataatttccaacaaatatgactcggagatacttgaaacacatatatcgagtagagagcaaaaagggattaaatcctcaatgaaagcaccaaaatattgacctcatttctagtcaacgatgcaaagtcaaataaacgatagtataagtgtttgaataatgtaaataataaagaactataaacgacacaagacttataggggttcggcccctgaattagtaatgacatactcctctttttgttgtatttaactgagaaataataagaccaaataaacatgatcaagtgagtttcttgctatctctgaaagttgtaagcaattcggcagcataatagcactcttgagaatcccaaaaattgatctcagaatagtgaatatgatgcactatttataggaaaaaagatgtagcttttttacatttaattacagaataaagtatttaatatttaattgagtcaatcccacgaaatcatcaattctccttgattctcgcaatcccacacttataggtgtcctgattgacctatttgtaagggatgaagttattgggatgattctggacattttctctgcaagtgtgttggtcggatatttgtccgagaagtgccttctgagctactcgacatgctgatcatcatgcttcgtctagtgtacgtttggctatggtcgactctatttggcacatactctgcccaacgtcttctgggcagtcttctcgaccatattgcatatgtccagtaccttcgacacttgacacatgtcgtattattccataccacgtcactaggttgttttttggaataatacactcaatgtatttaatctttaggccctttttgttctgaaatttatcctacatttcttttactcggtctcttgaattctataataccaaatttagtttgccaacgatatgatctgtcctgattttggatttgagataaaatgtatctcagatcggctcggtacaggtcatacctcgaattgggtccatattgggtttatctcggattgacccgaaataggactcatctcggtcgtccgagataggtcttacctcgatctgacccaagataggactcatctcgatctgacccagttaagaacatatctcagtcgtccgagataggttttatctcagtttggcccaaggtgcgaac

SEQ ID NO: 22360 - DNA, 4082 bp, Cannabis sativa
  modified_base (40)..(47): a, c, t, g, unknown or other
tatttaggatgttaatgaacatacttgtgagtagatctannnnnnnngtaaaataatttccaacaaaagctcaatcgcttaaagtgttcctttggggtcagctcgggtaagtgtgtttgttttattgtcaatggtcatggaatagaagctaatccagggaaaatacaagccctcctgcatatgaaatctccaacaaagacaaaggaagtgcaaagcttaacttgtctaatagccacactcagtagattcatttcgaagtcaacagacaagagtgttcctttcttcaacatccttctatgaaacaaaaagtttgaatggacggaggaatgcgagaacgctttcaaagaactaaaaagacaacttgtgaaacctcccgtacactcaacaccccaagacagagaagaattaggaatatacttagctgtcacagaatatgctgtaagcaccgtgatgataagaaaagagaacaacgtctagcatccagtctactacatcagcaaaagactagttgaaccataaggataatatcccttaatagagaagctcacttacagcccaatcttagaaacaaggaagttaaggccttatttctaggctcaccatgttcaggtatacatcaaccaacaaatacgccaagtactacgaaaacctgacgcctctccggggttactcaaatggggaatagagttggatcagtacgaaattatctttcaacccctaacaccagttaagagacaagccttagcagacttcgtagttgagtgcacatggaaagaagaaagcgacataggggacaacccggagccagtacaagaacccctagtagaaaacaacgaagatcaacctacatggaaatcgcacgtggacgggttaaccacagaccaactttctggtccaggaattgcccttgtcacgcctgggggaaaacgcctgcacgaagcactcaaatttaggctcaaggcctccaacaatgaagctgagtgtgatgctctcattgatagactaaaactttcttgggaggtacgtgtcgaatatattgaggtctgtagtgattcatagttgatagtgaatcatgtttcaggagagtgcgaggcccgaggagagaaaatgatggcctatctaagctagatacaagacctgctcgaccaattcaagggttacaccctcatgcagattctaagagaagaaaaaacaattggttatgctttagcccgacttgcgagcagcacagtaacagataaggccaacctagtccctatccaattcttagaagagcctagtatcaattgtgtggaagaaatcaaaatgatagacacaacgccaaactaaatgacacccataatatcctacctcaatactagagaacttccaaatgataaaaacaaagctccgagaaggatgagcaaagatgcacggtacatcacactagaaggtgggatgtataaaagaggtttccccatgcaattacttagatgtgtaacaaaagaagaagttgcacgactcatgtctgaagtacatgaaagattctgtggcaaccacgcagtaggagaaagcctatcaaagaaagcacttaggaaaggatatttttgccgaccatgatggaagattcaaaggcctatgtaaataaatgtgaaaaattctagagatttttgatgatgccctatccaccgcccactgagctaatatagattcaaagtccttggcatttttccatttagggaatagacctgatcggacaattgcccaagggcaagggcagagtatagtatgcaattgtcgcagttgagtatttcacaaagtggacagaagctaagcctttagcaacaatcacatctaaaaaaagtatttgaatttgtggttaaaaacataatatgtccgtatggactcccgcacaaaattatttcagacaatggcaaacagttggacagccaattgtttatagattattgtatcactcatggaatcataaaaagtttctccgcagtggtaaaccctcaatcaaatggccaggtcgaggcggttaacaagacactcaaagacaccatgaaaaaacaacttgaagaggctaaaggaaaatggccaaaggaactactaaaagtattatggtcatattgaacaacagagaaacacagcaactagacaatcaccatttgctattgcttatggttatgaagttatgctgcccattgaattagaacctccgtcccacagaagaatgatctacaatcaagaagctaatcatgctctcctagtagagtcacttgacgagattgaagaaaaataagccttaacaaacctaacgttagtagcacatcaacaaaaggttgctcgatacgtcaacaagcaaatgagtgcaaggaatttttttgtgggagataaggtcctcagaagagtattcctgaaaacaaaagatagtgcgactagcgtgcttggacctaattgggaaggaccatatgaggtggttgaagttatagactctggagcatataagttgggaccgtatgacgaaaatctggagctcgttcctgtacaaaggtatttgaatgggggaaatttgaggaaatactaccagtaagtgtacgaggtcggatgacaactttaagtacacaatgcaagaacatttacttttaagtagatgggcttgtaggtgatcccgctcaaaggttttgataaaatgactagtactcaggtcggatgaccacctttaaagtacaattttaaaagtgcaattgttttatttttatattagctaaagatcaattagatcatgtaatagctttcataaatgaaagttactacggtgacaaaattattccgaccagtgatgaataaagattaattatcattctaactgtgtcaattacttttatagcaagtcatgaatttaccatcataatacatacaaagggtttgctctaacccaaaggccaaacatacaaaaattgaacttgggaaatgcaagtgaccaagagttataagtctgcttggtcacttaggaggcagctatacctgtacaaaggatcggtaaataacaagctcaaaaaacatattagtttgcacgaaaaatactaaaacaaggtaaaatattcatttaaagatgacaaagcatgatataatcttgagattaaaggctgcccggtcagccaatcatctcaaagcaaaatgaagcattaccaagtttaaagactacttggtcggtaatattttatttaacaaaggcccatgggccgaacaaaaaagaaaaataaagaattttacaccgcgggagtccaatcttctttttacggattgacttggtcattggaggtcaaggtctatgtgttctgattggttgggagtgtggaattggcacttcagggttttctttggctgcctgacccgtacagtaactaagatatgcctctttggtatcagcaaggtaatcaatgtttccttttgttttgaccttctagaattcagaccctccctcttgtccttcaggccattgatctcttaggacagagcctcgacgtcctcctcaagctaggtggtagatggcatctcctagatctccttcgtcagctcctcgactcaattgttggtggctagaagttttttggtcacctcacccagctaggcccttacctcctcaacctctttcttggccaaatccacctcctttgaaaatttgttgtggtggtgatgattttaagagcactacatttggctcgggactaggtataagccatctccatgttgagttgcagaagaaaaagttaacacctgaacagatagaaaggcaagaaaaaaacaaaagatcaaaatacttactggagttgcctccttcaggagcccgcccatcaaaagctccacgaacatctcctcaactctgaccagatgatcattcaccttaggaagtaaccggtcctggtagtgctgaagcatccacttgcccttcttagtctcaagattcaacatgataggagtgtttgggggcctggccgtgttaggttttgtgccccaaataaaactaatttcattataattagatttactaattaataaagatcagaaatcttattttatgttgcatggtccacatg

SEQ ID NO: 22361 - DNA, 1300 bp, Cannabis sativa
tcaaactatttggcaatattagatattaaaggaatgagctttttaatgttgtttatgtttgatttgttatcacttttacacctagtggggagtaaagtatagactttttaaaagttaaattacttgtattgataatagatcaattgggcattaaactaaattatttgatttcataagaattttccttgaattttaattaacattcgactagtactagaatctggattttggatcccttatgctatattttaattccatttggaaaaatacctacctctcttccaagacttagacatcttaaatggtcatttggtcaaattttgttggctaaatttgcgatttattgatattattattaatcacttattctccacatgatcttttaaggcttttgtcaaacatttgatattaaatcataattatgtagtgtaactttgtttgggggaaaggaaacatggaaattttctccttaaagaaacttgctttatattacaatacattgcattttgataaaaagaatatgtcgaaattatatgtacattacacaaaaagttataaaatgggctaattatcaatttttggtaacatttataaggatgttattaatgtcttatcttttgagatgagtattgttattaggcattagtagtgcttagtactttcttgacatgtcatattgcgattgattagcgatacttcctaaaagttattatattaaattatgtgggacctgatacttagttggactaatagcgatactgacacataagagggtattaagtaccactggtgccctttaacaattctcttttgaaatagtgtgcaattttttgagccacatagttgttgtactaaattattaagagcatttaatgacagctaatgttgtgctaatctttgttaatggagttaacaataagacattaaagtggggtaatttatatactaaatagtaaaagtaattaataaaaaataataatttgggtgtgtgaatgcaatgcaaaaccaatctccaaggcatcattcacgccttctccaacaaaattgtgacatgtttattaaagggaaaactttattaatttgtttcaaacttgcaattattaaaatgggaagtaggacattcttgggatatgcaggttacctatgtatatattaaaaagtaatttaaagtttagtggatatatcacttaaaaataataatttaaaatctcacttttaaaatgtataattttcacttaaaaaaattgataaattatgttttttcttttatttatgatttactctttgttttatttaaaaa

SEQ ID NO: 22362 - DNA, 3120 bp, Cannabis sativa
atataatttatttttatttgatatataccttttttttaaaatatgaattagaagaatttttttaagaaaaattaatataattaaaaatatatattttatataaaataaaacttattaaaacaaattacattatttataaaaaaaattatagtgtaaataaaactaaatcaaattttgcaataagcctactgtaactacaataagcaccacgtatgaataaataacaataattatgaagaaaaaaaaaagaaagtgataatctatctagacaactaccctaaataaaaatacaaagcttttgacacaggttaaaagataatataaaattctacaaaaaagaaatgtattaatacaataaatattacgtatatatgacgatagggccaaggacggggttgattttctaaaatatcaaccatatgctgctatgaagatgaaatgcataacgtatttatctcttcttttttctttggtagcgctgattagataaatatttaacaacaattacggagactatcttattatgggcgggtcgtccaggtcagaggtctcagttactgatgttggaagacaagaacttgtctatctcaccaataacgttgatgtctgtgtttggaaataacaaacgcaatactggaacaagagatgatttgactttgggcttcattttctccccagctgttttgattacagatggagctggtacaccaaaccactgaaggtaccaagaaaggagaattggacctttttcttccccgtttggccatgtccccgatcttaaatagttacggaaattatcctgtaatccctcgaaacatttcaggagatcttctactcgttttctaagggatcctagaaaattagattgaacaatgccacctcttgaagtggtcaaccttccactcaataaagcttcattgtaggctactgcaagctgcgagtcagagcaaaaaaaaaggttgtgataggcatcagatgaactaacaagagaaatgtagtaaaaaccatcctatattattttaactcattaaatattcacccatggaaaaacttagagcctaactcgaagcattatgtaaaatgtaagctaaaatcatcaactaacaacgcatgtttaccaatccacaacaaaaattatcataatgggaaatattttggaagtatatgaaaaggaaaaagataaggatcaaggattgtgtttctcttttcaatttttccgattatacagatcctacttgtaattgttgattgtacaagcaaaaaagtgaatgaataggacagagaaacactttatttgtttccatttaccagctcttgagaaattaacaaacatagcacaggagtgaactaaaccgaaacaccttgctaatacatgtgtttttttattcaaaatgtaattatcattgtttaacatccaaaaacagtagattctgaaacaagcaaccgtttttctaaacatatggtgtgctgaatgaaatcaatcttggcaatcaataaataaaataaaagcttgtcatcagacagaaaactacctttaaattagagataaaaagtgagtcacccaaaacaactgtaccgcaggcgaactgatctgccattgacccaattgttgtgtataatgacaaatacacctgccaaggactcaaaaattaatactcgattataaggatcaaatagacaaaggaattatgctgaaattccaatagcaatacaaaaagtgaaccaagtcttaaagaataaacacaggtagcaatacacagcaaacctttagtacaaattttttggtttgtatgcattcattaacaagaatacttgtttcattacggtactattgatatagaaatcatcaaaatattagtgcaccgttgcaacagtacaatatacctgtaaaagagcaggcctgtccttgctcacacactcaaataatacttgtaggcaaaattcctggaaatcaacatcggttctgcacatacaaatccctgttaaagttatgcaattgatttacaattaaatttgatgtccagcctgctaagatgcttcgtttatttttttatataaaaaaggacatatacaatgtgaatacacatgcacacatcttaaattttgaacctctcccctatccatacatatacttgcacactccaatcccaaaccaaataagctactcttaaaccagtgcactgttagcacatcaaggttcacaatttgagcttacctaaaaatctccatatgcacatgctaaacaactctttaggatcaaggactattcagagactttgactagcaatgactttagaaaaagtatctacaatttcattttacaacactcaaatctacttttataataacagcatgcttgttcctaactgataaaatgagataacacaactgaccatatgataaaaggattcatcttataggaaattgagttataaatacgagaatatataagtatatatggaagagatgtacagacttacctgctattccaagaagggtcacagcagagttgcgcaaaggcaatcaagcttggatcagaagagaaagtactgactagctgatcaactgtaacagaaccaggtccattgctcccatctatgctaggtttagatgcttttaaaccagttaaaccaaagacctggatcataaatatttgacaaatgttatatcatctgcaagaggaaaaggaagctttcaagtggtagaggagtttgaccttatgcattgctcgtgacagcagcgactggcacccaatgggatcatccacatatgaacaagctccaacctttctcttgatatatagaacgccagaattgaatgggttactcttatccccaaaagtccaccagcttttatctgttcaataacaacaaagagaaaggaacacagactacacagtatgagaaagggtaaaaaaatgtcaaaaaaagtttaacatcacaacttagtaacatttaaaacaaagaacagaggcatctgctaccttcaggaaccaactctattacttgaggccagtaccgaggaccacaaacgcgtattgttttcaactgcaagcagcaacatatgaagtaactcatgaatcctaaacctgaattttacttgagagagagagagagagag

SEQ ID NO: 22363 - DNA, 6996 bp, Cannabis sativa
tctcatgctcattctgttttccagttaagatctcaattaacggcttctcctgctcatcttcaaaagctttgccttgaggattcaagactgtggaatcctctacttgatcttgatagctttgttgtttctcaactgaactgccattgtactccatcatcaaggaatccaaataactctttataagaattaacaagacacaataaacaaaagcaccaagcatgtacagaaagttgggtccatcatttcccaatatttcaatagaagtgtccatggtcaattcaagaagaaagctgaacataccaagcttcacaggctgttctctttgagatgatatggtcaatgcaaacagagaaaatgatccagtagtgaatacatcaaattgattcccttggaaaattctctctcctttcttcactccacaagactcaatgtaagttgaatgtattctaaaccttggatacttgttcatgaaaatcaccacagaaacaatcatgaagaagaaagatttcaccatggtttgaaccaaatacttgccatgacacttctttaccactctgttaatcaaatgaggtgcctttagcaaagaatagccaagcaaaagagaaaaggtaataaagcagacacctttcaagttctcagcatcttcaaattgctgctcaaaaaatggggataaaaataaacaaataaggccaacaattgctgaaaatagttccaaaaggttccgaaatatgtttctcaatttcccccttttatgacctttgagattaacaggtgaaattatataatcatcactatctctactacccaataatgattcaatataacggcgtagaaaaatcaacccaatacagtaaagaactgccccaaacatataccggagattcggcccatcatcatatgctggaatttccatagaagtgtccataatcaagcctatcagaacactaaacaagccaagttctatagttttgtgactatcagatgataaaagcaaggccaaaagagcaaaacctccgatggaaaacagagtatattgacttccatgtaacattttctttccttgttcctcaacacaagactttctatacttagaatgaacatcaaaacgaggatacttgatcaagaatgccaataaccaaacaacacccagaaaaaaagagtcgattaggcatttaagagagaagtttaaattccataccttttgcaagagctcactccagcttggagccacaaacacaagaaatatgagaagagcagaaagagaagcaaaaacgaacagccttgaacttgtagtattgttaaattgaatcttgaagaaggagctttgggacagaaagattaaaccaacaatggctgaaaacattcccaaagtaattcgaagatagtatctagtattggagtttattacatccatggaggagaagtatgaaaaaaggaaataaattacagaaattcagaatttgcatcgaaagtatagtagaatcaagataatcaagttggtatcagagtgaggacgacagaatatacttcacatacaagaaagtcaattatttctggaagacaatatgatataatatgaagggaaagtcaacggccagtcaacttgagcaggtaaacaagcatagttgtagctctatatcctatgaaacaaattaaaggtcgtcaaataccaagattgacccagtaatcttaacatttttcgatgtgagtttggtacaaaacttttctaaattagataaaagtaaagtactattaatgccccaaattagatctaatcaacatcaacttatgtagcacgatgaagaaatttggatttgatgtaatataatggtaattgtatggataatcataatataaataatcatttgagctaggtgggtgtgtgttggaagtcctgagtttgaggtttaagtaaaatatggttgtaatatataaatgcttaaataaaaaaataataatacaaatagtaatttaatgcaacacaaatgagaataatattattatactggtcttacttctctaataagcctcaaaacaaaataaaataagagtctatttagtgacgttttaagaataaaaaaaaataataataatagcttggagatgaaagcactaccgaggaggaagaactatgcttttggggccaagtggttacggtgaggtgctatgaacaaaaatggtggcgcagctttttcgaacagtccggtgaatgaagaccataccaaccacgattgtgaatcgtctcacggcggtagtcaatttgggcttaatcctctggggatctcaattactaaaaatcagggatttactatccctcagccgagaatagaggacagtaatgaagggtgcgtaggtgggggaatcaattcccaagctggaaagttgactactaataagagtattgatgtgttaggaaaatctccaattaatgagtgtaacatggcaacaactccagtcaatggggatgaggctctcatgatattagataataagaggagaaggatgggccttggaaacaacattgggcctgagaaagatagcaatgtgggctatagtgatattgttaataatgttgaaggtgggctatcagttatggaggatgtggaaatggggggtgagattggtattattacaaaaaacttgttgagggcgggttctggttcacagacccgcctatcattatgaatgtcttgagttggaattgccgtgggcttgggaaccaacgggctattcaattcctcaaagagattgtgtctcaaaagaaacctaattttattttcctttgtgaaactaaaagtgacaaaaataaaatggagagagtgggccgaatgttgggctttgactgtgtcttttctattgaagcccaaggaagctcaagaggcctatcattgttatggagaaatcaggaggatggtcacatattgggctattcaaataatcatattgattttttggttaagtcttctgagaagggacattggagactcacgggtgtgtatggggaacccgttcgagctcgtcgccatcaaacctgggagctgcttcgtttcctggccagagattcaaatctcccgtggtgtgtaataggggatctcaacaacatcgtcaggcacgaagacaaaagaggaggccgacgatacccccaacatctgattgatgggttccaacaagttctaaatgattgtcgacttcaggacttggagcttattggccacccgttcacctgggagaagggccgtggaacttcggcctgggtagaagtaaggctcgaccgagccttggttaactctcagtgggcataggttttttctctcgcttcactttttaatttggaattttcctcctccgatcactgcccattatttctagaacctaaagttgttcaaacctttgtggctaatcggaaatttaaaattgaaaatgcctggtttaaagaacctgtttgctttgagataatacgtgactgttggcagatagctgggaatgctaagttttctgataaattattgctttgtgctgataagcttagtgtgtggggaaaagatgtgacaggaaatttcaaacttagaattcgaaagctgaaatctgatttgaaaagtttgaaaagtaaaagagatgctcactccattcagcgatacaatgaaataaaaaacgaattgtttaaagttattgatcaaagagaggctttttggaaacaacgatcaaagcaaatttggctaaaagaaggcgatcagaatagcagttattttcacaagatggcaaccacgcggaaacgtcagaacaatattgaaagattgaaagatgaccaaggtaattgggttgattgggataatggcttacaaacagtagtcacaaactattttaattcactcttccaatcagctaatactagttgtcaagaagtcattgactgtgtccgcaactcaactccggatggtgcacactctgaatttcgtcagacggtaacagaagaagaggttaaaaagacagtatttcaaatgcaccctgataaaagtctcgggccagatggaatgactccagcattttatcaaaagtgttggtctattgtgggcaatgatgtggtcaaggtagttaaaaaattctttgacaccagggaatttgaagaaggttatggtgatgctcatattgtcctcattccgaagaaaaagaatcctgaagacatgactcagttacgaccaattgcactatgcaatgttgtctacaaaatcattaccaaggttctggtgaatcgtatgaagcccttcatggatttaattgtttatgatactcaaagtgcttttataccgggtcgcctcatctcagacaatgtactcatttcttttgaagtgcttcactatttgaagagaaagaggaaaggaaaggagggttttatggctttgaagctagaaatgagcaaagcatacgacagaatagaatggaaattcttggaagaaattcttcataagataggctttgatacttggtggattcggctcttgatgaagtgtgtgactttggctcggtatattgtgactcatggtggtcgtgagatgggtccaatttctccctctcgtggcattagacaaggggaccctctctccccgtacctcttcattttgtgtgcagagggccttactgccttgattcatcgttttgaggaaagaggactgttacatggttgtaacgttgctaatggggtaccccgaatatcacatatgctatttgcagatgatagctatctctattgcaaagcaactagtccggaggctactcgaatacaagaagtgttgggtaagtttgaagcggcctcggggcagaaagtgaatttttctaagtcatccatatttttcagcacgaatactgtattggcaacccgtatggatattagtaattttcttggtatgaccatagctggagagaatagtttgtctttaggcttgccaagtaccatctctagaaacaagtcggcagtgttgggtttcttaaaggaaagagttcgaaagcgcatacaagggtgggaatcgaagttcctttctagagcgggaaaggatgtcctcattaagacggttgctcaatcacttccaagctatgccatgagtgtgtttttgcttccggttgatattacaagtgatatggagagagtaatggcaaagctctggtggcagtcttctggtaacactgggaaaggaattcattggcgctcttgggataggctttgcattcacaaagataagggtggaatgggctttcgcaaccttcaggattttaattggctctgttgggaaaacaaggttggcgtttaatctctcgacccgaatctttggtggcaaaagtgttgaaggcgaggtacttcccgcatggattgtatcttacttcctcgctagggaataatcctagttttgtgtggcgcagcatttgggaagctcagcaacttgtttgtaagggggttaggtggtgtgtgggggacgctcgcgacattaaggttactcatgatccatggttaccgtgtagagacaaccctttcatcatttcctcacatcctaatctattgcatgcttcggttcaccatctgatgaaggttgatggtgtgggttaggatttggagcttctggaagacatgtttgaaccaagggatgttgagttgataaaaagcattcctttggtttcagatctggacaaagataggctgacttggtgttactaaacttcaggtctatattcggtcaaaagtgcatacaacctactccaaagcatttatggcaggtgggacaatactcaaacagaagattcaaaattctggaaaaaaatttggcgcctaaagttaccaccgaaagtcaaaaatgttgtttggcaagcagggagtaattgtcttccaaccttgtgtcagttgcaaacaaagagggtgaatgtcagctcactttgtcctgtttgccgtttggaagaagagactatcattcatgctttagtgacatgcctgacgattaagcaggtctggaatcgagtgggcataggtacatcagctagaattgtagactgatctttcttggattggtgtattcaaacctttgcagatttggacatggatggtaaacttcttttaccaatgctctgttgggcgatttggagtgcaaggaatgattgtgtttggaataggaagatggtgggagtggataatatagtagtgttagcaaaaggttatcttgatcaatggcaaagtgctcaaagctctcttattgagacatcatggtctggtttacagatgggtgatggtgctgagcaatggaccgccccaattgaaaatagtatcaagatcaatgtggatgctgctatatttgaaggtgctaatagttacggtattggattagtatctcgtgaccaccatggctttcttgttcaaggccgaactgatctctttgttgggaatgctacacccgaattggctgaagctatcggagtacgtgaagctttgagttggaccaaagaaaatgcatggcaaagagtggtcattgaaactaactgcctagtggttattcaagcaattcgtagctcagtccaaatgatctctcctttcggtcaagtcatttctcattgtaagcaactcataattgatttgccttttgtttcagtgttgtttgtgaaacgatcagctaatgtggtagctcataactttgctagagcttccatattatttcctggttgtcgtttcggtatagagtctgttcctaccaatttgttaccttgtttggtaactgattttgttggttaataatatcacattttccattcaaaaaataaataaataataatattataaaaatattttcagcgggccaaataaataaatatacaatctaaataaaaaaaaaattatacaaataccacttgtacacaccttcaattaaggatcaatacttcctgggcaactatcgcgcaaccacgcagcaactcaacgcaaccgaaatgaaaattcaaccagaaagagaactaccattaatt

SEQ ID NO: 22364 - DNA, 1805 bp, Cannabis sativa
aatttcagatataatggctataatatatttttcatattattttgatctccatttttttttctcactcaatctgattcaaaaattcattactttatttttttgtaaggctgaacagaatcataatagatatactgatgggaaagtaaaaaaaaattaagaatgttcataaaaaacattgagagaaagtgatttaaaatgttggagaggtataattttgctttcgttatcaaagattctttgtggcagttggttgaggctcacaaagataagcatgggatagttcaaccagacattgtgaagaatcattgggcttaaagaaccttttagctgaattaagaggaagtcgccacaaagaatggttgtcgagaaggattgtctttaggtagtgcaagcacttcggcaccggttattttggtgggttagttggtgattgtaatattttgttacaaactctgcctaatatgtcttgttttatgacggtttgttaatgagattgttcattatttctaactgtgtgtttcaagggaataatgttccttctgatgttaaagatgctttgttatcatttaataaaattttaagaaaaagaaagaaatactatctattctttgtttatttaaaaaaaaaaaaattaatgtgtacaatatgtaccttaagttatgtttctaatttctttttttattgtttttataaaacaagtctccacattaaataatgcagtccttaatgttgatgcaatgatgctggatttcttcttcagttcttggtgcttctacgggtgtggtgattagggatggagagggggcggttaattttgctgctgccactgttttgcaccgcgccaagtctccgttggaggctgaactttgtgcgattcgggatggccttaaagctggaatgcaaagggggctgccaaggtttgatgtacaatcggattgtttgcagatggtaaaactcattaatggagaagagcgaggttgtagggaggtggatggtatcatagttgagattcaaaggctgttggtatgtccttctattagtggtgtgaggtttctctttagggaagccaatatggtggctcatgtattagccaattacgttttgaaaaacaaagttagtgcaatgtggattggggtttcactctcttgtgctcgtcatgctattgagcgtgacttgccatttctttgtaatcggtaatttgtttaatggattctagttctcaaaaaaaaaaaaagtaatttaaatattttattatataattcaaatttaatgtaacaaacaccggcaagatttctaaagcggaaagttcaatttactttgattttttaatcacataaatatatggtaccatataattggttctttacttgtgttagtttcttagatcattaaatcttaattaacaaatgacatgaatctaaaacaaacaaactatataatactcccctctaacacatatattcatctatagccacattacaattacatacatatatgagtactatttgagaagaaaaaccttacaatttgggagaaaaaaaacatctcaatcatactagagtatacaatgtaaacttctataggattattaaattgacaaacttttcgttatagatttgatgaagggaaatttgtatagtaagtaagaaaaaacacatttagtatgcaatgcaattgagtaattgaacaaaaactcaaaataatcgtatattaaaaaataaaaaatgacaaaacaagccaaaaatcaaaaccaaactattatgaataataataaataacttaaaatatacaacatgaatatatat

SEQ ID NO: 22365 - DNA, 2602 bp, Cannabis sativa
  modified_base (1141)..(1145): a, c, t, g, unknown or other
  modified_base (1174)..(1176): a, c, t, g, unknown or other
tctctttgtccctttgtttgcaactcatcttaacagtattaatggagcatctccacgaatcagctccacacattagtccccgacggtgagcagactgagatcgttgaagcccatatcttctttcctatctctctctcagtgcgatcgtagttcttgaacagagaccaagccagagaataagaagacgacggatttgagtttggatttgattcatttttggtttaatttttattcttatgtgtgtgttaagatctgggttcgaattttattgtgtgtttttaatgtttgagatttagttttttattggggttttaatgtttgagtttgtgtttatgatatctattttttttattattattattattattttcatagattttgagaacctaaaatttgatataaagagttttattttttatacgggaatcaaagtttgcttttcgtttcattgattgaaaattgttaataggaagtttatggatgggatggaaataatatatgaaaatagaattgaaagatagtatttgaatcgaaaatcaacgtttattgttaatcttcttgaactcctttgaccccagtgagttttgtgcatgagagctcttggatgaggttattgaataaagacttatcagaggtatcgaactgctcttccatcggtttgataaagtctttgacctttttatggtggctccaccgacccacgcaattttggacatgatgaacatgatacaacgaaaattagattgctctcacttttcacgtaatgcaatcttagtaacaatgttggttgtagtgacagtagcaggtttgtccatccttgcgtagtccatgttaccgtaggctaagtggagaagaacttgctccttctagattttaaaattttcactcctaagtttaggaattttactagtgattttaatgtattttgaggtggatgaagtagctgcaagagtagcattacaaatttagatattaaatatttgagactttaatgaattcatattttaccagtgtataaacgtgatgaagatgaaaattttactaaacataaaatttcatgtgggctaaattttaaatttaataaaattagatgaaatttatgattagatttaacgctaaataccattttggaccctgtgtnnnnnaaaagttattaattggaccctctgttttnnnaaatgacaaaatggaccttgtattttctaaaattgtacaaataggaccctgaacagatttttcgtcaacataaaacttaataataatctgatcttgatctagaaatactatgactatgacatgacaaaatcaaaattaattattacattttctatattagttcgtgttagaaattatcttaatgttagttatattaaaaaaaattattaaaaattgagcttagggtcctatttttaccattttggaaaatataaggtccaatttttcatttaacaaaacagatggtccaattggtaatttttacaaaacacatagtccaaaatggtatttatcctagatttaatcaaccatttagtttaggaaaaaaaaattgttgtctatcttaattaaatttatgataatattattaaaataattatcctaacttctctaactaaattaagaaaactaatttaacatattatattaattaattatataaatataataaaatttatgtgggtaaaaaattattatacctatataattatttgcaaattatgtccattaaggtaaattttaattaatatataattttatataattaaagatgatatggctactccctaattatttgaaattatattttacttagatattaagtattgggctccacctaaaaatagttttattattaacataatagataattactgagattagtgctcctagtgtggtcatccgaaaattattaaaaaatattctagacatgagcatctgtgtaacgccttatttcttaggcatgctacagtgacattctaattactgcacatatttttgctaatcaaagaatttctcaaaaatcatatcaaattaaaaaattttatgataaactttaaacttttataaatatatatacatatatccatataaaaactcaggatcccgtttctacaattatattcatgttcaaaatacacttgataaatatgttgcacatccaagtcgtcttgagaccgaattttccaagttgaaacatcttgacatgtacaatcatccccgaactctggactcactattgctgataactctatgaaaatagagttatttagctttttttgtgcattaaattagttttgtttttaagtatttttaatttattttagtagtctttttatttaattttgaataaatattaattttagttctttatatataaattttcataattttgaatcattttatttaattttctattttataatggttaatcttaatgttttgtatttttataaaaaaattaaatatatatattttagacttattaaaattaagagaaatgatcttaaagtccataaactcatggaagtctaaatattttgtacaaaatattcatacacactaaaattcacattgtattcattatttatttatagtatagataata

SEQ ID NO: 22366 - DNA, 4290 bp, Cannabis sativa
attgaaattggaagagaaaaaggaaatggattacatattgagttgtaacaggaatctccattgcagactgtaaaatcgtttttctagctaagtggttgaacaaattggatctgaggcagctggaagaggaagtaacccacaattggggtgaacctttataattctttgtgtctttctactttattattctttttagatttttatctcaattatcgttcttttgattgttaattgcactatgatttgagacttctaaggtaattcctctcacattgaattatgaaagaacctttttctcattcgttttgactttatcctcgactaattgtgttcatggcaaagtgtaagttatgttgaactaattgtgttcctagcaaagtgtaagttgttcgagactgaatttgtattcctagcaaagtgtaccgttattcttgactattggagatgttcaacctcttatccatgagaacaaaacaaaatagagaagagaaaaagagatgcaaaggagagaaaagattaaaagagaggaataaatctcttatttatttagaaaagcttacaacatgtttatatacagggattaggagctaacaacaaactaacacctaccaactagagtcagtatagataactaactaaacaaactaactaactaactaaacaaatctaataaataattgtcttaacaagaccccttaagcttataattggtaggatcaccaattgtaagtttttgtcgaaatgaagagaacaattggctggaaataggcttggttagacaatcaacaatttaattgatggcatgaacatgctttacttgaattaattgttgaagaattttatctcggacaaaatagagatcaatctcgatgtgtttagttcgagcatggagcacaagatttgttgtgagaataattgtgcggagattaacacactacacaactagaggtcgaggcaggtggatgtgtaactgagtaaaaagagaatgcaaccaagtatgttctaatcacaacttgagctagacttcaaaatttagctctgatgctgtttctggacactgtatatttctttttgcactgccaagcaaataagttagagccaaaaaatatagaaaaactagaggagcatatgtcatcagggtctcttgcctaatcagactcacagaattcagtgagctcatagtggtctagcttgctgaggtgaatgccatagtccatggcgctactaagatacttgagaattttcttgacatcttgccaatgagatcgtaagggattagccataaattgatagacttatttgacactaaaggatatctcaggcctggtgatgagcaaatactgcaaggctccaactatggacctatattgttaagggttgtcaacagggaaacttccataggctgaaagtttgaaaccactgaccattggtgtgtttttgggtttgactttgtccaattcagctttgtgaagaagatcttgaacatacttttcgtgagacagatctagaccattttgtgtagtagtgacatcaatactatgaaagaaattgaggggcctaagatccttaagagaaaatcttgcattcagtgtattgagagataagattgggatcactatctgtgataataatatcataaacatacacaaaaataattgtcattgagagaggaatatgtctgatgaatagactgtgattagattttaaagacataacccccagtgatagaagacattaatgaagcttctcaaaccaagcacgagaagttttcttaagaccatataaagctttgtgtaatatacaaactaaatctggtgaatcaagatgctcaattctagggggttgcaccatgtacaattcttcttggaggtctccatttaaaaaggtattgttgacatcaagttgcttatttatgttccaaccttagagcaagagtgattgcaactcttattgtaacatgtttgacaaccgggctaaaggtttatttgtaatcgaaaccaggttgttgatgaaaccctttggctaccaacctagctttgaacttaagaacactcccatctggattctttttcattctatatacccatttacacctaataacaattctttcaggtggtagtttgactagagtgtaggtgttatttctttttaaagcaaggacttcatcttccatggccttattccattgaaattgttggagagcttgcttaatagatgtaggaagttgtgtagctaggtaagccataggttttctgatgccactcttgcctcttctctgcatatgatgtgtgttgctcacaaatgatggtgcagatgcagatggtggaggagatgcagcaactaatggtgcaaatgctgaatagatgcaacaacaaatggtgtagatgttggaacagatgctacatcattgctaggtattgaaggattaacatgtgctgatgtagtagagctagaacacttgttaagtcattagagatctgtacctgtgaaaactgttcttcatcactttcaaacacacaacatttagtagaaataggaacagattagtggtctgggaatattgcagcatcatgtggaaacaaagactcaactatatatggagaagtgactgtgagaatttgtcttgaggtgacacactctgactgagatgaagagggtgaactagatgtgtttgaaacagaatgaggaaatgttatttcatcaaaaatgacatctcatgtatagtttgccaaaagagccaaaacatttatagcccttgtgattactactatatcctatgaaagtacatggtgaggatcttaattgtagcttatgcttgttgtagggtctgatattgggaaaacaagtgtagccaaagactttgaggttggtataattaggttgaatgtcaaacaaaacttcaataggtgatttgtctggaaaaataggtgtaggaagtttattatgaagataaacagctgtcctaaaggcttcatcttcatattttaatggcatattggcttgagcaagaagagtaagaccattttccataatatgcttatgtttcctttcagctaatccgttttgttcatgggtagttcgacaaggttttttgtgaattataccagaagcactgaggtattcagtaaatgatctatatttccctccccaatctgactggaatactttgattttggtgccttaacatagttctacttctgttttgaaaactacgaaagttttaataacatcagatttgtctttatgtaagtagagccatgtaaatctagagtaggcatcactaaagtgtacatagtaattgtagccattgtaagaagtagtaagagaatatcccccacaaattagaaactaaaagttctaaaggttcgatataagttgtttcaaaaactttaggaaaaggaaacttgtgaatatttccgaaacaacaagcttggcaaactgaatttggcattttattcatgtttgaaatcttataacttgagagtaaagaatcttacattaatgggtttacaaaaatacaatagatttggaaataaacgagattaaagttaaataataagaatacttggaagtttaaaacttagacgaagagacaacaccattttggtaggaaatctagaggagaagaaccagtactcgcggaggtcgtgagtacggtccgtatggctgatagggtagtaagaatctagacgcttatccaatctaaagaaccccattttttttatttgtcctcataaaattagcctttacgctgtagaggtaaaggattttctccaaagaatgaacttctaaattgttcatcttgcataatatatacaacccagccaaaagcctatatgacgaggggatcagctggaaaggggcaatcccaattctcgtaattagatttgcaaaataagttctcagatggagataagtgccattggaaatatgagaccagctccatgcactgaatctctctgtattgatggaagcatattctcccttgataaagagtctctgctacattaatctggggacattgcgaaggctaacaacgttggcgtaagcctgcaacatctcgtaagatcgaaaacagttggctttttgatccttttcccaaatggagttgtaatgggcctgagcaatttgggtgccttgacccccttctctttgttggcttccgcaagggagtcctcttcaatagtgggctcatactaaggaatggtttctaagacccccttttttcgaggtgccaccgcgggggctatggtttgattatcccccgcagaggtcctctcagcagaagaa

SEQ ID NO: 22367 - DNA, 1889 bp, Cannabis sativa
atagctgacccataaagaaaagaagaaaaaaaatccagcaaaattaaattataaagattaattaccatatatgaatagaaatattaattaaagatttatatcattattatgtttgtttaaaatatatggtatgtatataaataattacctttttatgttaattattcattaaattttattaaattattaaggaccacttagataggttcaaaatgaattattaggagttatatttctagtcttataatctggttttaatgctcaaaacagtgggctctaaattacaatggttattttttcctttttttctcactttattcaaacttatatttttcactatttaaagaactctacaagtactcattggagcaatacttcttcttcttcttcttcttggtttttcaatatatattatttgggtttttgtgttattacattgtttaatttagagtgaattattatatataatatattaataaaaacataaaaatgaatcatagtgtgtcaaaacatgttccaagctttgccaaaggactgcaaattttggtagttgatgatgatagagacactctttccattatcacagcaatgttagaattatgttcatataagggtaagataattattttattttgatgattattgattttatattttccagtacattattattctttctccttaatctgattattatatatgaaattcactgattttatttatttattttttttttttgtgtagtatagtagtaatacaattttgtaataaatttttttaaaaaaaatgctgaaaagtgcaaatggtatccaattttaaacactaaattttgggcccatatgttttaacaataaagggatttgccccaaatccaacaccaggttcagtgctggttctaggctaaggcaaattaggtctgcgcttagagcctactcattttagggacctaaataaaaaaaaaaatattttaaaaaatatacataatttttaataattttttaaaaatactatttatctttaaagtaagggtaagggtctaatttttttttttttttttgtctatgacctattttaattcatgcccggctctgatgaagtccattatcatttttcctttgattttgttttctatataattttaggttaaattattattgttttattattggaacgaaaatattctataataagtaaagtggacaaaatttattacataaatttgtagcttaaaaagaaaaatcaacaaaaaaaaaagtttaacaagcggtttacaacaaaaaaaaaaaaattacttcttttttatttaatattctagcatcaattacctttagatttttgtcataaatttctacataatattactcttgttaagattgtatttgattttcattactttagaaagcataacaatatatatatatatatatatatatatagcacatttgtataatcattattatattgtgatttatttcagttacaagtacaggagaagtctctgaagctctctccatgattaaagagcaaaagagtaaatttaaattagtaatggcttccattgacatgccagagatgaacccatattcatttctcaaagcttcccttcaatgtggcattggagtcatatgtaagaacatcatcccataattctttcttgttttgtttaaagaaatatatttattctataaatgatatttacagcacaagttctcgaaattttaggtttgtaaccgatcgacaactatctaattattttttagcgaaaaaatactcaaagttaatataacagtgggtaagtatcattttgaaccttgtgttttgcaaaagttattaattagaccttctattttgttacatgacaaaatagaccatgtattttttaaaatggt

SEQ ID NO: 22368 - DNA, 2057 bp, Cannabis sativa
aaaaaaaaaatagagcaagagaagagatgaaatctgagaatttggacttgtacgtagttttactgaattggcttatatactatggttgattatattcaaactgggaataaaagaccttggttttgttcaaattactttatttgtttattttattttagtttagagcactattattattttaaaaaaaaaaaacaaccaaattctacaattatgtattttaattggatggtacggacataattatacatgactgatagtttctgaaacatgaattaattatttttgtaatgattaatttataaataagggtacataaattaaataataaatcttttttttttcatgactataggatcgtatgtttagcgagaataatgttcccgctgattttttttttattgtaatggttgatattgtaatggttgaattttcttatgttgaattttcttattaatcttattaataaagttattattaataaagttaccattaataaagttaccatttttcgttaccatttttcctcaaaaaaaaaaaaaaagaaattataggaatcaatgcaacaattgtattttatttattttttcaaacttggtgtaattagtgcatttaatatgggtcaaactttttgacacggcacgaaattggcatgagtccgagaggcatgactcatgagcacgactcaatacgaaaaaatatatacttaggcacgacacgacataacacgaaaaaaatatagtcttagacataacacgacacgataaatctgaaagcacgacacgtaagcacaaataaattagtttgaaagcataacacattaaaatatccaataatttactaagacatatatttgtaataaaaaataatatttataaatatcattaatgtaatgtaatattatggacaaatgttatagatgttaagaattcatatctcactaaaagcatttttgtttatttttacctctcttaagaaaaaaaaattataccctttcactttaaatgttgacaaatcggtaataatttcgatatttttttcttaaaaaaataagtttgataattgattaccccaaaaaaaaaaaggtaaaaaaagtaaaaagagacaaaagttgaggaaaaaataaaaatcatatttattaagaaaaaaaaaattggagaaaaaagaataaaaacgacacgtcgtttagaattaaacgacatgatgtgtatactaataaaaacttttcagtattgtatcaaaaaacctaactatattctctaaaccattcccgccgagcttgaccagagctgagaaatcaacaatggcttccgttgtctccaaaaagcgaaagaagaacaccacttccctttcacacctcaaaaccctaggccacgacctcctcacctccagagctcacatcaacaacctccccacactcctctccttcgtctcttcctcttcgcctcctcagtatgtactcgaagctctcctctcactccaagctttcttcacttctgttctccccgacctcccttcatcttccaaaaagccttcctctcgcaccgtttcacaggacgacccagagtttatttacagaacgtggctcaaagctaaattcgatgaattcgttaaatctctcatcgacgtcttggtttcgccccaatccgaagaaactatcaaggtttctttttgttttaagtttatttgattgtaattttatgaatgtttgtcgatttatttggatgatttttatatataggaattggtattggatacattaatggagtttgtgaagctgggaaatggtggaaggtttaattctgctatataccacaagcttgtacatagcattgtaagtacttacactattttcctgtgttttgggttaaatgtgtgtctaaattagtataatttgttgttattttctttaataatcaggttcactctgccacccctgtcactttcttgttggacttgcttgtttcgaaatatttcaagtacattgatatcaggtatgcacacttaatcacattctcatccaacttcaaccacttgtttgtcttgcctgtatgttcatc

SEQ ID NO: 22369 - DNA, 1380 bp, Cannabis sativa
atactctgctcttcacttttgtctatccatgatttatccattataaaaattataacaataagatctcaatatgtagtaactaattataactagttactagttacataatgtaactaactaatttctcacaactatataatatttatatattactctaattcttgttttagtttagatcatgttattatgttactcatttcaaatattcacatgataactagtaactaactgtaaatagttactagttatataagctgtaattaatgaactagtttcttacaactattaagtaattatttatgttatgcgtaacactttttgtttaatatttatgcatttttagtaaaatttatcctaattttatcaaaattttgatagcatgacggttgtaatcgagcgttccaaaattttttaaacatgctaaaaaataagaaaaaaaaaacaaacaaaaaaatacaaaccaaataaaatagcattaataatataaaaactatctacctctgattgtagtacatgtattcgcagaacctactttactacggttgaatatttcagatattcaaactcaactaacatgcatattatgtcacacattcgaccacagtacaatatatcacagaacctacggatgaatatttaagatattcaaactctactaagcattaataattattaattaataataacaaaagttagtgaatgtataaacctgtagctaactacaaaaatcgatcaactccaaattatttgataccttaataatcaggtagctcacaacctacgatataataaaatacaacaaaattaaaattttaattatttaactacttacttactagttatatgattttttttttggaagaacaataagttcattactaagcacgagaaaagggagtcacaggggaaacttcctccccttaaaacgttcttgctacaagattgtccaacctaatatctttagccaggctatccgctacaacattagaaaaatgctaaattaaaacaattaactgaatcaagtactacataagaaagactaaagcatctacaatccaggggacaatgattcctacgcagagcatgaatcgtcaccaagagaattagacaaaacaccaataaccttttgatcttcctccaatgcccaaaacagagccatgtgaattgcttgaagttcagcttccaatgttgaagtggcattcgaaagttgaattctataaaaccaagaaccagaactcttattgaaccttactgcagccaaacctactacaatatttccccacgatgcatcagtgcaataaatcacctccaaatcaggatttatagcagtttaatcgacacaatctttagagggagtgtcttctacaaaagtgagtaact

SEQ ID NO: 22370 - DNA, 3847 bp, Cannabis sativa
ctgtgcgggcatgtgtgtgtgcatgtctgatggacttcctatcagattcctatatatttgtttgtggaggttgcttagttgtatcaagaagatatactaatagtgggagagttagttacttaactaagtcaaatttggctaggggagagggaggcctctcaaattaactttgattcatcaataagaccagattagattcttcttcagttaagaaccatatcggtgtccttgttatattgcagtaggagtggaagaagtagcctggagaaactatgcaactaagtttgttttattgttagaatcattatttcagagagtatgcaactaagtttgttttacttgataatgattgttagaatcattattgcggagactcgttgattgtccatttctttctcttttagtttttttaccatttactctattattcgtgaaatgaaataagattgtgaatactgggttcaaataattgtgaaattgtatgctgtaaacgttgtggcatgtttactgtattcttctgtggcaatttttgttccgttttgggtggtgttcactcagtattggattggatagttgagaatgctttttgacaatgtgaagaggggctttgctataattcatcaggactacctataaatggaggctgatgagcctctctgctggtcagaaaatataatttctgtagatacatttggcaaccatttttcttcaccatagtgatttttctgctgctgcttacgtaatttttaatgtctcttttgctttcagttcttgcggtgcttcttttgtgtgccctttttgtgctgcttatgtttcttttattaagttgcagaaaaagcagtctgttacaagtcatttgattggtatatagcaattaaagtgatgattaaatgatggtcagttgtttaatatgagaagttgccatgttccaagacattactgagctgttagtttaatgctcagttgtctccctctttacttaatacaaaaccccagctacttctgaatgaattcactgacttgtatgcccttctggtgtcatatatcaaaaacaaaccttagtataccaactttaagtatcaaccatcctaaaagatgtaaactattataatgttgaccgatatcttctatcaagcaggaaagaagtaaacagtgttgctgagtgattcttgacgatggatcttaaagtttcaacttttttgtctcacacacatatttccacttacattttgtacctgcagtgcagggggcatggcactatcgactttagtgccctcaactgtgagctcaatctctttgctagcaaagagttcagtggctagtttacagatctggtctttgcatggacttcttttaactgttgaagctgctggtttatcctatgtatctcatgtccaggtaacttattaagattaagtttctcgttttgatggatatatgagggaattgtgataataaaggtttctctatcatgttgctgatgatttgggatttttggatttttccagctgcatgtacagttgtttttattaacttatcatatctgtagtctgttttatttctttctatggcaggcaacacttggcctcacactggatattcttctgtctgaagagaatgggtgggttgctcttcagcaaggtgttgggcgcctaataaatgctattgttgctgttcttggtcctgaacttgccccgggaagcattttcttttcccgctgtaaggtacttactatagtcttctagcattattgggcttatcaaatgctattttttgctctctttaaggtacctactatgatcttctagcatttaccttaggcatgggctttacagtcaagttcaaatctttcgagtttctttaacaagtcaagatggtgtatttatcctatgctgatgattttttttttgtacagtctgttattgcagaaattagctctgggctggaaacagcaacaatgcttgagtatgttggctgatcatttattttgttatgtgacattgaagttctctttcctttttttttgttttccttttcttttttctttttctaaatattagaaggctatgtgagatgctttttgagtataaaaaaaatcactcttttttcattgtagcttaattttgttagaaaattcataacccatgttgttcatgcaggaatgttcgctttactcaacagcttgttctttttgcaccacaagctgtgtctgttcactcccacgtgcaaactcttctcccaaccctttcctcaaaacaggttcgttctcgaagagataacgatctagctcttaaaattgtatgttctcttctgtttcctattttatagttttcaccctactgcaattttatgcagccaactttaaggcatcttgctgtctccactttacggcatctcattgagaaggatccggtatgccctgggttctagcttattccagaaaacaatgtattagcttagtttgttaattttaccagtggacactttctgtcgttactgtaatttattgcaggtatccattgttgaagagcaaatagaagatgaattgtttcatatgctggatgaagagactgactctgagtatgttgaaaacagttttcttatgtttgcttttatctctatttgcaataatggggtatacgtgtgtgatcttttgatcattcacaaacaaatccctttattcaaaatttcaaatacatgggctgttttcctgtaattaacatcatgaagttgtcattaaaaggtatttcatatgtttgaatttcatgaagttgtcattaaaaggtattaatatctaagtgttcagcagaggtcctacgggaaaaagttagattttggacagcgtcttgggtgtacaagacaaagcattttgaaaatgtttcattttcagacttatttagggactggagagcattgttgtagtttctttgctgctgcctcgtatgaatattttctaatgtgagggatctggttttatgtgggtcctaggggattgcatgcaaaaacgcatgtttggggcagtgagtatgttcagggtgtatagattgcttcaggtttttgtgcttggtttttaactttgttaaccacggtcttcctccgcgtctaagacaaaggcccctttctcttttttcaaaaaaaaattcatggagccgactcaaatctagttgttcttcagatttaccttcaacataaactgtaattgtacttctattaatatgattgtcaatgtgctaagtcgaagggaggaaattttatttcactaagatgtaactgatatacttacaaaaatgcacgtgtatacatagagcgtcaagtatattgtccatatactatatatatatacatatatgtatatatcttaagcggaagctctttctattcgggaacaagagttcttgttatgattttggtgaatgtatcatgcatgtgaagcattatgttaggaagtgagtgtcttatgaattagttccattggtcttagtttcctcaccatgaaatttttagaaattatattttgcttgtactcagtacaatttttaagcaaaatattattgtacagaaagattatgttggcatttctcttatatcctgtggtattgttttctcatttggccttcatttattgaactgagtgtgagtttgtgtatggaagaaagagattgctagtattattccatgcataatgccgtgaatcccttttgatgtattaggattggagatctagtgcgtagcacaattatgcggttactctatgcatcttgtccttcttgtccgtctcattggatatcaatatgtcgtaacgtggtaagttcttttgttatcatacattttctcttttctcttgtta

SEQ ID NO: 22371 - DNA, 4329 bp, Cannabis sativa
  modified_base (3885)..(3894): a, c, t, g, unknown or other
ccgatctatcctggtaaaataatttccaacagtttatgcattcaccaggtccagatatagaatcctaagctacctaaaaagttcacttgggaaaggtctcttgtttaaagttcaaggaaatttgaagattgaaacctatactggtgctgattgggctgggaacctacctcaggttactatatgtttgtaggttataacttagttacatggcgcaacaagaagcaaaatttggtggctagaagtagtgttgaagctgaattcagagctatggctcacagtatacaactgtatatgaactttattgtgataacaatatgacatttgtagttgctcataatccagttgtacgtgactgtactaaatatgtggaagttgataaacatttaatcaaaggaaaaataaaaaatgaactaatgtgcatgtcttcagttcctacaagggagcaagtagcatatatcatcacaaaatgactatccaagtaacagtttgatttcctgaatagcaagcttactataaatgacatttttagatcagggagtttaggaaaatagtgtatttattatggaaatattcttataggtgccatatcactattttaggaagtagttataagcataatctcattgtattattatttattttgttccttatatagagactcatgtaaagttatatacactattttgtgtatagataaaaatattaaagaaaatacttttaccctgatctattttgttttcttctattccattataaagtcaaagtcctagaagcacatagtagattattgttacaggcaaggcaatcaccatcccaatagtaaccctgagaaaattttccaatatcagattgagtgttatatacgagttattttctaatgaatcagagcttatgaaaagaaaaagaaaaagaaaaaaaatcagtgcatataacttacgaagtgctcagtatttgaggatgtacattatattccttggcaaacacaaaggaaactatggcttggggaagagcagcctgcaataagagtattagcattagttgataccagcaggaacagccacttcaactataaatataatacaaacaatgaccacctaaattgtgagtatatcattaagtttttggcctgacattgtatgattggatcaaattgaaaagggtttagctttaagttgtagatggtaatattaaaatacctgaacgattgcaacttgaaggagaacccctctaatgccaatagcagcagaggttgcagccatcactcctggcccatcaagaaaccgtacagccaatgaaagtgcagccagagattttccacaagctattatcttcggctgtaaagccatgaatagacctgtttggatatccaaactttttgcatcaaaatatactattttttgtgctttaagcaacatagtaattatatttagagaatagtatacctagactgaacattgacattcccaggcctgtgtttgataatatggttacgatcccttcaatcattattggcatagtgatgtgaaccctacaaaatgaccgaattgagatgtattaaaaaagtgaattaaattattttccgtgaaagttgtgctaataataataatacctgaatgctattagagaccacacaaggccaataacactagaataggtgtttgggtttcttatgagtttcctccaaaccatggtaagtatgagctttgtcatgacacttgctggaggcatctctaacttcttgttttcttcctcttcttcttcaatattctcactaaatccaataccatcctttgacccataatctattcaaaagcatcatctctttttgtaaatgtgtcaaaaaagtaaaaagaaaaaaaaaagaaagcaaccaaactcgtacagaaaaagccaaattcatacaaaagagcaacacagtcgagcaccatgctcaatactatatactaaaataatcattactgaaaaaatacttaattttggaataaataaataaaattatattgtgttatttaaatattatctttaattttttcaaaaactgcatgtgttgatcccttattttttttaggtccctttgaaaattatttctccctcgatcataacaaaaatataataaacatgttcattagccttattgcataataatatagaagaaaatcgcaaatattctatacctatataattttctgtgtaaaagataagaagtttaataattaaaagcaagcataatctacaaacaattaccattcaaaggagatgctccatttttactgattacatccatagaagtaccaaaagtgtttgcagggagatctgttgctgccgagaatgatctgttgttataacttgatgcagcacttgacgagttccaaaaagacatgtgaagttgaatggcattggcatcaccaccacgacatcctgttgtagtaatttctttaccaagctctgattggccaaagcttactgatgagtttctgggagtagtaacactaacactatattgatccacagatgatgtcgttgaataaatctcaactcctgttaagttcgaggcacgtggagtaccagacttagcagatgaacccatatggatttttctaaacgacaacatagaggaattagaagagtaagatgatctcctcaccatgacatgaagcttcccagaagtgtcaatctcagcctcggcgtgtaaatagtcacaacctccagcaaacgacataacatcaggctcagtcttaagagaagcaatggacccagcattggctgggaaattgttgtttatgaaaaccttagctgctctgtactcgaacataatcaaaagcagagtgttccatataactccttggaaaacgacgatctgaaccattaagcttgaggaaaactcaccgtacattgctttgagaagtgggattcccatgacaagagtgttgggaagagttgagagtgagttgagtgttatggtccactcaaggcttccgtgtttgcttatcattttccagcaaaacagagcaagtaaaacgacaatcttttggagagtgtcagctaagataagcttgaagttcatgtcgtatgggttgttgaaggcaatgagctggaatgagagaaatggtatggcaatgagggccacgaaacggtttacaccggcgcactgctccggcgtgaagatcttccaccataggactgaggcgtaggctaatgtcatggctgcgtaaaggggtactagagctgataacacttggtagaagtccttgccggtgatcatgattgtgtttgtgtttgagagagaagctttactgatattttccttttgagtgtttggaaggcaggaaagagaaagaaagaatgaaattaaaagtagaaggaaacgtgtttgatgagaaaactcaatcttggccacatttcgtttgttgggttttgcatggctggctatgtataactaggagtgagatcatagttatatgctatctatggtctttttgttctgaatctatgcttattatttcttttttttttttttttttattttttatatataattaaggtttgattcatgtttgaatgtataatatatgtataaaagagagtagtaattgtgatacattacacatttttaatgaaagtagtgttttttaatcaagattttattgtcaaattatcaatgttaatacttaaagcgattgatatttcaaaataaatcacaaacttttcaaaaaattaaaaacactataagtagtatttggtcatatttttcgttttttaattttttaatcacaaaaataaaaataaaatttgtatttttaaaaaacaaaaatgtgttctataaccacttttatttttcaattttaaaaccagaaaacaaaagtgtgttctataacttttattttnnnnnnnnnnttttgattttatttaagttgggtccaggtccgggtctaggaccgaggccgtggtctgagtctgagactggggcttgggtcggagtccacgtctcaagatccaggttgggatcagagtctaaaatattgattaagaaaaaaaaaattatttaaaaaaattgtgaaattaattttttttattttcaaaatttttaaatttttatttctcaattaaaaattaaaaagtaaaaagatttttacaaaacatatttttgaaaaatatttttacttttttaattaaaaaaataaaaactaattaaaaaagtagtaccaaacaccctaaatttttttatttacattaaattttacattacactcttagagaagacttcaaaagatgagagggaaggaataataaaaatataatttataagtttgaaaaataagtagcatatag

SEQ ID NO: 22372 - DNA, 4145 bp, Cannabis sativa
tactgacaaatagttttttacatatacagtttcatatttttataatatttttagttacaattaagttgcacataagttggctcgcaatagatataacttttgcattacaatttcaacagcgacccacgatccatgcttcctgagattaaaaccttcgtctgatgcaacctttggtcaaccaccagcaaacttcgtctaatgcaaccttcgatcaaccacccagtaatcttcgtctaattgaaacatttgtctgatgcaaccttcggccaaccacccagcaaccttcgtttgattaaaaccttcgtctgatgcaaccttcgaccaaccacccaacaatcatcgtctgattgtgtaagtgatagtgtaagaggtattttggcaattaaaagcacataaaaaatataaatgttgtctacactttataggaatatttttataaataaagtgtcaatttatatttttcatataataatttcaaaaaaataagctattttattaattatattaggaataagtaacagaattaacttgttacatcacaattttatttggaaaccaaaaaataattctaaaaacaatacagtaagatggggagatgttatccattcccagtttcatctgacacaatgaaacttatctttgaactgctttagctgcttcatttgtctactcattttttccttttcagcttacaagcatttacaagtaactgcttattattattaagtttagtttacacttcacaacttgctctgaggagatggatcagaagttgcgagctcagcgtacatgtccgaaatagcttttgcgaaatattcctttgcttgaggtctcttcacctaaacaagttgggaaaacaaagttaaaatattagattaactaacgggattttcgttcccagcattttgaagatgaacacttgccttgaatgttggagtgagcagaccattctccaatgtaaatggttcgggcacaagtgtcacagcttttgcgaactcaaaacctcttagctgcattaaaaaaaattgaatttagacaaaggacgaggtagaaaaagaaatgagcactcgaattgatggctagacacaagttttgatccaatgacttacctgagcttctcttccaagagaatccatatcagccaagacggcagcctttgctcttggatcattgcatagctgctgtatgttttcaaactgcgttcacagattgtcaaagaaacataaataagacacgatgatttttcgcagttaatgacaatgcttatgtacaaaccaagacaccattctcctcttaccttaatgccttctgaagctgcccattcttgtaatacatctgggtctacggagacaactgctactagagatgaatttaagctgtcacctgccaagatcaaagcaaagaacttaacaacagtgctgtacaaagcttgaggaaagagggaatgtatggaatatagattacaacttaccatgcacaaagcattgggcaacgaatttgcactttgcatatacgttctcaattttttctggagcaatatactctccctgtgccagcttgaaaatgttctttttcctaaaatggtaaacaacataataagtggtgcaatgcttgtatttaagctaaatatttttcatttttttaaaaaaaaaaaaaaatagacaaatgcttgaatcacaagaacccatgagaagttatataatcagattcacatcagattgagtctgaaaagttctgtaaccaaacttcatttgagcctaagtttgtaactccatgtataaaaaactttattttgctttcaaagggtggtggagtggtgatttggaaaggtggaatggtttttgtttttaaaaaaactttaacagttttagaaagtcctttatgccactatgaaatgacaaaggctcccacaagtttggataatacacattatccagatctctagtgtgtagttgactgtagatggtttcaggaacaagtataacacttcttattgtatatttcgtcaaaacaaccaatcattggagcacaaattactgaggattataagatctcacctatcaataatttttagacgacctcctgaaaaccacaatccaatgtctccagtatgaagccacccatcttcatcaataacttctctcctgttcagacgaataatcttgtcagacaaattcaaaagttaataaacaacagagaatgaaaagacgacaagtaacatcgttacgtctgctgcacttcatctttgtgatagccacggaaaataattggacccctgacacagatttcacctcgaggatatggctcatccgcagttgtgtaattcatttctggaacatcaacaagttttatttctgaaataggacggaaaacgatttagaaaaaaaaaaaaaaaacacccacacacacaaaacgttacaaaggcatcattgattgttcagcattatgtaattccaattacatcctctatctaggtggatgagacaaatctgaaacatgcatgtgtgaaggcaagacacatacatgatggaacagatcatccaacaaagctggtcataagagaatatcacaataagatatgatggctgtgaaaaagagagatttctaattgagggtaagtatgaaatgatggcttcaaggtcaaagggtctgcataaacttcacatcttgccaattgacagatactgaacgtatcataaatttggtgtaagatactgaacgtatcaattaaatttgttataggcatgtctctgtgaattctttagcttatgtcataactcaccacaagctggattaggagaaccaacatgaccagacagactgtcaccctcatccatagaacttataacacaagaagtttcagtcattccatacccttcagctacccgaccaccaaagcagctgcgaaggcacatttaagtaaggaatttattttttggaaaagaagtacgtaaaacaaaatttaagaaaactcacaaaaagaaggcaaacggagaaaactcacattttcagaaagtccatgacatcaggagacaaaggagaggcaccagataccatgaaacgaactcgtcctccaagcttatcttttatcttattgaataccaatctgtcccacataggagacggagtttttcctgaaacaatccaatgcccaatcatcatacaagacaaaagaaatccacaatccaaagagcgggcaaactaatatttaagattagcaaaacttaaacatataagagcacttgtaacatttattacaaatgtttattataaaatgttgatcaagtctcttatgtaataagatcatatgagaaagattctataatgcacagatgtttcagaaaaaaaagttgattgctagctctagtgctgcagagtatagcttagatcactttaccattcaataaagcttgcttctttgcattataggcagcattgaacagcttttgcttcagtgtgccagatgactttacagcatttgttatgctgcaaaaccataataacattttcaataataatattatttgcattgactgtataattaaattcacataaaaattgactatttttaccctgcatatattctattatatagcctaggaacactgcaaaagattgtaggtcgcagagcagccatatcatccattaatttcatgttgtcctgcatatgatggtccaaataaagtggctgtaatgttgtctcaacaaagcaaaattaaaggataaaattgctgaaactgaataaaagatagatataaggatgcaaatgtttaaaaagataaccatctgaaataattttgttaaatacacatacactcggagtagcaaagtaattatatctcagaataccaatcagcaacaacagaatcatataattgtctagaaaaatcaggtacaagaaagaagagagagaaaaccaaccacagatctaaaataagagaagtaaatgagaatcataccccctgatagaatccaacagcaactccaaaatatgctgtcataacctggttgacgcgctcatagatgtgtgccaaaggaaggtacgaaatgtagctgataatatagaagatggtttcaggctcagcaaagagacaggcaaaagcaattacacagaacatgagagaaataacttggagagataagta

SEQ ID NO: 22373 - DNA, 2968 bp, Cannabis sativa
atattatatatatatatattctttcatttttatggttacacggaaaaaaaaaaattacttctttttataccaagtactgtcttttgtaattattgggtaacctcttaggtctgaatcagtttttttctttttaactacctttgtcttttaactgtaatctttttcccttcaaatttgaaatttccccggtataattgttccctccactactcctctgcttccccatgtcggcgtcagccccctcccatctgctcaaccagctcgatatcccccatagattcacttttgaagaacatacattcaaccctttctcttaatgatgaagaaagatccatcttttgtatccctgaatataaccccacgccctctgaatgtaatcagcccactcttcttgccaaagttcttactcaccaaaatgtctacaaacagatttttatcgaccaaatgtctggccactggcaaggtcgatttcgagttgttatcactgaatataaagaagatgatggactatttcatattacacttggttgtgaaggagacaaacgacgggtacttaacaaagagtcggcactttcaaaaccatctcattggtcttctcacgccagatgctctgcaaaatgtctcaaaggaagacttaattttcactccattttgggttcaaatctaccgacttcctttcctaagcaaatcaaaaattttagctgaagcacttggtaatattataggagaattcatagaagtgtttgatgattccactaatgaaggttggggtcccttcttgcgagtccgtgttaaaatctgcacaaataaaccattgctgcgaggccaaatgatcaggctgcccaagattaaggatgagttttggattgacttttgctatgaaaggcttcccgagttttgttttaaatgtggtcgtcttggacacccttatgagcgttgtgttgctttcatggaacgtatggacaacagtaatgatgacgatttttaatatgggccatggatgaaaggtgctaaactccctaccaatacttatgatcgatatcggactaattttgcaaaaggaaatgcatggcctctactcactagattgtccagaaccacccttacatccactcttccatccctccaaactcgacaccaagcctgtcctaaggttctctttgaaggggaatcatctagcagtcatcttcacttgcatcatcaacattttactccaactcctttatctaacccaacgaccaaccacacgaacatacatcacctctaaacttctgcaactttagatactgatttccaaacaattctatctcccaattgcctaactcgaagccatatcaccactcccacaaccaattaccacaataattctgtcaatgtcaatccgtccaacatctcccaacctccacttatttctagcaattatccttccgcaccaaatgccacttgcaccagcacactctctaacaaactatgcccccctttcactcactgtctgaaaattcagcaaccccaaaacactgcaattccatcaaccaaaccaaccttttcacctgtttgcaacaccaacattcagcacgctacaacatccgcttataacattagcagcaacctttcacaccagccacttacacacccttgtaacaactaaaataaacaacaaattctcactcccagcagtccaatctctacccaggcccttccttcatcttgcaacactcaaaaccagcaaccaaaaataaatatgagcaaccattcacaccagcaatccatctcgccttcagtatctaataagaatcactctccaagtaagtctattgctgacctttcacacatttatgtgcctgatttgcagaatcatacatttgctacatacccaccagccttcatcccattcccattaacactaaactcacatctctaactcttaccatgcctatgaaccaccttcccacttacacaaatgctaatgtttccactggaaaagaaaactagctgccttcatgcactttcaaaagacaaaatgattatctatctatgaggaaaattttgaagagatgtcacaacaaccatgaatcatcatcctctcctttgtcaagggacgatgatattgagactttagtttctgattttgaggattctaacttatccaatgactcaattgcggaggttgcaaggcaaccctgcaaatcatcatgaaaatcttaagctggaatgcacggggcttggggaactcgagtgcattgagacacttacgattgcttatccaacaacaatcgccccaaattttgtttctaatggaaacaaaactacctgtaaattcagtttctcgtttgcgacaatttcttcactttccaaacggtttggagtctccacgtacaggtcttagtggtggcctcttgcttttatggaaagatgaagtagacctttctcttttgaactttggttccactttttttgactggtacatcacaattgaaaatggcccaacgtctcatttcacatgtttttatggtgctcctgaagttagtaattgaccagcctcatggactctacttgagccacttgcggatgttgcacctcaccttccttggcatgttattggcgacttcaatgagattctttataacagtaataagtccggaggagcactccgaaatgaatctcaaatggatgcatttagaaaagccattgacaagggttgccttcatgaaactccggtggatggtgatccttttacttgggcaagaaaccaaactgttgttaacactattaaggagcggcttgattggtgctttgtgaaaaatcattgggaatctttttatcacacacctcaagttcatcatcatgattatttttagtctgatcaccgagccataagtgccacattccatctgctttcatctcagcctagcaacactaaacgcaagagtcgattcagatttgaaaaactatggctctccgatcctga

SEQ ID NO: 22374 - DNA, 2620 bp, Cannabis sativa
  modified_base (2556)..(2569): a, c, t, g, unknown or other
tggggggggggggtgaatatcaagcattcactaaactattacaagaacatggcatcactcacaaagtctcttgtccatacacacatgaacaaaatgggagcgaagaaaacatagacatattgttgaatctgatcttactcttttagcacaagcttctttaccacttaagtattgggataaagcttatcgtactgctgtctttctcatcaatagaatgcctaatcccaaacttcaatacaaaacacctttagaagtgctatttgacactagacctgactacacctctcttagggtctttggctgcctatgttaccccaatttaagaccttacaatagagttaagctgcaatataggtccattccatgtgtgttccttaagtatagcctatcccacaaaaggatacaaatgcctatcttaagatggaagactgtacatctctagagatgttctctttgatgaaacaatctttccattttccacaacagctaatcaagccaaacaaaaatccattcctgtccctctcatgaatactgccactcctcaagttgttgtatctaccaataccacaacccaagcctcccccaccaattcatcctctactcctgttatgtccccacatgtcttttctcatgattctcaccacacatctataccttcccaatcccattttcctaaccaaaatcccgatccacaatctgatcctatacatcatacagtgaatgagacaataactaacactttggcagtcacttcccaaccagcaccaatgcctgttactcaacctgctacagatgcaatttctaatgtggtttttgtaggtcttaacaagcatcccatgcaaacaaaagaaaaattagggataaggaaaccaaaagtcttgatggcttctcttcaaccaaccaacatcaagcaagctctaaatgatccaaggtggtttcaagccatggaaacagaaaaacatgctcttgtgagaaacaaaacttggtacttagtgaaattgcctcctggaaggactcccattggctgcaagtgggtgtataggattaaagaaaatgctgatggctcccttgacaaatttaaagtcaggttggttacaaaaagatatcaccaacaagctgggtttgactacaatgaaacattaagtcttgttgttaagcatgccaccataagaactgttctgtccattgttgtctcaaataattggaccataaaacaacttgatattaacaatgcttttcttaatagtgacttgcatgaggaaatataaatggtccaaccccttgatttgttgaccctgagtacccagaccatgtctgtaagctgcagaaaggtctctatggtctcaaacaggcaccaagggcctggtttgagaaattatcctctattcttactgacttaggctttaattctacaaaactgatcactctctctttgttaaagcaggttttcaacacacactatatgttttagtgtatgttgatgacatattaatcacaggaagtgatcaatctcaggtttcttctcttgttacaaatctgagcaacaagtttgctcttaaaaaccttggtgatttacactatttcctgggcattcaagtaatcaaaacacctactggtctgtaattgtcccaacaaaaataaattcatgatctattatgcaaaccaaagcttcaaggagccaaaacacaaagctctcctgtgaattcatgcctcagattatctcaatatggatctgatcctgagatagcttacaatgttaataaagtctgccattttattatgcacaatcctttgaaatcacactgggtagcagtaaagagaatactcagatacttagctggcacctcaggctatggatctcaactactcaatctactcatcttcaagcattaattttgtgatgcagactgggctgttgatccagatgatcgaagatccaccactggattctgtattttcttaagtgacaatctaattacctagcaatcaaagaagcaaacaacaatatcaagatcgtccactgaagctgagttcaggagtcttgctactgttgtcactgcgttgacatggattcaatccttgctctccgagctccaatacaaatcaattccaaccccaacgatctggtgtgacaatgtaagctctgtaatgctagctgccaacccaattttgcatgctcgaactaaacacatcgagatagatatatactttgtttgagacaaagttatcaacaaggaaatcaatgttatcatgtcccaaaagagcatcaaattgctgattgtttaaccaagccaatttctagcaatcaatttgctaatttgaggaacaaactcaaagtgttttgttcaaccaccctgagtttgaaggggactgttaaggataaaatcagttattagtttaatcagttaggaattagttaattacgtttgcatcttgtaacaaccttctactggtttttctctcttgcttgttgtatataaacactgttgtaatcttccttgttcaataataataacagaattctttcattcaattctttctctctctctctctctnnnnnnnnnnnnnnctctctctctctctctctagatatcagaaacaattaacacgagcaccttta

SEQ ID NO: 22375 - DNA, 4022 bp, Cannabis sativa
  modified_base (63)..(81): a, c, t, g, unknown or other
  modified_base (723)..(727): a, c, t, g, unknown or other
tatgtgtttaatttttaatcgttttagaagttcatatttaggtgttaatcaacatacttgtgnnnnnnnnnnnnnnnnnnntaaaataatttccaacacccggatgactatcatgtccacttcggttttagtctttaggaaagctagcctcattctgggatagagttcgtgttggctagttttccctcctagaatggtagttctggatagtcgactctagcaggcccaatcctatacggaagcgtcatcagcgagtatccttggtccgtgagtctaaaagctcatatatgttattagaggctctgatacttaagttgacatggagaattcgctcaaagaggagttggttaagtttgttatttctaactaacttaacaacctcgtttcttacagccaccaactttaggatcttgatcccaagcctataaatactatcttgacttgttatttcgagacaccagattcaaaactctgttcagatgagattgaaagtttgagagaaaaaagactgagaggtagagagaggtgcagagaaaagagagagatttggtttgagttttataagaagaatcttctgtagatgaaaaagattctttggtgtaagtgtgagagttgaaacactgtgagaactcaacatagacgtctcgactgtattgtacctattcttgctcaatcaataaagaagaatttcagtggtgttccagaactggagtagagccatannnnncatcgatctatcagacttgaaccagtatatatcttagtgttgatttctttattttattcatttagtgtttttggtcttatatactctgtttgctcctattttccatctgattgttgttcttaatttgatagtcttgtcattgctaataatttgattgtttaagtttagttgttttgattctgcattgttagtcataatttttccacagtacaaaaggggtatttttctaatctttactttatattatgcatccataataaaaagtgttatttttataaactcacaaactttgttatctactttcaggtccaataatcctagcccaaaagtcaagtttctctcaccaatcaaagacaaagtaaatcaagagtcaaaagactctcttttcacttaatggttcgagccgcaccaagatcagccaaaagacaagtcaacaaaccctaaatactaacgctagtataaaaggtaaactttctaaccctaaacctacttcaatcattcctttttcttctaaacaaaattcaaatctgctcaaaaacacttatcttttctactcacgacaacatctaggtttaagggttctagggttatgttctttgcttcttcttcttctcttctattggcgggtagggttctaagggttctaattggtttcgatttctattcttcttctttcttctacccgaaacaacaatcgtggttagggttgtacgttctaaagggttttactcttctctaaacccaaaaaaactcaagctttttttgcctaatttctcaaacacgaacccagaaaaattcaaccactcaaacacgagaccaaagctccaaaacttaaactaagaacatacaaacacaaatacacaatatcaaaaattatagagattaatatgagaaataaaaacataaaaatgataaagataaagacaccaaattgatctcagagttcacccaatgttaccggatacttctccatcatgctacctcagagcttgaatctattcatcagcaacaggttacaaaagtatgatttacaactttgatttatctcttgatttctctcttattttctctcttgataactaacatatctctctttttgttttttttctttacatgaacaaataaaccgagctatacaaagctctctcagaggaaactctctctcaaggcttatcttaaactgaagcactctctttggctctttcttggctctgtttccaaccaaaaaatgtatcctttaaatatatctaggtctgtgaactgatctggttaggttgagccaccagtgatatttattgtaattgattttgtaactatttgtttcttgatcttggtagagtatgtctttgtaattgtctttatctcttgtgttctgttttttttttcctgttgtaagttgtaatgtgttgtggataaaaatgtcatttcatactcaatgattagtaatttaatactctggttaactgtattattccacctagcttctgttaagcaaccaatgattgttgatgatgctctgagggtcttagctttaatgaccactagggtcagcttcctttctctatccttagcaagttcatgcaatgtttaaacttagctagggttaccaccttaggtcccatgtctgcagggttatatctagtgagaaccttttccattgcgacctctccctatgtcactttgtctcttataaagtggtatttaatctccacatgtttgtttatgtcatgaaagacatgatttttacagagatgaacacaactctggttgtcagcatacactataggcacactactcagcaagtttaactcttttagcactcctttaatccacaccacctcttttattgcttctattgctgagatatactctactttaatggttgatggggccaccaccagttgttggactttccaactcacacaattacatctaatcataaaatagtaagctaaagtagacttccttctaactctatcccctgcattgtttgggtcacaaaacccttccaccaaagtttaattttgtgactgtctaaacacaagtccaacatctattgtcccttttaagtaccaaaaaatccatttcatagccacctagtgtatcttgtcaggcatttccatatacttgctaagagcacttacaatatatgcagtatctggtatggtactctccatacgatacatcctcaaaccaactgcattagagtaggggatctagctcatatcctctttctccttctctaacatatgacatctttcgttctgtttaatgggccacatacattttacaatactctttcccttgggtcttggaacacaaaccatagtcttgttcttcctcaaagagtctgtctcctcattcattgcatagttccacttctttgcatcattgcactttataacttcttcaaaagttttaggtgttggtttttatggtactaaattgggtaagcagcgaaagagtttcgtattatctgattatcattgtaccatatcccaatagatctccatatgggtgtacattaaatcaaaataataaaaataataagtttagagtatatttcttgaagcctatcaaggtatcctcgaaacttctcatacgttgtaccccttaatccagatgatgaggaattgcaattggactcacaccagtgtcttccaaatcgatctaccacacacaaggaatagtatggactattaggataaagtgtataaattttgttcttgttgagttctcaacacatgagcaagaacaattgagggagaaaacaattttcttttctcctctataatttcaaaaatcatagtgttaaagtgatgtcaaagtgttacttctatttatagctgttaaatctcttcaattaaatcaaatttaattgcttaaataaataaatatctatagctgaatttagttaaagatatttatgagagaatctctcaactacttgagaggatatttcaacaactttgaaatatctttaaccacttttcaaattcaaatatttatcgaatttaattaattaaataattaattaatctaaaaagataaaccccatagggacaggacataagctaggcacctacccttgttgtttaagacaaggttggtgtcttttgtcttgacaagtacttttaacttgataaatcttgtcttgacaaattttgttttagcaatttttgtcttttccctatctaattaatttgaaaaattatttatttattacaaaaataaataattactatttctccaattcaaaataaatttttttgaacatctttatactactctttat

SEQ ID NO: 22376 - DNA, 2844 bp, Cannabis sativa
  modified_base (154)..(156): a, c, t, g, unknown or other
ttttgccaccaaaaataaacattagatatttaagtgtataaaatcggaaacattaggtatttatgtcgcaatttaccctattattattattgctgatatagtgtatatgttggatcattattattaaactgttgtgattaatttaaaaattaannnaaaataattaataaattacctgtaacatgtgttgtcgaaaaaatttagacaacatcaaataattgataaataatggatattcaaaagaaaacagcaaatactctacttagaacagcgagtattcaaaagaaactacccagacaatagaatgaaaatggaaaaatataatgaacacaaaggaatatagtggttcagtcagatcacagtctgcttagtctactgttgtaaaggaattctgtcttgtttattcatgttggatcactcctttatatacaaagcaagtgtccttttagttacacaaaaatgatcggttatagaaccgttttacaattaatatcaacattaaattagataaacgtaaaagaataaatgaagtatagttcatatatgttttaataagtatagcaacgtatgcgatctcatgagtgcgagttgcatgttcatattctcgcacaagctcgtaggttttgggtgcattctatctttctacggaggactaataaatagtgctaaggcatctgcgtttggattgagtcgcatgtatggacacctcatatgcgtcgacaacatgggacatgcgagtccctatcgagttatcaaatacgctttgtcgttctaactagttcatgatataaagaagcgatctttacttggtcgcaagagaaggctacttagtcatcgcatgtatttcgatatatgcgcgacttgtataaacattttttggtcctgcttattttatattacgcaaagtgtaatattgtaactagactctgtcatggtcatatcctcccgcaaattcaattcaagcgaggttgattctaaagaagtccattcttaatagctcatcaatcctctaagaatatgattccacgtgtcaattttatagaagtttgatctacacattttttacgtaatcatatatatatatatagcatgtcccattgcataataatatgtatttatcattttttttttttttttacagcaataaaaatgtacaattaagatgctttcaaacaaaaaatgtacaattaagatactttaaaaaaagaaatgtacaattaagatgagccatgccaagtcataaagtgccgcaaaatcatctaccaattgggtttaaatagcattgacatcactcccccacccttaactaacagctgcatcaataaataacactttctcacctttaacaccatattgggtttaacagttgtcagaattgtcgccttatgtatccacttccttttttctttcttttctttctattttttcttaagtaaaaaaaatgtccaaaaaaagacaatataattactgcatgtaatacaaaaatttaacattttcaaacaaaagaaaatccaagaaggaaaaagtttcaatggggataaattccatcatattttctttttcttgattgcttatatatgaagatttatgaactttaattgattggcaaacacctttctccaacaaaaagaagaaagtcatctttgttcacgatcaaaaaaatcatggaaaaagattgcataattaaaacctttagcttaagatcaacccccatcattatttctcactttcattgtcaattttcaagtcatgaatttataatccataaaataaataataagtgaaaaagaaaagaaaacacatttaaacaatttcctaattgccattgccgggaccctcacgacggcgctacccgtgtcttccgccggaattcgcacttccgaaagtgccaccaatttctagtcagttttattgttttttcccatttgacaaaacgacttgtcgtttcagcctcgtttgcaagattgaggacggaatccaaacctgtcgttcttcaaatcatattctacataataattctgttgctgaaaactacccaagatgatggccggtccggtgctgatttctgggccggccacattgttagtcaccatcgttaaacatacaatgccggagctagacaccaaggcaaagtaattctctactggcaaagccattttcgcaccgcctttgaattggaaaaccaattccgggaaattcaccgatttttcccgagaaatatcgaaacaggggcttaaaccggtctgattttctactttgaattctctcttgtaatgactcatttgtttagcgaattccgccgttacggcttcgtaaacaggcttctctaaatacgtgaacgttgaccctgaatcaactatagtaccaccgttaccgtcagatcccgggaccaagtacttgtacggaatctttactctcttaccgccgacgacgatttttcttatgagtacgtagtagtactctttaaatgcggggtttgaggttgatgggttcttctgaaacgggctatagctgattccaccttctgttttgtgatcgccggaacggtacagaacaagatcactgctcactgaagtgtcatcgaactggcgagaaactaagcagtgagagaatttggtgagacccaattgggaaggaagcgattcgattccgcggccgaacccggcgattccagatggctgacgaatcgagagaaaggagcaaccgataagaacattcgtgaaagctttttccgggaaagaaagtgtctcggaaagtaaaagcccagctgttgaaccggaaccgtactggattatataagcagggcaagtctgtgagcagtttcctttttggtcgcaattattg

SEQ ID NO: 22377 - DNA, 4944 bp, Cannabis sativa
gaaattagtttaaatttccaattcaccccctattggaaacatatattgggctaacaaggagctcctctcgccacacgacacccagtcaaaagatgctgcctctcataatattttagcaaacatgaaaggccctccgcacaaatcaaaaagagaaacagagagagcggatcaccttgtcgcaaacctctacttagattaatagggcccatagtaaacccaccatgagtgacattgtatgatagttttgtaacacaaaacatgatgagttgcacccaatgagtattaaaccccatacgaagcatcgtgttttcaataaacgaccattcaacccgatcataggccttactcatgtcaagtttaagagccatataaccctccttaccactttttttccttttcagataatgcatgatttcaaaagcaatcataatattatctgaaatcaaacgacccgaaataaaagcactttggttatccgatatgacaatgggcaacacttgtttgattctattcgccaaaaccttagaaataatcttatataccacattacacaatgatattggtcgaagatcattcatcacttggggctgtttcttctttggaataagtactatgttagtcttatttaagtctcttggaaaggaacccgagacaaaaaaaattctggaccaacttaacaatatccccaccaacaatgttccaacttttttgataaaaaccaggagtcattccatcgggacccggagatttatccggatgcatttgaaagagtgcacgcctaatctcatcctccaaaaccggttccagcaacttcatgttgtgatcattcgaaattgcagttggaatacactgcataacaccagaaatgtcgactgctgaagctgtaaaaagctgagaaaaataagcagttaccaccgtgggaaggccattctgccagtcgacccaattcccagcattatcgcgcagtttttggattgagttatttcttcttctagctgtagcaacgacatgaaaatacttcgagttattatctccttcacgcaaccagagttctttacttctctgcttccaaaaaaattctttctgcaacaacacttcaacaagtttacccgaaacaagtttataattctcaacagaaatctcatccctgcctttcttccatctattcacctccaacttacaatcttttattcttctagcaaaatttcctgagtaatcctttccccactccattaacacctctccacaaccaaatattttttcaataattgacttcatgggatcaacactccaacaatcttgaatgatctttaaacacaacgactctttcaaccaagaattttcaaagcgaaaactccggttatttgcaatcaccatattgttgacagtaaccaaatggatagggcaatgatcggatgtagaaacttcatgattgtaaagtttagcaaaggaaaagaaatctaaccaagcttgattaaccaaggcgcaatcaatattaaactccacccaatccagtgtaccacgacttctctcccaagtgtaaggataaccacacaactccaaatcatgtagactacattcagctaaagcttcattaaaaccgtccacaagccaattcgggtaagggttgcctcctctcttgtctccttgagaagtcacattattaaggtcaccaatgatgcaccaaggtaagttcagtttattgttcagctcattcatgaggtcccatgtttttttccttaaacttctatttggttcaccatacatacatgtcaacctccaatctcctctctcattcccacatatcagcacatcaataaatatgttaccaaattccagcaccttcacttcttcttcaactctccataataaagctattcctccactcatcccctgcacatcaactgaaatagctccttcaaaactgatcccaacacgcaaactttccacaacatcctttcgagataaagtttcacacaaaaaaaaaaaaataaccgggcttcttttggatcacaagatccttaatgaattgttgagcccatgggttcccaagcccatggcaattccaagaaataacactcatgatgactggtgggccggagtaccaaggcccacctttaaaacgttttttgaaccatttacttcctctacattagaacccatattcggcccatgaaaactttcctcatatatacctttctcattccccatacacctcctcttactatccaggaccactagcaaatcttcctcattaattgaatcctcatcacttccagacatagctgtttgaccccccataacatcttttccattaactacaccttcctttccacccataatgcctttattcttatctaaattcatgggatcaagattaactccagagtcaacccgatcaatttccatgattctaggcgagattgaatcacctccaacatttctcatccgcctggaaacactgtcaccaccatcggctccaccgtcctccttccccgtacgaagccactgagcaccgatcaagtaatttttcttcttcatttgagctctcatcccaatcccataaggcttagccacttgttccagaggttgatcaaacctccttggacaaaaccttcggaatgtccaattatgccacaaacaaaacaaaatgttggaagatgttcatattgaaagtttgcccggatccaatccccattctctttacacaatttcattcttcttttcaatcgtttatctatgtcaaccgtagctctaacacgtagataatccctccataaaccattaaaatttttaggatccgacttaacaaaacttcccacatacgcaccagcacttctcaccactttttccaacataaaaccagtttttagcccatgaatctgaacccaaaaatcaatcttattcaaaacaacagattttggatcctctccttttttcagacgatgaaacacaagagggcacttgttgaacgtccaagggctgccatgtataaccgattgtatatctaattcatggtagaattgaaaaagatatcgattagtgtcgagttctttaaagtataccccctttcccggctgccaaagagaggccatcatatgcttcatagcatcaaaattaatcaaaggtccttcccgtaagaaacttccctactaagcaccatttgtcattaaacaaagcttcattcccttcatctttcccaccaattagaatcccctcctcctcatccaccaaactgatttgtccatatcgttcattaagatcaaaatcattacgactactcgaagccatcacaagcaaaacaacaaatagcgaataacttagaagcactcaaaaaacatcagacaacatgttatatgacaagactttcaatattcttccacactctaaacgcttttgaaaccagtttgattccacacaatattgatttaaacttttcctataattgacttgtaaagtcacatatatttactatttttttgtgtgtatgtttagattgaatatatgagtttattgtgctagtaaatgtgaattatataaattagaattgaatgaatctaatatcgagtgcgaattatttttcaggatgacttagaaaaaagacaagtaatttttctttatgcctatgttgtcttagtggtataattaaaaccataagtcatgaagtagaatgagcacatattggtttcataaacaactatgttaacaattactatttttttttttttaaaaaaaataactatgttggcagcccttaaaacaacccaatcgcatatagtaactatgttaataacttttacaataacccaatctcctacaacaataatgttaacaactcaatctcatacagcaactatgttagcaactctttcaacaattcaatcgtatataacaatcatgttaacaactcttacaacaacctaatctcgtacaacgatcattttagaatccttacaacaatttaatatcatacaaaaactattttagcaatccaatctcatacaacaatacttagagaaattcaatctcctagagcaaacatgttagcaactctttcaacaactcaatctcatacaataactattttagcaaccttacaacaaccatattagcaatccttacaacatgttagaatttgggataaggtgaatggggttccatctcaaaactaattggctatgggaggagtagtctttccacacattagcgatgtgggactatctaacatcctccctcaagatggtagctattttatttgctcaccatattggacaacttgatcataagcggctcttttttagctcactatccctgttgatcacaagtggttctttttgctctactttttgaatcggtattttttttgtagctctttttattttttggctcactattcctgaatcacaagtgacttttttaactttggcttttggatcaattttcttagatttttggtggcttttcttatggtattcacatattaaaaattataacaatcatgtccttaagtcgtaaattttattccaaaataaaccatataaatttgactcatttatataatgacccaatgcatattttatatatacaattgtggccccaaataaataaatttctaacaatcttccactaggctacatatgtatgcatataaatgtgtcaatcttattgagctcatatctttgtcatcataaccatagacatgcaacctcctccattaattatatcaacataggatcaaagcagttttcattgtatcaatcacaactaaacccatcaatggtcacatatattgacaaagtcaaataacatagatcaatcatgatagtgtggtatgaaaattacatgtatgatgatctattcatgtcaattttcaattggtcctactttactttatggagatcaaactttagcttaaatgtacaaagtgaaataaactgaataaca

SEQ ID NO: 22378 - DNA, 3313 bp, Cannabis sativa
  modified_base (2948)..(2950): a, c, t, g, unknown or other
  modified_base (3255)..(3281): a, c, t, g, unknown or other
cagaacccagaaactgggaatgagaaacccaacacaaatgctggcggttctacgcctgtgagtgagggtgcctatgaccccacaagatacgtaccgttggtcgagttggaaaatcatcaattctgacgacgcttggaggaggcaaaccaacgaaaccctgagttggaacgggaggcagccgcagccagggcggcacaggaaaacaacacacaaaaccaactagatcctggagtgaggaggccacgaggtagacttcgcggctcacgaactaggaggcaggaaatggctcaggaaaaaccccaaacactcaggaggagcaacctggggaaactagggatgcacttgaagatgaacaaccagatgaccaggcacctcatcaagaagtgccacagagacctcggggatttacaacttatgtgaatggaaactgtgatttaccagagtcttctcgaagaaatgcaaatagaagtcaacctcggactagggaacaggaaatccctcgtggtaacgagagagatcttgggactcaacctaggacaagtgggttgcccccgagacatcgtcaacatccttcttgcactgatagggaaaggagtgtatacaatccccagcaagggacatgtatcaacccgttcccaaaggagaaggcccgtacatgacgaggcaagttctcgctcaggacgtacaagatctcgatatcatagtcgatctacgcaaggaggggatagaactcgtcgcggtaatgatcgacagagtacgagcacaactagaactgaaagctactcaaggataaggtctgtaagtaactatgacccacaatggctgaatctttgtgagcaattgaaccagaagaagcctgacttacgtcaataactcaatcaaaagcaagaggatcctatccaattgtgaatcattgagttggaggaaaaatttaggagataccaagatgtgaaatatgggaaactgcctggttacgactcagacaaagaacccgagcctttccatctagacattatgagcattgaattcccccaaggatttaaaaaccctcacgtctcgtcatactataggactacgaatccggtcgctcacctaaataactttaataccatcatgcgagccagcaatgttacgaataacttacgctgtattttattccccaccatgctaactggggcagcgagcagcttgttcaacaaattcacccatcactcaatcacctcttgggaacagctatcaaaagacttcaagaaacagtttcaggcagcaagagacaggcgacctaaagcatcttcccttactaacataaagcaggaaccgggcgagacacttaagacctactaagtcgtttcagtacaactgctgcaaggtttagaaacttgaacgacagtatctagcttacagctcttcaagcagggatcacgactgatctctcgacagttggaggtgaattgtgggattatttacaagatcgcccagttaaaaacatcagggagttcaatgagagagctcaggtgtttgttcgaaaagaggaagcaaggaaagagatgaagttgttaaagactggctcgggaagtaaacccagcactgttttgacaaaggctaacaatccaggaggctctagtacaaagaggaaagatgactctaaggaatcaaccaaagataagaaaaaacagaagaagcacgacaagtacgtgccaatctacactatttataccaagcataattaatgaaactctagaaaaataatatatatctatctacctcgcacatgagcacaaggttgcattctacaaacctgagcccatgagacatgcgagacacaaaagagatgcaacaaaattttgtaaatttcacaagaacatagggcatacgacagaagaatgttgtcaattgaaagacgagatagatatccttatctcgcgtggttactttcaacaatatgtgaagcgacaaggcaatggacaaaaccagccaaatccgcccaataacccaggaaaccatagattacaacctcctcctcttgaaagagaagacattctcgttatctcgggagggccacatctcactggagaaagtaacaatgcccaaaagagatatgtcaaggaagttaagaatgaacagtcagcctttgctccagaatcatctaagaaagctaagactgaggaacctccaattatgttctcggaggaaggcgcaaagcatgtgagatatcctcatgtcgacccactagtgattacaatccagcttcccaataaaagaataaagagggtgttggtggataacgaaagttcagtgaatatcctttataaggatacattgaagaaaatgggactggaaagagcaaagtgaaaaccttacatggtaaatctgtgtggatttataggcgatagtgttgccagtcaaggaataattgaactcccattaacagtgggcgagacgcctttatccactaccataatgcaagattttttaattgttgacctgccatcagcctacaacatactgttgggtcgaccaacgttaattggactagggacagttagttcaattaaacacctatccctgaagtttcagacatcaataggtgtaggggtggcgcgaggtgaccaacttctggctcgtgaatgctaccgcatagagctacagaatagaaaagctggtcatcaactaatggcagtcacaactgaggaatacgagaagcaggatgaggatcttcatcctcggattcaagatgaacagaaccaattgaggaattggaagaaattatttaagatccaaaaaatcccacaaattgtgtattcattgggaaaaacctggataacaaactaaaatagcaactaataagttttttaagggcaaaccaggatcagttcgcctggagccgctcagatatgatagcgattgaccctaaaattatttatcaccacttgaatatcgacccaaannncccagccaagagacaaaagagacgacccttggattttgagagataaggggcactcaagcaggaagtggataagttgttgagtaatgactttatacgtgaggcattttatcccttgtggatatccaaccctgaccttgtctcaaaaccaaatggaacttggagaacttgtatcgacttctcagatttaaacaaggcgtgtccaaaggattgctttccactaccaaggatcgaccagttagtggatgctactgttggacatgagcttattgttggaattattttaccagggtcttagatctactcannnnnnnnnnnnnnnnnnnnnnnnnnntgaacttctaaaacgattataagtaaacacat

SEQ ID NO: 22379 - DNA, 4793 bp, Cannabis sativa
attttaaaatacaatgtaattactatacagtgtaattactagggtagtaattacactgcatagtaattacatagttgtttccaaacagaccctaaatatcaaagaacagtatgaagttagaattggtgtattaagtattcatttaaatttatatgttagaaacttattttaaagtgtgtgtcatttttagattatatcttttgcattgtatgttttttttattatgttcatgacgaaattagttttctgattccttttattatctttatcccattttgtatgcttaaattaactctaattttttaaaagcaaatgaaagattgaatgttaaaataaagaatgaagttagaagtttagttattagatattcatatagaatttctacatttgaaactggtttttaaagtttgtattatttttagatttttttttttgtattgtctttattatgttattgttgaaactattttttttctgctacttttgatgaaataattagtttatccaatgatgaaaaatacagggtaaaactattttttaataaccatttttagagctgaagcaataatatcatgggctttggcacataaaataatatttatctaatcttttgtttgtaatgaaaacatgaaatcatcagtctcgtacacttattcatttaattatttcacatggttcacaggtttaaaactagtattgcaaggttcacatctatttgaaattgttttagcaggttttaatggttttgaaattagtttcacaggtcttaaggttttgtaatagggttgctctgttttatgatgttattgtatattttacttttaagtttctttttattattttgtttctaggttcaaaactggttttcacacttatattttatttgagattattgttgtgcattgtatgttttattgtatcggtagagttttctttttgtatttttgtattttattgtgtatgagtgtgtgtattttctatttggttaactgaagaaactagtttcagttatctttaatatttctcatttatgttttgttttcataattttcatttttattgtgtaaccaaactgattttgtttgatttttcgaatgttcattgttgttgtaagatgaaactggtttcgatttatttttattttttgttcagatggaatttgattcctccaataaggatgcaatgaaagatgttgctaacgattcaagtgctatctttgagaagaaacttcctctaactaaaattaaaattcttaagaaggttaatcacaagtacaaaaaagtaaatctagtctaaattttaagggttcatctttggtatgtattaatagaagcatatatttttttaaaaaaaaaaaattatcttcttatgtatgttcatttttttagtttggttatactagataactggttttcatgtttaattgttgttttacgtaattgaggtttaagtttcattctttcttttgttattttacgaaactggttttactgtgtcagatgtaatttgcttgctttatgtaactagtatttttgtgtcactttttaattggttgtttaacataactggttttagtaatttatctaatgtaactaatttctctaatttaattgttatttactttcttttttttttttttgataaatcagagaaatttgtattgcatcaaatatctttacaacctatccatctttggtttaaaaaaaccaatttatttacaacaattcaatccacctcttattctccttactaactttttttatcaaaaataatctaattctatatttatcatcattttcactcttttgtataacactttgaattccagcagctttcatttcggtttttccataatgggtagatcgatgctgtaatggcagcagccatcaccctccttcggctcttttgagagctttgatcgggccaaccacctgaagagatgtgaaatgctacctgctcttgtactccatgctagccaatttttatttctgttagacatttcaagctaaaagtacactcaaaaaataagtgttcaatctattcctcatacttctcacatattacacattttgtatccatcacaacattaaactttttcagtctagtctttgtttggagacgctttagcaccgaaagccatagaataaaactatgcttcggtacattgagtctattccaaacaacatccgcctaatgaacctttggttagttttcaacaagcatttgatagactttattaatgttgtatgtacctgttataagtggctagaagttgatgcctttgagatgatccttgacagccacaatatgcttcaaataccaactccccgagggtgggactttgtaatcccaccaatctcttccttttaagaacatgctatgtatccatctcacccatagattgtcttgtttggatgagattgcccatacatatttcctaacgacaactatgttccaagttataatcttcctaaagtcgagccccccttctttttttggcttgcatatttttccccatgcgacataacctaggcatgcacattctaaattgcctttccataggaattcctaacacacgacattaacttttttcaagagctttttagatagaatcatgatctgcgtccagtatgtgtgaatagagatcaatacagaattaatcaaggtaacactacccgcaaataagatgtttcttaagctccaaatgctgattcttttcgtcatctttctaccaaaatttctgattcagtacttgaaagtttcctggcagcaatgggaatgccaagatatctaaatggtagtttgctcctggtaaaacccgaagcgcttaacactctttggatttcaaaacatccatcccgctaaagtaaaaagttgatttggaatcacttggtagaaatcccaaagtgttcgcaaacaacttgagaccttgaagtaagaaataaatggatttgaaatccccatgataaaagagtaatacatcatctgcgaagctcaagtgattcaattgaagaaccttgcatccttcatgaaattgaaagtcattcttttttccaatcttaaccatgattcgggaaaaatattccatacccaaaacaaataagagaggggacaaaggatctccttgtcttagactcctttttgcttcaaaaaagccatgtaaagatccattaagaagaatcttaatcttggagtgcgaatacataccatgattagtttgatgaagcttgccgggaagtcaaaagcttgtaacatctcctctagaatgtcccactctattgttagtttcttttaaaagaaactagtttctatgtttcaatttatctttttgattgttttaggtcgtattggtatttggttttccaatttagttattatatttattgttttacataactgactctaatattctaattttaattttgttcatttaaataatttatttctcaattatagttttaactagttgattattgtaactagtttcagtgtgtcaaattctaacaccagtgacaactctaatgcctaacttcagtgactttcgtgtaatgaagtcaactctaataccttttttgataattaatagacgacgataacaacttcagcgaatattattttttacttttttttgtggctaatattttattttcgcggataatgattattttgggtagtgtagtacgttgatggttaagtcttggagcttttaaaaagtttgcaactagttttattttggtattgtatttaatttattcaatattctatataatatctagaatacaagcatgtaaaatttatgtacaattttcggtatctgtaatgggattattttttttcattaagataacaactctagcgtatatactctcattctattttctacttcttttgcggctaatattatgttttagtagataatgaatattttggtagttggttgatggtctagtattagagtttctgagaagtttgtaactaattttaatattagtattatgtttttattagtttttttagtgggttgatgatcaagcttttaagcttataaaaaacatgtaaaatttatataagttttggtatttgtacagttagtttttttattaaaaaaataatttttattatatggaagaaattattttattaatttattgccttactaaaattatattgctattattttagtttttagatgttttttttttaaaataagcttttatagttacaatgttttgtctaaataactaactattttatatgttagaaaaatgaatcacaatcttatagttttttagggcatttatttttatttataataatttttctaatattttaaattttttatacaaaatatcatatttataaaaaaaactttgattttttttttcttattttttgtaaatagcccatgcatctatgaagataggcctgctcaaatatatgggccaccaagataattttcaccggttgtttgagcccatgtggatgtctctttcgtcattttaacatggggaaaacgaaatgataggaatacgatttttacaaaaattattactttataaaaatgtcataatatatctaacattttagatttgctcaagttagtttctttttctcttttttcactttcatataaacgtaaagtaattaaacgtaattatacaatttgacatgtttgtctgatcatgtatgtaattatactataattatgtaattgaaagtaattgagagttctaattagactcttcaattctcatggcctcatgagaattgaatgtaattacactgtgtaatta

SEQ ID NO: 22380 - DNA, 1902 bp, Cannabis sativa
tacaaaagttggcctccatctccaaaggctagcctccacttgtcaaagttggcatgaacatgacctataagatcttggcaggcatatggccggccagaccctggtatgcacatggtcggccagaccctggcaggagcatggctggccagacctcaacctacatagattgtatggcctgccagcctatatcctataggtacatggccgaccagcttttccctggcaagattttgatgtgcgaccctcatacgtggacagcaagccaagctgcaagttgggcctcgatagctgggcttaaagcgagtgaaactcatcactaccttgtaagggcgttgagactatagcatgttacacgaaagtgccgctttctctgtagtgttgtcacacaactacccgcctagaagcgccactcactttgtagtgttgtcacacaagataagcacgctgcctgcctattggtcgagtgaatcgaagttctcttccagtccactgtctacccaatcaagtgcaaaaaacacaatagaatcacgcaacgcacactgctggtgtgcttcttgcccgcgaggaaagaaaggcttcatgtttcactacaaagcttttgttcgtaaatttgaagataggaatttgtgcgttcaattcaaaaagattggatattcaaatgctatagttattaggaaagaagtagtattcaccgcttataagggagttggtcgtagacctatatctctcttgtttcgagaagagatgataataactcagcacgattggtattcaagtaactagagctttgttgcgtactttttttttggcataatggcttaaagctcagactttcactattgttgttaatggatttgtgtatcactcattcccaggtacaattccctgaacgtagtgcaaccttcagtccttctgaagtagagaaggaactacttcttacaatccctactgcccggcattgctcctcaaaatgacgctagttgttcagcttttagaactaacctaaatagaagggaaaacctagtgtgacaagctgactgggattgaatagctatcctttctaactacggggcaaagaactttttccaccaagccatatgtcggaagactaaacgggattgaaattatgggaacactgcatgagacagtatgattgcgggatcacctcttggtacgtctaagatggtattttttatcctattttcgagcctatctcgctagttcattcaagtttatatacaagcttggacaattgtccttccttgtacattttgttcatccaaccaccacccatgcttcagttcaaggaaaccaaataaagaaagccaatcgaaaatgattttatcactacgaatcaaaacatgttgccccattgactaagaagggggcgggcgcagtttctacatggaccccttcctttctgttgttgccagcggttttccaggctgagctggaattttttattataaagggcaggaaaagcccgaaggctgctgtcccaataggtcagcggccagaacgaggagaggacccagtaaactttcctattttcaagggataatttagtcatttgaacattattatttaaatatgtaaataacaactttattttacctatttctaaggatattaggcatataagctctactatataaagagcattagcctatctttaaaatcctaagtcatttaagcctccaagctccctaagctctcaactctaagtctgaaatcctaatcttctcttttccctctctactacaagcccaaagggctctttccctctctctcgcatgtctctaaggctctagctctctcgttagagacttacctactgattcatacattgtaatcttaagagagctacttcagatcccatcactatagtgatctgagtagtat

SEQ ID NO: 22381 - DNA, 4224 bp, Cannabis sativa
aggtctttctgaagcttagccatgcccgtgccagggttatgaggtctactacagctttaaagaagaaacttgagagcaaggatgtcgagctcagggcaaagaaagctgatcttgcaaaggtgcatgctaatttggacttatcatcgacccgtctaagggagatccaagatcgatataagggtgtgggtcaactacttggtctccgtaaccaagtggtgacaaatctaactgatgataattccaagctgaagaatgaactggataaggagtgaaaggagaagtaggtagctctctaggaaaagtaggtagctctccaagaaaagtagaaggccgttgatgggcaataggcgattagggatgagtatttagacttgtccatggaggttctttatgaggtatctctgcacaaccctgacgtcaatctgaagtacatggagtcgcccatttatgagagctggcttgcgtgagggagggagggaggtgtatgagaataggccatagatagaccaggctggccaaagtgaggaggtactagccggcaagacccttgaggtgccttttggccagactactagaacattggtcgaccatcttatggatgaggtgccatctggccagcctcctattagcaagattgcagagcctgcccttgaagctccatctatccaagacacaattgacttaaacccacctactcctatgattattcttgaggatatttagagacttacgtttttttttgtcttctatgcttttattttgcatgctttatttcttgttcttgtatggcctatagggcctttacttttgagcagatgaccaacctggcagtttttaatcatggctttaaattcttttatgagataggtaggtgtctggacttatgctttttatgtataatatgaagtattccttttggaattacttagttttcaattatttgcttatcaaagctttaaattttgcttaagtttgatgtgcttgttcaatggtgtacgatgtgagtgcctccaagtgatttagcagacttattgtctcttggtcactggtgattcaccaactactatacatctttgcctgtgtattttcttggagagaccagtttgtatgcatgtggaactaagaaaaataaagattaactttaagaagttatcttgttaacaagttgttttacacaatattgaaccaaaataacatttttattcattaattggtcttacatatgtgttgttgttgtgcaacatacattttttggttctaaaagtttacaaatttaaagtttgcttttaaaactcattctatggctaccgatacacgacatgctgagcaggggccatcactgaatagtgatggaaacttagctcttttacactaattcctatacagtgagttgtatgggaacaactactaaagagtagtgtttttacaaatttctcactggtaatactttctaagctattttccattctagtatcttggtggaaaaagtaattccatgttcttattatacctgccaagcttgtacacaactttacttgttatctctgtaacttggtacgaaccttcccagttttgtccaaacactcatgccataggacctttggtactcaggaataatctttgaagcactatgtcccctatgaagaatttcctttcattgacttgcttattaatgtagctggcaaccttttgctagtaggcatgtagctttaggtcggcttggcctcttctttctttttttaatcaaggaattctactagcacggtgtggttaacttcttggtcatatgatgtcctcttatgggccagtagttcaagctctaccggtagcattgcttcatagctataggctaatgcaaagggtatatgcctgatggtcgtcttctcagtggtcctgtgttactagagtacctttgggagtaagtcaagccaatcgccttttgcctcctttagatgtttttttatagtgtccttgagggtcttatttacgacttccacttgcccattcgtttgagggtgagaaactacggagaagcttttaatgatgttgtgtctattgtagaagtcagtgaacatgtcattatcaaattgtttctcattatctgacaaaatcttctgtgggagtccaaactggcatgtgatgtttttaacaacaaagtagaggattttcttagaagttattgtccacaatggtacagcttatgtccacttagtgaattagttgattgtgactaccacatattgtacacctccttctcccttagggagttgacttatgagatctattccccacacagcaaagggccaaggagagtgtattagtgtgagctcgtttggtcaagctctcaggttctttgagaatctttagcacttgaaacatttcttgacatagtccattgaatcctcgatcgtattaggacaaaaatacccttgtctgagtatctttttggacaggttttgcccccaacatgacttctgtagaagccttcatgaacttctactaataatcactaaacttctttcttggcgaaaaatgttaaaagtggcatcgagaaaccacgtctgtacataaccccattgaggattagatgccgagcaacttttctcctcatttttcctacttcatttattttttctggcaagattcctaataactttgtggtatatagttattttttattggaattaaacttgatttatcatgaagagagtaatgaaagtgtgttgtttgttaagtttgtttagtttttgacttcattttctatttagtatgctagcttttgagtcttatgaaattattattttttagttgtatttatttaattaggtgttgcttgtttgttgttaagaaaggagagtcaaagtgccaagggaaagggaatggtgcgaggtcaaattgggcatggaagctaaaactaggatgaattgctgaagcaattgccacaataaattcagcattctggacagtgatgtggacaaagtgcaacagaattttcattagttgaatcagtgcagaggtggtagtcatttaaatttacgccaactagctgacgtgaaaataggagaccaaggctagtgggctaagaaaagaaggaaatgggcttctattttagggtattggattgtaccctaatgacctaacaactaaaaaaataagttcagccaccatcatcacaccattaactaagtattgaaaatcatgtgtcagaaagaaaagtactaaaaatcaagtgtctaaaagaggaagtcaagcgagaaagaaggaggaggatacaagcttcattagtttgaatttctattcttcttcttcttttgttttcatcctttctttatatacttggagtttgttaattttaaagactaagtagtagccatagatgaactacctttatttttggattctaattactggtttaaacatgagctaagcttcttgagacttgaatggctatgaacccctatgttttggtatgattaattttaagtatgaatttaacaatgtttcctttgttcattcaagtaagcttactgtttattaatttttattacttggccacgagtaacaatttactaagctagatctagttctagaaaggctagatctagtagttacaacttggatgatgcaagtgaattcctaagtgtacatttttgttagtaaatggaatagagatatttcattaccttgcataacttgagaattgatgtttaattgctattctgcaacttgatttgatataggaatatattaaactaagtggtagaacttaatatgtgagttttggcaaaatctaaaaaaaaaaaaaaaatttaactttgtgcaactttgctgaagtgatgctaatgtaatgctgaaaaactgggcagatttaatatagggggacatagctattcaagtctattattccacagatacttcttctagcagataattttctagtatttgttttcttatttgtagtttatttttattgtcactaatttattttactttcatcaatcattcattctttatttttgtttattattctttgaaaagatctgaagttgttaattagttggttttacatttattttaatttgctatccttatggagatgatactcaacctatattacttgttgtagattgcgtgcacttaagtataaatataatttttcacccactattgtcgtggattgatactaaaaattgtatattatcatcatttttgtaatttatttct

SEQ ID NO: 22382 - DNA, 4939 bp, Cannabis sativa
  modified_base (591)..(598): a, c, t, g, unknown or other
  modified_base (2381)..(2393): a, c, t, g, unknown or other
atttgagttaaaaattaattttaaattaattttaaatcaacttaaatcaagtaattttcataatatttatttaaaatatataatatatactaaggatggacaataaattttttaatctattttcaaatcaacttaggtaagtattttaataaatattaaattacaatttatattagtttatctaaatttgtaattttaattaaataaataaatatattttaaaatatacaaattgaaaaaatatttaaaataaaaaaaatatttttttttttaaaaaaaatataataagctttaagttaacatattcggtcttcattgttggtcttacatggttattattttaatgggacctcgtgacacttaacgtccccctaaaggatggttatccattacgaatttaataccattagatcttaaaagataagtattttgtaatttcaatttctaagagctccattccattaatgactacttagaattgggttacacctatgaaacaatggtagaagcttatacaataagaatgaccttggctgtcacctaaacgggacaactttgaattcttattttgatcgaataaaagattgttannnnnnnntccattttagatgagctgactattctatttaacaaatagtatcttcgactctcgtctaaatgtgacactgtatcatttagttaaagaccttagaaaatatttgagatatatttgttttgtatttttttttccatatctttgttacttgctaaatgtttataaatattcagaaattgtgtatgcatttctattgaaccagcattaatttctgttattaaattttgtagtatcaattttaatctccattgttggtcttacttagttgattgtttttaatgggacctcgtggcgcttgacgtccccctaaaggatggtcatccgttatataatctaatagtataagatctcaaaagataggtattatgtaaatgaaaagtctagttgactgatccctaaagatgatgacttaaactagtgtttacaatgttgaaaaaatagagaactcataaaaaagaagaataaatttaactctcgcctaaacgggacgtcgttggattcttattttaatctaaattgctctttagctttcctcttagctatttcattaagaaataattgtgtaagatagtacatcattagagaggaatgtttataaacacccgattatgatgttgctctattttcttctaagaaaatgagtggcacgaatgaatatattctagataacagtcgcaactgatgttgcaacactaattgcaattgatattacaacccaaattgcaaccctaaatcaccattaaaccatatcgcaatctcaatcatgctctgttgcaacttaaattgcaccccaaattgcaaccctaaatcactattaaaccatatctcattctctgtcatgctcaatcacagcctaaattgtaacccaaatcccaaccataaatcaccattaaaccatattgcaatctcaatcatgctcagttccaacctaaattgcaacccaaattgcaaaccctgaataaccattaaactatatagcaatctcagttatgccccattcgcaagccaaatcgtaatctgagtgcaacctttcttcttcttcctctcagtcattctcttaagacaaaggtcagtaatttcaacaatgattgttgaaaacttgtcaaagctaaaggagatgatttcatatgtaaagttttagaccacttttttcttcgttctttctttgatggaatcgcacgtggtttcgaccttagttttgcaaaataaaaacttatatctatattaatgaaaaaaattttacttacactatttgtgaaaaaataataataattgcgaatgaataaccccataaaaatttgtgctttaatatttgtccaaaaaaaaaaaatagaaataaaaagtttgtgctttaataaataaatcaaacaaatttttgtttccacttttataattacatatatagtagaaattatatgggaaaattataaaaggttatttttttttatggcataaataaataataccatgagttatgtgttttattttatttatttattttttttttatatttatatgaaatttttatgccatatttttataaaaaaaagatgaaaatttcatatttgtaaaacaataataagtttctcctaaaaagtcactagtatcggaaaagtcaccagaaaagttattgtcacaggaaaaatcactaaaaagttacagacaaagtcacagtcgtcgaaaaagtcaccatcgccgaaaaagtcaccagaagtagatgtatcagatataaataaaaataaaaccggttctgtaacatattaaataaaaacaaataacacaaaannnnnnnnnnnnnttataattgaaatataatcggttctgtaacataatgaataaaaaaataacacaaaataacttaaacagttataattaaaatagaaccggttctataatattgttacgataaataaaaataaataacacgaaataactcaaactaattataactaaaatagaactggttatataacatagtgaatgagagttttgaggtagatatggtatgagtgtaattatttggtaggtttgagcatattgaatgaatgtttttgtttgagttagtttatttaactaatttttgtgtgtgagtttttatcttagttactttacagaaccggtttttttttttgtctcaaatctttaactagttaataaatataatcagtttctttatattatattctgagttattgtgtgttattatttgtatttatttattttgttatgaaaccagttctttttatatttatggttcaatatttttgaggagaattgttcctttaaaaaaaaaaaaattataactgattttatgaggtattatgtgttatgaggtatgttgttatgaaactagttttctttttaatttatgttttagtatttaggaactaatttcctcttattttttttaattgtaaactatttgagttattacgtgttacttttctgtatttattatgttatataaccgattttattttagttataaccggtttgagttatttcctattatttgtttttatttattataatactattatagatccggttctattttaattataattagtttaagttatttgtgttatttgttttttttattcattatgttacagaatcggttatatttaaattataatcgctttgagttatttgtttttattcattatgttattgaaccggttctatttttatttatatttgagacatctacttttggtgactttttcggcgaagataacttgacaatttttttggcaacagtgacttttcggtgacttttccggtggcaataaggtttccagcacctttctggtaactttttcggcgtagataatcttttttagtggaacttattattacaagttttattaaatttttttattattattttttttcatatttttaagtgtaattattttttaattctatatttttttgcgttatttatttatgcctataccgcattttcctatatttatgaaaaaatcccatgtatataaccgttgtttcccagcttagtattttggcggattcctctagaggaagaagattgtctgcggggctttctccattcaattttcttttccaagttcaattttcctttccagctttattattaatcaggtaatatacattaatatactctgattggactttctatttcttctttccttttccaatcgggcttcattgatctcattgttcttcccaaacccataatgatgggtcttgttttttttttttttcaaacttaattcttgttctgtctagttttacctgaaatggattaggtctattattagtgtttcatctaagcaaagaacataaaacaaaaatcaggggtttatagggttatttattgtttctatcgtaggtttgctaactttctctagctgatgtttcatgggtggcgactattataatctgcgtttgcctctttgttgaagatgggacatgggtcggtgaaagtccacttagttctctgagaaatattcaagagctgtttggtttgaagaaccagattttcaatccagtcaggttcgtcttttattttcaaatgtaacatttttgcaagaagaactgtagcacattctcggcttttatttttgtgtttagtaatttattttgcaacagttttattctctaattaatatcatgagctctctttttgctgtttggtttgatctatttactatgaaattgctgaggagtgaatcaacatccattaaaacaaaatatattatctattatagttgaagtcatggaaatatggggggttaagtctattgtgtataatatacttaacagctttgtggttaagtagtttctgaaaatttgtcatttcgtttcagtttacactcaaataattgtaaattagttgtaaagttcctgaaattcgtttggaaatcacagctttttaagttctttagaatctagattatgttctagctgtgtgaacaaaaattttgctaatcatgaaagaaaacaatgtttgagaagggaaattgtatatacagatataactcataggaatgatggatttgttgaaattctgggtttatactttgaatgagtactagttgttatcatatagtgtatttttcttttgatgacaaaacttaacttgtcaaatgtgtagcaacatatgctatttaacaacttttttcttttttaaaaaaaaaagagaaagagaccacttgtcttagaccggcgtccccttgatataaattgaaagcctcacttatggcggaggaaaaccatggtaaacagaacaagaaaacctaaagttaatcaacaatttgtaacaataagcacaaaaactcctaggaaaaaaatgcttat

SEQ ID NO: 22383 - DNA, 1180 bp, Cannabis sativa
catgtttcgtttttcagataaatttacatatggctaaaaaaatggagaaacaagagtagtgaatatacaaaataccatcatcttcatcatcataattatccatgtcaagctccttcaatccatcggttatgtcattaaacttggcctcagtgtcagagtcttttgaggctttgatagacttattatcaagcttctcactttcatcatcttcctcaatattattattatcatcatcatcatcatcaccgccatgattactatcattacgatcaccatccatatcctcatcactatctccactatacatgattagcaaaaatcacaaaaaacgtacgaaattcagtttaaacatctcggaataatagttaaattagaacaaacacaaacaccaaattaccttctttccaaggcaccactcttgacaatttcttcaatttcttctttggaaggcaagtcagctacagaagggattggcttgggtgctcctttgggaacccatgaaatagccgttatcataattagaatggagagcgaagaagtccgtggcagcgggttcaaaacaaacgagtctagaattgtagcaaggcaccaccaaaccccttaaaccagaaggtcgaagacaatgaagaaggagatgacagtagggttttagacttctattggacgagtaaggaaattgggcctttctgatgggccggagcgaaagaggaccaagggagttttgtggggtaggttgaaaaatagcatttttttttaatcaattaatcaaatttaccactaattttatatttaattgaaatatacccctttttatatgtattatactcaaatcacatagagagtatcttgaagtgacatgggtaaaattggtacaatgtttaaaaaaagagataaaaatgatagactttaaaaaagatggtaaaaataaaagagaacaatataaaaagaatttagagtgtaatttcttcgagtgagttgtagtgtgttttgttaagggaaagagataatttcacaaatacacaaaaacaaaaaaaaaattataaaaatacagtttcatagaattttaaatatttttacaaattttttaattttatttacagcaaatatggtctttttacgttatattcatgttaatttgttgttgattttttgttacctgcatgttattttttgttgttgt

SEQ ID NO: 22384 - DNA, 5900 bp, Cannabis sativa
gtatctatgccttctatttttggtttatttgttaaagattgtcaagttattttatcttctttaagtaatgtttttattggtcatgttaactggtctgctaacaaaatcgcgcactgtatggcacgtggtgcttgttattggtcaggtcgtcttttttctgagagtgatattccccttgctctttagtcctttgtattagcggatatttctatctatttttcaattcaaaaaaaaaatattttaaaatcaattaaataaagaaatgaaataaaaattgaaaaataaaattgtcaatcaaaaattaaacagagaattagtaggaaggaaactgtaagaaagaaatgtcaagcttgtgtataactaatatcttccgaagctgtaatgaaaaacctattattcacaagagataatgttttaaagagctaaaacattggattaattattcactacccatctctctaatttcagttagactatggatctcccctacaactttgtcctgcataaattgtaaaaactcccataatcctgccacccaacctaatattttatcaactaataccatattcacattattctgtttgcactactctccaactatttttctcctctagtaaaattacccagctttcattacttgcccgctgaatccagcatcgccaagtactcgtttatggcttcaccttctttggtaacttcaatgtcatagtctgacaaagcgtcgacttttgctagtccatctgcaagcacgtcctccatctcttcatcacgatcttctactttcccagcagtagatgaacctccattatcttcttcttcttccacaatatcatccgttaatggaactgaagaactcgcaacggcgtcagaggcagctggaggaataggcgccgattctgtattgttgttagcagcatcatctgtagggtttgatgcagattgctgttgtgacagcaatcgaagcatcgcttcctcgactgtcccaccagcctcaacagcttcacttgctgcagaaaaagttaaaatagcagcagagtatagttattaacctcaaagcaaacgttttttaggtagaattagaaataaatataatactctagcaaagcattgtcatgataaaaattaagttctttctcagtcacctcttgatctttcgaaacccatttgtacaagggtttcaattgaagcatcattagctttttgctgtctccttcttttccttgattcaatagtaaactacaaataaaaaaattagttcaagcaccatacgtttgaacaacttaataaagttatttagaaaactaagaaacctgaattgaggaattaatctctggattagtcaaatcatccaatgacttctgagtatcattctcatttcgtcgaagtgcttcagctgcaagctccttctcaaacctacaaaatccatcagatacccaaaacagacatgatatgcgcgttacacatttaattaaacaaaagaaaagaaatcgatatcgatttaatcaaaacttaatgagattaaaaaatccattgagtgaaccatgtcatgatatgatcaatcaactctcatatcagaatttctcaattaaatttctaatagataattatgtgattcgacaaaaataaatagaatagaaaagcatatcatatacttattgtgttatcaaattaattgattttccttttgacacaaatccttaataggatatagtatattagtattcatcaagcagaaagaagctatcttaaagagatttttgcaaaaaagtctaagacaatgagcctctcatattcaaataagtatgccttataatagtaaatagctatgaagtctgtgttcgtgatcaacacacaaaggttcattaatatgccttaatattaataatagatagctttatagttttgtccttacccaatagagaccaattcattcaacttctggagatccacagccttctttaagggtgtccttccatatgccttttgctccctgcaaaattttggccaaattaaaactacagatagagaaacatatcttataaatcagattattaatgagactcataagactaacatcaactccttttgtttctgaagatcctctacccttttctgtagcctctttgctttttgttcaacaagaaaatcgatggcactctcaatatcttgattgctcatccgcaatgccctctttgcatcgtgttctctaaagcccatgctcataacaagtgacaaggcttcatcaggcacctgtagctgaaagaaaccataaaaaacacacattagataaagtgaggttcattaccattagatggcagccatttcctggtttcccctttgatttgttacataataatgggaagaatttctatagattggaatagccaattattttttgttctctctagaaaagtaatatgcaatgtcatcaatcaatttactgccaactaggatttcaaagaaaagcctaggttaaatttggtccaccaccaccaacttatttctaagaaaacgcaaagtaaaaccaactaacccggataaatctttctcgtgcagaggtcagcacctttcttgatttatcaaattgaccactgtggtaagctaccactccttccagcaactccagtctcaaatatctatgataagaatatgaaaagtaaccagaagaatacttcatcaaaattgtgttgataaaataaagattggtgcacttcaaatgaaagataaagaagaataggtaaaaaaagaagacagcaatttgtgaaaagtacgagtttaaatatgaaatatgcttacagtgcaagctccgggtagcgacccccttgaaggaatctgacacggtgggaatcctttccatgagaacgttcaaaattctgtcttgctttcttaaggcgctcccctgccactgagagacagctaatgtctcgtagcatgaagtagcaccatacaatgtctatttgcagtattggaggattgtcgataaactaaaaatggcacatatccgaaaggtgaaaaatattttaaagacaattatgatatttaccttataagatgagtataattgcataagagtccaagtggtaatgtacaatgaacatgtgtaataattttatatctagcttgaaaccggttcagattaacagattgttctttttacgaaaaacttcagaaaatcttatcaagattcattattacacttccctgatccataatacaaaggagattgtaagaattcaagaagaacattaacattgtttccaaaaagtcattaagtgtgcaaatcacatggacactgaattcggttctgtcaatcagtagctcgatcaaatgacttctataaagggagtacttaggagaattttgtaatctatttcaaagtgtagaaacttaacgcatgatcgggtacgtgaacaataatagccaactcacctccatgaccttcggatcacataaagagaatgcctcctggaagaaagggaaaaaaatggaataaaagtcgtcttagtcacattataataccaagtaaataacttatagctaacaatcaatacaaagcaagcagtatgtaaaatgtccctaaacaactaatgtaactaataacatattgaaagggcaacagacattttgagatgatacttatcctatccaaagaaagccaccacatagatgcaacttatgcaagcataagaactttgtacaaaaagaaacagggctacaggcaactaacctctcccatagtaagtacttccattgcttctttgtaatttcccttgttaattagctcctttccattggtatgaagcatcaggcccatcatgattgccctgtaaaaaatgagtgcaaaatcctccaagttaattagagcactgagctgcaaacaattaaaccctaatagaaaaatgatctacccatccaactttctagccaaacagaaaaaagcatacaaggagaacattctaatcagcaccataccgctgatcagtctctgttcctaatttcacttgtcgtccactttgatcttccagttcgataacttgatcatcaaacggtaaggtaccgtctgcatttctttgggacatcgcggcagcagctgacctgtcaattcaatacaaacataatcaagttaacaagcagagttttaggaccaacattgtcttcaagtaattgaggaccagcacattcattacaaaggcactccatggattaaaacttcagaaaagtagcaaatagaataattggatgatcaaacacgtcccgtattatcatatagaaaaagctatccacagaattctctagcactgtgttatattcaatatgcaaccaaactataaaaaagaaaacttccaacataaattatcaacaaaattaaagccaaaagtgatctctctctttctctcttttgttttccccttagaacatgagaaaaggcccaaggtctatcacaaagctatatcaggatggcactcaaagcaaggctgcaaattatatagagagacactaatcaatcatacaacataaaatttgggatagacttgtcaaaagacctagctttcattgaaaaattaatagacaacagcagacccaatttacaaacttggttcaattaacagaattatccatcaaaatagtcaacgataccaaaccccattatcaaaatgagaaaagtaaaaacaaactcacttaagtcgagcaagtctacgagagcgttcctcctcagccatcaactcgttctttatgaatttaccctcatcggcagcaacccgggtagacaaaattttggagttgttcttgatacccaattgaccaagcttatcgtttccatcgccatcttttaaaactttcccggcgcaaatcaaattgatggagttgggtccacagtttgatcgcttagcaacctcttccctcaacatgggaacggtccaattatccaattcgacatctataacaccagcccacgtccctgcaatcttcagcttcgacatgggtatggacgattgaaggaagatagtgatcagagagtggattcttttgagtgtggtaggtagaggagtttggactcgacaagactgtagtctaattattatgtgtaggttaataatcttaatctggtacgaggaggtggagaagaacttatatagttttcttggtgatgaaggttatgagtttgagtgggtgatttttctgaaataaaagcgaaaaactctggctttatctacacaactttattaatactttcgagttccacataggtttctttgtcacagcccacacggctcattgtgtacatataataatcttaacaaataggctaatattttttctccttgaattttaacatgtaccaaattatgttccctgaacttttaaagttattgaaaataccccctgaaagacttttttcaaattttagtaaaaaagtctaacatagataaaagttcaggaggcataatttagtgcatgtcaaagttcgaaggacatgatttggtagatatcaaagtctggagaacatgttttagtacataaataatcattgaaatagtaaaattgaataaaattagacaaaaatccttaaatccaacaatctcaacagttcatggggcattttcaatggccttaaaagttcagggggcaaaaatcctaattagcctaataaataataccaaattggagaattactcatatatattataaaataatgtaaaataagtaagaagaaaagaagaagagagaaagagaaactaaaagagaatttttttagttatttattctaatggggtgaactcctatttatacaaatacaagagttaaacattaagaaattaagaaaaaaggaatcttgattataattaatggtaataaataaaagatttgaatatccacataattattaatatttataa

SEQ ID NO: 22385 - DNA, 1801 bp, Cannabis sativa
  modified_base (31)..(52): a, c, t, g, unknown or other
aaaatcccaaaaaggcaaaaagaccataatnnnnnnnnnnnnnnnnnnnnnnataaaatcacttaggggtaaattggtcaattctaaaatctctactaatctcgacattctcgatgtctaacatattgccccactatactaaaaatactaaaatgtgactctaatagccaagccccgcgttccagtattgtcgggcacgaaacattcaaaaatatgaaagtctatatatgacatataaaatatattctgaattcaaacaaatctccgtaaaatgataattcataactaatatgcaagtttcataattaaaccttatttatctgctaatttctaaattaaagttaagtgatctttacaattatcttccaatgttcctctcctagattattgatacatattgataacttcctatcaacaacatgtgtctattctaatgcatacttaagcatacatgagacctctcattgttaatgcttaagtaattctttcttgattttatattttctagaatagttgaaattgatcctcagatcaactttttgtctggaactcaagtgatatcctttagagttagccattgaaaaggtccctagcatcttcgtaatgtaatatacttgtgaatgagtaaatacattaccagatataccacacaatccatagattttaatgatctctaacctataatactaggaaggagaagttttcttaaggcccatgaatagacccattaacataatttcccttcttatccttgtatttgaaaactttaggttgttccatgtgaatgtttagaaccacagttctatcggctttgagtattagttccttattagagtattcattgcttgtttaaactaataagaaattgtcatcactaatttcatccaagtcataaggtggtgggttcctagaaaccatcccactactacaaggtactatcaccttctatctaggaatattagtggcattatcctctttagtcgtgatgacttacgttaatgtaacaatggcactgggaccatcttatagatgatgggacacttttggtttaaataaaataatatatcctatacattgctactttattgagatttagtcatgttcttataaaagtagtattttttgaaacaaacactttgttgtcttaatgactataggatggtccatccctaatcacttcagaatagctattaaatatgcaaatcttagttagtagttctagctcctcttcagttcatgagtaagacatccttggatctagtgattgtgtatactaagtatgagaccattttatcattccaaggttatcttaggatcagacttagatgggatgacatagaatatcgtttctctatctctatggaatttccctaaaaggactcaggcagcttctagtaactaattatagatcttaccattttcttcaatatgctattctgaagttgttagaggtaagtttagatacaatttgaagctcaacttaataatctttgaattgcataacaaaatagttctccaaataattcaaaaataatacaagttgattctggtcacagagtataaaacacaattccatacatttcacacattgtttgagaaattttttagtgcaatttattgttccaattgcactattaatgaagctcaagagaattatacaattactgagaaggagatgttagaagtggtttattcttgtaacaagtttagatcccatactattggctctaaggtgattatttatacgtatcatgtagccattggctatttgtttaaaaagaatgatgctaagcctcacttg

SEQ ID NO: 22386 - DNA, 1342 bp, Cannabis sativa
tacatgatttagtaccataaaactaatatattatgggacgatgatttgttggctaaaagcttaatttagaaaattggtgatgggagttctatttggaaaattgaagaccactggattcctatgaataggtacccatttttcttcttcttctcattctcttagtactaatcatgtatcctactttattactccttcccgggattgggacttagagaattttagaagatactttgacgaaaataccattgaggacattttgaatgtataattcaatgaattttctgttagttcagcctaccattttttcctctcgtttagagatattccttcttcttcatcttttaaaaactctaaatctttttggactaaactttggtcttctccttctcctcctaaagttaaatatttttttcgaagagttctttccaattttgtttctgttgctagctcttaatttcataaatcatggacgcactttaatttttgtaacttcaattgtgataataaatgtcatgatgttgttgatttcattaataaagttgttgatacttttgatgagtgtgatttctcactatttttatgttttatctaagctacagcagaatttattgagactaatataatatttaatataaacttgatgatgaaatataattaatatactttattaatatgcttaaatatacactatacaaatttatagagataaagattattaaccgtaaatgtaatttttattggagattcgtattatccggttggtgctagatagataaaaaaaattaaccgcactaggaaactttgttaattatcttcaaatgaagaataattatatatgttataaattttggtgtaattttaaaataaaatgatttaaacatatttatagcgtttgatatttgctaaatttacttcaaaactaatctgggataaaaaccaacttctttttcattcataaaagaaaaatttgttaacaaattcaactttttccaaaaaaaaaaaatgatttattttttgtgatgtacttggctggtctaatttatacttgcaaaattatagtaatgctcagcaggtcttccaaaaaaatatttgaaggatactaatcgggtttgtactatgtgtctgctttattgaagcatgaagatcaacagtacactcatgcaattaattataaaataagaaaatataatcttagtgttgtggttcgggatggttaaaacaatattaaggcaggaatcatcaagcctacgtgtggtaatattccttctgttatagtgagatttctctcacctagaaactcgagacaagactcctatttagaggacacgtatattcagatttc

SEQ ID NO: 22387 - DNA, 5316 bp, Cannabis sativa
  modified_base (809)..(814): a, c, t, g, unknown or other
  modified_base (2997)..(3022): a, c, t, g, unknown or other
ttttaataattgagttattacactgagtcagagcaaacacccgagcaggagcaagtgtatcatccttcttctgttctggtcgcagcatctgtgggaaattcctcttcaattgactgaaagaaggacctggcctgacactcgccctaatggcgcctcttgaaccttggacattcttgaaaagtctgccagtttttgtttccaccgctacagaaaccttggttactttgaaatcttttgtttgggcctgtagctgatggttcattagacatcttcttgtgatcaccagggtcattacccttacccaaactggcaccagacgtctgcctccaaaaatctcttatcacaatatttttctttcgtatctgatcttctgcaccctcagcagctagggccaattcaactatctgtgcataagtctgaacaaatccaggttgttcggtagcaactattatatcccgtgcaatgtgttcatctaatccccgaataaattttactttctaacagccttagtagctacttcatctgaaacgaatttcgcctgtcgattaaacttggtggcatactctgtcaccgtcatactaccctgagtcaattgtataaactcttctacttttgctgcccggatagactcattataatacttctcgtaaaacaatgttcggaaagcaccccaggtcatgttattcaggttatgaccctgagacacgatctcccaccagatataagcatcttctcgcagcacatagataacacatctaacgcgatcattatctcgacccgcatgaaatcaaaaatggatgttatcatannnnnncattgctccgctttgagtggatcagcaccaccctcgaacactggcaggttctgctttttgaaccgttcatacaacggctccaggcgattcccaacttccagtggcactaccagaagtgcctgaggatcaagattgggatttggaacaggctgagctcgctgctccctcaactctcgaatttgctcaccctgttgtcggatggtctcctgcagcgcaacgtataattcttcccagtttggtggtggtggaggattctcaccctcacctccaaccctgagcccagcaagctcgcggttacctctacgagattacctcgggtgcataatttatacacctatggtcacgttctaagaaatgacaataccaataagtatttctaaacatctcaaacttttcacacttttctaacaactagcatattccaaatagacgtacaatcaagtaattaacagataatctaataattaaaacttactgaaccatgagttgaacgagtcttcgcagccaatgtacatatcaaatcagtcttcaggatctttaaaccttggtcactttgataccatgttgtaacgccctgtccaacagggacgccacatatgtgcacttttataaaattctcttttactcatttatataattataccaaaagtgtgggtaatttaaaattttgtaattaaaataaatgcataataatttttttttataaaagataagtactaatatttacaaggaccccttaatacaaaatatgtatgttcaatttcaaaagtgctttacaaagtacgattatacttcaaaatacaatcaaagtgggttatcctgtccaccgggccgtggtactgcggctaatatgtacattgctgctatgacctaaaactcatgaccgctcaactttcgccttccctttacctggacaatttagcacccgtgagtcacaaagactcagtaggaaaagtgaataaaactataaacaatataacattcatttaatcacatatgaacatgcttaatcaattacaaaacattataatcacacagtcttggtacttcataaagtacccttactactctctacccatgagctatgtatgtaactaccgttgcccgatgcagcgaactagaagtaagaaacctatctacggtcttaggagtaattactcgtaacggtaatgatcatttccaaccctcggtcataaccgaggcttaacaaacatatattcaagttttcgatcataatcgagactataatcacacaattgttaatcacttaaccctaagtgatgcatagcacttttcttacctcagtctagaattcaagtgtgcgggacgacctgagtggaatacaagctgagcgatcccggtcctatgtcacgacaacacgacaactaaaattcaaaaattcaataaattccttaaaccataattcgagaaacaaaaccctaattccgaaaccaaacataacctattctccaacaatcctaaaataggttatacaacacaaaaataacctaaaacaggtactaggtatcacctcgagccaaaaaaaaatttgaagaaaaacccgatagtttcccctgcagggcaaccggtcgaccgtttttggtgcaccagaactaaccggtcgaccagttctggcaggctagaaaaattaagggctttctcccccaaattcgaaccaaaaccttcccaaatctgataaataattccaaaataactcaatatcacataaataacatatccattctatcaattcaccacaacccatcaaattatacaaatcatactacaaaaactaagatttaagtttttacagccaaaatttgcaaactctacttctaacagccacacaatttatctaaaagaacttaatctaaccctaaaaacattctctaaacttagcttaataccacagttcaaaaccctaaaaccctaaccataaatcatatcaaaactcatggaaaactaaagaaaaagctactaaaaacttacctcaggctatgtaacacatattgctataatttcttccaagaaaaatagcttgaagtgattgaatttcccctatacttcttgtagttccttgagccgaaataaacgagagagaggtgtgatagatttttctaatttttccttcttatttctaatacttatcttagcctatgcctcataataataataataataannnnnnnnnnnnnnnnnnnnnnnnnnataataataataataatccaaaacataactcaaattcctaaagtcaacctaacacactactattttgtcctcaaaattacacataaatccaatcatatcctagggtaacttaggtgatacctaactattccacaaaactgacaacttaaaattttaaactaatctggattacttccaatacagtccaccctctaatgtcgtgacatttctgactacaccgttaagttttcacagtcgccagacccgaaaacatactattccaaaaatagtatccacgataccagcatattcaataatttaataaattacgctttaattaactattcattaaattcacactaattaacctaagtaagatcataatcttacttcattacctgaataatttgcatatttaataaaatatgcccaattaaatatcattatattttttgggatattacaacaataatggccaaggcagcctctgagtatctagaaattgagcaaatggatgtaaagattgcctttctccatgaaaaactagatgagatcatttacatgaagatgccagaaggttttgatgaagatagagataaggtttgctgtagaaatctctctatggactgaaacaagctcctaggcaatgaaatcttagatttgttgatttcatgttgagaagtggcttcaccaagagtgcttatgatccatgtgtatactttaattgtacactctttcttctcctctatgttgatgacattcttttgatagggaaaagcaagagtgaaattagagaaatgatgtcactcctgaacacagaatttgaaatgaaagacctaggtaaagctaagaaaatcctaggcatcaaaataagaagaaatagacttgtctctgaccttgacacaaggaaaataccttagaaaggtactataaaagttcaaaatggatagctcaaaacctgtgtcaactcccttagctgcacatttcaaactatcccaggattaagcacccaaaacagaataggatagagagcttatggactcagtaccctatgctagtgggattggaagtttgatgtatgctatgctctgtacaaggccagacatagcatatgcaatgagcattgttagtaggttcattgtagaccctggagagaagcactaggatgctattaagtggattaccaaatacatcgaaggcactcttgatctaggcctcacctatagctaaagctataaaatagaagttgatgtctcaggctatgttgactcagactatgcaggttgcatagacacaagaagatccattacaggttatctattcataatgtaaggaggatgtgtgagctggaaggtaaatacacaaaaggtagtagctctatcctcaacagaagctgagtacatggcagctactaaggtaattaaagaggttgtttggctgaaaggtctagcaaatgagatgggatttaagacaaaaaaatatcacagtgttttgtgataaccagagtgcacttcacctgatgaagaaccctatgtttcatgagagatccaagcatatagacatcaacatgcacttcattagagatgtaataatctcaagcaaggaagtccaagtttagaaaattcatactaatcacaatcctgctgatatgttcactaaggtagtgactcaagtcaaatttaaacattgccttgatctacttcatctagcaggatgtgactaaccttcctctttaggctacttaattatttcaactctctgttgattcacttactggcatgagacagattaaggaggatttgttgtataatgatccatctcatgccaaagtcggctacaaattagttaggattagttgatagttatttctattaattgtcctaggtaattacaagttagtttttctgttttttgtctctaatctgaattgtacaaatagttagagtttaattctttgtagatatagccttgtacagtttctaatctctctctcaatgtaattaccccacttatcaatgaaacaacacaattacttcaacttgttcttgctagtttttggtcattgttcttgctcgttcattactagtttgttaccaatttgctggttcattgctacagcattcctgctgttgctgctgttcttatgttctgctctttgagcaccattcttgattgttaaggggtgatgatcgatcacaacaggaagagttatacaaaatctatgatcatagataaatacagtgatatttaaaaattgataacaataatcttaagagatatattatcacaaaaataattatggatcatatgtgcat

SEQ ID NO: 22388 - DNA, 5136 bp, Cannabis sativa
  modified_base (1314)..(1314): a, c, t, g, unknown or other
aatttgcatccgatccgatccaattatgattggatatccgattctattggatcggttgggattggatcggtcggttggaattggattggatgactttctgcacacccctaatagttaacacaagaagaacttcagctacgacatttgcctcctcaggtcttcctaagattcgatggcgactaattcagatgttcgtgtttcagtcacaactagaatctccacgaacctgaaaaatgtggccactcttgccacctctgcaggcaccacaaacctggccaccacaactagctaggtcaacacaaccattccaatgggtctcaataatcgacctatgccgcctagggaggaccctccactggcacctcctgatgaaggaagaacacacgtggaataatccttagacacaaccattggtactggtccctggtattatgctagagagacatggctaggaattggcaagccagccattggcaagccccatgtagacttaggagaagatcttgagttagccagacttagagaagtcgtctgtcaagtaggccaaactgaagaaccacacgctgttagctgcgatgtacaacagagatgcacatttttaagatggatatatgacctagagtacatcctctaatctcaccaggtggagccagactgccgtaatagagaagcttgcgacctgataaggtggttaaatgagagaagtgctagaagaggtcaagatctcattaaagatcctctctaagagagactagtcgacagttcggggagggtctaccaatagattgtccaaccaagttccacaagaaccaagaaagaccttccactacccaaaggaggataaatcttaccacaaagatatggtggcaagaatagccagatcctgacaactagcagtctagggggtcaaccagagaacccaagctcaacaacaaccccagttggtcaatctctgaccggccaaccccttggtggtacacctttggtttgccaaaaggttaactcctgtcttggggcctttgagagtgagtaacccaaaggctaatctttaatcgactaggtccaggaatgggtggaaacacccaagataacaacttgagaagtgagtttagtcacttcaaatatctagatccacctaactctagcaactagtgtgattaaccccctgtcaacacacaggctgcaccaaccaatcagaggagctcgggtaaccagaccctatctgttggaatatcttttaccaggatctagatttactaacaaatatatttttaacatcctaaatatgaatttctaaaacgatgaaaataaacncataaaaggtatgagaaaccttacattggttgtagcagaattaaatgactccttccgctcagatttctaacccttgtaccctttctgtcgtagagtgtcatcaagatcttttaccgttcaaactttcaacctgaattggacccatcagatccatgtgaagaatttcaagaactttaaaagtgttcacatcaggaacatttctgtgagatatttttggttgattgccaaactgacatggtccacatttgcctacagcttctttacctaatttaggtaatcctcaaacaatccctgcattggataattctttcaaatttttgtaatgaatgtgtccaatttttcatgccataaatcagtgatgttatcaatagcagagtgacaagtagcataggtagtgatggtgtaacaattatcattagatctaaaccattgcaaaatagtttcatcatgattatcaagaacataacaatgaatactattaaaattaacagtgcaactctgatcacaaatttgactaatgctaaggagattagctcttagtccttcaacaaacattacgttcttaagcctgggtagaccttcaaaattaagagttcccatccctacgacttttccagctagaccattaccaaaagtaatttctccagattgcattagtctaatgttttcaaggtagtctttttcacctgtcatatgcctagaacaaccactgtcaaaataacacatttgagaagcaataaaattaaaacaagaagaaacaaccaaatattatttttgacaattcatttttgtttttgagaaacatatttatttctagaatatttagaattaaacatgttttgcattttagtacatctaggtcgaacgtgaccttttattctacaaaaatggcctataggaatgaaccaattcctatttcctttgggattgccaaacttgccaaagtggttcttttctatagcagtagtacattttactgtagaatcagaaatcctgcaaaataatgtcagaacatccagaaactaaaatttcatatttgagaaatttagtatttagccttaacacaacccaaaccaccatgacttgtttgttttgaattttgaaactcttcaaaaatgttggaacctggatttaacattttaacatttctttttaatttttcaaattccttagttaaagatacaaatttagaatttcttgaaatcaattcagattcacaatatttatttttctcttccagatctttgatgttgtgagataaatctttgttaaattttactaagtaatgattttcatcacaaaattgcaatcacttaccaaacattaccttgtaagattctgccaatgattcctcatcaagttctggctcatctgaatctgaaataacttctttatcattgtcatatcagtcaaaatgttgtttaaaaacaaaactttttctttttcctttaaaacacttgttagcgcaacatttttattttcactattttcagaatcatatcactccaagtaaccttaaaaccctatttattctttttcaaggtattggcacatcagattgaataggaccatacccttcacattccctacattgaatttgattattgggaaccaaagatttagatgcatcgttaccttttggagtttttgagaaattcttttttatttctaatatttttcatgtacctttgaaaatttcttgttaacaaagccatttcatcatcactctcattgtcaaaaacatatttttcataaacgttgaaggcaatacttttacttttctcaacgaaagaatttggcttaacatttttcttgatttgttgatttaactcaaatgtttttaatgagcccatgagttcttcaaccttcattttgccaaaatcttttgcctcttccattgctagccattttgtgtcaaacctgtcaggaagcacatgaataatttttcgaaccaagatagattcatctaatttttctcccaaggcaaagaactcattagaaatatcagataatctttcataaaattcagacaaagttttagtttttgacattctcaattcatcaaatctagtttgcaacatggtaaaatgtgatctttttatatcagcggtacgctcaaactgagtttgaaggattttccacgcgtcctttacagattcacaagatgaaattaatttaataaaaccttcaccaacaccattaaaaatagcatgtaaatccttattgttataactagatatgttttcatctttagtagtccaattttgttcaagttttatcttagtactacctttatcgttattttcagtaggttgcgaccaacatgtaagtatagctctctaagccttctcatcttttgacttaatgaatgctctcatcttgacattccaatatggataattcgaatcattcaacacaggtggtcgagtaatagagattccttctgtaaacaaagacatctcacacaaaataattaaatagaataatctcaagatctcactaagattttagtgacatgctctgataccaaatacaattctgtattttaatatttccagtttattatttaattaaatacttaattaaatgcaaaataatgaaactgatattgaaatagttttttcatagctacagaagacaactctgtaactctagaataaactagaaaaacaaacagtgcagaaaagtaaacacacacaaggtttttgtacgtggtttcaataattctttcaaattgttactagtccacgggaccatgcccagagataagattcattatatagatctcaaaaatacaaagtaattgacttatgcataaataaactccctattattatctgttgcaagcttgatatattccaccttctaatcgaatcttctgaaacttcacttctgaaacttcaagtgctcgaacttcctgcaatctccttgaagagtgtttgcttcctcctaaggcaagacttggaaaacaatctcccaaaagctttgtaaaaccttttcccgaaggtagcactattgttcttcttctttttaggcttgaatacagactcaagacaatacaaaatacaaataaatagagtaagaattgaacacactcttctctacaaaataaagactctcttttctaaagatatgagtgaaatacaaagatacaaaagaggtacatgatctagctgctataaggtgtatttataatcaatagacgccttattgaaagctcacacacggtctgaacaagaccacaacccattaaaaaattccctaaaaaatatcttcaatgagcccagaaatttctatttttgtacctacagaatcgtgagcaataagtgtgacttttcttttatagaaaaagaaagttttactccaattttctcatcaataaatctaatcaaacaaaataaaaaactcacacaagatcaaaatatcacagctagatagatagaaaagaatttagtaaccacacttaccatttttaccttatttttcataaatagaaaagctagataacttttcttccaaaaataaattaattaatataaaagtcaaatacaaaatatagaaactaatgtaattattccaactaaatttaaacaataaataataaaatatttttgtcacatcaaaaatgtcaaaaatagaattaacagttttgtcacccagctctcaccaaacttttatttatttatttatttgtaagcgctctcaccaagtttttagacctattcgggcccgtttggtacacaggactggattggattagacaggctaatttgtccaatccagtgtttgggcatgttagaagtctggataactaatccagtt

SEQ ID NO: 22389 - DNA, 2011 bp, Cannabis sativa
tttaaaatttcaatgattatcactacattgaatattattaattttaaaattatgatattaaaaaaactataaactaaaataaaattaacatacgtgacttggcacgtaacataatattatagatctagccccaaccttagggtcgaggtccttgtctagggtcaaggtccgtgtctacgttttgggttgggattggggtctaaggttgtggtctgagaccatatccaagtcgggtcaaggactaggtctgggtcgagttgggtggaagtctaagttcgggtttgagtgtactatttaaaaaaaataaataaaaattatttttaaaaaatattaacttttttatacactatatatcaataatacatatgtaaatttatgtatatgtgtgtatgctcattcctttccaatggtggggcaatgtttggctccatatatataaatatatacctatatatttatatatatatatatatctgagtcatggatgatatgagattaaaatgattcttgagctgcaaaatatgactatataaatttataaaaatatattatatttgtgtacagagagaaaaactttaagtaaagtgctagctaaccaaacaattagaaatggtaaagttggcttaaattaaaatgatcaaggtctttaaagcttatggatatatcattaattaattatgatcagctgtattttaatactaattaaacatataggagagtatacttgtacataaaacaaggaaaaaattaaaacaatattatcacataattaataaacatatccattttattatatatatacttaaaagtatattgaatttgatatgatgatgatcacttagccaaacattattctacaaattaatgtgtctatggtggaaatacactcaaacatgaaaagtaaagtatattgaattctattatatataaagtcatattgattgtacttttttttttttaaaaaaaaattttagaataagattaaccttcattaaaaataaagttaatagtaaattaacaaagtcaacaatttagaggattatcatccactctaataatacagtgtgagagataatacaattcgccagactgtttaacaacgaatataatcaagagaagacaacaaaattttataccgtcataaatataagggtaaatactattttggaccttgtgttttgcaaaaattattaattggaccctctattttattaaataacaaaatagaccttgtattttctaaaatggtaaaaataagactatgagtttagtttttgatagttaatttagtccataggttatattatgtgaaagtacacgtgataattaattaagaagaatcacccaccttaatttaatatttactaattatttgagagttcattctttcagatactaaaacaccataccaactttttcaaaaaaaaaaaagaaaataaacaactaataaaaaaaattaaataattattataaaatatctagcttagctttctaaatttaatatagtaattattatgcccaattcatcatttggttaatgaaaatcttactatatatagattattattagagaattaaaatattgatgtgaactaaaatagttttgatgtgatatttacatatttatatattaatttttttgatggatatttttatttacaagatttttttagaaaaattattttatatattatttttttaatattttttttttatttttactgttttggttatttttgtggtttctatgcgggttgctataggatttagattgtaatttagattattctgttagttgctatgtaaatttccgtaaagacacaaaaaaaaactactttaaaatataaaaataaaaaaaaaaaaactctctttttttgctgcaattttacagaaaaaaagaagaaaatattttaatatatattaaataaataatctttatctttaatattatattgagcaataaaaataaaaaacaaattactttaaaatgtaaaaatttaaaaaaaaaaaa

SEQ ID NO: 22390 - DNA, 1667 bp, Cannabis sativa
caagtattaactttaagatggaatatattcatataataaataattttaatgtaggaacattatttggaacctctctatttttagtatttacaaaaattataattaaaatttgattgtgtatgaggataatttataggattgaaattatgattcaaatattcgtgtaaatgaatttttaaattctattttcaaaattataaattatttaaaatttttaaaaacgagtcggatgcctctagtataattataataaataatgtcatatgaaaaaatatgttttcttaaaatgccaaaaacatagatgtccctattaatttttttttttttggtaattagatgtccctattaatttaatagagacaaaaatagtatccctaatatattttattaccataacaagacatttgcttggcttggacaaaacaaaatagcctttgttctttctgttattctttattttactttaaaataaaatttactttattgctttgacattctaagtagatggcatatttaaaatacaattttaaggtagaaatttgcattatatgtcaactaattatgattatgagactaattgtgctctgttaattctttgaaagtatgcaattcatggttagaacttagaacttgaaatttgttttggcagaaaaccaagaatgtcttgttattgaattctttctgttgaaaccaaatgccttgcaatttacataatatgattctctttagtgcataagtacctaatttcccccttttatttccaaatcaagcaattcaatttcaatatttgatttaactctctgttaggcaagtcaaaataatttgcctgtcatggtcaaataactggaaaattgtaaacaagaccaagtcttgagaaggaaatttcattccattttattccagcttatccataatgttatgtatgcttgtcacataagaaaagatagcaacttccaatattgtacaaacaataatacagtgaaccaaatctgcaaaaaatctagagttaatttcatgaacttaatatgaaacttgatttaattagtttgaatactttttgttaatatagcatattaagtaagtcaatgtttctagctgattatcacacttgaaatcattttattctgattcaaaaggactattagcaaaagtcaaagttggtgtaaacatgatttaacaacaagattagtctctttacaactctataaattgtgacatatttacagtttcatgcataccaacttgtcattcatacattcctttgcttttgtttaagtttttctatacaatggcagcaacctctcttacctctctctctttcgtttttgcaattctactaataatgcatgctaaggcaaaagcttctacctgtgatgactgtttcactcaatcccgggcatcttactatcccaattctgatgagaaaggaactgattgtaaggcatttcgataagagaaaacaaataaagaaaaccatattttagtgtttttcaaccagtaaacatacatgcttacctaacacttctttcctttgtttcatttgatttaacagctggtagatgcggatatggttcgtttggagcaaccatcaatgatggacttgtctctgcagtatctgatctctatcgagatggagttggctgtggtgcttgctacgaggtgagtct

SEQ ID NO: 22391 - DNA, 2551 bp, Cannabis sativa
ctattccccatacaacgaagggcccaggactgttcatgaggggttatatccgttggtggggctcttggaactttcgagtaatattggattggttcacatttatgggtctactcagtgcaatccttcttcatggtaggccagaagtagccttgacaaatgattttcttagaaagactgggtccagatgtgtgatctctacaaaatccttcattcatgacaacacttatctctgttcaaactatgcaccttagagacgacattgataatcctcttttgtatagtttcccatccatgatcacgtatttgggggcctgatactggatcttccacgaagcagccctatcctttgggagtgtacctgtttctagatacttgaatattgaagccatccaggaggtcaagtgattgatggcgaataccccagtgtttctgtgcttggttggtgtgatcagatgtgtgatggagactagtccgtattgctctatttctgagtctgttgctaattttgccaacatatctacaaaagcattcttatccgttgggattttcttcatagaataatgcttaaaatattacaatagctcttgattttttactacgtaactagccaaattttctccttttgtctagtacttcccaaacacttggttgactacaagctgtgaatcactgtagagttcaatgtttttggtgccaaccactttttctagttgtaaaccagcaataatagcctcatgctcagcttcattgttggaagctccaaactcgaaatgaagtgcactttcaagttggacgttttgtggagctattaaaatgattttgtctctagaaaatcttttgttggatgctttgtatacatatatcttccaaatttctctctccgggactgacatttaaggatcatcatttatccctatacattaaacaataaagtcagctaaggcttgacctttaattaaaattctgggttgatattgtatatcgaattgactcaattccattgcccacgttaggagttttcctggcaacttcagtttttgtagcacttgatgaagagggtggttggttagtacccttatggcgtgagcctaaaagtatggtcttaacttccgtgaagcaattagtaagaaaaaggaaagcttctcaatcatagtatatcttgactctgtgcagagtagtcttttgcttacataatatactagaagctgtacctttccttcttctcgcactaaggtggcacttatgggatgatgtgacattgccaggtacaagagcaactgctatccatcaactagtctggacagtattatagtctttagcagatgttctttgagttactagaaggttgtttcacactctgttgtccattcaaatgtattgtgtcctcaaagtatgttgaagaacagtacgcacttattcgtggatttggagacaaatttgctaagtgttgttattcttcctgtcaacttctggacatctttctattttttgtgtgaaagcatgtccagaagagcgttaattttctccgggttcgcctcggtttcttaagaactgactatgaaacccaagaatttccatgaagaaactcgaaaagtgcatttcttaaggttcagcttcattttgtactcctagattatgtcaaaggcctcttctaaatcattgtgaaggctctcgaagggttttgattttaccggcatgtcattggcgtaaatatccatattcttctccaaagtattcttgaccattttattcaccattcgttggtaaatggctttggaattttcaatttgaatggcatgaccttgtaactgtggattcctttgtcagcttggaaattgctatgctcctgatcagccagatgcatttttatttagttgtagccggagtatgcatccatgaaggttaagaggttattttctgaggtagcatcaaccatctgctcaatgtgtggaagtgaaaatagtcttttaggtaagcttggtttagatctgtgaaatctatacacattctccatgtcccattaggctttaggaccagaaccagattggcaagtcatatgggatatagagcttccctaaggaagtcaatgtttatcaacttgtgtaactctatttttattgcttgcaacctcgctggatctagaggtctctgcttttgtcgaacttgtttcgcattgggatctatgtttagtgcatggcatataacatggggactaatgctggtcctatcaaaatgattccaagctaacacatcactattttccttgactgtggaaacaatcttttccctcactactagaggcaagttcttccctactcggataaccttggtgggatctccatcatctatgattacttcttccacttcctccattagttctatgacatgttccatgccaattcgtggatcaagttcatgttcctggacaaccccaaccgttggctgggaagatgttccgacatcagagttatttccttcctggaccatgagtacaattctggttgaaacgttgtagcaacttcacgctcttttttgatctcctctaattgtc

SEQ ID NO: 22392 - DNA, 5317 bp, Cannabis sativa
aatttaaatatagcaataaaaaattacctaaataatgagtttttacttttttttttgaagaaagagtttttacttggagtttcaaaaatatatctcactcaaaaataaaaaatagaagaaaatttcttttcccaggtcattgcgattttcattctcttctcacttcccgcctctcagtctctacctcctcctcctttcattcctctccttcaggccgcctccatcgccgtcgacaccatcgcagcaggctttgcagcttccgaaattcagtaagtgatgtttcatatttcaggtcatatattgttcacaattcattacgctgattcctctgcaactctagaattttttcataaataattattagttaggggtaatggatgtttattttgtaagtatgaacaagctttaattccttttcgagtcaattattgcagaactctgctgattgaaattttcaatttccggaattcggactgagaaatcagctatggcgggtaaatttaattactttcaattctcgccaattcgttcgggatcgattaggttttgttattttctttctctattctaagagttgtttttgtcttttgaataatttgcaaaggttccgaaagagaagataaggtctcattggagcttaccgaggaaattcttcaaagcatggaagttggcatggctttcaaagattacgtacttttctctctcttttcttgtatttatatatcacgttgtttcattctcttgctaggttttcttttgaatgaggtcaattatgtggctctagatttttcaaattctatgtttaatgttaatatcgatcttatggcagagtggtagaatcagttcaatagattttcacaaaacatccacttatctagttactgcaagtgatgatgagtccatacgcttgtatgatgtagcaagtgcaacgtaagcctcttattttcttgctcccaattcatgaacattcttacttgaactagatgctgtacttgctcctttgttgctgtttttgtgtttatttttcatttttcttaagttcagtaactcttgctctattgttcatttagaaattgatacgaattttggggtttgttttgccctttttattttgggttttaagtagtttgaatctctttagttctatccttgtagttcttatttattttgccttactgaattatgagagtcctctatggccagttgcttgaagacaattaacagcaaaaagtatggagttgatcttgtttgctttacatctcaccctacaacagtcatttactcttcaaaaaatggttgggatggtatgatatctcaacataaagttctgtttgcaattataaaactagtttgagatattgatgagaattcttgattcagaatccttgaggcttctatcattacatgacaataagtacttgcggtattttaaaggtcatcatgacaggtacgatttctcaaacgcataaaatgaatttcgtactgaaatatctacattggatgctgaatatggatgttcttgcattcatttccagggttgtatctcttagcttgtgtgctcgcaaggaatgctttatctcaggctctcttgatcgaactgttttgctttgggatcaacgagctgaaaagtgccaggtttggatagcagaagatagatgctctttccatgttatagctattcggaacttattttcttgtctgttatccatgtcagggtcttttacgtgtgcaaggaaggcctgctacagcgtacgatgaccaagggctagttttctcaattgcctttggtggatacatacgaatgttcgatgctcgcatgtatgaaaaggttggtttagtcatattagtctgtttgaatgtataacagttcacaagtattgtttttgttttgttggaactaagcaatgactattgcattcttttagggtccttttgacattttttctgttggaggagatgtttctgatgctaatgttataaagttcagtaatgatggaagactaatgcttttgacaacaatggatggacacattcatgtacttgattcttttcgtggtacacttgtaagttgcatacttcccactcaaatgcactgagaagcttacataaataattcataatttgctcatatgtaacatgctgtctgctgatttgtgtgtggtttgtcttttctttatacttctttttttcatttggctaaagtctttttctttccgattgtgtttcagttatcaacatacaatgtaaagccagtttcaaaaaattccacattagaagcttcattcagtcccgaagggatgtttgttatatctggttggcactctctctctctcattattagtttttagctaataatacataactactaattgtgctcactaaattcatgtcatactccgtaccacaaaaagttccaatagaccattttttgtagttagaacaagatgtgtgttggagaaatgtacctcaggatcctttacaaaaactctatccgtgttctctttttctggacttactagataaaaaatttgcaggttccggtgatggtagtgtctatgcttggagcgtcagaagtgggaaggaagtaagtttaaattatcttaatcttgcatctgtttgtatatatactttttattatattttcctgtttggttcctaacaatatgactgatgtatttcactatcttgaagttgtttgttgcctggtaagtattagtagtactccagttggaaaatcattaccattacacttgtctttgatatggtgtatatcaaatttaaagaaaatagttcgactgaaaaagcaagtaaatgtcattaatgattttgttcacagagcttgttaacatatgaattaacaatatccaattcaatgttaatttcaagtaattatggcttcctatcaacttctagacgataatagtatagttttaactctgcatgcacacccctgtttacactttaacacttgtgtccaggtcgcaagttggatgagtgctgaaaatgagccccctgtcatcaaatgggctcctggaaatcttatgtttgtgactggatcttctgaactatcattctgggttccagatttatcgaaactcggagcatacgttggaaggaagtagagaaactctgtctcgaatctgccccaaatcttaactactcagctgtcaacaagaatctttcctatattggtgcaagttgaggttatcgccacacttacctgtttctttacttgcctccgtaaatttgttcccttgtcggaaaattatagcaccagagaaaatcagatgtgtaattgtattgagaaagaagcaagttttgtagatgcttcacctaaaacagttaaaaagaatgatcaaaatccctagaaatgtagattgtacagttttctctaacaaatatctattttgaagcttttttcacaagttcttagttgtatcatgagcaagaacaatattcttaatctgtatgaatactttgaaaatgtattaatcatattttatttgcttcaacttggcttttgggtgccaatttcataagtccatacatagttaattatgttcagcagtttctatttatgacaagggttcatctcataacaagacaatatgagagaagtcaagtcaagtcaagcctgtcttcttgaggtgagtattttcaaaaagatttctactttttgtgattgcttctgtaaaattcttaaattattccatggttagaaaacttaatatgtactttcataaaatctgtgctgtagatcaaatcaaataatgacaatccattccattccatccaaatggccctatagaaactttgattatctttggtgtggagcctgcttgcctgcctgccatggacatttaaggtacatatattataacaaaaacaagtcttgaaattgtacgcatgttaataatgtctttgcacatatggcaatgatgtagtacactagtacttgcgtgaaaaaactctctgctctgatagaaaaaaattaatagataggaaagttggcaaaagagagaaaacaaacaaacttacttttggggaagagaagcttttgagaaaaactttttaacatgaaatagggctcaacaaatcttgatggagtgtcatgccttgtgttttataaaagatcttcttggatcttctactaaatctctcttctcaatcaataaaatataatagaagctttgtctattgtttcctttataagctcacttttttctttctttcaccctcttttagggtcattcccaaacaaaataaagttatgaaatttttgtcaaacccattctaagggagagcatccattaaaatcttgttgatggggaccttcttaaatacaaagctactataaggctaaagaaaacaatcaagtatatctttaatgtctattctttttttttgtcataaattgatttgtaacaaaccttttatctgcaccattcaaatgtatgtatgtacaaacaaaacatgccaaaccaatcagacttgttctgtctcttatgtgataatatttccgtgtgcttgaagctttagtcgattgaccaatagttactttgctatatttttatttatatatattatggtttactaagtttgtttaatagtgtattgagtgttgttttacacgttggttttgaagtgagtggttttacacggcacgtgcgaagtatattaactcagtctcagtttcattaattgtctgttcaatttttggtcagtgcatgatgagtttgaagtttggacaaaaataattttgacccatacttgcccaaaattggacaaattagcttcatctaatatttgaagtttataaatggaagactctttataaatagattattattatgccataatttttaatccccgtatttttgcaaaccattattgcaaaatacatataattaaaaaaagaaaaaaaaaatagactagtgcactgtgcacatctctatgttgaaaaatataaaaaatattgtgagattgttccttccttttactctctctggacaggaaaagttattaattaattatattctgtataggaccaaaaggaaaagaaaaatagttttgtggtatttacgaagtgggtgggttcaaacttcaaaatatatacccttctcttctctatctaactttacaaaaacggctgggtattattacctttctcactttcatcagtattttctctgtattttcttttctttatacctttggtatcattggcaaatcttttggattatgtacacaagaaactacacataatggcacctagagttactctaacctcaccttttgttgctctctctctctctct

SEQ ID NO: 22393 - DNA, 2776 bp, Cannabis sativa
ctaattagtaactagttactactgaacaataccagtttttataaagcttttaccagtaaatagtagtaatatactaaattgtgataaacatcatctagttaccagttttttatttcaacatttttttctttacgaactgtttctgtttgcaataaattcaaaggtgcctccataattactcattgtttaaaagagaataataaatggatgcaattatttttttgaaggggatgagatgtagttatttcattatttttttttacatatatagatgtcagatcagatgtagtctctcatttgtaatagtcatgttccattctcgagtaatttatatgcccgggagggatgtgttgcggcaattttagatgaaaccacagtacattactgcaaccacggttgccaaaaaatccataaaaatctttagtaggtaacgtattccttcttttttcttttctactaaattcaaacatagtatagtaatttaagttgaaccgcacaaattcaactataaaactgagcattgttgattaatcaaagttgaaagagagacacaaatgctagagttttcatgggaaacgtggagagacttaagtgaatttggatcaagatttgtaggactctatctaagaaaacaagcgttcatcatcttctttaggcttttctttggaagacttgataagattatttatgttgttatctcattttcaatgtcactgtatccttatcaacttatatatgaacataaccattgctctttgttgcttaaataatattttccttttgaaattctctcgttttattaaatatgttcaggcaaactaataatggtgcttcttaaatgaaaaaggttcccaaattgcattttcaacaagtgttcgaaaagacacaaacttttaagcagcttaagaaacaaaaaaagttatagagattaattatgttgcaaatataggagttcttctaatgacaaccttaatatactttatttgtttcttataccaatgacttttgaagaagacaaaatccactttagctgacttgcctttaaattataataactaggcaggaacagctatctgggacaattgaggttgcattaatcttgattacagaacgcttttaagaaaaatgctaactatataactttcttaattattttaattaatacgaaggaaaaaagaggaaaaaaaaaaactacatgcatcatcacatttttctattcattgttccaagtatgatctagaaatgattctcttgagcaaaggatgaagaggtccttgaagcgaatcaagaacactggttattgttacacttcttagagcatgaaaatgacattggttgatgcttcaagctagaaacatcaaacagttccataaatctttgatctgaaactctagctttagctgctgcaaaccgctggtactcatcgaagaccgatgaaaggcaccatctttgtaattttctaatgcagccaaccaggcagccagttcggtgctgccaatcaaagcaagtaaccatctacaatatattagaaggtatacatacagacaggacttacaatcactaaaaataatatcaaagtaacccataatgttgctcttaccttccctcttttgcagtgaatcaacaccgggtgattctttacatctggattaagaagatggtaaaaacaaaaaagttagcctataagccaaagctattttttctttttcccttttttttcacctttgaattcaaattcagatggggaaatataatagcaagatattaaaatggcaatgtgcttgaagtagtaccaagaacaacttgtagtgcttcacggatggtatcctctgggatgtttacaaaaggttcctggttgaacaattgaattcccaaatatcagtttgtatttagtgtgacaaagtcataattagttgtaattgatatgtacaaagataagtttctaaacatatcatatttcaccgaacttaatccttacaaacatcagtattatcatgtccttaacaatcaaaaactatatgccatattacgttgtagtaactagcaagaaccaaaatgaagttcataaaagaatataaactttaattactgtctactgtattttgtaagaaaaaggaaatagcacaatcatttgtttcccgtaaagatttaacacatataaactaatataaatacatctgttctaaaatgtttcttcgtaggactcagtatttttaaacaactttctcaaattgttatcgatattgtatggaaatcgaaatcaacaagttagcgcattgaaatatttactattattattttatgtgacagtcttatataagctaggcactggtggaggcatggccacattttttgtaataaaatttacttatgcatggtgatttttcttcttataaaaatgtacaaatttataaataacaaaaaattttgctctaaaattaattaataaaaatacaaaaactacattgatagataaatattcattttaaagcttgtgtcctctagaatgatcagtgacagttttaataaaaaaaaattatacatatatatagtgaatctattttttactatgtcatagtccaatgttaatttttttcttgaaagaataatatgttataatgttaatcagtttattatgagaatttgtataaaaaataaaacatacagatacaaagactttaaattaatttatcaaaaaaaaaaaaaaagactttaagactaaaactatgtacaaataaaaataattggaaaagtcatactaatgttataacaaaac

SEQ ID NO: 22394 - DNA, 3105 bp, Cannabis sativa
cagttttgtctcatggggcttgctctaagattttagtggtccatggttggcaaagcatgctctgcggttagacgatgagctatcttagttcgaggaggttccaacgcctgtggcggacgtgggcgtcgtaaattcatgagtaattttaatcactttgtcaaaaaaaaaaatatcttatgaattatttttacaattaaaataatgaaataaaattattgtgcgacaaaaaattaaactttcaaaatattattttgaaaaattaaatatccttataatttatttgagtttcttgtaagtattttaaatttctatttttatgattttttgaggttattcccgcatctatattggaagtattgttaatattataaaacatttaattgaaataaaaagattccaagtacacattttatttatttattttacaaagtgaaacacacattttatttattataaagtgaagttagtgccttgaataaaaaaacacaagtgtcggcggtattagtttttcaaagtcttttttattattattattttttaatttttaaaaaatatatttattttaggttgattctacaatgtaccctcttaaaatgatatattgatgaatcctctacttattttataatctagaataattttttagtctaatttttttttttttcatatttatctacgttataactatttaagatatattttgagaaattcaaaacaatttacaatataaaaatcaatgttcaaatagtttattttacagcatataaaataaaatagtcacgtgtgtaacttactgtttgaacgtagttttttgcgagttaaatttttttaaatttcttaaaattttacagaatatcttaagtaattataacggataaagatatatcggtgtatctattttaaggggtgaattatagaatttttttattttatttaatttttcttttggcatatttatttattaatattacatgttgataattccgtactattctatttctcatatgaacaccaacactaattttgccacttaattacataattttattttaatatttaattttaaaaatatatattttttaatttccaagaataaagcatcttccaaacccaaacttcgaaaagcaactcaaaagggcgtttgattaattaattgagcttttgtactttggagttattaatgttaatgaaaaccacaaattctgtttcaaaaaaaaaaaaaaaaaaaaaagaaaaccacaaattacatatcattactttactaaatttttacttcccaaaatctgcatccttaattaaataatatataatcaaaacatgattaacaataacacacataataataatcaatttcaacacacaatccaaaataatattatatctttttttaaaaaaaaaaatcataatgattaaaattgaaatttatatacatattagatattaggatagataaattaataataaattcaagatctatttgtatataatatagtttagtataacaatatataataattatgtatatacatatctgactgatccatagtaattactgtaatttgatagtgtaatactattaactaaagtcttcttccctagatctttaaatcagaagtagtttatttatctgattatcaaaaagcatacaattatgatgagacaatatgtatttatagggttagttcgagagggacttagctacaattggcatgctcatcaaatgcttcagttaactagaaaagcccacacttttgcttcacttatactttacacactgatgctaagcttattaactattgatcaccaacaatataagctaatacagcatagaactatccaatcaatctaagttttaataaaaactaataaaattaatgtaagcccaaataaaaagtctaacatattatgtattcctatcattatttttttatctgaagtatgatattataatatacagacgcactgcattattacattattatcattttaaatataaatatatttattaagaaatgcacaaaacaaaagaaatcttaaaatcaatacaagcatacattatttaaagaaaattgagagaaagattcggccaccaaacatgaaaagttacttgaaaagtttctaatgaaataatcagttttgctagagaataagcaaaagtattactagctcgattacaatgagaattagagacataaaaaaaggactttcaaacttgaaggatatcaattaagaacaatatcatactcttttttttattattattattaatcagcattatattcattactctaaatatcatttacaacctaataacatctttaaaagaacttaagatataaaacaattctatacaaatcaatactttttaattacaaatcaataaatcaattcatgtcctcttgattaatcttcgtaggcattgtacatgttattcaagtccttattgcctcttttgcccttcttaagatcatttcttggctactggaaccaactttcatgacttccttattccgagcacgccatagttgataaactagtgatgtcagggttgctgcaagcactgccttcctgaacttagaatattttgatctttcaatccacctgaccaaattttgaaggtcaacagacaaaaatgtccacccgagccaagctttcaagttctaaagacaagcatggctaaaagagcattaaatgacaaatgctacacagtctctttgtaaatattacaaaatccacatacctcttcatcaatcaccttgtggagtctagcttttgttttcaatttgtcctggatcgccatccacaaaataaaactgtgtttgggtacattaaacctccccatacctatttgtcccattttactttctcccaaggagtgatcaacaatttgtacccctttgagatcttctcttcattttgcatttgttgataatccttgagagttcttacttcatttttaatagccactattttcttcaaataccaactactatgaataggacactacaataaatttgggctttaggcgcgacaattgtcgcctctaatagtactagaaatcgcccctaatagttattaggagcgacaagtcgcccctaaaaggtc

SEQ ID NO: 22395 - DNA, 3311 bp, Cannabis sativa
gaatgtccacgttttatgaacgattatgaatgagtagatcctaaaggaataactgtcacctcgtacatctataaatagggactgaacccagggtaaaaggaacgaccaattttagatagaaaaaagagatattgttgctaaattgtatcattgtattctgtattcaaacatatttatccttaaaaagatataaacttatggactatgaaaatttaatttcaaaacttggttaaaatttttatgttatttattatttatttagtacttaatttgtatataataaattctatatttattataaaaaaattaatattttagttaataaaaatctgtgttaacattaactttcagattgttactttgcttatatttttgattacataaaacaatcagtacacaaaaaatcaaaatttataaatattacaaaaattgagtaatatcacacgaagcacactttaattgcctagtatcatataaagtcaaaatcactacaaaaagaaattctcctacaaataaagctatttgtacactcatattatgaacaaagaataggccactattaaacaaatataatatattttaatatattcgttacaaatattatatgaaaaattagtgacagcaaaattaaatgtagaatttgattttattgttgaacggtcataaaaaccttcccacttacaattttgtcagtctcaacaagcactacattattagagacatttgtgatagcatgggaagtaaacttgggaagcccatcaatgaaaagcgagtactgaatgtgtctaattcgatcagggaacaataaaattggtgaaaaatcagcgacccacatagttccatttcctttgacaacagctgtcccaactgtagatttcaagtccatcccaacagcattgtttcgttcaatcactacttgttcaatgctccaaaaactcccatccactctcacaataggagtatgatattgagggttcccattgaacatgttgttcacaatgttcaccccatgaatatgtcccttaacagctttcagaacaatatttccatcacctagaaaaaacccatttgtgacatggacttgaactgggtcttcaatcacaatagatgtataatccatgtaacaattatcaatcctagtctgggaaatccaagccaccttgactaatattcctatcccaccaaaaccagtagccttgttatagcaatggacaccagtcaccatattggcttggccccttaaaatgataccaacctcagctgaaaaaattgccacatcagttatggcattgtcattactttctatatcaatgccaactcctgtgaagtacttttctcccttgtcaccaccgatggttgagtactgtcccagaaagcaatttgatataaaggtttcgtgacccttttggactagaattccttttgttgagaaatgaagaaagaagcaattgtttatacggattctaacagagtcgattatgaagattcctcctcctctatagcttgaatcgaagagtatgtcacgaaaagttatatcctcgtagaaaattccaacactatcaccactgaagtcatggggtgagtctgtatcgatagggactgaagatggagaccatagctctatcaggtaacgatttcctggaaatgtgtgtgatgctcgaagagttcctcctttcacctaattaaattcaagtggcaaacaaacattaattagcatatatgagatatctgtcaatagggaaaagagggaaaacatgaagaaaaataaaactctaaaaaatagagataaaataccaatgtttatagtactttcctttttttttcgtaatgaattgatgacagtttaatccaatgaatcaattttcaattctaaagtaaaggcaatttttcttcatctatttaccaaattactgtagcatttcttttttgtacatgccttttattatgtaatttttctttttcagtttggaaacttttttcatcccttgtctacgtctttaagtatgaaattaaattgagaaatgattggaacacactcgaattatacaaactttttacaaatttaaagatgtgtagttaatctccatcatataattaaaagtgatatatttctacctaaaaagttaaatgactaaaatttattatatattactgtgtgtgcaattttatagtgtatctattactctatgtatatgtgtagttattattaaatacactcaaaattataaatggtcgtagtcttatgcatgctctaattatattattattaattgtttggtgattttatttaatgcaaatcaatggaagtttcccttaaccactgtgccatgatcagtgtaaagcatgcagaaaagaagttatataaagcagcccccatgggctcatacctagactacttccaaaagatgtaaataggtcataaattagaaaaataatcataaaatggaaaccatacagaaaattacaaataaatttccaaccttgacttctttgaataatataagcgagttagttctagtgagttatgatactaagaaacaataatgtaagaggcaatttttattgttattacgttatagtatacccgtcaagcacttatatatacatgactcatctcaatgataaatacgtgtgacaaaggatcataggaatttaaaatattcactaatgtaaaaaattttaaaattttattaggtaagtctacaaagttatgtaataattccaatatattgactgtgtggaaaagttaaagtaattatactgtacacaccctatagtgtagctaactatatatatagcaccctccaatattttatattgaaattagtataaataaatattatattaacttttatacaatatggctgactatgacgcaactttaaatatattatactaattataatattacattaattgttttacattttaatttttactattaattatttttatattatattatgatgtatttttattgagtaatacttcacgattatacgactatgagtactttttatagataatttcacgattggtcagtaaaattctttaaaagttattttttcagtataacatgaaaaaaaaaaaaaaaattgtattaagcaccaacagtgcaagcaattcttacatatacaatattagaaaggaaagagaaagaacttttattttttcacgcaccatgtttgctttcggcatgtagataatttgtaacttatttttttttctttttctgttaaaaaaatatataatagtacagtagttatggaggaagcagcatatcaagcaactagaatgcaaaaaaaaaaaaa

SEQ ID NO: 22396 - DNA, 1200 bp, Cannabis sativa
cgagcgaggtggctgccttgggtacaagaaaaaataaatgtatgtatatttttgggataattataaagtgttgtcatattaaattatataattattaaagttaattatatacattttatggatatataaaaacaacaacatatttatatacaaaatgatgactagtatagaatgtgtaactagtaactaagtaaaatagccttatataaattaaaacatgtcaccaagtgtatccatttcactcaaattagtaataagttaattattatatcagaaaagaaaaagttaactattatatataattctcttatatttccttcataaattatatatttgtaaaaatgttttttattggattataatacatgtggtaccatgcacggcatatgaaaaagcttacaaaaaaaaaaggagaataatatatatttatagaaatagccactttttctcctttttatacataataattaatatatatttattatttttggtatgatatatataaattaatattagtataaataattaaataaaggcatgcatgcatgcatgactatcttcaaaactaaaaaagacacagatatgtagcactcagctgagtttttccgtcgtttccaatgttctttactataactataaatatatataatattgtaactttatattaattgaaccaaacacaaaattattattattattattcaaaataataataaaaaaaaaatcaacacaaggagtagtgttactgttaatccatatagttttaacaatctctctgtaaattttttaaaaattcaaatagtttaccgtgtttaaaataaatttgaaattttttaaaagtttacaaaaataaaattataattataaccactatgaaaaaaattgacaaaaaatatccctaacatatcattttaaacctaaaagttaattaaaaagttataattattagtcctcttaattaataatatgtgttaatcctctcctggaatgcatgttcaattttagttatgtactatatttaatattaattacattatttactattgtgtaactttgtgttgtgttgtgtgtgtccacgttaaaagtggtcgatctgatatatatttagtaaataatatatatatttatagggtaatactatggtaaatcggcttatctagcccaggcgttggagagagctccccagtgtaatgttgcccc

SEQ ID NO: 22397 - DNA, 3480 bp, Cannabis sativa
ctcatgttaaccatggtgttttattagttatgataccaactcgctctcaatgaaagcaccaaactattgaccttagaaattgtccaactgacaacggggttgtatttaactggtgcttaccacgtgttacacaattagaactagaaagtaaaagaacacaaggatttttatagaggtttgacccccttagttttttggtaatgacctactttccttttagttgtattggtaatgagagataatactatttaaattactataggtgggatctgatatagctctcttaaggttagaaagaaggaatcgaagatggaaaatctcaagtgtagagagaagctatagtgggcatgtgagagagagaatatgctatcagacttagagcttcaatgaggcttagttatgacttaacgacttaggtctcacttagggttttatggttgagttaaggttctttatataggagagattaaaccctaattaacaaataaaataaggcagagacatcagcctcacgctgcagccatggcggatcgtggtcgtcctcgtaagggcatcactcaagagaaaggaatgaaggatgcgaagacaaagagaagcatgaactgaggacctacattctctgagaagatgaaaactagaaaaatggaggagattttaggggtgggtgaactggatgtcacggatgaagaatcagcggaagaagaaggagatagaacagaaatggaggagactctggtagcagcggcggaccgtttgcagccagaggaagtgccagatttttcgagctatcttgaagcaacaatgcgaatggagacgtatatcagatcaggtaatatttcaaaaccctcaattctgagatttgaaaaattgatttaaaaccttagtgggaagtttgagaatgctgataatagggggaaagttaatttaggagttaaactagagattgaagatattgaagacaatcgacagtggtagtttatgtgcttggggctaatcctccattgcaggtttttgaaggatttgctagaagagtttggaaggaaaagggctatgataggataggagtgttggctagggggatatatatcataagatttcatactctagctaccaaggatgaagttcttgaaggagggtacatgttttttataggaaaccagtggttatggagccatgggatcctaacacttattttaccaaggaaaatatagaatcagttcctacttggattcaaattccaaggttgaatctgaagtattggggaaaaaaattgctgtttaagatagcaggtcaattggggaagcctattataacaaacaaggttactaaaaacaaagagagacttaactacccgaggattttgatagaggtccaaataaatcaagaatttccagaaataatttcattcactaatgaattagaccaagaagtagaggtgtttgtgaaatatgaaaggataccaaacatttgtgggaattgtgaaggaataggacatactaccgaggtgtgtaggaagaaagaggaacagaagaaagcttgggtggtgaaggagaaatgaatagggaaggaagaaggaaaacatgaagatgaagaagggtttcagaaggtacaaaaagtgtggaaattgaagcaaaaagaagataaaaaggagatggtggctagattggaaacttcaaacaacttttagattctaggagaggaaggagaaggttcagggacaaatttggaaattaataacatatttggaggggggagcctccaatggaaaatggataaaattctaagttggaatgtcaggggggtcaataaacgccataagcaagaggaagtcaagagagtaatttttacaatgcaagtgggtttagttggtctccttgaaaccaaggtacagtctcacaatttgggagctatatatgtaaatatgtttttgggatggtttttctcgacaaataatgcatgtcataaagggggaagaataatggtgagttggagtccagggatgtttgcagtgaatattttacaatgcactagtcaattaatgcatttaaatgtcattgcaacagtgggaagagaggagtttatggtaacttttgtatatgctctaaatgaagaaatgggaagaaggcaattatgggaggatttgattagtatttccaagaatacaagtcttccatggattattttgggagatttcaatgaaatattaagtgtggaagaaaggattgggggaaacaaaaaaacaacatccctctacattgtttcgagaatgtgtcgagaaatgcttcatggaggatatcaaattttcgggtagtttttctacttggaacaacaaacaagatgtggatccaagaatttattctaagatagatagaattcatgctaatcaaaaatggctagacaagtatcctaatgttgaggtgcactttatggaggaaggaatgtttgaccattgtctgggaatccttacagtatatcaaaaattaagcaaaagcaagaaaccattcaggtatttcagaatgtggtaggggcatctgagttccagaaccgattaaaagaaatatggtagatgagaatagatggcactcttatgtttcaaatagttcaaaaatttaagcacttgaaggctgagctaaaaagtatcaatagaagcaagtatgaggatattcaagttgaagatgcttgggcgtaccaaaaccttgtgcaatgtcagcaggaattgcaacaaaatcccagcaacagagagttagtggagaatgaaaaagttgtcagaaaagactatgctgagactcatgctaattacatctcgttttggcaacaaaaagccaaattgaactagcttaaggaaggagatgacaactcaagtttcttccatgcaagtataagagctagaagatcaacttggaaaggtggtagacaaacctgatcaggtaactgaagctttcttagatttttatcaatccttacttggctagaaaatgaatgagaggaagaaggtaaagaggatggtagtgcaacttggtcctcttatttcaaaagatcaagctagttttttgcaggttgatttcactaaagaagaagtaaaagcagtggtgtttgagatacatggcaacaagtctccgggacaggatggttttggaagatttttctttcaagataattaggatattgtgggatatagtgtttgcaaagcagtgctatcttttttgtactcagggagttactcaaagaaatcaactaaacaacactaactctcattcccaaaagtaagtgcccagattcagtggtggactttagaccgatagcgtgttgtaatgttatctataaagttacaaccaatcttatttgcactaagctaaggaagattctaccagacatcatatctcagaattaaagtgggtttgttcaaggaaggtacatgttggaaattattttactaggatctagatttactaccatgtatgttgttggaaattattttac

SEQ ID NO: 22398 - DNA, 2691 bp, Cannabis sativa
  modified_base (851)..(862): a, c, t, g, unknown or other
ttttgaaaactctaaaggagggtccatataagtatacttggataggtaatttgacagggtgtttttgaaaacaaattgtgactatgattttgagctttagactaaaaatagaaacaacaattttatgtttttttttaatgtttttaaatcattgaatttaaaaactcttcaaatagtctgttttttttttttagattctcaactattgatatgaaaaattagcatttccaatcacccaaagatgggcatattgacatagcttaagaccccgagttagatgaaattaatatacagaggctaacgacgaagtacctcttaatcagaggaagccatatacacagggtgtaagtgataaaaataagagttaatactattttagattttgtgttaaattacaaaatagattctgtattttttaaaatagtaaaaatagaattttgaacttaatttttaaaattttttttaatataatcaactagacaacaattcttagcatgaacttatgcagaaaatgtaactaattttgtcataacatctctatataaggttattactaagttttattttgacaaaaaaatcagttcaagatcttagaaaatatagggtctattttgtcatttaacaaaatagaaggtctaatcggcaacttttgcaaaattcagtatccaaaatattatttaccctaaaaataatctcatggataaggaaataacttcattcattataaacaaatatgatctcatgaaataattcttaagtttattctctaaaaagtctgtaaagacaattctgcttattaaataagagttgaacattttgatatattcgtgaatgttaaattattaatattnnnnnnnnnnnnatttatatataaatatcagaaaattcattattcatacatacatgaggctatgccttgtagctgtatagagaactaagatcacttagtcataaataaaatagtcaacaacacattagaatttaggaatgtttaatcaatggttgctaatacggttcattgatgtccgctctttagtgcaagtaatctcagttcggattattcatgttgtatgacatctaaatcaaggtgttgtatataatagagattatatatgacaagaactgatatgaataaagttatatttatcaaacttacttttcactagaaatacctaattcatatcataaagatgatcaatagtagattggtgtaaatcccgagtaatcatgaattcatgttcatgttagtttctttgattcatttgttaaaacttctcaaagaagatgattcttacaacttctattttgagaatctaataatgtggatgactgagaacatgatctacaataatggaatcctgactttcctcgcagatcgaatgttgattccctttatgtgttaattttagaactgaaaagttgtgcgcaaatttagatgggatctaaattatacttcaactagtaaattaacggtactaaaggataaaaaaataattcgaagggtaacacgataatttgaccaaaactaattacgaattgacacaaggagggctaatcactgaaattgattatatcaatggacactgtagtaaaacttagtaaatataattctttaattactaagagttcaattccatatttatagtggagtaatcatggaattaataaacagaattattttaagactcaataaataatctagtttgttggagctaagaattataggtccatggtccccagatcgccacctcgaaacactttcgagggtagggataaagagttgtataatgatgtttagaaaaatctattttgaattggcaaaatagtaattatttatttttgttataaataaataattttaaaattaattaaataggaaaaagacaaaattggtgaagacaataattgttgagacaaaaatttttaaaacatacgacaccatccttgtcttaattaagacaaggtaggcgcctaccctatagtagtagggtgtccctattagttttgtctttttgggttaattatttaattaattaattcaattcaatttgaatttgaaaagtggttaaagatattttaagttggttgagatatttctgcatctaaattataataaccaaactcaattttagatatttatttaaataattaaatatgattttgttgagcccaaaaattactaagggctagtttagcacaactgtgctgtgggggaaaaatagttgtagttgtgctgtgagaaaaagtaattgtattatgaaaaaaagctaaattgagtgtttgataaattaaaattttaatgtgctatgacctgctaagattatattataataatgataatgttatagtctagatcattataataaaaaattatgctatataaaatttttatttttatatatttttaaatatttttccctatagtataaatttatatgtatttgtgttaacgcagatttttgttaaccaaatttgagtctaaccgtgacaatctcacacaaaaaataaaagctataaaataaaaagtatgaacacacagggtgtttacgtggttttacaattaaaattttgcatagtctacgagtcaatcttattcagatttctgattcttttctcagggcctcttttgtatgagtttttccgtccttttttttttattatctggccactatttgtaatcacatagtggcc

SEQ ID NO: 22399 - DNA, 3732 bp, Cannabis sativa
  modified_base (1068)..(1070): a, c, t, g, unknown or other
ttgttatatttggataagtttgttctatgtataatattttctttattatttacaacccataattcctataaaataactagaattattaccaattaaataatgatagtttttttttgcctataaaaaaaataatgatagttaagagttataaacatgataaatatctttttgcctattccatttttttttttgaaaaatattatttgtcattataaaagacaatttcataacaaaactaatattttgttcaaaaataacaacaatagtatttgtcatttttttttggtcaatcttataatattgtaaatgaaaaaatatattaatattttgttacaagatactttttttggattacaacaaagctttgttgttatttaaaattgccaccaaatattttgactttatatatatatatgaaaaaatatatttaaatcatccctatatatataaaccgatgcatgaactcttttgcccacttaacacttgaaatcataacagtttattaatggaatattactaatttaatttttttttttttatgaataaaaaggagattacgtgctgtatatcttttcctcatctcttcgatcattttgacaatcttagagactatatgttagctacaagagtcttataccttagcaattactttaattgggtcatcggtagtcacatcaagagttaccatcacataaatgacaccatctccagcaagaatcaagcctttctttaatcgctttcaagagaagctatggtggattttgaacccttattaacccaaacaagaaaagatgtcagtaaaaacaattcttaccattacaccacacaacacgtgattaactaattaatttattttaaatatatacaagaaaattaacttcactcaagtggcatatacacacaaaaataaaaaatttaagaaatttacatgcaatgcaaaatcatgaattcatgcaataataatactatatgaccttaaggcataaataattattgtgaattaattatcacattgtattctagttttcaacatcaaaaaccaaattgtacataataataataataatnnnaataataataatatatattttttgcaaatggcacattataagaagctggcaaatgataatgatgtgttcatatggctaaatttaattaataatttaaatactataataattatagaaacctgattaagacaaaagagtttaaatactaatattgattaattatttggaaaacaaaggtctcattgactataaacagattcaaacaacgtgggcttcatcatgtgtacatatcaatatataaattaatttaacttaattaatcatcaattgaataatctctacatggtctcttatatataatattattgagaaattcaacatcaaaaaagtctttaggggtgattttctacttatgacacttaaaagaaaattataacaataattatttttaaatgacggtatatattatatttataatatatacacatatttttttttttcaaaaatctctcgctgaaaaatagagtttaaataattagtttcacccgtgtcataactattttgaattatattttcaatcaattattcaaaattaatttctcgaaagctaataatacgaacaattaaagactatttaaatagtgattatgtatgcaaagactatttaaatagttattatgtaagcttcattggtttgtgaaaagaactacaagagaatataagatcaaacttgtcattcttttttccattaattttcaaagatgatagaaatattgaagaaaagaaaaacacacacatataaatgtgctgtgacattaattatactcattatatatatagttgcaatatactaggaattatatatgaacacaatttgcaattcatttatataatataaaacttaatatgtatattaaatataacacacatgcatagtagctagattaggtttgaaaaccatatataatataaatagtagtatttgtacgtaattactaattatatagggagtggactacaaagtatctagggaatttagatcaagatagtaaaatactgatatcaaaagcgcggcaaaatcatcacaccaatgtagtggtaggaaagcttttactgatatcttttttgtttgagtcaagagttcaaatctcagcacaaccctttattcaaaggaattgtacttgatcctatgggagactagcttgttgtgatggtgtcatccttaataagatgcatattgataatcaaattaagacagaatgagtagctgacatgtggttttcgagattgtcaaacctaccgaaagagtagaggaaagatttactatgtgatccctttttttcatgcaaaaaaaaagtgctacaaaaatctttgagaaagtaactcgcgacactataactacatgcaaatggaagagattctagcttgaaaaacttcaagacaggctttgcttttggtgtaggcggttaggtttgtgcttagggtctacttattttaggagcctaatttttttttctgttaaaaatatatatttttttactgattttaaaaaataatatattgttttttttttctaaataagggttaaattatttttttttcctggcccattaaatttgaagatggacctacttcattagtacccaactacaagttcatccataagagaggcatgaacaatgaattatgtctctttaattaaagaacaagaaggcatgtagtgtatcaaagttatgaattacatgtatattttttaatttattctccaaattaatattccaattccagtgagctactttcctttccagttgtatatctttatccttttgttaatttgatcccatttttcaagaaatatgaagccaatattctctcatcaaatttggttatatgtctttttatttccctttttttcttttggaccaaaaagttgttatacaagtacattttttaagtcatttttcttcaagagataatctatatgtttgttaagaaaagataaaaacacaccaaccaaagtattattattattattagggtcatttggattggatatatttgaagaccaaaattaaatagctaaaaaagaaaggagtagtttagtttgtatatgaagctgagaagagaaccagtccaaaagatgtacttataataattctatatataaaaaagaaattaaaaaagaaaaaggttttctttaattttggttacacttttggaatggttgttcaatacaacattattttgtcggctatatatacataaatatcaacttttaaaaaaaaattctgaccaaaacagtataaatatatatagttcttaattagttacatatggtctatttttctttcaatgtttatatatataaaataaaattacaaacattaattaaaatctttaacacacttttgaacaagaacaacaaacaataaactcgtagacaaaaattgggattaactagcatgatccatttggaaggtcatctcacaaaaaaagagaaaaaaaagctttatttttatttatatatggatatttatgtaaaattaaatagtaataataataataataataataataataatagtttttgggaccggccttcaactcaaatgatgagttgcttggcattgtgagacattggtggtcaatcttttttacaagttgtttacaaaagggcaactacatattacataacatatacatacaaatattatatatatat

SEQ ID NO: 22400 - DNA, 9312 bp, Cannabis sativa
cttctagcatgtcgtaatttttttttttttatgaagcttcctctttttaaggatacttcattttcttttaaaaatggctcattatgttggtgtagccaaaaaattatatcataacatttctattacatgagaagagaacttgcttgaagaagtacgaaatgcgtataaattgttactctttcatcaacattatacctttctggtacaagttactttgagaatgtttccaatacttcttacatattgtaaaatatgatgattaaattatatattatatttcatagaatagtatatatttacatataaagctaggagactaaataggaaattactaagtacaaatagaaaactactaaatacaatttacccgaatttttacaactaatattctaaaactcaccctcaagctggagcatagatgttaatcatgcccaacttgttacaaagataatcaacctgcaccttattcaaagcctttgtaaaaatatctcctaattgtttttcggtcttcacatatcctgtgaagatcaggccttgtttaattttttcacgaacaaaatgacaatcaatttcaatatgcttagttcgcctgtagaacacgggatttaaggcaatatgaagagcagcttgattatcacaccataattttgccggagagtcaaaagttgataaattcatattacctcatacacagactgtgccatacctctatattttgattcagcactagattcagacaaaacattttatttcttactcttccaagagatcagattgccccaacaaatacacaatatcctgaagtagatcgtctatctaccatggagcttgcccaatctgcattagagaaacactcaatctgggtatgtccatgatccttgtaaactatacatcgtctcaaaaaacctttcttccatcgtatgggtgtctgctggtgctcctttcaagtaacataaaatttgctctaatgctgccaatgatttattgttggagaagacataggctgactagcgaaactaaccgagaatgcaatttctagatgagtcatagttagataattcaactttctaaccaatttgtgatgtttctcaggatcttcaaatggttccccatcacttgtaagatgcatagttggattaattatagcattacaaagttttgctttcaatttttctttctcagttaacaaatcaagtacatactttctttgagatataaaaataccttgtttactctgagtaacttcaacacccctaaatcctttgtgtgaaactgggtatgaataaaagacttaagggatgagatgcctttagtattatttccagtaataacgatgtcatcaacatacactactaacaaaataatgccagtagatgatggtccatcagctatagtaacagtagaagtaggactacgagactgaaaagtgaaaaaaagattagaattacctgtcatttgatctgtggcatcagaatcaatgacccattttgagaatttggaaagaaagctattgaatcagttactgcaatgacaaaaggagatggagacttaagtgattcctgatacctcgagaacttggcaaattcatccgcagaaataaggatagatttgttagatgcatcactagtgcttgcaatattagcggaatgtttttgttgatttttgaactctaacttcttacactcaaacttagcgtgacttggtttcttacaatagttacacatggtgctttcagattctagtgttcgatttatcggtccttgtgagatacttccattgtatctacttggaatagagttttttcctggtgtagaattgttacgactcaccaaggcgctattaagaggagttgaagaggtagtttttgtgcgaaaaatacgaataaaaatatcttgtaaagggagacattaaaactagagagaacttgtgactttgtagagtttaattcaaatgagtgtcttgtaagaaaactcatgtaagaaaactcataatagtcatctgctctcgttcacgctgttgaaccttcacatcaaggctaaatgacaataacacattaagctcttcatatatttttttaaatgccataaaataactcatatgaaactgattttgtttctccacacgataaaaggctttgtcaacatcatatatgcgagatatgttgtctttgccaaaatacaaaaaatccaagtaatccattagttctttaaaccaattcacaatgattaatcaaactaattatctcattatcgatataattttgaatttgaagaaacaagcgagcatccccacgtagccacacttttcttgaattgtctttttctttgggaagatcatctttgtcaatactccttagataaagtcgaattgtcttattctattctaaataattcgaaccaatcaatttatggtccgtgattttagacatcacgagaaccacatagaaataactagtggttttggatctgatttcgtctctgccataatctcataaacaaatattgaaatagacaaggcagaatcaaataacgaaaaataagtaaagaacacctaaatactaagtagggagaaatatcaaactacaacctgagacagatgtaagtaggcttaaggttaaggggagccaaaaaacgaaccatagatgaatcgccgttgaaacttccgtcacatgcacatgcacgtggggtaggtggtagaagaaacgagcaacgtgtgagcgacacgcgcgaggaatccagtgaccggactttggggtttggcagatcggcggctggacaatccttctgagtgggtggtgagagcaaaagatccctctaaatgaatccgaaaaagaaccctaattgaaaaacccaaatttgtgataaaccttaatttaaaatttcgaattcctaatctcacaatcagctctcataccatgtaaaatatggtgattgaattatatattgtattccatataatagtatatatttatataaaaagcaactaggagactaaataagaaactactaagtacaaatagaaaactattaaatacaatttactttaatttttacaactaatataaagctaatattctgattaataaatatagagagagccattgataaattatatatatatttatatatatatatatataatatttttgtttcaggaagagtataaggtacatgaatatatttcccataatagtctttagtaggatatgattttcttcctaccaattgttgtctatattttgttaatatgattacacgtaagatattcttcttttgacatgcttagaatatatgatttgattgatagaattcatatcaagatagttgaaaatattatggctaaaattgtcaattgctatttttctgtcctgtgacccttaatatacctactttgggcttccgttaatactttattttttgtaatgatgtatgttgtctccattaaatgaatttctaagcatgtatacgaagttctacctgcattgatcatttggaattttctaaagggatcatgaagcagttttccagcatttgatttttttttccttcttcctgaccattgaaaaataattaggtactgaccgtagtcttagagtcaatgccatgcgtgcagcaatatctgatgcattcccagagccgaaccgtcgcttgttacaaaggtatttgtgacttcactagtttctatcatttgtacgtgacagtattatttgtcttctcacctcaatgaaaattgttttgttttttattgactattagttgatttctcgtaaaattttcccatccgtttcagaatacttataatgatgcggaatgtggcttctcacaaggctgtaaatcgaatgagctgctcagccgtggcagcttgcatggcacccttgcttctacgcccccttctagctggtgattgtgagatagaaaatgattttgatgtgggcggggatgggtctgttcaacttttgcaagcagctgctgcagccaatcatgcacaagctattgttataactttgttggacgagtatgataaaatatttggggtaacaataagatataccttgttcataaagtgttttggagttctgttatgcttttctattattctaccactaatctacatgctcatttgttagtgtatcatccctttatgctagtttttcactcaaaattttctttatatgctgaacacaaaatatgttttcttttttccgcaaatcctgtcatctcatttgaatacatgtcaagctcaatatgtagcaagcaataaaagtggttgcaaactaaatttacagtaagaatcacttatcaaaatcagaaaagacaatttgagctccacaggctccatttattttgcaggaagattctatgacacctgaaccgaatactgaatcagaagagagtggaagcgagtccggggaggcgactgacgatgacgagtcttatgaagatgatgatgcaacacaggaatctgatgcagagactgatgatgatcctgaaaatgcttcaagtgaaatgtgcagtgagagtggtgattctggagacattgttatacataataataaggttgttcttaattttctctccctccccacacacacacacatactacatagaataaatgtctggagatgtggaatgtaatgtacatttagatgctacttggtccttccactggcatcctatgtacttatgctctgtctctgcccttattcctatatacttggtccattgttacctttgtgacaacatttgcagaatgatgtatacttttcacatttcatgtttgtataaaagtttcatctagaaagtttatttactgcatgcaggttttttttgtattttttaattattttgtttcactctccctttttgtaccatatataagcctgtaaaaatatgcatgcatgttcttatcttttattctaatgatttatatttgtcagtaaaacatctatcaatattttttaacaacagtaagtatacaggaatgtcctgactataactccggtccagactcccctgaagtaggtgatgacaaccaatctaaacaaaacgtggggacaagttttcatgaatcgttctcatctcagtctgatgttcaatgcaacactaataatattcctgaaaatagtgacagttcagtggtgctggctaatgattctgccgaagttataagtgatatcccttcaaggatgagtttcactcaaacttcaattgctacctcatggagtcagacatccacaacaatacccagtgtaccagagtgtggtgcacggaatagaacttattgggggcgtacctctgtgagtataagtaacatttttcacattaggcattttgttttgctgttctataatttggaatggtaataagtattgcatgacaacaagaatagtcatcttctgcataaattaagctagtttgatcctaagacagttcctgttttctttttgggcaatacagggaagaaagaatctttccatggaatccattaattacggtactgaagatgagtaagtgatgcatctgcatatgtcttcagccttttgtttttttgctttcttaaaaaagataaatccatcttattgtgttatattagttcacatgatagattgatagttgatccttgatcctagatacagatacttattctattttttgtgatctgtaaagttagatttcaattcaagcagtctttttaatattaaaattattattatgatgaagggttgagatccagagacttgaggaaactaaatctgagttagaacaaagaattacagaagaggtaagcatatatcttctttcttacaaacttctgtatcaagtttgggtagttttcataatcaggttctcttcttattataggttaatcagaatgcagttctaaaaataaatctggaaagaaggaagaccaatttgactcaacgtcgtctagctcttgagcaagatgtaatggcgaatatatttttctattcctttcctactttttaagaatattttgttgtcttatggttctcttgttaaatgaaataagcttgaatagaaatttcggattgcatgtgaatctacagttgccatgaactaaattacaatgccaaaaataattaaataaataaaagcacacatacacacacacacacacacacacactcagatttccagtttatgataaatatattaatcttgtctttgaaaagtgttaatattgattttcagtagacagcttactgcgttggcattaacttattgttgtcagtggggataatttaatgtacttgtaggtagcaagattacaagaacagttacaaaaggagagagatctaaggctggctcttgaagcaggacttaaaatgtctcatgggccattgccttatctaaccgctattgatgaaaaggttagtcatttttttagtggtcattatataccatgaattttctggtcatgtaccaaaaatgtaacatgcaaatgtgctaaagacaaaagcagagcttgaagaaatagctacaacagaggcagacattgtcaatttgacgcataaacttgatgatcttggaatgcatcttaatcaacaacgtgaactacgccaaggatctatcccaagcatttgcaatttgatagaaaaaaatcaagactttcaaaccaaattgtatgttctcccttctaatttggattcaactctattgcattaaacactcattctatgatttctaatgtataaaacatgctcggatttgaattttcaatatttttttaactggtgcttttaacagaaaatatatgggcacaaataaattttcattaactaagaatggatatacaggaaggagagacaaaaagatactgaagtcgtagccccatcaaattttgaaaggtcaagaaataaggtaattcttcattgagatatttcttttaaacattattttgattgcttacacttgctttaccataattatttttctctttacaacattgactattgattagtagattgaggatagatgatatattgtggccaaggaactattatgctttgatcaaagccttactctggagtcagcaaagcttaactggttattttatatagaaagttttcaccgcagctttagatttaagatgatggtttaatagctaaactaataaagtttattcgtttaatgcttaaatccagtatgaggatttgtgatgttttgatgatactaaactggccttgcgccagtagccatacgtgattgcgttatgattgagtatctagtaaatagttgctatttttagctattacttatcatcatcatgcatcacaaagatgaaaacaataaacgggtaattaagtcaaagttgactatttgacacaagctagagatgtttgacgcattaatggacataatgttaaaaaactgaagatggttattagagaagatgttggagaattaggcgagtgtatgcatgataaaaatgtggatgcgggaagaatatgtaccttggaaaataccttcattcaactgggttggagctgatccagtttggtttaaattttactaatgaaagttattgtttgtgaaatttgttaaaagaaaactatttatctataacagattgtttcatatatcttcattgaggtaacgtcagtgttatggtggaataggatgctcagttaggtgccacagaaaatgagaacgagaggacgcatgattctgcatccttaacaaataaacatgcacaaaaatgccaacaccagcaagaaatatctagtacaaactatcaatctgttggggtgttagcggatccatctcctgcagagccagtggcagccagacgttttgggctacctaattcaaagaggattgctacaaagggtgaggtaggtttgttgtatgctatctagttggcttggtcctttgtatataacacacatcttctttctacattcattggcaaaaaatatgcttggtgtagtagcttcttatgtttctccaaaggctgcacgagggagaactagatattattttttttcttttccgttttttaacacctgtttacttgcacaacagggagcgaattcgacgacttctgcactaacaaagttgaccacccgactaaactttttgaaggaacggcggagccaaattgctacagaactccaaaatatggacaaaggccgagtttcatcacagactgtccaaaatccagagaagggtagagaattgccccacaactacccagagaaaggtcaaggatctgatgtccaagccaacccaaaccctgaaaaaggtatacacttagacaaacccgagttgtttcagaaccaggtgaccgaaggtcaatcatttgaaagtccagagaagataaaaaaggtagagagtcatgcccccaactacacagacaaagaaaaacgatcagatggacatattaaaaatatcctggacagaggaaaaccagagaaccacacgtctcttaacctagataaaggccaacaacaatcattcatcacttcaagaacaaacaccagataataagaggtgttgaataattgctcattggtgttgtgtttctgaacatgttattgatatgtagtgtgagtgtgaagttgatgtatgctacaaaggctgatttttcatgaagcatttttattaaagattaaaaaagaaagaaagaaagaaaataaaaaaagtagagggtgtttgtaattcttagaatctttattgctcagttgtacaaaatcatctccttcccttgagtgttaaccgaaataaatttagtcaccttaactactatctgttttgctggtccagcgttgaagtagaagaagcataaacagtaatattgcccacaactgtgtctatggttcaagtgtctattgttcacccttctcatcttgatcttgatcttgtacaaccccagtgaaatcaaaacaacgatggaaggaacttttgttaatcaaatttataattatcgccacgtggacatactttattggtttataaatatttttcaattttttgaaatatgtactatctaccttagagaagtaaaataaattattttaaacattagaagaaatatataaaattattacacaaaaagtaaaagatattgtaaaactttaaagactgtcacttcttgttcattttaccaccacagaaattcctattatgtttttaaagtcatgcaacgatgcacaattggcgaatatttcagttctttcttataaaaaaatagtgcattattatagttatcaaaagattgtcaatatcattagcgaacagcataaaacagatcacaataaaacagatcacatagggctcgtttggaacgccg

SEQ ID NO: 22401 - DNA, 2589 bp, Cannabis sativa
  modified_base (122)..(123): a, c, t, g, unknown or other
ctacagaaaggatacaagagttaaagatctgagcggaaggagtcattatattctgctgtaaccaatgtatggttttctgagctcttatggatttaatttcattgttttagagatattcatanntaggatgttaatcaacatactttttagtaaatctaagtcctggtaaaatattttgaattatagaaactatcaatatatatacacattctataggttcttcatgagaattgtctgcctagcttgatgagtgtgggaataattttctatactatgtgactgtcactttacttttacctcttgttaaagatgtgctttgtggggcaaaaaagtaaagagtccagcttttacggtctcataataccccaaaatatagccatagccatatccataggggccttcttttggcaaaaagtccaaatgttgaccattttagactctcttgtctatagtctacacagtataaacttttatataactaaattgtctattgtccttgtattagtatcaaatcccccctaatcatatgaagaatcaaagattagaaacatgttattttcaatcccaccccaatgaaaaaaataaataaacctacattaaacctccttgaaacgacacactacaattgactataaccctcaagacattttctaagagaaaattataagtaataattacattctctacattctagaatatttttctaggtacaatatcgattcatcaacaaaattagtaattagtagtaattaaaagtagtaagcaattaaaagtagtaagtaatatcttcatttaaaagtagtatgtagtaagtaatatcttctatatacctgagctggtttcaatttctttatcaaatcgataattttgttgttctttacatattcccattttgcagcagataaatttgagaatacgaataagatggtgcttgaatagtaatattatttatttctgctttgttatttttcagcccttgacattgtaaattaaatgttaagttacttaataaagtaatagctattcaatagtatataatcaaaaataatatctaatgaatgtagttattttatgtatgagtataaccattgatgaagtgttattgcttcgaaattgtctggattgattttgattgtacttgattcacgacttgacaatgacaatcctgtataaaaatgatactttaagcctatttaaatggacaaaattggtaggaatatatatatggtgtttgttagtatataagtacctctcttagtttgaacaatcatctttgttcccatcattattgggttgctttcaataacttcagataatttttcactaatgtcttgtaccaaagcaccccacagagtcaaacatatcgggttgaagctacaactgtgattgaaaaagaaatgacattattagttttgttatgtatcataattttaaatccatattaaattattgttagtgctctaataaagattatcattatgtatttgtatgttatattttatatatctgtcatcgattagatatatttcttgtatggttcgttgtttataaactaaattgaatgtaatgttagttaaaactttgtaaatgatttgttatgtgttatattgtggagatcctaagttaccttatggtttgttggagtatatgtcagatgacaagttcttaaacgcaacgaattcatggattggtttagaaatttgtttgccttcttcttggacttcaacaagttgtgtttttgagttcagcgtctagccataatggtaatttgtgtcagtttgaaggtatttggcaagtgttttgttgacacgggcatcactgatgtagtaggtgtgtaactcatgcaaagtgtcttccaaagcatcaatatcttctgcgaaaaattactgcatcgactctcatttcctgtgtaaagtttatcataaagacatgcaacaagattttgaattagataaatattaaattaaaaattgtctagcactgtgtaactaatattattgttaaaaagaggaatgagtctacatttggatcaaataaaaatagctttcgatatacttgttcgtggtggagatttatgttgaattgttatttttattttccatccaatagtggttggagtgatgtcatctactgattggtgtagagtcggcatctgatatgctcatttaataatgatattttgtaaattaaataaaataaaaaatttattgtgagaagaagcaatgtctcaaatgtaataaaataataatgcaatataatattaatatagaaacaacaataaatcatattttaaaagcatttagattgatattttagaaaagctaattatacaatcactttgctaatattttgaagagattaatttaaacaagataatgctaataactctgtgtacactatatttttagtcgagttcttatcttgttgggaagttgaaacaggtcggattaagactctaactgtcgataatgtctttgctcttgatattgctgttgggttttatactctaaataaaactcatttcaatatgatcagatttacttattaataaagatcagaaataacatctttaatgttgcatggttcaca

SEQ ID NO: 22402 - DNA, 5722 bp, Cannabis sativa
  modified_base (3904)..(3907): a, c, t, g, unknown or other
tgcaatgcaactaataattacttttaaaaatctttttctcaaaaaaaatatatatttaaaaataaacaaaagaagatccaatgcaatatatataaatagaacggttatatagtgccctagactctcctctctctcaacctttcctctccgtactctccgtatcctcaaaaagtatcttcacatataaattcacacagacaaaacacttttccaaccatcaaaaaccatcttccctttctctctctcctcatgaccgatcaaaacggtttcgcggtcgacgacggcgacgaccgcaaccccaaccgcagccaccatagacacagccaaagccactctcccacctcgatctctcaaaaactccattcctccatctccaacatctcatgctgtttcgccccaaataaaaacccaaaccaccatcccatcagccccgtccacgtcaccaagtctcggattctcggccgaagctcctccgcctggatgaaattccgggaaaatcattatcatgaatttaacatgtgtcgaaccctaatctcgcgtatcaggcacggtcgccaccgccgccaccactccgccgatttccactacgacgcgctaagctattcacgcaacttcgacggcgaggacgcccacaatgccgacgatggtttccccttcagaagtttttcctcgagactgccacaatctcctccggctgcaaacaatgccgaagacgatgatgatgataatgatgaagacgaagaaaagaacagtccgacaccgtcgtcggcggcgagggaggagataactattacttatatatgattaattagagtttttttttaagagatgacgtggcagtcagttattggtgggattttgttttgcatggagaaattgattgaattatgagtgtacatacgacgtcgtaattaagttagcaggtgacgtttttcgggctaggcagtaatatcttttatttctataacacattagacgatctccatggggttgccctcacatatgcatatgcaatgtggtctcttgacaatgaccatatagtattttttttttttaatttttcttattttaaaaagaatttttttttttatataaaaaaaatattttttacttaaatagttattgatggtgtgaattataatgggtaacttagttgtagtatttttttaagagaagatgacaaaattaaaaaaaataatattttaaaatgatgtgtatattttgaaaactataggtgttgcctctattagagatttataagttatttttgttgatggtttagtttggtctggattttattcttttcgaactaaacaagtaatgttggtttttcattctttttgaaatcaaataaattaatattcctaacataatgttaaagtaattattaatattccagggtccgatggagagtttggaccacttaatttcagatcacctttcccctattaagcaaatggatttagagttaattccatggcatgaggaaattaggcaaacactcttctttatggggagtgtaaaggccctaggaccgaacaatatgtctgttttgttttttaaacactattgaaactcaattggcgcggagttgtgtgaggctgttgtgtggatttctttcatttaggttctttgcataaaggcttcaacgaaacaaatgttgtcatgattcttaaggttcccaatccaaagaaagagtcgcaattcaggcctatctctctttgcaatgtgatttacaaagttagctcgaaaatcattacaaataggattttagaccgattcttcacaggctgatttgtcccacacatgcagtttttgttcaaggacggaatattcaagacaataatgttcttgttcacgagatcatccattcttttaaacccaagaaaggggaatgagggtttttttgcgctaaaaattgaccttgttaaagcctatgataagctaagctggcaatttattgaccattttcttcagagttttaaggctttcgacaagttttgtaattgggtccagcaatgcatttcttcgacttccttcaatatttgccttaatggaggttcaattggcaggattactcctgaatgtggcattagacaaggggaccccctgcccccttatctctttatctgggttgcaaacatcctcacccgtattcttgaaaatgccctagatgccagaataattaaaggtatcaagttgacaggaatggtcctcgactttctcatcttttctttgtagatgatcttattatagttggtagggccaccttgggagcagagccggacctgagctaagacgaaggaggcagccgccttaggcccccaccactcagaggcccatttaaaaaaaataatatataattagtaataaaataaataataatacttttaatgcttgttgtagcctagtggtaatttgattagtttaacaattaagatgttgagagttcaattcccaatagcctcacttttttatttttgcctaaggcccaaattaacataggaccgaccctgcttgggagaagctaagggtatttggcagtgtttgaaaaaattttgtcattggtctggtcagagaattaataagcttaaaacttctgtcttcttcagtaataatactagtgtcgggatggagtggggtattaggcaggaacttgggctcaacaatgactttgggaatattaactacctagggctccctttgtttaggtctcgcaataaggacgcgaatttcaatttcattctagagaaccttatctcgaagctacatatggttggaagttaaaatccttatctaaggctgactgagctactctaatcaagtcagttggcctttcactaccaacttacaacatgcagactacaaagttgtcgaagaaattagcctccaaaattgatgtttggtcagggatttttggtgggattgtgatcaaggcaaccggggtatctacttaagggcttgagattgttgtgtctccccatgtcccggggagggttaggcttccaaaagactgtggaaatgaaacatgttggctaaatggagatgtgctctaatcaatgaggaagattctctatgttgtaaggttttaagggccaagtatctacggggtaggcattttttgaagttctcctcaaagaagtctaattcgtgattctagaataatgttctaaaatttaaagaaattctcaaacacggggcctgtaaacttattttggatgggaaagaaacaaagatctgggaggatccgtgaattttacatggccaaacattctatcctcgacctaataacaatcggcataaggatctagagactgtggcagatttatttctagacaatgggaattgggacatctccaaactaattcatgttatttttgatcaagaaacgaccttcaatatcctcaaaggtataaacctagtgggcaagaaagagataagtggatatagactaaagaatcaaatggttaattttcgacaaaatccgcttacctcattcaagctttgcaacgtgcccctttgtgtagtgttgcttctgctttgtggaataaactgtgaaattcaaaaatcttagaatgtcacaaagttctctagtggagcatcctctcaaacactttgcctatccgatctctcctcgctagaagactaaacattgaggatgtctcttgccctctttgtggggagggtgaggaaatgatggagcatttgttcctttattgcaattttctggtcacctatggaggtcgtccttctggggagttaatctggtgctcgaatctggagctcgggtctgggactgggtccagttcctttcgagtcttaaaactagagggttgattgttgtgattgttcctttggaggcattcttcagagggtttttagctttattttcttgcacaatttnnnntattttatatatcatctttttgtgagatttttttatcttttttccatcttattcctttgatattttctaatcttcttctctttttaatctgcaaaaataaaagataaaaaacgtaaaattgctctaaacaagagtagaactaaattaaaaacacactaaaaataatactaaaaacaacctaatagtgatagttcaagattgtttctttatgcttcgattatagtggacacaatttggaaagcccgtataaggtacacaataattctctgagtaataacctcaaggattgtattaattcaatctctttttgctacgcagattatggttcttgtctgttggattcatcgaggaatgttgggtcttctgtttggacccctccacctgtaaattgggtctagatcaactatgatgtgaaagttggttgtggctcgatatgcgtggtggctttagctagggatcattcagaggaaattttgtggatagctaccagcatgctcaaattttctgatcctcttattagggaagctacaacctgtctgttagctgttgagacagccagtttcatggaatcacctttttgtgatgatagagagtgactcgggcacagttatcaggacgctaacaggagcttgttccagttggagtattggtaactatgttacccaatgtaaaaatctctaaaataattttttaagttgtaattttttatttgtttctagattatgtaactttgcagcccataacgtggataggtgggcttttgctatgaatgtttcgggtatggtggatccttcttccataccaatcgaaattttgtgtaatgaccctgaggtctaactatgtagttttaatgtcgtttattaaaaaaaaataattatattaatattatgcataaaattattcttaaatattaatattcaataaaaaaaatcatattatagtatatatcaagaattaggcagttcgatttgatttgaatcacgaacaagtttggaaccacagtatgggcaccagtggtcggctctcacattatttaattttattgctattatagtgtatcgctaaaacgtacaccaatttagtgtaaaatcttctactttttggtgcaacaactccaatcactaacactaaatatcacactaaataaatatattttatttaaaagatcttatattttatattatttacattaatagcctaaaataattaatttatgatataattatatcataactactagtaagaattaaaattttaaaataacttagtaaaataaaatatttattaaattaattaaatattatatataattttttttgttaaaaaagaaaacttaaataaaatcacactatgtttatttaattattattttacttaatatttatttttatttatgttgttatttttagtttcataatttaaatgttgtcttatttttattttattcagtattagtatttttattgttattattattttgtatttttaatatgttagtgtgttttaaatcaattattacttttgtgataaattttaatttgaggactaaaatataagattaatttttaaaataaattaaaataagggctagatagccaaaaaaaaaaaagtttaacaccaaattggtgtagactcaaaatccaacattcttaatggtgtggaatttagtgtgtcattggagtgaaatagtgtgaagattccccaccaatttggtaaaatagtgcaccattggagataccttgatacaccatttcaccaaattggtgtggaatctttacactactttactctaatgacacactaaattgtgcacca

SEQ ID NO: 22403 - DNA, 5087 bp, Cannabis sativa
ccaaatctgaggtcaacacaaaataacaacaaaaaaaaaaaaaaaaaaaaatatgccaaacaagtaccagccacaagctattatcaaggttcacatgttgagactaaaaagaaaaactaaaataaaaacaaaaacagcccactttgcaaacacaaaatatcatcattgttgggcaaaacttctcaatatctcccatgagtgatcataatcattcactacttgagtacgagacaagagcagcaggaacgacagaaacatgccaatagacagtgacaaaaaaataattttccacaatagaaattatggcacttacacaaaccctctcctttctagcttcagggactgtttcacttaaccaagctctttagattcagaaaccttacggtgatggaagctccattaagtacaaaattctatacatgcaaggtcaagatctctcaattgacggacatgcttcatcttcatttaggaaaggttacatttattttttatactaaaaataacaagtaggctatatctcaagaagtaccagttgaaactagaaacaaagtgaaatttgataatccattagttgtggagaataattgcaaaactactaagcgctttcttcttatcttccatttctatgataaaagaggtcacaacagaccatgatgttaaaaactttaaccttatttgacaaacatcattagtactcaaatatctcacggatagcaaacttttctccaaaatactgaatgaaggaggagatggaaacaaaatgtagagaatctagccttagtttctcatacctcttaatctactttgaaggagttaaatggtattttgatagtggttgctcatgtaaccttatcatttctcttgagtctttatttaaccttcaagatactaatgaaggtttcgtgacatttggtgattgaaataaaggataaatcatgggataaggtgatctgaaactcttaggagtatttcccttgacaagtgttctatatgttaaagtgttgaaggcaaatgtaatcatcattagtcaactttttgatgctaattatgatgtaaggtttactaagtcttagtatttagttttattttattggattttagttcttataggaaacatgaccacaattaatcattgatatgttcttttcaatcaattcaaatatcaccgcgtgtatttggacaaacctgacctatcagattacagacttcatcatctaatttattgagatttggagaagatagtgacactaaaagtagtacttggagttcctatgtttaaaataggaagaaattaattttgtaggacatgtcaataagggaaacaaaatcgatcttcccatcctcccattattgttcttttgacaagaagatttttagaggattttcatatagatttaatggaaccaatgcaaactgaaagtatttcttgaaagaggggtgtgatggtgtgcgtggatgacttttcaagacttaccttggtaaattttctttaagagaagttagatatatttggtgctttttcagctctttgcttaaggttacaaaaggtgtatatggtttgatgtgatcatggaaagaagtttgaaaacttgatattttctcaattttgtgaaaagatgggaatagtcatgagtattagtctccaaagacacctcaacaaaatgtcgtggtggaatggaaaaacgaacattgcatgagatggctagattaatgttgtatgccaatgaagtggcaacataattttgaataatgtatatatgcatgaacattttcaaaaaactctgagagactttaaatgttctgctactattttcttttatgctcatatatgccaatatatatacataggtgtttatagttatggaacatagaagatttttactttcaaacaagaagaaacaatgttgaagttgattggtttaaactaattgaacttattggatttttaaaaaccaatctaatcaaatgttactaattgaatctttggaaaataatcacacaaaaatagagttgaatgaagatcaagatttacaagcttcccctgcatcaaaaatacattacgaatggataatgcttagatttcctagaactatggtaaagtaactctaatatgaatctcaaaatataccttatccagttttatacatgtccgaataaaataaagcattaaaagattcacatattcagtttaccctaactctttaatagaattcctgaatataaatctacgtccctttagatttttttatagccaagatccccttggttctcctctgctgaaatcccttcaataacacaatctaaaaacccataaaattaagcaaaacttaaaatgtacttcaacttttgaagcttttcttcttcttcacaaagaatgtaccaccaagtatgaaaagaaagtataccctagtagagcaacctaatactactaacaacctaataacttacttaaccttccaaaaatagctcatcatatctggcattgagctgatacagttgttaaaatgacaccacaaagctcacatggcaagatatgaaattaacctagaaaaatagatacttctaacttgtcaataaatgaagatctgcgtataatagaattagatgaaactaacaagccagtatacagtgacaaaaacataatttgccacaatggaaaatatggcacttacaaatttcgttaacaattttgttttcttgtataaattgggttgtgaattttgtgctctatttttttctacaattgaaaattattattcatatattagaacttgaaagtctaaagagagattactcataatttttagtatttcttgttatagctgaaattttttgtttggtttggctagttgctggctttgaagtattcaaattgtttacttttaggtacatattttatctagcacttttctgttaaaaaaaacaaatatttctctttaaatttgagttcaatgtttgctattagtttttataagtgggtatgacttaatcttaatatatgttggttatctatgtggctttataagtttttaagtatgataataggaaatagtttgtgattatatattattgtggaatttaagaggtcatgtgcttaatgcaccactttaatttttattccactttagtaagatagggtcgggtatgaaaaaaggaaacaaaaggaaaagtgagcctggcctattttgtatgctagctaagcctgaaggtgaaattagccagtagaaggttcaaagtatgcatgttactttttattttatttttaatatggtagtataatataatgattaaatcaaaaaataacacatattgtactagtggtattagatcatatgccctgaaatgtgtatctaacctatcaaatgtaggcttctcatttaatgttgtaagcacaactgtcataattgccatctcgactgttatgacagttggtcttccgtagtgtttaggttgctataaatactattagactccattttcttagatagagaaccaagtgtaattctcaacttgtaatgcttactcaaaatcaataaaactgaatttttctcaactttagtttctgtggttgtgctttttgttctgtgaagtacttttgtgtgtgttcattggagttcccttgttgtgtatgtatgtgtatgaagatagtttgtcattggtgtttcaaacacgtggtatcagagcactagagatgaagaatcagattcaagggttcaagattcttgaagatctacccaaaaagaaatgggaaatgaaattttgacattgagaagtaaactggaaaaaatgattacggattgtggcatgtcaagatgagggttcttcatgatcaatagggtctacaagctacacttctttgagaaggaaatctaccaaaaggattaactccaaaagagaagacaaacattcttgaaaaggctcacagtgcactcattttgattcttggagacaatgttcttagagaagtgtcaaagtaagattcaacagctggattatggttgaaactagagagtttgtacatgacaaagtcactgacgaagaggttattcttgaagcaaaaattgtattcctttaagatgacagcaaggaagaacatttaagatcatcttaatgatttcaataagttgatacttgatttggagaatatggagatcacagtcgaggataaggatcatgcaagcattatagtgaattctctttccacaaaaagttatgaacattttgtggatatcatgatgtatggtaatgattcattgaaattacaggaagttcataatgcattatgtcaaaggaattaaagagaaagtcaaaacaacaagaaaaaggtctggggatggtttgttggtcaaaggtaagactccaaagaaggaaagtaagggtcaaaacaattcaaatgaaggcaaccataatttcaagttcaagaaaagaagctttctatgtaacaaaaccacacatctaagaagagattgctctgtcctaaagaacgacaactccaagaaagatggtgatgctgatgtagtttcaagtggagaaggcactgatggatatgatagtgctagtgttctattaatcttcaagaatggatcagaaggtgcttggataattgactcaggttgttcttttcatatttgtcaagatagaagcctattttcaagttattcaactgttaaaaatggtactgtaaaacttggggataatcgatcttgtccagttcttagaatttgtattgtcatgctgaatctagataaaggaaatgatattgatttaagccatgttcaacacgtaccagatattaaaagaagtatagtctcagttactatcatgatcaagatggttgctctattgaggttgaaaatggtatgttgaatgtaataaagggatctatgacaatcttggttggagttagtatgaatggtatctataaattgaatgaattttcagccaagaaccatgttaatgccaccacttcagatcagaatagatcgacaatgatttggcacagaaggcttagccatatcaatcttggtcgtttgaaatatctgagtaagaaaggagtgtttgagaaggatcaaattactgaaatggat

SEQ ID NO: 22404 - DNA, 2558 bp, Cannabis sativa
tgtaatttaccccaatagtgggaaataagcagaaatcctaagtgggtcatgggacgatccatacctatcacttagcctataaatactccttcatttccatgcaaaggggtcaacatgaaaagacatagccaagactctgctaaaattatccttgatcttcttcttcttcgaaaagatattatgggtagagagttagggtttcctacaaaaatgttgtaaattcatcattattgcccttagaggctaatagactgactcgtggactaaggtcatctaacacctgaaccacgtaacaatcttcttctcctaattttctccatttactatttctttagctcttaaatattttagtttctaaaaatcttagtaaaaattttgctattttcattgagggtcgaagaaagatgaaaaccacggttactaccatggcgtccacactaaagacaactcacaaaaggactcttcaaggtggcctcgagataatcatggatgaagtaaaccccctctcgctggagcacacacaaccgagcaacgtgagaggtagaggcacgttcaatgtgaacgatcaagaggaggacctagacaaccatcatgagcatgttggtaatcacaaggatactaggaaccatgaaggggaagaagtggattatgagggttgtgccaaaaatgggttttacaaagatggccgccattaggaacatgatcctgaggtaacgagagtttccgatgagttgttcaaaactcagcaaaagctagctcgttaggaaatattttctcaaagaatggaaatgatgttggactgccttcgaagcaagtttggggatctagacgaaggagactctaatgatgatctttcagtggaatacatcaggagaaataccacagaaaaccccattggcattggaacctttgctcctgtacaggacaaggggaaggtgaaagtgggtgacccaaaaaactcttccgctcctgagcctcctcaaaaaaatacaaattaggccaacaatgccttcttggagcagaagacggccaatgcctctaggcttggatgtccttcagcctaaaaaggccctgtgccgccgaagaagattgctaagagagtatgagaacctaagggaaggaaaatccaccctagtgatttggtaggccaggacagtgggacagaggagcaacactccaacgatagttggttcaccgtggaaatgacctcaaaaaccactcgagcaagaaggtctatcgaaaggaactccctaaaagtgatgaaaaaaaattagaagaccaaatagctgccttaacaaagttggtccaaaagcagaggggggccttcattgattcggaagatgaagactcagagccttgtgtaaggcggatcatggaggctcctcttcgaagaacttcaaaatgcctcaaattaagctgtatgacagactcttggatcataagactcacttggccaagtataaaaagattatgcaagtggccagggtgagcggtgatgccaagtttttgtgcttctcattaacactcaccaggtctgtggaagattggtggtagaggctaactcctagatctattcactcttgctaaaaggatttacaatccatatttagaagcatttcatagctgcatgcgagtatgatttggaaatggggtccatcaccaacatctaacaacaagtgggagaaaccctaaaaagttttattcagcgaaagatggaagcagccgctaaaaccaaggtaaccgatgatatgaagctcatcgccttggaatctgggctcacatctggctccctattgttgggagaaatgtagaggaagagggttgaaaccctctctaaatttatggccaaggcctaaggcttcataagtttggaagatgcttaccagcaagccttcggggtccctcaacagcctcggtaatctctattcccgcattaactttgccttccactattgctggaatgctatacactcctacgatctatagaccttctacgtctatgccgacacctacacaaaccaatttctctgggtatggagtagtgaaaactagatgcactatggctcctagacaatcaaaagcatgggtactagagaaagaattgagtaaatcccagagcaagagagaaggaaagggtctggggcgaggagaagctttgaagaaatccaggaaagagtataacccaaagtacactgagtactctagtgttgtggatactcgagaaaatgtgttcaaggctacatgtaacatggctcattataggggacctccaagaattcctcaagggggaaaatttcagagagcccaaagaagcattgtgaataccatggagatgtggggcatacaacaaatgaatgtaacttcttgaaggatgagattgaaatgttaataacggtaggacattcaaaacaatcggtctgggctccaattatatatctcaaacagggggtcattcatggacaaatgattattcctaaacaacaaggtacaataaatcctctacatggagtaggtcacaatcaagtgttgggttttgtgccctaaataaaacccattac

SEQ ID NO: 22405 - DNA, 5099 bp, Cannabis sativa
gtggccataaaaaataaaaaggtatgtgagggtgcatgtgtgggggttctcagattgagtcccagacttccaaattatacaatataatgtatatataaactctttaataaaaaagacaactacttattttcttctgtttgctgtggtgtgggctgggacaggtaattaataacagccaacagaagaaaataaaacgacggctagtagcattaaaacaggctctgctctgcatcatcattaagattttcatatcaaaattaacatatgtcccacttttcatttaattaagtaatttctacagcaattaataaatacataaataaatatgatgatataatacatatagagagagacagataataagtaattaataagagaaagacagagtttgctattattattttgagaggatattgcctttggtcttaattagtagattagattagtggcaagcttttatctgagtttttataacacttctttctttgctactcttcaacaatggccaatgttcacacaaagtttactactcctacacctcctcattttttcaagattattcttcagaaaactcttcatgacaacaagatagtaaggacgaagtatctatattatatatgtatatgtatatattttctttctaactattttctgtgttcagttgaggaacattgttaagagtttcaatggctatataaactcaaagactataacagctaacagactatattatgacaaggatgacaatggacaagttatatattaaaaaaatatttatagacttatagttagtcttgtgttacgttgatttttatatatatattttttttcaagtactaatcatacagtttatcatgaatttgatagcaaccatgactttctcgaattaattttcagaagttatatatatatgtatttatatatggttttatttttgcaataataatttatcatggtgttgtcttgtgcagcaaataccaaagacattttcggtgaaatattgtggttgtttatcaagtcaagtatttcttaagcttccatgtggatcaacatgggaggtagggttaacaaaaagtagtgatggaaaggtatggatagaaaagggttggaatatttttgcacaaaattgttccttaagccgaggaaatctccttgtctttagatatgaagggaaatctcagttccatgttatcatattcgacattaccactacagagatagattattcttctcattttgagaagcataatgttgtagattttgatgattatgaggattctattaaagtctgggaaaataggggaaaatctccaataccatgttctgctaggccccataagaaaatgaatactaaatctaaaggtattattgatgactgtaattaaaactgatgaagcaatgctttcatgttgattgttaacatttttgttttgtgtaatgtgttgaatatgttttcagtcatgaagtgggatttgtctgataaagaatgtggagaatcttccctaccaaggtggatggaacctgaatattttttagggaaacagaagttgaatgcaaaagacagggctgaagctgtcaagagagctaaaggttttaaatctaaagacccctttttcatggttttcatgcaaccatcctttgttggagctaagtataatatggtaattagtaattatatcatgcttcttaattacaagttcaatttaaatgtttctcatattgacttaatgtattcttcttgatcttttgttgtgaaggttataccatttctctttacaaaatattacctcctcagcagcattagtaattctcatgatgtgatccttaagattcaagatggcagaacctggtctgttaagtactacgtaacattggctgaaggatctcggagagccagattcgagactggttggaaggaatttgctgtagataataatttgaacgtaggtgatatttgtgcctttgttttgaggaagagtattggggtaatgttgtttgaagttgttactttttctggaaattatggagtagtgaactctcctatgttaccaggtaaaaacatgaatttggctcattctatcacaatattataatcccacatcgactaaatgtgagattggttagaagtttataactactcgagttttttttaattttatgatgctgcagaacttaatggcaggacaaaaggaagccagtcatgtaaagtagaatcttgtaacattgtgaacaaaagaaatggcttaaaaccatttattagctttgctaaaacttcagctcataaaggaccaagttcttctcaaactaaaaggccatcctttacagctactatgagtgatgcctatgcaactggtcgttgttatttggtaagtttgttttctcttcagtttaaacatgaaaaattatcaagttttgtttattcaaaaactaagtttgattacaattatttctattgtttcacacaatgtgtgttctttgcttttcattttggacaggtcttgccatgcaagtttgtgaaggagtacattaataacaaagaatgtgaggtaagacttttggttttggatggtagatgttggtttgtccaattgaaggttaggcagataaaccaacgtccgacagctgaattgtgccgaggctggagagcattcgccttggaaaatagtctgcgagccggcgatatttgcacatttgaattaactattgacaatggcaatgaagtttcatttaaagttttcattgataagaagaaaggttagaaattgtcttaaccatttataattgaatgaatttttggttttaagtactaactttaacttacaatttgttgctttcagttgcaaataagagaagaactattacaccatccaagcgaaagagaaacccttgtgtgaaaattgaatcctcttctgattttgagaaagccaagaaaatcaaagttgaacctaattcaggtatatatgtgaatgtgtatgcatgattctagaataatgtcaaaacattaatgttaaattaagaagagtgggcttacattttgtttataaaaattaaatgtaaactagatccttacttccaagtgattttgcagctgagaactctctttagccgggagattgtgtgcattttgagctgaataagaggaatcaagctgagatgaaagttaacacatatttagagaaagtgatttggctcaagactagtaaattttgtaattatatatgtggcaatgacttagagggttgctttaactaacccttaatgttatgattgttgtttttatcagctttttgtagttaatattatgactcttgaactgtataaatatatttattgtgatataatttttggtgtattttaattttttatcttaattttaacgaatccttaatattttttttattaattttataatattattatatatatttaaaaataaaagattatatagatattttatataagaaaattttaatttaaatttaaaaaattttaaaaattgtaaattttttaacatatttttaattttgttggtttaactttgaataaaaaacaagagataatttcactcaattggatacacaactattcattacaatatctcacttaagttttattgtacatataaaacatatatgggtacactaatgtagtcgtaatagctaaaaaaaatctttaaaaattaatatctcaaacaccattttaaaaattaaaaaaaaaatacataattaatttttttaaaaaattaactatacattattgcatttaaatttaatattacttatttatatttaattaaatttaattaaaaaaaaaactaattatactacaattaacttggtacacaacgatttaccacaatatcttacttaaattttattgtacatataaaatatacatgagtacgttaatgtaactgcaatagctaaaaaataaatcttcaaaaattaaaatctcaaacaccaatttaaaaattaaaaaaaaaatacataagctaattaaaaaaaattaaatatattaattatacgtccaattaacttagtatatatataaaaaaaacaactacttattttcttctctttgtggtggtgtgggctgggacaggtaattaataactgccaacagaagaaaataaaacgacggctagtagcattaaagcaggccctgctctgcatcatcattaatcatactcatcattaagattttcatatcaaaataaacatatgtggcagttttaatttaattaagtttccacaacaattaataaatacataaataaataaatatgatgatataatatatatatagaaagagagacaataagtaattaataagagaaagaaagagtttgctattatcttcaggggatattgccttttggtcttaattagtagattagtggcaatagcgagcttttacctgagctttcataagagtttctttctttgctactcttcaacgatggccaatgttcacacaaagtttactcctacacctcctcattttttcaagattattcttcaaaaaactcttcatcacaacaagatagtaagtacaaagtatctatatatacaccaaatatgacatatatatatatatattattcaagtatagaattttgttttttccttgtagctattttctgttttgacttgaggaatattgtttgagttttacacagagtatgagtgaagatagcaaataaagtttgagctgaaaatgtcttgtattgatctaacacctatttatactcacggactataacatactgtattatcataaagttgacatctcatacataaaacttttattttaaagattgtttattattattgttgttacattggtattttttggtattttaattcttttttgtgtatttttaaataaatagaaattttacttgtatatagacttgtagttagtcttgtttcatgttatctataatattctttttaagtactgattacagagtttagcatgaagttgttagagcatatatatatgtgtatatatatatatatatttatatatatggtggggtcttaggctgcagtgatgtagctatattttctggccaattattgtctttcattaacatt

SEQ ID NO: 22406 - DNA, 3637 bp, Cannabis sativa
ttaaatcaacaaattaagaaaaaaagtaactcgaattccaaaaatgagaaaagcaagtgtttacccaaatttcgatgatggtgacatggcaagagtaacgacatgtggcatagaaatactgggactagatcattaatggagaatatgtaaagtccgttaaagtgataattagtcatgacgagtggtcatgaccgttagaataaaagtctgacgttcacgtttacccctagcttgagcaagatgcttacctccaagaaggaaaaatggtggactgacaccctcataggtgggataaacgatcaccacacacttacgggtcaaattagtctagggggtagatgacactactcccaccatggacgtgatgccatcctcaaaggtagataagtacatcctcatgacaccatgactacccacaatgtcgaaagggtctgggggaagtcaccccgagatagtcattgacaccttcctcatgttgggtctcgggggtatcacccccaagtattagcttctatccccgaaggtggttaatgatcacaccacacccttgggagaccctcatcgtcaacgactaattcaaatattcaaatcccgcaagaagctcaaagacgattacaaacccacaaaaatagcgggatattaccataagaataagatttcaatcacttccaaaaaccaaggaggtggttgagatagcaccacattagttgcttctcctgaagtgagaagcaccgacctttttccctatataaagggtcagccatgacttgggaaggggattcgaaaatttgaggacttagaagaaaagactctgccattgttattcttccttcatttaagagcctattcttgatattgcaactctaatcaataaaacacaaagggaggaggctattacccacatctagggtcgaacctctttaaatttcggtgtctttctttacatttattgtaaattttggtatcattatttacatttattgttacaattttggtttaaatctcatttattatgactccgcatcagttggctaaaaatctagtcaatattttggtactttcattgagagctttaaccaaaatcttaaagctttttaccgaagtaatggtgctaactagaagatctcaagaacaacctggtgagaagatagataatgcctagcaagttccatcaacaaggaatctctacaggaacaatggagagcgaccccgacgtcttggtaatagtggtgcaactaccactcatgctactgcccaaactactattggtcatgggacaactggccaaaatgatgttgctgggcaaacaacgactgggcgtaccacccatgctaccaccgctagaggcgacggtactaacagtgccaccagaagggccaatacaagaaactttgtcctacctaatgaaggcatgagccaaactcaaactactcaaggtcttggcatctttaattaggccacggaataaaccccatatggttatcaaaggaattgacctagagatggatcagttacgagacgcgataggctgaatgcaaggttagttccaaaccgttcaccaagagcaaacttaaactcgagcagcgctaactaaaagtcttgctaaccaaaggagagagttctaatcttggttggaagagcatgcttgagaaatgagaaggtgccaagatgactaagatcgctacactcaagaaatgagaaggtgccaacataacagtgagttcatgaagtgctttttttgtttgctcaatctctctatttaatctctttttcttcttcttattccaatcatgcaaagccttcccacacttattaattttacacctaaaagcatatggccggcctctgctactactctccttccataattgatccactatctccgtacattcctcctcttggcaccacgcttcctcaaaatgaaagcgacttttccgctttgtttttccacatttactaccatctattcgaattggcatatccacaaccaacgcccgatgatccgactcccaccaatctaacaaagaaatgtcagccccttcaaactgagctagccactcctctgtacacaacccgcggtcaagccgctccataattggggaagtaccatgttcattacaccaagttaaatcatgcttcactgaactgaaatccataaaccgacaatcatctaaaacttctttgaatccatccatcccccccggaagcctatctttaccccccactttttccaacaaacttgaaatttcattaaaatccccaatacaaagccatggaccctgcacttccttttgcaaatcccgtaagagccgccaagaaaaatgtcgttggctagcatcaggatttccataaaatcctgtaaaaaaccatggagaaaatccactaccagcaaccgtagcaagaatatgacccggagaactagacaaaacttgcactttaatatcatctttccacatcaataacaatcccccactcagccccactctatcaactgtccacaagttcccatattgaagaacactacataccctttccgcttgatcacgagttaatttactctcagcaagaaaaattaaacttggaccaatatcacgcacatgggattgcaatgcttgtaatgtccagggattcccaatcccctggacattccaacttaatattttcattgcgctcggcagccttgatcaacaaggctcgccgcttcaaattcagaacaagaggcagataaatccacacaattagaaacacctacctctgaaataatgtcattaacgttgtccccctcttccccagcagcagaatcggcttcaaccactccaaacccaccatctcgaacactggtattctcagccagagcacaaccagttttattccctccactcctagcttttgcccgtgccttattcttgattgaaatgcattttctgctctccttcccacccgaaatagtcccctgaccttccattgtatgccctggcttataattccccaaagccaccatgtcttccatcgccgccccttcaatcggtcgagcatctcggccatcaacacttcccagtcgcccacactgcctcttcctaaccgccccctcattctcaagctcaacctccaccctaccctccacctggtcacgagaccgtgccccttaccattactttctttcaaactctccactgtcgaagccacaccagaatttgcatcctgtttccctgactcttgtgagatattgggctccttttgttgtagcccaattgagctttgaccagcttctaaagtagatgggcttttcatatagtccatttgagtacacttatggcccacttcaaaacccacctgcattttagcttttaatttttgagtcatcagatctcctataaccgcctgcccacgacccacgccagtcgccacctccttctccatctgttgcatcgtgggaaccacacttctacgcacattcggagtctcatgctgcccttcctccgaccggcgaaccccatccaccaccggttcatcagtattatcaagaacccgaccttcaccttgtttagacataagttgatgatgtgctacaaagcaattcggaataggatcctcatcctgttgggttttatgacctaaataaaactcatttcatata

SEQ ID NO: 22407 - DNA, 1472 bp, Cannabis sativa
tagcaccgaatttgaaaaaaaaattataaaaaatatatgagataattccccttaattttattagtagatggataaatttagtactaaaatagcatattttgtttaatatatagtaggacagtatataataagaccatgcacttattttaagtatgaataattaaatttctcttttttctttcccttaataaataaattaacaaaaataaaaatccttctttatcattttccacacacacctattttgacattagataaattttcttcatttttattatcttataataagttaattccatatcaaaaaagttgtgatcaattttgataacttcataaacatgttcaactagctcacaaaaaatcaagtattgataccactttatcttaatcatgagccatttgagatcaattttcatgatttttcattcttttttgacaatttctcaatgagagtaatgtatattagagtttggagaaatatattaaataataaatattttgtgaggtttcttttttggaaagttttgtaagttagtaacacacaaatggtcatagtgttggtatgcaattaccaaccctaataacaatccttaaatgcaacctgtaagttaaaactcaatgtcaattcaaaatggatacaattaatttacgttggtagatgcaattgatccctcaatagcgccactttatctcaatagcgtcactgataaagtgacgctaaacttttaccaaatcaattatgtcaatgagcgtcattgctatcacgttgaccgacacattgacatttttaaactagtgtgtgcaatacacttttggattgcattgaaaaacaacttgaattataatgtacaatgagtagcaaattgtacacaagtaaaagtggctaataatattattttacattatacaccagatctgaaaatgaaagagaaaggagatagtggtaatgatcaacttttatttcacgtatagcataggctattgctagtacaaaagaaaagtggtgtgatttagtcaaaagaaataattaaattactttttagaattttctccattgaaaaattaagctctctctttagcctagaccaccaagtttttgtcacttgtttctctctttatccatgagtactaatctattatttcaagtggtatcattagtttttcctatttatgataggtgtcattgttgggggccggggctaatttttgcagagtatatatgatcagttctatatggcaaggccaggccaccttcaatttatttatttttaaggaacatgcatgcatctacaatcacttctttgttcaatatatatcaattatatcaatctttcctttactttaattacatcaaaagtaaaagagaaatgtattttcttcactttataatattcctttgagctatttgaaaacgtcttcaagatgattagttacatagtaagatattgtcccccaacattttatttatatat

SEQ ID NO: 22408 - DNA, 4710 bp, Cannabis sativa
agctgtcagatcaaataactccctaatctaacggctgccgtacatcacggattacacaccgtgaaagtataataacgggacaaaatcatatccctatatatgtataagtacagacacatattgtataaatattcattacaaaataaataaataaataaataaaatgactagctcaaatgtatttcagtcagataagtatatatatgtatgcatatatatttagcatattatgattttgaaacaattcaaaatcagatctaacaaacattattataccttaattagagactcatgctgataagatactataaaatattataatttagaaaagaaaatagataagatatgcgaatttttttaaaattaagaaattaaaaaaaatattaattataattaataataaataaaaaaaataacatctataaatttattaatatttataaatatattacattattttgaattaatagctataaatgtactatctttatatatttggaaaatgtgcactagattgttacatctagttgggaagaatccatatcctctctagctggattaacataatagaatctttttcttatagtaattgagttatggttaaggaataggtaatatagttgggaatcaatcacactccaaatttttgtcatataataacaataataatataacaaacaaaaacaaattacttatgaactttttttttcttcaaattttgtctttgttatggattttttacctataaaaatgctttcattattggaataagtgcatcgcaattcttgccaataaattagcaaaagccgttcttggtggctttttcattatttcactatctttcaatctttaatttgcatcattattcaaacatgaatctcaatttatattctccattaataataggaatatttttaccctattaattataacaaaaaaaataaataaatcatttgagattaaaagtcagattaaaaaattatttaataaattattttctactaaaaatatattcaattatttattatatattataaaaaataagaatattcaaggaaaaaatatttaaaataaataatatttgaattttatatttgtaattttgtttttaaaagtatttcatatttatatgttttatttttattaaggaaattgaggacaacattactttaactttatattttttaacacataactacaaaaattaaaattttggtgacaaaattacctaaactccctttttgttagctatttacccattccattcaaaaaattatcttaagtaccatgttggacatgtcacagtatacacaagtgtacacgtgtcaaatttttagtggtccacgtaattttaattattaaaatattataaaacatattttaaaattacaaaaaaatattttattttatttttttgttctttcttttttttttcttctcctttttctttttttgcctaaacaaaatagaccctaatttattatttatttttaatatttaatgtatttttcttttcatattttgtaataattttgaaaatatttctataaaagataaaaaagggaaaaaaaaattaattttgtaataaaaagaaaagaaaaggggaaaaaaaaaagaaagaatattttttataattattttttttttcttattttctaaatttttaaatatttaaaattatcttataataattaatattacgtgaactactaaaaaattatcatgtgtacactgtggtatatccaccatggcagctaacatagtcttttggacggaaggagtaaatagctaacgaaatggagttagggtagttttgtcatcaaaattttaatttttgtgattaagtattaaaaaaatgtaaagttcaagtagttttgtcaccaatatccttttttattattaactaacaacattaactgaaaatttcctataaactacactttttttttacaagttatagatatataatttaaaaatattataaattattttatcaaatgcttataaatttttgagtcttttttttattttatttttacacttcaaaacagtttgtttttttatatatatatttttatgaaattttacataaaaacccccatagtaactaatgcagcaacttaaatcgtaatcaaaatcactggagaaactactagaaatatcataaccgtaaatttgaaaaaaagaattaaaatttagaatatgaggtaatttttctaaatttatattatgggaaaaataattaaaaattgtatataacataatttttaatatatttataattttaataaattaaattataacattctcattattataatagaatcttaacattattttaaaatttataatttaccaaacactagtttagctttttttctacaattgtgttataactgtattttctcacaacacagctacggttgctttttcctataatataactgtactaaactaaccctaacttggttaggtgcatgtaagagcatgaaaagaatctcagtgtataactcaaagcatgaatatatatatatatatatatatataatgtttttttgcaaaaaattataacaaacaggatggaatgttttgcacaaacgaaaaaaacaaaaaatattaataatgatggctgaattttatgtagtcttttggtgaatcaaattttcttatttgtttcatatggcaactttaattattatagttagtatttctttagttgattgtatatacattgatgaatgattattatttacttatttatttatttattttgcaaatatatgaacgcgaagacggtttcccttctatttatttaatttgagaattaatttgtattaatttaatttagattgagaaatattaaaggacactctcagtgtttagcactcttataaaatataattttactatttttataatttaatatcagatccatttattttaatttaataaatattatagaaaatccctaacttcaatttagaattactcgtacatgcataattaagccaccactcctaattctaattaataacaactatacaagacaagagtagctaaatattattgctttaattggattgatgatcatgcagtcattactaaaactaaaaccattaacctaattataatatatattccttcaaaatttccagcacacgtacaattccaaatttcaaacactaacaaaggatatcattaattactcaattcaacaacactcactcatcaataatttcactacacaacacaaagtactcacacttaaatttctttctataatctgatccatcacaaggcactttttttaaaagggaaagtgccctttatggggcactagtactagctataattatttgtccccaaaatattatatttttcatatatatttttggggttctaattggtatgaaaatgtagcgataattaattaatagtactaaaagaaggagcgtttgactggtgctcttccaacggctctcatcaagtttgatatttcaagaaccctagccactttggtacctcttttggcctcggcagaagctcttctttcttctgcttttctacgcgctttcgctacatcattttgcatcttttctagggctcttactcttttctcctccaatttcctctgcatacataaaaaaaagaccaattattgattttatttggttgatgatgatcatgcattcattactaaaactaaaaacattaatatataattagtgtcaattgtttgttgagtggagcaatatatcaatgatagttgaccaataaagaggataaatcattaaaataagattagaagagctttcatcaagtaatatttagtgcttaataactagttcacacctaactaaatataaacatgttaccaatcaacaaacgtaataatgaaaaatcacatatagctagtaaatttaaaccaacattattcacttttgcacgtacaaaattcaaaatgcaaccgtaacaaaaatatatatatatcatcactatcccaactcttttatagctacaatattttgttgttgacttatgagctttttgaggcgaattacaagttatttatgaactcatttcattttagtacagtgtcaaaatagtaaatatggtgtatatatatatatatttatacacacaaacaacccaacttttcatatactatttccctaaattcgatgtgaatatcattatcacaatcattacaaagacagaagatcagtaccacacgtacatatatatatatatatatataatcttacaattaacataattaaaggattatctcatttacatttttttttttaatttcttcattgttgctatacgaattgctataatcccataattaattaagcataggagataatcataacacattagactcaaattaacaaccaattatggcaaataaaacaagattaattagtaagttttttctgaaattaattaaaagtaagaaatatataaaatacctcaacttttttcatccaagaagtagccatttgaacttgttcattctcccacccattaataacagcatcttccctcttaaaccgattattaatcttagccactttagcgttttgccaagccgaaattttcgactcaacttcctccttcttcactacctcaaccgacgtaacaacccgatcgtctccgccgctaatttcgcccgagctaggcggcgccgcccaatcccgccgt

SEQ ID NO: 22409 - DNA, 2620 bp, Cannabis sativa
aaataatacgtaaattaataggtgagaaaaatcatctcagaatttgtgcatcaaacaagatcacttgaaccgttgaacgttatgaaaaaaaaaaaaaaaacaatgatccaagttacacatgaagtatgtttgagcaaaaataaactcttaaaaaaccatgcaacaacacttatccaaagattccaaaccaatacataacataaaattacttctagtctattaataatataaactataaaactcaaaaatgaaagttaaagacaaaagggcagatcaactcaacagaaagaaagccaaatataataatatattctccgtagcaaaagcagcaagactgtaggaagaaacagcaatggcatccctaatcatattaaacaaactaaataattgcaagaacacaaacttgtctttccagctaggaatgcgcaggagacacaatcagatttcttattatcttgatggcgaaacctcgatctaaattcagatggggcttaatattttggatttttcttgtgttattttaagtgggtctttcttttttatttgtagtctttaatttaaagcaagcatagctatggtgaggggatgcagtgatatgccggaggctgtattggaggaaatattttcatggctacctcctgattctttaataagtttcaaatgtgtgagtaaatcctggtatggtcttatcaaatcacttgtcaaaaactcaattttcgtgaacaagcatcttcgcaatatcaacaacaagttgttgtcttctgctacaaatttagttttctgttgccatcgacctggttattgcccagatccgagattggaatttttgggtccttttgaactgtactcaatgcttactatatttaatgatgataacacgagtgatcgcctaaattacgtaagtgaagattttgatttacccattccttcagctgagttggatatggctagtgtgttggggtctcactgtaatggaatcatttgtattgctgattattatcaaactgtaatgttatgcaaccctgcaatcaaggaatgcaggactcttccaaaaccttgtctatctaatgatggctttgttgtgttaggagcaggattttgctatgattctagagcaaatgactacaaggtcattaggttcgggatcgataggtttcttcctgataggatagagaatccgaaacccagagctgatatgtacagtatgggcagtgattcttggagagagattgagattcatttggagtttaatcgctttccatctcgtgacaaacaagttttctgcaatggagttttctattggtctatgtgggctcgtaagtactttatcatttcttttgatgtatttggtgaggtgtttcgcaacataccgttgccagatagtcttcaattcgatcgccttaaattagctgtttggaatgaatctgttgctttgttttcgtatcctgaaattagaggggtttcaatttcaatttctattgaagtttgggtattggatgactgccatggaggtgttaaggggtcttgtttttggataaagaaactagttgttggaccactagtgaacattgtgactccatggacattctggaagagtgatgagctcctgttggaaggaattgatggtgggttagtctcgtacaacctcgacagccaattgctgagaaatcttacagtttcggagtttggaagaatagggcgttgggatttttcatatgtgaagactttggtttcagttgaaggtaaatgagccatcttgttgaataattaatgtttgatctggaattatgtaccaagatataggcagtagttatgtctaactgcagtaaatttcaaaaaatctgtttacttttgaagcaattcagtatttgatatagttgcacttgcactaaatggtgtaggaaatttagtttcctttgactattgttgcatttgactaaggttgtgtggtagcaatattattttatataaatatgtatatttaattatgtttttgtgtttatgctcttttgtttgatgctttttcccaattagcattgagatgccttgctctctttcatcttatgtgatctggctttcaaaatcaccaggctggcactcaaagcagttttgttaagattcatatcataactctattcttaactttcaattagacaacctccatttatgccaacgacttgaaattgcttctattttttatatttcaacatatgaatgaatgtatggaacttgcataattatcatacagcaacagttggataaagctttgggcgcttctgtctctgaatagtattgtttcgtctaataaaatagaaggatgaagatttcttgtttgcataaggacatggtctatcgatggccaaaattcttgttgaggaaagattggacagggtgctctgtgtcctgacctgaattgtttctatgtttctttggttgtgattctgatcattcttctatagtgttgaatttgattatcataaatttagagaactatattttgctgatgccactctaatcaaattatgtattttcttgatgacaatagttttttgattcatgacaagaagtctcttgaaaatagcttaactgccaactgattattgcagaaataaagccaaac

SEQ ID NO: 22410 - DNA, 2418 bp, Cannabis sativa
ttcaaaatattaaagaagtataacatgaagttaaacctaaaaaaatgttcctttggactctcctctaggggtgcacacgggtcgggttttttgggttttcgggtagttgggttcgggtttctgggcttggggtcctgaaaattcacaatcgaacctggtttttgggtgctcgggtgcgtcgggtatcgggttgggctttttcgggttgggcgtagtcgggttcgggtcttgttgggctgagcccaaatatttaatttatgggttgaaatgaaatttaatttttaaaaatactatttttttttttatttttataatataagcaactaatagtatataactatatataatatatacaatatataacataactcatacatacgatactatcctataaaaaagcaacaacatatatataataataagtatatataataataacatattataaatataaatatatttacattgattacacatatacttgatcatcataataaatgaataacttactagatatgaatgtatatgtccactgtgtctcgtgtctactgtctcgtgagtctctcacgaatatgaagagtctttttttttgataacttaatagatatggatgtaataaatgaataaattaatacgatatgaagagtaatagatatgtagagtctttttttaataacttaataaatgtaataaagaatgtaatagatatgaatgtatactgtctattgtgtttcgtgtctactgtctcgtgagtctctcacgaatatgaagagtcttttttctttttgaatatgattaaaaaaatggaataatattaattattgacaagtgttaagccgactaataatatttctttttatagaatatgaatagttttttttttgaatgtgattaataagtaattaagtattattaattttttatttttataaaaaaaaaggttcgggttacgggttacaacccgaccaaaaaaaaaactacttatccacacccgaacccgaaacccgtatggaggctttttcgggtttaactcgacccgactacacgggtttttaggtggtcggttttttaggcagcgggtcggggcgggtggtcgggtttttcgggtttgtgggtctaaatgtgcagtcctagtctcctcagaatagtttttgggattcatagtcaacgcgaggggtatcaaagcgaatcccaagaaaattatggcattaatagacatgcaatcaccgacaaagcctaaggaagtacaagccctgataggaagaatggttgcacttaacagattcatttcgaggtaaactgataggtgtgtgccgtttttcaatgtattgcgaggcaacaagaagttcgagtggacaaaagagtttgaagatgccttttagaacataaaaaggcatctagcgacgcctctagttttggcaacaccaatcactagagagacgctatttctctattttgctatctcagaagatgcgattagtgcagctatagtacgagaagagggtaagcaccagtaaccaatttactacgtaagtaaaaggttgctaggggcagaatctagatatccccctctagaaaaactcgctttgtgcctagtccacacatctcgtaagctacggccgtacttccaggcacatcccataaaagtgttaaccgatcagcccttgagacaagctttatcaaaaccagatgcttctggaagattgataaaatggtcaatcgaactggggcagttcgacataacatacaaccctcgcacatccatcaagggccaagccttgcccgacttcttgatagaaggtataactccaaaaaaaattctgcctatacatcgagaagcagaaacttggaagttatacgtggatggtgcatccaatgagcaaggtttgggtgcatgggtaatattaatattaccagaaggctttaagtttcactatgctttgagatttcaatttgacgcatcaaataacgaggctgagtatgaagccttgattcctggcttaaagacagtcaaaacgttgaaagtcaaaaacctcatttgccatagtgattcacagctgattttgaagtaggtcctcggggaataccaggccaaaggcttaaaaatggcgaaatatttagagaaggttcgaaaaaacttggaaagattcgattactttaaaattgagcaaattccaagagaaaaaaactccaacgtcgatgccttagcaaaactggcctcaccgaaaaacttggatgaattgaacttagttccggtggagatgctaagtgagctaagtatatgtgaaacggaagatgtagagatgatagacagctctcctacatgtatgactcctataatcaattacttactcgacggacaacttccaaatgacaaaaatgaggctcgaaaactattgtactcagtgcctcgctaca

SEQ ID NO: 22411 - DNA, 2910 bp, Cannabis sativa
  modified_base (2011)..(2016): a, c, t, g, unknown or other
ccctagtttcgttagtttcgttttgctttgtactctttgtactcttccgtccaaaaatcacagttaagtgccacgttggactgtccatgtatacacacttgtatacatgacaaggttttagtggttcacgtaatatttgtttttaaaaataattataaatattaaaaaaaaaatttaaaaaatcagattttttttaataatttatatattaaaaaaatagtttaaaatatttaaaaacataaaaaaattctttcctttttttttttttacaaaaatcaaaccaccaccattctcactttcacgagcaaaatcgaaccccaatctgaaactcgaaccacaatactcctagctgcaggagtagcaacagttccccgtcgagtttgagtccctggctgcaaggttccgagttctggcaatactggttttcgggttcttgtagaggttctgcaagaagttttgggatttggtgacaaaagaaccaaatcttcatcaacttgggtatcatcacatctaagttgactcaagaactcctctaatacttcaacctaaaaaaatattcattttcaacaaataaaaaaaaagggaaaatccaaaaccctaaaaagaaagaaatatgtatacaccaatttatcaaactaaagtcctctctttcttctaaagccattgattaatgattataatggtgcctttctccctcaacgctcaagcttctcttctttcaaattaacaggtaaacttcttttgggttttctcttctctttttaattttcatcttttaaggtctgcaatgggcgttttcccttgatgaatcttcaccgtttgtaattttttatggtttattaaggtgcttggattcattttctatctgaaaatttgaaaaatgctttttttttttttttttgtacacttcctttcgacgtttgcggaggagagacggagaagagttcggacggttggggttggacagtcggggatggacggcttgggctggacggttggggttcaatttttggggggtttgatttctggaaataaaaacgaagaagaagaggaagaagaagaaaaagaaagaaaaaaggaaaaaataattatattaatttttttttttttctgatttttaattttttttaaaatatttataattattttaaactaatattacgtggaccactaaaaatttgccacatgtacaagtgtgtacatgtggacagtctaccgtggcacttatgtgtgatttttggacggaggggtatagagaaaaacagaaccaggtttagatagtaatgccgccaaaatttcgatttttgtggttaactgttacaaactgtaaagttcaggtgttttagccgccaatatccctaaaattttatccctaaaatttaattagttttagtaatgaggagtgttaccgtcaaactcctatacaaattctgtattcaaaaatgcatatttgaatacttttttttcaaaatttgtttcatgagagtgtttgttatgcttacaacattgttcttgtaattttttttaaaaaaagtttgtatattttacagtgttgaaaatacgtttaaagttttttaaacatgtggtaaactggaatatcagaaattttgtttttggtactgtaaattgtttgaatttttttaaaaatttacaatttacaggagtgatattgtaactataatgaatataattttttttgaaaaaaaaaaacattccgtcatgaaggttgtaataggaagttctaattagtcctcatttttggtaattgaataaatgttatatttgatgtgatttataaaaaaaaaaataaacctttgtgtgcgtatttattctattagacttttatttgggttggttttattaaagggattatttcacacatacacaaaataataaaaaaattacaaaaatacagtttcacagaattttaattttttacgatttttttgattttatttacagaaaatacaatctttttatgttgtactcttgttaatttgttgttgatttnnnnnnatctgtatgttattttttgttattattttgatgttatttaaatattattttcatattatttttatgtagtttttttgttgtttctatgaaaaactgtaaaaatgtaaaaaaattctttaaatgtaaaaatataatttttttacaaaaaatagtagcttatgtaattatcactttattaaaacttgagttaattagataattttttattgagttagtctatagcagaattatgaaaacaattccaatccaactaacattaattatgtaactaaggatctaaggagaaagacgataatattacaattaaagcaatcgttatacataaaagtatgtaatacactactacaaaaataatatttggcaacacgcatatagtaacacttcataaaaaaatgttattattttatataaatttttaataagaaacacttgagaaagaagtgttgttaaaatactattatctttgaaaatattattttagtaataaattaaaaataacttacggtaacacttctgaaaaagtgttactatttcttcgaacgaattactaaaaaaataacgttctatacaaaagtgttactatataggacacggatgcagtcacacatgcgtgattggtcctgtattttttttttaagtggtgagagattgagctaaatataatattttttgtgcccaacttaatagtcatttttctttaagatgaattagttattttttcataaaaaaaaaaataaaaaataagaaagaaagagatgagttagttgaaagaggtattttttttatactgttttcagttattaatctatttgtatttgtacttaattttcaaagcttaaattttggtggtaaaataaaactcttcaaataattgaactcttagtaaatttaagg

SEQ ID NO: 22412 - DNA, 7557 bp, Cannabis sativa
  modified_base (5384)..(5394): a, c, t, g, unknown or other
tccttgattggaatgtagacattcttttgcaactagattacatcacttaatatgttcacatgtcaaaatttaaagcattcgcacttttaacttgtacgggcaaaataccatttgtggtttatcttggttttatttattaattatcatttcttgtttgatatgatgtgcgttagaatacgttcttttcctctattatattgcaaaagaactctctaattattattattattttttaaaggtgtttaatatgacttcatatttgttttacagactcttgttgaaactccaaagccaaagttcgacagccgcaaggtcaaatcttgagttcttgagtgaactgaaaaaaaaaagaaaaaaaaaagcctttacatgtagatagtcattcatgtttttaggatattcatttggtatctgtctttcttacaggcttttacaggttctattgttgagcgggctgacaatttaaatacaagttcaaaaaatcagaccccatctcaggtaatttatttgtgtgcagcactaacaagacacaagtgtccattataattttgatgatttgaaatggtaacgatggttttctcgttgctgtttggttttcagtcttcaaaaccggtttcaagattcaagatgcagagaagataagtaaccatggtgatgcttggcacaactggatgaagaaatgccaaatttcccagttatgattagaagttgactttagatgatgagggaaaggaaaaatagaaaccgagacccaaattttgcacaaaaccaaagagctttgtttaaactcccgaaacgtagatcaatatttgacattattttagcttgtaaggttcatttatatagttcgacattgtcaatttctcttgtcaagaaccaaccagtcattactgatatcgctcttgaatgacgccaaatttttctgaacttctgaaaagaaatggctgtaaatacattcatctaaacgcaatgagggaatgctcaatgctgtttcaatcatgaacattcttttcatcactactttaccgattctctaccacaaatcatatatgtacagtattatttacataagctgcagctacattctaccttctcttcagcccccatagggtgtcttatgcttcctcctcttgtaatctcggagcacttcctctctctctgcaggtgttgcagttaatatccacttgctgaactctaattctcccataccagcaaaccgagcaaggagactatattgaattatttttcggttcttagttgaagaatccatttcattgatatgtatgtcatctaataaatttctatgaacaggcatggatggaggatgaggttttgggttaccattctgagataagccctcttgcagcttctcttggaacccaggaccatagtttacaatatcttcattgcgatgagcataaacaacacctgaaatattgtgaaactgagttaagcaacaatgcaacaataaattcgtgaaaattacgtaattcttaatcaccatccacatgaaaatattaaaacttctagttggaaactgtaagtcactgcaaaagtcatcgaaatcacgagccaggtgacttctttacacatggtgaaattgtataaatcaatcaggtcaaacttaaaaataatggaaacataaaaaacgaattaaaaataggaaaatgaatggcaaagagcacaaaaaacacttgcccagatcttcaagtgcagggtcactcgaagctttcttggaatctttggacgttttcttaatccaagatcctaatgatgacataggaccaaatgtttctgaagaattagttaattcttgctttctactatcctcttttcgcttgtcatgcaacccaatgatttcgctggtaaagaccttatcagaaagatcgcggaacaagttacaaatcccaaaaagttccccttgaaattctttgcaattctgaaaatggaaacagcatattgaaattaaggaaatttaatgtttgaatacttaaagctaagactttctttgtttctacctggacaccttcaaaatagcgcttttccatttttccagagacagcaatgtttgctagctgctgtttgtagacctgacgcgagtaaacaagttcttctaaagagccagctgaaaggaaacgaaaaaccaacacatgtcgcttctgcccaaatcgaaaagacctatcttgagcttgcaagtcttgagcaggattccagtttggatcaaatataacaactcgattagcactcacaagattcaatccaagaccaccagctcgagttgatataagaaacacctaaacatatattttgttaggtagcaggaaaaacacgagtttatttaatcattgattgaaacgaaaaactaacctgtttgcttggacttgagttgaagtcgtcgacaagatgctggcgcaagctggttggtgtggaaccatcaagtcgtgaaaaggagtatcctttgcgtataagaaacttttccagtatgttcagcatcctaataaaaagaaaaaaattatttcaataacaggaaaaagatgtctcaaaccatcaaatggatagattgaagatttatgcaattaatccatttcatgaatatacgcatgaagagtaagtctgattattaaagttatgctatatccattttatattatcaatattgacaatatgcaactgaatgaaatggctgactcaacaatcctacttaggttcccacaaaaacttttcccagaaccctccttttctcttctgaaaaattctggtgaaactgggaagatttggttttatgctactgttcataatcaattaatcataaatcaaccagacatatagttacatcttacatgttatagacctaattgacacattggcatttcaatgcttgttcatgggatcacataattaataattagtccccaactaccaggagacagaaaataagcaaaaccccttggaacaccactaggaatgtgactatgaaaagaagtttaattattttgcaagttaactgtgaaagataataatgaagaaaagagtaaccgtatttagcatacgcagtaaactttacaagagtcacctgacagagtaactgaacaaaagaactttgtcacaccgtaaaatccaagaagacattaacttctctagtgctcgcattttaccacaatgtttaacatcactaaggcccataaaactttcattttgggtgctccctcccaccaaatctatatctgggccaaacacagcagaggcaaatttttcgtctctcttttgcttatctgggtcatctctagaattaggcttgatcaactccaggtgattacttacctgaaaaccatttacgaattgaaacatgtggcaacacaataatatcaataaaaagtgatcagataacgattagaaaaattgtactctttcatgagtaagcagattattattattattttcatttttactctttaaaaggaaatagagttctagtaattcctttcctttaattattctacaatttttgttcatgtaaaaagcaagccttgatttctttaatgagcagaaactgagcctaaaaataaattgtgaatattatcggtagtattttacacttcagaggcatttaaggtaagaccaaaaccccaatctcttttttattaaaggtattccgggtttatctcaaatttccatcaccatgtatgcttttcttccgtgttcatagtctttacttagtctacatatcactgtttctaatatgaaatctaatgttgcactaaaaactaaaatgtaaagtgcaaaagatgactaatttgtcttcaaccaattatcatatatagagagttgtgccattgtgtagggccactaagagatgatctctttcacatagcttttcaatgaatacaaacttttacattcatacctgctggagcttgacaaggcaaggaagaacgatacaaaaggggcaggaatcacaaccatctggattgtctttatgaaggtagggccaaattaatccatttggtataatccttttacaacatccagcttgagtgagaggacttccacagctacatggaagatccttgtttattaggcattgaaagtcaggtagctgtaacattcttctgtaggcccgtttctgcaattcactcatggcacaaaacacgacattatcctccttccccatcatgagatgcccaattgtctcctcttttgtccttcttaacaaatatttacgaagaacagtcactaagtgttgttttcgcttatcagctacctccacaaatctttcaggagcagttgctctttgaccatgctttaggggttcatcataaaattcacggaagtgatcgcgtgatcccaaagatcctggcgaaacccagtcaaagagattaaacaattccataattttgttctgcattacagttccagtaagaccaaagcattttaatgttttaattcctagaaatgcttcatagagttttgatttctcattctttaacttgtgtgcttcgtcaacaaccacaatctcccaattcacatctgataaggcgcgtctttgaattctgtaggtgtcaaagctcgtaataagtacttcaactgcgcgtacttttaatttttcatatactagatcacggtttgcaccatggtaagcagaaacactaaaggtagcccacttggaaaattcattctcccaattgcggataaccgaagaaggacaaactatcagtacagggcctttctgtcctaattgattgttctttgatgttacagggtcaacaatatctccatctttctcataaatagcagccaaaaatgcaattgtttgaatagttttgcctaatcccctgttccaatgttaatgacaggcagtcagcagtgaagttaatcaccccaccaaaatccacatttaggtagacaggttttacactcaagtaaagcaccattaagaaaacacattatcaatacaaaaaattctaactaaaattatcccgttataagaaaaacgttgtctatattcataagcctaagctagatgaaaaacacatacatgtcatctccaagaatacctccatggttgttcttgtataaattatataaaaacttaactccctccctttgatgttcaagtaacctacagtttatggatgaaggaacctgcaaataaatatcacattattctacaattacactaactagtaagtatacaataatcaagaagataaataaacacgaactcgaatagtggaagcatgaaatgaaattacctgaacaacaggaatctcaccctctgaggtcaagaccaacggttcataaggtcccgtatgatcaaactgaaattcactcacttcagacctcagaaacgcttctggtccaggtttttcttcttcttcttcttnnnnnnnnnnntcatcatcatcatcatcattttcatcgtggtcttcaaagttaccacctttatgcttctgggatggtttgggttgggtccgtggttgaattgggggtggagagatgggatcttggaggcgcaatagttgctgagaaagagaacttttggggggttttctagaaattggggagccaaagtcgtgggaagtaaaggtccttgggtaagcctcaatggaggtggaagacgatgaatttgagcaaggcttaagcgtttctttgaaggcttggagtgacatgagagaattgggggtttgggaaacttttttttcgtgggaaaaaccgtttccaaaacagcgtttttggatttcttcaaacaaaacaaaaagtgtttttttttttttttttattttggatttttgcgaatcttatatccaaaataaaaacaaaagtttattattcaaaaaaaaaaaaaaaaacaaaagtaaccccaataaataattaaccgcccagctgagaatgacgtggcaatgtcagtgtcaaagttaacaggtggaaaagcgggcactggagtctgggttgtttgttgggatagtttaatttagatgaaaccaatatgaaattcaactatcaacgctaaaaactgggatttttttccataatcccgttcccttaattttatttctatattaaataataaattatacattaattttatttattttttttccatattatttaaatatatacattttcaaatattttattaatttcaattatattcccatatatttttttttataatatttacaatacctatcaatttatactgtaatatatagattacgttaatattaatacatagcattatttataaaagggaatatatttatttggtattttgtatgttaatatggaaaatgcttattgtttatttgtgaaattagcaaataaaaaaatgtattttagtgactgtttatgtactaaaccatgctccacagactttgatatatactaaatcatgctactcaaattttgaaatgtactaaatcatgttcctgaactttcatctatattagacttttgtactaaaaatagacaaaaattcttaaatccaacaatctatgtaaagtattttttatttgactttaattaagtgtttagtttttttctacaaaattaactggttttgtttgagtttctaaattataacttcagttgtctgtgtttataaaaaaagttcatgctttgcttttactttttctcataactaatgctttggactaaggaagacatgacattggatgcttgagagattgaaattgaagtatttcatggtccaaaaattcaacaacagatccttgatgtggctataccagaagctgatgaaattaatgaaccaatatttcatgttgcaccagaatttgatacacaataatatatgttggcagaaaatgaagcaatattggagggtgatttcacgcactatgacactagaggtaatttcacttcaggtgcattatcaagtgctgcccttaggaggctcaaatatgcacctcgaagagcatctaccaggccaaatgagatgagcataggtgaagcaaatgtggaatctttgtcaagaatatcaattgatgacaatgacttggagtggagaaaagagaataagatttcatacgatgatgaggatagttttgactttgacaaatattgtgatgaatcttacacagaagcatggtttggagagcactatgacaataatgaagccgagcataggaattttaagaaactatcaaggaatgaaaatttattgatcctaatagtaacctgtcaagactaaaaaatgagaacatgtatgagaatgggaaaatagtccttaagtaatggcaaagattcaatgatcacaaggtttttggagaagtattgaaagactttgccattcaagaaggttttgagctacgtaaagtgaagcatgcttctagtagaatcacattaatttgtacagctgaaggatgcaaatggcaaatccatgcttccttattaccatatgaaacagagtttataatcaaaatctacaatgcaatgagggcagggacggagggactttagcccatatgtgggctaaagccctcactcaaatataaacatcaaattttttatatgtagatatatacatatattaattca

SEQ ID NO: 22413 - DNA, 3611 bp, Cannabis sativa
  modified_base (102)..(103): a, c, t, g, unknown or other
  modified_base (2998)..(3002): a, c, t, g, unknown or other
atttgttaatgggagatcaaacctaatcgttaaatttaacagaatattctttttatttttaagaatattctgttaaaccaagaattgccgttagataggcanntttaatatataaagatatatatagcttgtcaaagtcatggatggactagtgtagagttatatattacttactttaaaggatattaaatgagttaattaattatttatagtatgagtaatttttcaacggtttgaattacattagcacaaaattatttgaatatattttggttattaataataactttaattgtatttattaatttgtctctcaaagataattaatatcatgttcatcaacaaattcaaagctatacgtagtacgatcaccatcacacaataaggttaattttactattattctctctctctctagctattataatttgaaattataatcactgtatttaatttagttttatatgcaaatatatattcacattttaaaaattaataatgggggttaaattaaagtactaaatggattgcattattaaaaaataataaaaaaaattacaaaaatgctggagttttaaatattttttataatttttaagatttttttatattcttgttattattattattagttttttattatttttatattatttccttttttttattgtaaaaatatggatcattaaattgtaatttaatttttttttttgaaaagaaagtgtaaaaaatttattaaaaatagtatttgtaattattaataatggttgtctctctttgttgattcttcgatttaattttgactatgttagtttaaattgattgataatgttttaaaaattatattaatttccaataagctggtagttattgtagcatataatggctttgtgagaaataagtatatatatatatatatactgacaacagtatgtatttattatatataaccagcagaaccattaatgtctccttccctattaaataaaaataaataatttgtacattatatatatatatatattatattagagatgaattgtctagtgttagttcagattttttgaactcaagttcttatgcattcttatttaatttagtcatattgttgaagagtgtgatcgaatgttgttactcgagttaatgacttgttatttagtttttgttatattgttcgttctgctaataaggtaactcattattatttagttagagttttttttagtttcctgcaaatctttcctttttttgaacattaatctattctttgattaagaaaaaaaaagggttatttcttcacttgtttttctatttcatttctcaatataaaactttaaaatatatcaattaattaactaagtgtggtgtttgtgttcatatctcatcaaattctaaactaatgcaaacttaattagtccaagttaattaaataatattttgtcatactctaaactttttttttttagtttattatataataaaaaaaattgttgacctagacctaaatggcaaaattctagctagttatatatatatatttatattagattaagtaatgtatgattaattaaaatacatagttcattcaaagtatataagataaatatagtatacgaaaaattgagatgattttaaattaggttttttttttttttttttacacttcaaagcagtttttttttttgtatttttactgaattctacatagaaacttctattccaactagcactgcaatctaaattgcaacaaaaaaatcgtatagaaactcttattgcaactagtgctgcaaccactttagaaacacaaatcaaatcgtaaaatttgaatttgaaaaaaaaattaaaaatacagtatatggagtaattcccctttaaattaaagtgttggattttttaatattattgagtgctcactctgagcactcaattaactctttttctccttgatcggttacttgtttaatctctcttactcaattctcgagaaagagagatacaaagagagatctcgagaaagagagacaaagagaatgatcaaaatttgaaaacatgatgttctcctaacaaaagtttctaatataatattgtaaatagaaaacaatgaagtttgatcatcagtgaaatatcaccatcatgataaatatgatcataatgaaatgaaaacacatgtgttggtttgtgatgatgatgatgatgataatgaggaagaagaagagcaagagtagtgtagtgtgaatgagtacaaatttggaccattatgtcctctcatcatcatataaatatataaatatataaatacataaatacataaatatatgtttttgaattcttctatcattttaagtaggttttaattgagtgtatacagtatacagtctttgtttttacgttattaattacaaaaacagtattatataaacacatacaacaacaacaacaacaacaacaacaacactaatatcactattgtatttccaagtacaaatgtgtggtcgtaacagtttttttttcttatatatatatacacaattttttttatcttattttagtgataaaattctgttaaatttatttttttttacaaatttgagatgttaattaaatgtcactattaaatattaattatattattactatattagcttcgaaattttattttcatttatacacaacattcagttaatatttaataagttttgtcaaaaacaaaaaaaaatacaaagaaatttattattattattaccacttgatttttccaagtacaagttgtgtggtaacagttacatgaatacaaattatatatattcaaatcaaattttgtcagtaaaaaacttaacttttactcaaaatatacaagtagtgtgtggtaacagtttttcctttacccaatacacacatgaatacaaattatatatattcaaattttgtcagtgaaaaacttaacttttactcaaaatatatatgtggggttttcatttttctttttttattattattnnnnnttttaaaaaaaaaaaaaaccttagaatgaacatatattcatggtggacagacaatacaatagactcactcttgctataatgagtatcttttctaatatctaagcttacatgaatgggaccaccatgcaccatatctctcaatactcatagtgattgtttatatatataaattaatgtgtttgaatatgaatttgtttgttaaaacaaaagtcatattatgaatttgtatatataaacatataattaatgacttataaagaaagaaagtgatatatataaaaggataaatattaaactaagaggtaaactaaagttgtttttattaactaaacgtatctaatgtgtaaataaggtatcatagttataattatgatgttatgcataatatcatcatcttgcatattatgagtaacatacaatgttatataacatttggaaattgtttgtaacccttaaaattaatgtactgatgcatctttattttctgtatggtaaattattttcgactttaagaacttttaaagatatatatgaattttttaaaattttataaaatatattaaataactataatataaattatatattaaaaaaaaaattaccccatat

SEQ ID NO: 22414 - DNA, 4255 bp, Cannabis sativa
attaattatattttatcactgatagtaataatatatgtatatgtaatttataaatttaaaatttacataatacactacaaatttataagaaataacaaaaatatgttaacatgattttttttttttacgttttgaaattttttatttacaaaatacttttttagtaaaaataataaacggttttttttttgttttgttttgaaaaacgccaatataatttcatagaaattgtctgatataaattaataatatatttacatattaatatgatagtgaagtgatgaaacttaagagaccacttaattaattactgaggtattcttagtttagtttatgttcgccatatatatataggcattaaaactgttcatgaattagtagtgggtggatgatgaattagtttagattaaagattttttatctttttattgatgcatattaaactttgattgttgttaataagaatttagtttcaaaaaattatatgcaagtgctaattatgtatatatatataattattatatatatgtgtgtgatatagagtggagatgatatcgaaagacaattccataagcttgagtccccacatgaagatgtaggattgtttagggtttcaggagtgtttccaacattttctccagatggctcaaagcttgcctttgttgataatgagttcaaaaatgtgtgggtagccgataacaaaggattgcgtattgttcagaaggtactaccaactacaatataaatatatatatatataagcataagttgtttagtgaggagtcttaattaaaactttttaatcaacttttacgtctgaaattacacgttgaattatttctttcaatttttattaatagcagtatttgttagtactataacgaatacttcaataaaaaaattaatatgtaatttcaggcgtaaatattgattaaaagtttatttaccattaacattaatttatatattatagacaagaggcccagacagcatcttcgcaccagtgtggaaccaaaatccagaaaaagatgtattgtatgtatgcatgggaccatctttcaatgctaccgaaaaacttgacatttgtgctattcctgaagcctcaaggggtagaggacatcacaaaattctcaccgcagttagcaataatgcatttccttctaccagtccagatggtaatcattttatttatttatttatttatattatatatatacattatataataatagaaagattattaggttatgaattatttcagaaatacctaaaaacaataataaaaaaaaaattatatatatatttttttaagttatttgcggcataaatacttaagtttaaatattcttaattgtagataaatacttaacattaatttttgaaggtaataatacctaagttatatttctcgaacttcggtaggtacatgactaccacatggccgttgacttgacacttgacagtcaaatatttacaaaagtttcagaaatataacttaagtattattaccgtcaaaaattaaactaagtatttatctgtaactgaggattaaacttattacgccgcaaattatttatttatttatttttttacttttctactgatttgtattctctctaaattcgtaaaaatattatataaaaaaaattcaaaaaatatatatataaaaaaagtgcaattttaggtattttgtgtaaatttctcatctttttaatcattatattctattaagtatttttagtatgattggtaagtgtgttacatgagatttcacacaaattttcataaaagttcaaataatttagaatgacgaacaaagaatattcaataatagttttgacaacacgtacaataatagattgtttgaactcttatttcaacatgtacaggaagtaaaatagtatttcgatcaacaagagatggaggagaaaaaaaacacaagaatttatacataatggaggatgcagaaagtggagattatggaaatggggaaataacaaggttgacaaaagggccttggactgacacacattgccaatggtcaccgagaggtgattggatagttttctcttcaacaagacacaagccaaaaggggcaccagagactgataatggccttgacccaggattctttgctgtgtttatagtaaaggcaaataatccttctgtggtgataagagtgttggggagtggagatgatcttggtgggcatgtaaaccatccattcttcagtcctgatggaaagagcattgttgtgactgctgatcttgctgctgtgtctgttgatccaatctctttgcctttgtttgtgcactctgttagaccttatggagacatattcactgtcgatattgacccggatgacattaacaaaaacaagaatgtgaagaatttcaaacgtcttacacatagtaggtatgagaattctactgctagttggacaatgttttcaactaatgacccaaaagcatcatggaatctacttttgaaggaggactataattatgcacctacttgcccttatgcatatcctgatggtggtgaaagttggcacatgactggtcacctttgtattcctaaaagatgttgttgagtaattaattatgtatcgaaatttatgtagtaaaactttttaaaggattgttctgtagatttttaatttattttggtatttaaaaaaaaaaattagtttattttttttctcttttcatgatcgcgtacatgttgtagctatttaaggcaactagtaaaattttcaaaaaattctgaatgatttacagtgtcaaaatttagatttaaacaacttcttacactgtattataagaaaaaatagttgtgtatgcaataaaataagtaaattttattttcgacattgtaaattattcaaaattttttgaatatttatccgtggtcataaataactataacatatacgatcatgaaaaataataaattcgtatgccaaaatagataagaagtgtagcaaatattgtaaacttacccattacatatatgtctttgtttctcattttactacgtacgagtaatgaaactttgtgagacccatcataaatcaatgtgattagttatgttgtatgcttatgtttttcaatactaaaatttgatgttcaaaaaaaaaaaaagaaaatactaaaatttcaaagtataccctgcttcttgttttcaaactattgctataacaaatataaaagatagagataatggatagggaaattcgatattacattttaaaattatacacatgttttattataccacccatatcaaagtagggaatatatacttttaatatccatacttctaaaaatactctccccatttcaaatccttcactctctaaaattattatacatgctattacccatataatttataaataaaagtagaacttaaaatagtcgattgcatgtgtattaagaaaaattacgcttacaacacaataaatcattttatctttttaaaaaagagataatttctactataaatagctttcaatgtatacaacatataagaatattttagctatatatatcatcctcaagcttcttataatcttatccatctttctctttcctttttcctaccaaacataacctatatacttttgtcttaggatgacatcatctatttgacactatatatttcatttttttttttaataattaattaataggttgtattgagagatgcatggcatcctagatctgttcacgtgggttggagattaattagtcatttaaaattattattattattattaaagcaaagacttaatttcacgtggctatgtttgcatggtatgacttacattagattaattataataacaatgtttagattccttaaattacaataaaaaatgttatctaccttattaattaattagcttaaacaactatatcgatacatacaccccttaagaatccaattattttttatatacatatatattgttattaaagtttttcggtgtgtaattttttttaaaaaaatttcttaaaatttgtcttaaataattataatatacttgctaactaaatttttttttataaataatgaaataaataacacccctttaatgggtgcatatcatataatcttttcttaacctatatatataaaagataattaattaataggcactacaaaaaaatttacttttttctttttttgaatggaaaatgtaaaacttcattaaccaacaaactccgtcaccaaacaaggtaacaaatca

SEQ ID NO: 22415 - DNA, 1628 bp, Cannabis sativa
gtcttttaaagtttcatatttttatgacacccacatagccaactgttttaagaaccgttgggaaatagtataaaagacagttataaaccgttggaaaaaactaattttatagtagtgaaagaatagattagtctatttaagaaaaatattaaataaatataacggctcgtataaagtaagatataaatttgaacacaatataaaattactgagcttgaagaacgtgtcatgcttatcttataaaattattgtctaaaagaacacgatttatatttttttacgacccgacatgatacaattttatattttttatagcccgaaacaataaaattcatattttaaaaatataaatcggctagcactatacagaatcagatttagagtgatgaggatggagagtatatgtagtggacgtggctaatttgattgatggacagcgttagagttgtggccttggcgttttctgcttttttacttttgaatcaaaactattaattaatgggaatcgggtccatcataaagtacgtacgttaatgtctcatgctcccaccattaattataagattctctcattctcatatatgattttttgtatatacatagaagatatataactgcttcaaataattattatatgatcaatcataaaaagcagtatatgttatatatatattcagtgtttgcatggacgtgactgcagcacatctataggcacatatatagccacgacttataagcttcaccatatatactctattaaatatcatctctttttttttctttcttataataatttcaatatattctaataatatacgaatctatctatatatttatatatataaggtaataatcacataattaatagatatatatatacttattggaaaatattgtcccccatgaattaaatgtgaaagtattgagtcatatcattgctaatcattgccaattgattttgagatggaacaccatgattcacaacatggtatcagagccatatccctagtgagctttcgatccacacttatcaaagagttagccagccgcaagcgagcaaaatagtactcccagccgcgaacaagattaagcgagcaaatagaattcccaaccgcaaaataaaaaaaaaaaaataagcgagtggtactacttaagataaggtgattcaagattggtgagtaaaaatagccaccatgatattggagaatattgtcccacgtggattaaatgtgaaagtattgagtcatatataagaacatgggctactccactcattgctaattggttttgagatagaaccccataatttccaacaatactcgatgaagatgatgatcagccatatctatcatatatatatatatatatttttattcaagtaaagtatacataaatagatcagacttcgtgacatccaatatatatatttgaataataatgctgggattaattgagttcatttgattatcttaatttttattatatataaatacaacattataattactctgtaaaactgtacatcagtacatgtaaataatgtacgtacttgtatatattaattattattttaattttttttcttctctaaaaattctcattcgatatatttgtatatacatgtttaa

SEQ ID NO: 22416 - DNA, 5267 bp, Cannabis sativa
ttacataaaaatattgcataaaatataatttaatataaatattatacaatacaatatggtgtaatacggcgtaccaaacgaacccttaatgagttagaattgattagcacgttaataactgtataattcaagggtttcaattgtacttgaatgtattcattactaaaaattttctattttaaatattattttcgtatgtagttattattaactatttgttgattcaatatagtaattaattctaagctaatatttggtggagagtattttatttgataaaatatatttacattttgagatttatgaatgacctactaattttaaattttaattttttttaatgacattttacataatggataacataataaaaaataatgacatttaaaaaagtacatgtaaaaatatattactaactaatatattactaactaaatttgaaaaaaatttaacacacatagaaaataaggttcaaattataatacaataatactaataatagtattggcataaaattctctctgagactctgagttctgtatggtcgttaggaccctgtgatcatgtatgatatgattcttttattgatgctgatggtgagtggtactacggatgatgctgtagaggaaattgtgaatatggcaagtcaactggcggtggaaactgaggatgaatgggaggtgaatgaagaggaggcaaaggagtttgcggagaagacagttattggcaaggtgatctcaaaaaagtcaatgaatggaaagttattccattcgatcttctcaagaatgtggaaaaacattagggactggaaggttaaagtgttagaggtagttgatgcatcaacctacgtccgaatttcatttgatactaaagaaaatgcacgagtgattctggagaaacagccctggctctttaatgggggactattattattggaagaatggccattgactgactgatggcaggatgcgaggctagaccgggttagctgctgggtgaaattgaaggggtttgagcttaaatcctttactctgaataatgtcagacgattggcacaacttgcgggtgatgtattaaagattaaatggagtaatccacaacaggcttttatgaatggatatgttagagttaagattggttttcctctgaataaaaatatatttgtgggaagatttgtgccagcagggggaacaaggagttgggtccaatttaaatttgaacgtatgcccatgttatgcttcaagtgtggtttgtggggacatgaacaaattgattgcaaggaagagccggcaatggaggacattgggaatggactgaaagtgttgaaatatgggtattggttaaaagatgagcatcccactcctaattgtatagttgctcatcaacaatatattagccaggagatacacggcactgacaaaacaagtgggccggacgatggattgacagagaaggcatcagtgtacgccgatcaatcggagattgggagttccagtggtgcggtggtggttcctagagatcaggagcatgattctttgaaagttagtggggtagttatttccgaatttggagggaaggaaatggagaatgtcaatactagtaagaagcccaatgggccagacacttttgtaagcccaaaagactttacacatatggagtatagggatgaggaggcccacgactttaatgataatgagcatattagtaatagagggatacaaagtcaaggacacatagctggggctgaagtgggaattgggaattttcaaaatacgaataggaaaaggggcagggacattattgtcgaggatgagggtgagggaggtcagaaaaaacgaaaaggggcagttgggtttgtggtgagtgctgatgatgtggagaatgggaagaagaataaaggtaagggaattcttggttgccaactaagctcaccgattgagaaagaggtttttattgtgagttctgttcctttagacgataagaaaggaaagaagggagttcttcatggccataggaagaaaatctctatcaagactcgggcacgaaatgttaatagacagaatgtgggaatgggtaatatgtcaatggagcaattggtggggcgagaagtgggttcttcggctgctggctgttcccaggaaggaccgtttatttttggagcagctacggagaacaacactgcggcacacgaaaagaatatggctacgatagaggtgagtatttctaaggtaactgatttcttatctcatgatactaaaattgaagcagcgagccttgctacgcaaggccgccgagcacaatgaaactcctaagttggaatgtccaaggaattgggaacccttggatagttcgtgcatggcaatcccatattcgggatcatgacccgagtattatttttttggtagaaagtaaactcactagagttgaagcaaaaagattatgctcagtgttacgggttggagggaatttttggtctgtggatagaattggtcttagtggtggattattgttgttatggaaggatgacattaatattcgggttgattcaagctcaccgggtcatatccttgtagaagttgtaggaaaggatttttcgccttggacattgacatgcttctatggacacccggatgcaactcaacggaagttttcttgggagttattacggaatataaaagctagagtacatggagcttggctgtgtattggggattttaatgaaattgtaagtcttgccgaaaaggttgggggaagaacacgatgttcggctgccatgtaagattttaaagaagttattgatgattgtggttgatagatttttgatcggtgaaaacagagctaacttggtgtaatgagcatgaatctaaccaagttatggagagattgtacagggggttatgcaatgcggagtggttgagatgttttgagggagcggatatccaagtattggattggtgggagtcggatcataggcctcttgttgttgacttaccggtagctttggaacatgatcgatgtggtcaaactaaaagaaaaactcgatttcactttgaagaggcatggtgtgatgatgatgaatgtaaggatatagtcctcaatgggtggcaagatggtacttttggtggtcattctaggggttttaaaaggaaaacgattcaaataggaagaactttgaaggaatggaacaaaaagaagaagaagttgttgaatgaaaaaattgggaagcttaaaaaaactttgactgaattgtcttcacggcaagagctgggtacttgggctgatgtcaaaagagtggaaaagcaattgaatggggcattggaaaaggatgaacagtattggcgccaaaggagtagagctttgtggttgaaatggggggatacaaatacaaaatattttcaccataaggcttctaggaggagggaaaaaaatgagattaaaggcttgtttgatagtttgggggtttggcaaagtgatacaaatcttgttgtgcagatggttgagggttatttttcctctcttttccaagctacctcagctagtgatgctcatattcatgaagtgttggctgctgtgcaaccgaaggttactaatgagatgaatgaagttttgcttgctgaatttgaggaggaggacattgttcgagcggttaaagaaatgaatccgactaaggctcttggggttgatgggttaccggcattattctatcaaaggttctggactactctcaaggacgaggtcattgcggtttgtctttgttgccttaatgaaagtgcggattttagttgtttaaatgataccatcattgctttgatacccaaagttgataagcccgaacgggtagaggaattccgaccaattagtctttgcaatgttatctacaagattatttccaaatgtctagctaatcgattgcgaagcacgttggatggggtgatctcggacacacaaagtgcctttgtaaaaggccgcctcatacatgataatgctattattgggtatgaagatttacatgtatgcggaaaaatcggtttcaaaatggacaaaaggtggctctaaagttggatatggcaaaggcatatgatcgggtggaattgaaatttttagagatgatgatgattcggctgggttatcaatgtcaatgggtggaaaaaattatgaaatgtgttacgtcgtttagttttgcatttctgatcaatggggaagtgaagggacgagtgaggtcggaacgcggattaagacaaggtgatccgttgtctccatttctatttcttttctatgcgaaggcattctcttgtttaattcaagctgaggaacgaagaggactattgcaaggtattaagtttggaagaacagatctttttgtctcgcatttgttctttgttgatgacagcttggttttctttgatgccacgatggaaggatgtcaaacattccgggagttgctaaataaatacaccaatgcgtcgggacggatggtgaattatggcaagtctgagatctgttttggtaagtatgttgatgaggcaaatcgtactcagctagctgaatttatgggggtacggagggtagtttcgcatgggaaatatttgggcctgccatcttttgtggggcgtaacaaaaaggagctgagtgacatgattaaaaacagggtgtgggcgaaaatgaagggatggaaagcgccaatgttctctatggctggtaaagaggttctcattaaagcgattgtccaagcgataccaacctacactatgagctgttttaggctaacgaaggggacaatttctaacttacatcgaatggcggcacgattttggtgggggtcctccgaaaaagacaagaaaattcattggtgcaagtgggagcatctatgtaagccaaaagataaaggtggaatgggctttcgagatttgggaatgttcaatcaaacactgttggctaagcagatttggtgttgtataaggtatcataatgctctttgtaaccgtgttcttaaggcctcgtattttcctactacttcggttttggaggaaaagtgtggtacccatgcatcttttgtatggcggagtttgatgtggggtaagaaactaattttgaaggggtaccgatggcgggttggagatgggagcaacataagagttctggaggatccatggttacctagaccagtcaccttcaagatatatgataagccgcctttaccggagcaccttcgggtagttgatttgaaattgggtgatggtacgtgggatgaacaatttattagtgcg

SEQ ID NO: 22417 - DNA, 2559 bp, Cannabis sativa
  modified_base (26)..(36): a, c, t, g, unknown or other
ttaaataacatacttgttagtaaatnnnnnnnnnnngtaaaataattccaacacctacttgtttacttgagattgatgaactagaaagagggtaaggactcaatcgaattggttcttcacaaagggtagatgatactcatttgtggttctcatttgaaagatgtttagtgcaacatgtgaagttttattgaatattattgaagatataactacttttgctcaacgaggacatgcagatggatcctatgagaaagtaacttcttttgaatttattttcattttgcatcttatgataaaaattctggagatttctaatatacttcataagttttacgacttcagtcttattttaaatacaatgcatcttgtttcatttactaagactctcattcaaaaattaagagaagatggatgtggtgaattagttgatgaggtgaaatctttttgtgaacttgttaatatacttgtgccaaattttaatcctctctatactgcaagaagatgaagaagtcgtggtcaacaagatgccaagaattattaaagagttgatcttttcaatgcagtcaaagaattaaacaacaaatttaataatagcatagtgaagttactcattcttagtttagcgttagattcgagagagatgcacgcatcattcataattgatggcatttgcaagttggtacaaaaattttacccaagaaattttacacaatacgagatggtacaactaaggacgcaatttgaacatttttctcatgtacgagaacttcttaattttactattttggcaaccatttctgatgttattggttggtaaaaactagaaaagcagagattctcttaattgtgtataaagtgataactcttattcttacacttttagtttcaaccgctaccacaaaatgattttttttcatttatgaatacagtgaacactttttgcaacaagatgaaagataaattttgaagtgtttgtttgttagtgtatattgaaagagaaatcgccaaaaaatttagaataaattcactcaacgataattttcgtgattttaattttaattatgaatttaataaaatatctttaaaaaatttgacacttaaatttataatatagtttggtccgtgtgaatttttaaaatttatgcatttttttaagcataaaaattatttacattgttatgaagagacctttgtagaaaagtatacatattttgaatcattatttcatgggtttattcgatcaacttttgtaaaattttattatttcttttgaatcatgcatggtgactcaaaactcaacaactacgagctgattaatttcataatataaaaaaaaacctatattataggaaacaaaaaacattgcatatgccacaaaacaagttgattgcatgcatgtgtttatgtataataaaactaatatatttgttacaactttttcttcctcttggtgattgctatgtatatattatttgagttatcactcattttgacactccctttatgcgcatgctatatataataagattgagatgaggattatgtaattgagtggaacaagatacatatagattgtatgagatcaccaatagaataaaataaataaataaataaatagttgatgaatattatatatatatgattaattatttatctgatgactttttttcaagccgtgaacatcaccctcatgaagtcgatcctgaaaaaattcccattaatttacattacttatatatacccaaaaaaaacaatgttcccacttacattatacatgatgtgaatgaatgattctttataacaataataataatgatagtaaatatattggggtttggaataagaatgaggaaaagaattaagaaaagaaaagggaacttatattgttgttttgttgtcccctccaataacaaagtgatgagttgcaccttatcattcacagtactacatttcttatcttcaatctctccctttgtcgatgctctaccattttggaattttggaattttcttctgtttcatcatcatgttagagagagagtttgcttaaagttaatttttgcttgtaggctaagtgatatagctaactatatgctaaatgaaaacgacattggatgatcttatggcaaaatttacatcttttaatttattatataaatgacgatggtgtaagttctttctctttttttttttgggggaagaaaaaatacaaatgtaagaataaattgtatatatatagagtaatttgttgtataaatatttaagtttaattttcggttgtaataaataaatacttaagtttaattttttgcggtaattatgtctacgttatgttttttaaacttctgtaattacataactattaagtgtaaattttcacgtgatatctttttattagtatatttaaattatttttttaaaaaaaattaaaattttaatgacctgaaccatcaaagattgttagtgtcaatttacttaatacttaacagtcagatacctataaaagttttagaattataacttaaatattattaccgctaaaaattgaacttaagtattt

SEQ ID NO: 22418 - DNA, 4121 bp, Cannabis sativa
ctggagccatttagacttgttttcacataaaactgcctcttcatagcttctgggctcctcaatttcagtttgttgaactaccaccagtgcaaatgctattatgtctgcttccgcaaacctagcaagaggtcaaatctctctctggggtctatcacaagccaactgataaccttccagacctatatgtccgaaccctttcagcacctctgtttggtcttcattatcttgttcttccgactccacaacagcttctggttgtgcattgtcttctagttccacactatcttcttcctgtgaaccttcttctagaagttttattccgtactccacttctacacttctagtgtctttgtttcctatttttcctgtaacacatagagacacactatcctttctagatgtcaagtgaggatattctaactcattgaaaacaacatttttagcaatcacaacattttttttatccttttgggaaatgtaaattctatacccattggttcctaaggcataacctaggaaagttcccttcacaaacttaggaccctacttgtcaatagattggtgtacatatgcagtacacccaaatgttcttagatgcattagattgagggttctgttgtaccacatttcataaggtgtcttaaggtctataactctatttgggctcctgttaacaaggtaggttgtggttgctaaggcttcccccaaaatggttttcctaacccagaactaaaagtaaacatctaattttattcaacaatgtttggttcatcctttcaagaacacgattttgctctagggtcttcactacggttctatgcctagtgatcccaaactcttgatacatcttgtcaaattcagagttaacaaactccaacccattattagtcttaaggttcttaattttaagatcagtttggttttccacctaggttttccaatttctaaattgttccaaaaactcatccttagtggttaacaagtaggtcaaaacacaccgactgtaatcatcaactattgaaagaaattatttcttaccggagtgagtaggcaccttgtatggtctccaaagatcagcatgcacatattcaagtatctttttagttgtgtgctttgtcagagtgaacttcaacttatgttgttttcctaaaacacaagcttcacaaaatggcaaggcacaacaattttaatttttaattataccttgtttttgtagttctttgaggccttgttcactgacatgtccaagtctatgatggcatattcatatctgattctagtcctttcactatacttgcttctccagctgggatagtttctccttggagaacttataaaccattgacattttcacctttcatcactaccaaagaacctttggtgatcctcaagcttccatgcatggatttgtatctgtatcctttatcctcaagtgcacccaggaatatgaggtttcgtctaaggtctgggatgtggcttaggttcgtcagcaccttgattccgccatcatattgtttgatggccaccttcccaattctaatgaccctgcgtgaatgatcattacctccatcaattgatttgtaatcaaaaaatgactctcgatttggacacatgtgataagtgcatccgaaatcgagaatccactccaagttccaatgaccctgcatgaatgatcattatccattagaaatttacctccatcaattgatttgtaatcaaaaaatgattcgatttggacacatgtgataagtgcatctgaaatagagaatccactccctgttcatagatgacttcgagatagagaacagttctccgtccgaggagcagtcattactattttctgtgattgtagcaaaatccttcccgtgatgatgatgttggaagtccttcctatctccattgtgagatttcttgaagccttgttgctccttgtacttcttccagaatctttgcaagtgtctagactttccacagaagtaacacttcctagtgtcattctctctagatttcgatcttgaataagagtgatggtgtttactcttcaaactcactttcttgggtgatcttcctcttgccaaaatacacttattctttcttggattctttttccaactgtaattcaaaatctttagttttaaatgcggcaagaacatcttccaacgcaataacatctctgccatacttgatggcagccttaatttcttgatatgtgattggaagtgttctcaacaagatgatggcctagctttcttcatcaactttgtgatttatgttagccaaacctacaataatctcattgaatctatcaatattctcatctaaagaaagggaagaaatcattctaaaaccgtataacctttctagcaaattaatcttgctagttatcgatggttttaagtataattcttccaatttatcccaaactccttttgccttcttctctctaatgagttttcttcaaacactctttaattgatacatgatgatcatgtagtacaccatctcctccatttctgcttttttctctagtttcttttctgccaataacttctcatctccaagaaccttgtaaactttttggtgtacaaggatccctttcagactttatctccagagcacaaagtcccgagttccatcgaacttctccaattcgaatatcaccattgatgacattcaagtttctttaagatcgcaacggaaagaatcttgattttacgttcttgatcgattaccaagctctgatttgtgagaaaattaagactaaataagtagaatcaaaacaacaaaacttcaaacaattagcaatgacaagatcaacaatcaagaacaacaatcggataagaaacagtggcaaacagagtatgtaaaactagaaaacaataactacagaaaataaagaaatcaacaccaagatatatatctgttcaagtctgatagatcgatgtgatctatggctttactcaagttctagaacaccgtcgttatccttctttattgattgagcaagaataggtataatatagtcgagacgagattctctgttgagttctcacaaagtgtttcagctctcacactttacaccaagaatcttcttcatctacagaagattcttcttacaaaacctaaacccaatctctctcttttctctgcacctctctctacctctcaatcttctttctctccaactctgaatctcctctgaagttctaaatctcatatattgttcaaacgacaacattaaggcggtatttataggcttaggatcaagatcccaaagttggtgaccgtaagaaacgaggttgttaaatttgttagaaataactaacttaaccaactcctctttgagtgaagtctccacgttagcgaaggtactggggcctccaggaacataaatgagctttcggactcgagggccacggatccttgctgaagacgcttccggataggacaaagcctgctgaagtcaactattcaaatttgtcattccaagagagataactagctagctggaactcctttctagggaagagctagctatcatgagaacttcacccggagaagacatgatagtcattcgagaactcccttctggacatgactatcattccacacaactcctctcaaaatcaataatcaacgagtgaacaacttcctaaaaatatcatatgtatatttatttagaagaattataccatatcatattatttttttatttaatatatacgagacaaagttatcctatatctatccaagatccaaaattattgatatcttgatatcttgttttctttagaatctcacagtaattataagcttaaacttcttgttttccttttttgtcttgtttagaaacctcattggtcttcgcgagcacaccatctaattattgagctacgaaagtcattgtctcattgcaattgaatttagatcccaaaaatcaactacacaaaacagtattccatgtccatccaacataaatatgatataaaaagatataatataatatattaatatatactacagaaaagaaaataagagaccttcaaaaaaaaaatacatttttctttagaggtttttttatttatataattataaagtattataataataataatgataat

SEQ ID NO: 22419 - DNA, 2298 bp, Cannabis sativa
tttgatataaaaataatttaatttgaatttcgttttttaataataaggtgtttaaatattctttgttcaaaaaaaaaaaaagtttaaatattcttcggtgtgaaagagatttttacaccaaatactgaaatttttaacttttttattgtggagcggaatttttttcaaaattattgtgtttcttttcaaaaatatcgtgtaaagtttatactatgtattgtgttaaatttgcactattgttctacgattattttttagttgttctttttaaatgttttgttttgttattttatgattgttttataaaaagatagtatttttgtaaaatattttgcgcaacaataaagttgtaatttttttgccaaaaattcagtattttgtaaaaatctcaaaatacaaataaaaatatgatttgggcttacttccttcgtttaaatatgtaaaggcccgtagatataaaagaaaggaaattttgataattatcacttttattaaatattgaaatctgaaacctttactgttacattttttttttcaatatctaactacaactttattaactgattaattgtctaactattagataaaaattattatttttcaattatatttttcacaaacctaaaaaaaaaaagaatactttttttttaagaaaaatttgttattataaattagaaagagtcatttagggattttgacatagacaaaaagaatacttaaaagtaaaacttcacatgttattatatttgtagtactttagcaagtacctaaaccaattttttgatccaatttctcattgttaaacttatttaccataaataaatattttttattcagaaatctggatttcattttttcactgttatacttttttttttctttttaatattttcataaatatacaaaattcacaaaaaatttaatacgaatctacagttttttttattttaatattttaacgaattttaactttattttattaaaagttgcgacagttgtattttttggttgtttttccattgctgctacataaaaatagcattattttttgaaaaatacaaacaaaattttgtaaaaaacaaaatgtgtaaaaaaataaaaattggtaaaaatatggaaaaataaaaaaaatacatttgagggtaaaattcccattataaattacgtgtactgaagcccactgaatataggcccagacattagagatagggtagtttggtaaattcagtgaactagggttttagaaatcaattactacgaatttataagaaatcttcactcgcctccttcagttctccgtttgaaaccctaaatatcgttgcaccttctggatttgttttcaccatcttcgccctcttgaaggtcagttttgctacgactcttttatgtttgagttaaacgatttttcttgtgcaaaggttttttgtgataattctgtctctgaatttaacaattgtgaagaaagtgttatcagattgtgtacttatttcacttctgtagtactgttgatgtgatctttggttttgaattatccatttgatgagtatttgtaggtttgtgttcttattatattaatatatgtacatatatgaatgcgttgaatcatataattacgattattacgttctgcaatctatactatttttttttttttgaaataatattgttgacattttttctctttctgttttgtttatttcaattttttcagagctcccgatccgaacatcttcatcaaaatgtctgggtaagttgggttcttttttttggtgtgacaattgattattgtattggcatgtcattacaatagttgtgttctttaagatcgtttagtgcgccgtattaaactgcacagtattatattgaatttattttttgcaatatttttacataaaactatttgtggtgtattgacttttattggcacttaactatataatattttagtataaattgaaatttaacatagtattatataaaagtatgataattaaattaatctaattcaatataatagaatacaatacgaccaaatacagtgtttcaaaatattttctttaatactgatcgtaacacttcttccctgatttgtaattattaatgagagggaaatttagtcatccttaccagttggttgttacatattttgctattgtaggagactttgtcggctttcttgctagatagctactatatttagtgttttactgagttctggttaattgtgttgttggtacatgtcattattttttcctggtgggcttaatggtcattgagcatgatcatcatatgattgtt

SEQ ID NO: 22420 - DNA, 11927 bp, Cannabis sativa
  modified_base (8701)..(8702): a, c, t, g, unknown or other
  modified_base (11873)..(11888): a, c, t, g, unknown or other
ggcttggacccaacttgtagtgggtgtgtggatcttggaatcttacaagacccaaacttggaaccatttcaagaccaagctccaaacccaaacacggacccgagacccgaaattggataacgaaccggaatcaggaccttagaacagtaattggacctggaccaagaactagatctagacacagaactgaacacggaccaagacctagactaggatcgatactcggacccagaaccgaacaagaacctagacttaggccacgatctacgacccaaaacttggaacccaaggtcggtgtcctgggaccttgacaacaacccagactcgtacgataacccagaccaagacccacacccagactaagatgggaacccatacccagactgaaactcggacctagacctagaccaaaacccaaacctgtacccgtactcgtaccaaaactcggacttgaacccaagactcaaactcgaactcgggactcgaacctagaccgagattaggagtgggacccaaaaccttagtaggaccgagccctcaacttagactaggcccaagtttgtgtttaggatcgggtcccagatttagatctgcgtcgggatctcggtttgggacttgggctagatctgagtttggttctaggtctgggtctgggtcatcatcacggtcctagtcttgttctaggatcctagtctggcggttcttgttcaggttccagtttcgagtcctgggtataggtttaggtccagtttgggtcttggtctgggttcgggtcctagtttgagtgccagatccagacaccgactacaggtctgttcaggtgctagttttggttcaggtcctgggttccaagttcaagtttgggtctgggatcaaaattggggtgcggttctaggtcttagccccagttttgtatcccaggtccggttccatatttgggtctgagtttgggtccatgttggggtccttattcgaggtctgggttgggatctaggtctgggtcaaggttcaagtctaggtttaagttggagtctaggtccttgtcagattacaattttgggtctgggtccacgtcaggttacgctttgggttttatttctaagtcttggttcttgtcccgttctcgggtcccggtctactttttgtttcggttccaatttttggtcacagggtacgggttcgggtccaaatttaggcctgcgactaggttcatgttcgggtgtaggttcaggtcctggtttgggttcaggtccagggttgggtcccggtccaaacactgattacgggtttggtcaaagctccaggtctagatccagatcccgatctcgggtgccggtttggttccattttgggtgcttggtaatgagctgggtcctaggtttaagtttggtctggggtcacctactaggtcccaattctggtctgggtttgggtcttggtctaggtttgggtttgagtgcttgtctcagtttaggtttgggtctcggtctgggtttttatcttgctttaggttcgagtttaggtcctggtcctttcctaatcatgtcctagtccggttccaattccagttgcgattctgagttcgagtttgggtcggggtttgagtcatggtctgagtttgggtttaggttcgaattttagcctaggttcgatgcttcgggtgtgggtttgagtcctaagtcttagtccaggtctgggttcaagtcccaagttcggatcccgatgtgatccaggttcaattttgggtctaagttttgggtttttatccccgtctgggtttgagtttgggtccgggtccaggtcaaggtttaggtctgattctaggtctgggtctgagttagggtcccgagtttgggttccggtcaaggttttggtttggtcctagtctgtgaccaggttcttgtccaggtttgggtctggggtaggtttcaggtcctagtttggtttcgagtctcgaattcttatctaggtctgggttttggggcctaagttctcggtctaggtcccccatctaagtccggtttctaggtcctggtctgggtgcaggttcaggtttgtgtcccaagccttggtttgagcccaggtctcggttcgagtacatgtctaggtctcaatatcagtcttggtctgagttcgggtttgggtcccagtcacggtctggatctcgacgatggtttaggacctccaagttcaggtcccacgtcccagtcttagtcaatgtctcggtacaggttttggttcgagtttgggttatggtttgggttcggttctggtcttaggtttgggtccaagtcactattccaattcttattctaggtctagtttggttccgggtcagggtctgggtccaggttggggtcggggtccaagtaatagtttgagtctaggtacggggttttctgaacccgagctgggtccttgtctgagtttgggtcctacgtttgggtctggtctgtgtctgggtctcagtccaggtcccgtgtttcgatcgtgattttggcctgggtcagttttaaattttgggtctgggttcttgtccatgtctaggtgcgaatcccaatctcgattaggggcttggtttgggtcaaggatcgagtctcgagttcgggttcgggttcgagtctcagtcctagtctgggtctgggactaggtccaagctcgagttttcgggcttggttaatgtctagttctaggtgccctggtctcggtcccagtccaattctagggtcctggtcacattttggttcaagtttcagttttgggtcccatgttagggtctgggtccaggtcctggtcaagcttcgtgtccttgtttgagtcctagatcaagtcaccaactatgagtcttatccaagctgctgttcttgcatcccaagacaaaatatggatcccaatcacgagtcctagtctgatttcggttaatgtcccaggtcctggtctatgtctcggtctaggtccgggaccaagactagggtgcagttttgggtctcgatcccaattcttggtcccaagtcctgttccatgtttgggtctgagtttaggtctgggttcaggtctcaagtctcggttcgggtttggattcaggtttgggaccctatcctagggtgggtctgtgtttgagtccgggtcctggtccggttatagttttgggtcttggtccaggtcctagtcctattcctggtcctattgtagggtcccgatcggcttctagttttagttccagttttaagtcacagggcataggtttggatcgagttttggtccgagtctagattcgggtcctgatttgggtctggggcgtggttcaagtccgggtttcggtctctgttacggtctaaggttgggtctgtttccgagttcaggtcttctaggtccaggttccagtagtcccgtcgttccaagatctcagtccggttcgagttcaagtttcagttttggttctcgagtgtgggtcttggtctaggtatgtgtctgggtcctagtttgagttcaattttgggttcgggtgctggtctaagtcccaaatcaagacactgactacggttcgggtgcattcatctcccgaggtgggtcctaggtctaggttggggtctcgggtcgggtccgagatcccgatccatgttccgaggcccaagttctactctctgatttagggccctatccccgagactgggttccccatctatgttcaggtcctaggtgccagtctgggtccaatttcaagttttggttcgggttcgggtctcgagtcctggtctgagtccaggtcttggtttgggttcgggtccgagtttgggtcccactcctagtgtgggtccgagctttgggtcacaggtacgagtttggttcttagattctgggtccggcccaagtttttgggtttgggtctgggtctgggtctgggtctaggtcctgatcttggtttaggtcccaagtcaaaggtcttggtcctggtccaagtcccaatatgggttcatgtctaagtttgggtttaggttcgggtcctgttactatccaaggtgtgagtttggtcaaatttcaattccgggtctgggatcgggtctggatcctggtctgggtccaagtctgagtttggatacggatctaggtctgggtcctagattcaaacactgacaatgggccaggtcgaagcctcaggtccagattcagatcttagtctttttctagttcgagtcccaggtcttgggccaggtcccgtgtttgggtttgggtccgggtttggggttgtgtccggtagtcatgtccttggttttgggtgcaggttcgggtccaagtcccctatctaggtctggatacttagtccaggtctgtgtccaggtttgagtttggggcccatccccccatctaaggtccgaatcctaggtcccggtctaggtccaagttcaagttctagtttggatcccaagtttgggtccgagtctaggtcccagtacgagttcacatttgagtctgggtatgagtctcggtctgagtcgtggtccttgttcgggtccaggtcggggtcttgatctgagtcccaatcaaggtctagctcttggaccaagttttggttattgtttgggtctggggtcaggtcttaagtctgggtctaggttcgtgtctggatccgggtccgggtatgggttctgggttccgatcttggtatgggtatgggtttgggtttagtgtttagggatttatggtttagggtttatggcttaaggtttaggggaagtgtaaaaagtttaggatttatggtttaaggtttagggtttagggttccgcttccattttcgggtcacagggtacgattcaaggttcaggtgtgggtctgggttcgagtcctagtgtgggtctaggttcgtgtttgcgttcaggtccgagtcttggtccgtaatcaaaacaccaacaacacgtcgagtctagttcaagttctagtataggttcgggttctatccggggtctgggtccgggtcctggtccaattcccaaatttagacaccgactatgggtcgggtttaagcctcgggtcttcggtcttaggtcctgggtccaaatccagatccttgtcaagttcttgctcatgtcttgggtcttcgatcctgatttaggtcagggtcctcggtcccggtctgggttagagtttcagtctgagtgtaggtcccagtccgtgttcggtattggtccttgtcttgggtcttggcctagtctggatttgggtcacgtttcggtacttaggtcccaggtcctagatcttggaatcatactaagacccgaacctggaaccatttctaaaccaggacccaaacccagactcgaacccgagatccaaaatagaaacaagaaccataatgaagacccttgaactggaattggacctggacccaaaacaggatctagatgcggaaccgaacacgaacctagacccaaactgggatcaacacccagacatagacccgaacgcgaacccacacttgcgcaaagacctacaaccaagaacacgaaaaccaagactcgtgactagggacctggaccagatgccagacccgtaccagaactcgaacccaaacacagattgaaactaagacccagacccataccagagctcaaattcaaacccgagactcggaccataaccaagatcaagactgggacctagacctagactaggaccgagacctaaacctggactggtactagaacccagactgtgatcgggaccaggacccgaaccgagacccaagactcgatgttcgggtccttgtcatggttttgatcctggtctgggtcatgggtctttggtcccagcgagggtttaggaccaggtcaggtcaggtcccggtctgggtcccggtccaggtttgggtcccaagtctgaagtcgcagtcctagtcaaggtccctgtccaagttctagtttgagtatgggttatggttttggttcggttctggtcttatgtctgggtcctagtaaaagttccaaatctgattctgggtccgggtttcgttctgggttcaggtttgggtctaggttgaggtcggggtttgagtcttagtctgagtctgggtacgggtttttgatcccggtctgggtcgaagtttgagttcgggtccaggtttgggtcctaggtctgggtcagaggttccggtttgggtctgtgtctgggtctgggtccaggtctcgtgtttcgatcgctttttgggtctgggtcaatgttcgagtctgggtcttggttcgtgtccgaatctcagtttaggtcaggggcttggtttgggtctgggatcgagatctgagttttggttttggttcaggttcaagtctcaatcctagtctgggtccaggaccgggttcgagactacgtccgagcccgcattctggggctgggtttttgtctagttcatggtcccggtccaggtccaggtcttggttacggtccccatcctattctaatgtcctgttcacgttctggttcaagtttttacttcgggtctaaagtcggggtctggcttagggtcctagtcaagcttcaggtacttcttcgagtcccacatcaagacaccgactatgggtcttgtcaaagccccagttcctggatctcaggacaagacctgaatcctaatgacaggtcccagtctggttttgtttcatgtcccaggtcccggtttgggtctcggtttaggtccaggagcgagacttgggtgctgttctaggtctcgattccaattctatgtcctgagttctgttccatgtttgggtctgagttcaggtctgagttagggtcctaggtctcggtttggatttggattcaagtttgggacccaatcctagggtgggtctgtgtctgagtccgagtcctggtctagttacaattttgggtctgggtccaggtcttcgtcgtggtccttttcctgggtcccgatctgcttttggttccagtttcaagtcaccggatacgggttcaggtcgactttgggagtgagttgggttctgcgcgaggtccaggttcgggtttcggtctcggttagggtctgaggttggtgtaattctaggttcgggtctgggtctagcaaccggtctccttccaagatcccggtccatttccagttcaagtttcagtttttgttccagagggtgggtctggatctaggtatttgtctaggtccttttttggatttgagttttggttcgggttcttgtctaagtcccagatccaaacaccgactacgggttgggtctaagcatcgagtcccatatcccaggtcctgaggtgggtcctaggttcaggtttgggtctggggtcgagtcttggatccatatccaagttccgaggcccaagttctggtcccggtttcggggcccgattctcgggtctgggtcccccatctatgttcaggtcctaggtctcggtgcgcgtccatgtttatgtttcggttcaagtttgggtctcgagtcccgaactgagtccaagtctcggtttcattttgggtccaaattctggtccaatccaaatgtgggttcgagtttaggccccaggtccgagtctggttcttaggtcctgggtctgtccctagtttttgggtctggttttgggtcccagtttttgtccaggtctcggtctttgtttcggtcccaagtcacaggtcctggtctaggtcctattctcggtatgtgttctggtctgagtttgggtctagttttgggtcctattattatcccaggtatgggttcttgtcccaaactttgtctattccaatttcgggtccgggattgggtttggatccctgtctaggttcgtgtccgggtcttggtacggatctgggtctagatcttggattcaaacattaactacgggtcaggttgaaacctcaggtccagattcagatctcggtgtagttcaggtgccgggtcttcggtcgggtcctatgtttgggtttgggtctgggttttggggttgtctcccggtagttagctcttaggttatgggtctagggtcggatcccatgtctctagtctagggttgagttttgggtctcggtcctagttctggggcccagtttcaggtttaagtcccccatctacgtccggatccttagtctaggtctgtgtgaaggttcaggtttggggcctaggtcccccatataggtccacatacgtccaggtctaggtctatgttcaggtttgggtttggatcttgagtttgggtctgagtctaggtcccactacgggttcatgtttgagtgtgggtccgggtcccgatcaaagttaggtctctgtttgggtccgggtgggggtcccgatctgggtcctagtaaggtctaagtcccgcattaggttctggtgtgcgtttgggtctgggttcaggtcttgagtctggtctaggttggggtctggatccgggtcttggtttgggtcctgggttccgatctcggtatgggtatggatctgggcccatgtccaggttagggtttagggtttagggatttatggtttagggtttagggcttagggtttaggggtaagtgtatagagtataggatttagggtttagagtttaaggttccgcttctagttccggttctaatttcgggtcatagggtacgatttaaggttcaggtgtgggtttgggtccgagtcctggtctgggtctaggttcgtgtttgggttcaggtctgagtcttggtcccaaatccaaacaccaacnncatgtcgagtctagtttgagttctagtatgggttcgggttcaagtccgggtatgggtctgggtccatgtccaattcccaaatttagacaccgactacgggtcgggtccaggcctcaggtcttgggtcctaagtccctggtccaaatccagatcctagtccagttcgacctcaagtatttgctcctggttcgagtctcaggtctaggtttgggtcttgggtcctgagtcatgggttcaggtccccgattcaggtcagggtcctaggtcacagtctggttagggttctagttcgagtgtaggtccccgtctgtgttaggtactggtccttgtcttgggtcttggcctggtctatgtctgggtcacgattcggttctcaggtcccaagtccgagtatcaggtcccgggtcccagtcttggtcccatatcctgatctaggtaccgtgtcctggtcttagtctaggttctagtcccaatctaggttcaggtttcggtcctagtctgggtttcggtccttgtcctgatctcggtctgggtctggatttgggtttgggtttaagtccatgttcgggtctgggtctgggtctgggtatcgatcccattctgggtccaggtccgtgttcggttctgcatctagatccaatttttcagtccaggtcaaattcttgttccatcgtcatgatttcggttattgttctaattttgagtctcgggtccgtgtctgggtttgcgtctagtctggaaaaggttccaagttcgggtcttggtgcgattccaagatctagacaccgactacgggttcggtccaagctccgtgtctagatccgggtcccaatctcgggtgccggtctagttccatttcgggtgtcgggtcacgagctggggcataggttcaagtccagtactggggtaagccactaggtcccgattcttgttttggcttgggtcccgctctggttttttatttgggttcaggttcgagtttaggtcctggtcatgtccttgtccggttccagttccagttgcgattctgcgttcgagtttgggtttgagttcgggtcggggttggagtcatggtccgagttcgggtttgggttcgaatttcggcctaggtctggattaggctccaggttcgagttcgagtcccaagtttcgatcccgatctaattcaagttcagtttcaggtctaagtgtttgttttttatcccagtctggttttgagttcgggtccgtgtccaggtctaggtttgggtctaattctagttctaggtctgagttcgggtcccaggtttggttccaatttttggttcgggtctgggttcaggtttggtcctggttcgtgaccaggttcctgtctttgtttggattcgaggcaggttttgggtctgggtctgggtccgacttcagattcccggatccatgtcagcctagttcgagtgccaaattctgatctaggtttgggtttcgaggcctaggtcctttgtctaggtcccccatctatgtccgattcctaggtcctggtctgggtccaagttttggtttgggtcccgactcttggtttgagtccaggtctcggttcaggtacgggtctaggtctaagtctcagtctgggttcgggtttgggtccctatcagggtttggatcctggtctaggtcccgacaaggatttaggaccaggtcaggtcaaggtcccaatccaggttcgggtcccagcactcaatcctagttaaggtctcagtctaggttctagtctaagtttgggttcagttctcgtctcaggtgtgggtcttaggcacggttccaattcttattctggtctgggtttggttctacgtcagggtctgggtcaaggttggggtcggggtccaagtcttagttcgagtctaggtatgaggtgttcggatcccaagctgggtccaggtcttagtttgggtcccaagttcgggtatgtgtctgggtctgagtccaggtcccatgtttcgatcccgatctgggtctatgtccgtattttgttctgggtttgcgttcatgtccatgtcaaggttcgaatcccagtctcggtcaggggcatggtttgggtctaggatcgtgtcccgagttcgggttcgggttcgagtctcagtcctagtctgggtccgagaccgggtctaggactggctacgagctcgagtttcgaggcatggttatggtttagttttgggtgccgatcctggtctcggtccaggtcctgttctagggtcctagtcacgttctagttcaagtttcagtttttggtcccatgtttgggtcagggtccaggtccctgtccagcttcgcttccttgtttgagtcccagatcaagacaccgactatgggtcttatccaagccccggttctcggatcctaggtcctggtctggatcccaatcacgagtcgtagcgtactttcggttcatgtcctaggtcctggtctgggtctcggtctaggtctgggacggagactagggtgcacttctgagtcttgatcccgatttcaggtcccaagtcttgttccatgtttgggtctgagttcaggtctgggttcgggtctcgagtctcggttcgtgtttggattcaggtttgggaccctatcccaaggtggctctgtgtccgagtctgggtcctggtccggttacagttttgggtcttggtcctggtcctagtcctagtcctagtcatgttcctaggtcccgatctgcttctggtttgagttccagtttcatgtcacggggtacgagtttggatcgagtttgggtccgagtatatattcgggttctgatttgggtcttgggcgtggttcaggtctgggtttcggtctctatgacggtccgaggttgggtctgtgtttgggttcaggttagggtccaagttccggtcccgttctaagatcccgatccggttccagttcaagtttcggttttggttcccgacggtgggtctgggtatgtgtccgggtcctggtttgagtacgagttttgggttcgggttctggtctaagtactagatccagacacaattgtacatcgagtcccggatcccaggtcccgaggtgggtcctaggtccaggtttgggtctcgagtcgggtcctggatcccgatccaagttccgaggcccaagtttttgttggaatatgtttaccaggatctagatttactnnnnnnnnnnnnnnnnaacatcctaaatatgaatatctaaaacaatgtaaataaa

SEQ ID NO: 22421 - DNA, 1931 bp, Cannabis sativa
tgcctttactaatccaaattactaaagcggtcattacacaaattaatggataacattaatttgatggcgttgaatgttagagggctgaataaaaaagagaagcaacttgagttatttgaaagttgtaagatcaataaagttggttttggggctctttttcagactaaaataaactgtgataaggcttctagtgtgattttgaataatccaaactagaaaatctattccaatcaagtgatattgtatagaatcttcttgatttggatcaaaaatctagttaaggtggaagtgctcttggaggataagcaatttgtccattgcaagcttaaaatggttgggttcaaagaagagttctacctcacggctgtgtatggtagtaactcgttaaatgaacgaaaggagctctagtgtaaattagcgggtattggtcagttgaaggaaccttggataattctaggtgacttcaatgccatgtttgcttataaggataggtgtgtcgtaggaaaataaggacactgagatataagatagccaagattgtttggcccagggtcaagttgaagagctcaaaactttgggttcgttctttacttggtctaataaacatgaggagggaagcagaattcactcgaagcttgatagggtatttactaatgagagttggctagaccacttttcgaatacagaagcaagttttagatgggggttctctttgatcacagctactatcttattaaacacattaagatgagtaattgtggtactaagccttttatattttgtaactactggatgctcaaagatgggtacaaggaggttgccctcaaggtgtgtaagggaatgaaagtacttgatctaaagagtctaactcagtaactgtttagatttaaacatgttttaaagagctgttatgtttctaagcatgaagatgttaccagcaattatagaacagtaagagaagagtacagtaatgctcaaggaaacctggccaaaaattcgttatgtgctgctgcagcaaatgaagaaaaaactctgcctttaaatttcttagatgcgcaaaaacagtatgccagctaccttcaccagaacttaaagatttattggctgagatttggggatgaaaacactagctacttccacgctatgatgaacaaaagaagatctgagaataagatttgttcctattgtgtaggtggaattgtggaggatgattatactaaagttgtagagcatttcctcaatcattttcatagctttatgtggaagcatagctgagctacaaggagaatggaggcttattgccttaataatgggaacaaactgaacttgatacagcaagtgcaaatttctcagcctttaagcaagatggatgtgaagaaagcattattcggtattcattctttgaagagcccactcctggatgggtttggtgttggctttttcaaaggtatgtgggatgaaataggagatgatatatctagagcggtcctggggttctttcaaaatgggagtctcccaaatccctcattcccaagaatgacaatctgccaaagtgctaatgactataggcctattgcctattgtaccacgatgtacaaatgcatacctaagatgatttgtacgagactatccgaagttcttccttatcttaaacacgataatcaaggtgcttttgtgaagaacatgtagctggctcataatattttgatcatgcatgatttaattaaagggtacactcagaaaaatgtgtctcctaaatgcataatgaaaattgatttgagcaaggcgtatgatactgttgattggtagtttgtcgctgatctttcaaaaggcctttgtttcccttccaaattcatttcctggatcttaaaatgtcactactagaaaaacaggttttagtgacccacagtgagtaactctaaaactattta

SEQ ID NO: 22422 - DNA, 2949 bp, Cannabis sativa
aaaaaaaatattataaaaatatgtttgtgtaagaattttaaatatttttatgggttttaaaattttatttacgtaaaatatggtgttttgatgtatttttatattgtattcttgttatattgttgttgattttttgttatttgtatattatttttatgttatttgaatattattgttttcatgttactttcacgtaattttcttgtaagtataatcttttcacaaaagatagtaatttatgacattgtctcctcttttatatgaaaaaatttataggaaattacattacatacatattttaaattgatgtctttaattattatcttttttttcaaaatttattatgcttaccattttttttaatcattctaccaattttatctttatcacttcgcgatagtcttcattctttttaaattaaaattttttccaactttctcacaaacctacgcatctattttcaaataatacaaatctatttaagtgagagtgtgaggataatttagatacaatacttataaaagagtatatttaaattaaattttatttaaaaataaatttgatgaatgtatagcctaaaaattgaaagctcggccctcccttaccttgtgtcggcaaaagagaagtaggtgaaagataagagaagttgacattgaaaatgataggacacgtgttctattattattggatgaaagtggctgtaggtttttttcattaaagctttttatcactttggtatgtacgtggtattattcctcaccttctccctcatccctcattatcatatatttggatttatagtggcataagtgcttaaagttttatgtttataaagagcataaatccaatattcttttttagcgacataagtacttaatgtttaatttttctctaattttatcaatacagacactctgataatatactaaaaaaacttatacaatactatttataaaatcaaaattttttattatctccttatcagttgattttatgatacgaaacctcacatatacaattcatttttcattttaagctatattttcacattctaaccattttctaactctcgactttgacttataaagtctaagtacttatttggcaccaaaattaaaaaacagttctttgtttaggtgtgttggtcatgtttttagataacagtttcaaaaaaaaataataagtattttaagaacaataagatgttattttctttttaaaatacaattgtatatttgtcaatattttttttttcatattatctcacatcatttactcattttctctctcatcaatttctttatcctcactcattatctttcatattatttttacaggtcaataaggttgagttcaggtctgggacctgggactgagtctagggtccggggtcgagggtgggagtggaggtggggggtcaagagccgagatcgagtccaaccttgagggctaaggttagggtctagagtcaggtccaaggtctgaggtctagtgtggggatcgagggttgaggtcaggtccagggttgggttcaaagtccagggtccaaaaccaggtccaaggtacgaggtctgcatctagagtttgggtttagggttctgggatagggataggggttcaggggtagaggttggggttcgagtctaggatcgaggtcgagactggggtacagggttttgggctggggtttgagttttgaggtcagctctgagcctccgagacaagagtcctagtttgagtttgggtccatgcctgaggttgtgtttagggttcgatcagggtcacggtcggtgtcggggttgggttgaagtcactggttagggtcgggtcaggttcgagttcgtctcggaatctcaaaatattgaagtgtttttcttttcttttttttttaaaaaaaataaatctaaaatatttttcattctcatttctaaaactacaaccttgaaaataaaaaataaaaaacaatgtcaaacaagccttaagatttcaaccgtttctcatgtaaaaggatggattgttcgaacatgaatgtttgggaaggattgcctttgaaaagcaaactcacaaaaacaaaaacaaaaacaaaacatatagttataaaattttgtacgaccatatttttgtaatttttgtattgtttttgtttatttataaaattatccctagattgtggccaaaaggcccaaaacttaaactatctagaaacaaactgaacattacaattcggaaaacattgtttcaactcaaatcaatattatcaaagacaattaaaaaaaaaaaaaagagtgaagaacatataaaatccacagctacatgtttcaagggaaggagaatgatcatgaataaattgaaatcttatgacagagaattataatgctcttcttgattcaattggaacgagcgaagttgcagaagaggaaaagatgttcaacagattcacgctctttattacacatcgagcaaagatcattattggtgatctcgagagtcaaaaacaaattgactctcgtgaaagcgcatttgaaagaatactccactattatatttatgaactaattttctaataccaaacctttgataatgtcaaataaatgaaatgcacaatatgttaagttttcttttgtgggcaatggaacaataacatattttttgatgggtatctcttagtatttgggtgtcacatattttaatatatacaaaagaaaaattagaattatttttacattttctcactttgttgctgtctcccaccttagttgtacttctgttaatttttttcaatcttattggtgataggtaatatagtcatgaaagacttaaccaagaaaaaggaatcccaatataatgaaacttaggtggcgttcggtaacacttttttaatcagttttttatttttaaaagtagaaaagtaaaaatatttttcaaaaatatgttctataaaactatttt

SEQ ID NO: 22423 - DNA, 2071 bp, Cannabis sativa
taaaatttaatatacgtgcctcgcacgtagcttttttctagtgtgtgtatatatatatttcattctttagattgtacttactgagaatatctctcaagtcatggttgatttttttatttcggccaaaaatgtgctaattaatccaaatttttatgttagtattcaagcatatatgttatacaaacacacatccgactcaagaaaatgattcagttacacaacctataaattgtgtgtagaaaagaccaaaagcaagtcccgtcaagagtctatcttgcgtcaacaatctagagaactttggttgaaggagggtgatcgcagctctcggttcttccatgcttctgtagtcatccggcgaaggaggaatttcatttgggccattaaagatcgcgacgggaggtggttggagtccagacctgagattgaggagtactttaggggtaacttttcccaagttttccgttcgggcaacccagtccttgatgctgaattttatgacttgctccccaagatggtgtcccctgaagataatcaggctctgatgtctatcccttcgcctgaggagattaaaaaagtggtttgggagctccctccgcttaaatccccaggcccggatggcttcccgggtaaattctataaggataactgggatactattaactcggaggtgattaattttgtccaggaattttttagttcagggcgatttgttactgagatcaaccgcaccttcatcgtgctgattcctaaaaacgattcggcttcctcgtttgaagattataggccgatcagtttgtgcaatactagctacaagattatctctaaactcctggccaaccgaatccgacctatcttgagcaagctaatatcgcctaaccagtcggcttttgtcaagggtcgatggatcgctgagaactctatcatggctaatgaaatcatcaattttatgagacacaagaagggaaagcagggtttcattggtgtgaaatgtgacatgtcgaaagcctatgatagacttgagtggaggtttattgaggcggttcttttggctaatggttttgacaaccattttgtcaaattggtgatgttctgcattgaatctgtgaagttccaggttctcctcaatgggggcctcacaaaaacgttcactccgggaaggggaattaggcagggggatcccctttcgccttatatctacattttatgctctgaggtcttatctcgtctcctcctgaaaaaggaagtggagggccatctcattggagttaagacatccagaaccgggccatcgataacgcatcttatgtatgcggatgatactatgctcttcacaagggccgatgccatttcggtcttggtcctccaagagtgtacgagtaaatattgtagctggtcggggcagaaaatcaatgctgctaagtctcgggttaccttttcggacaattgtggctgggaattaaaaggggagttgcttgatcttttgggctttgatataatggactatgatgagaaatttctgggcaaccctctcttcatccggaagaattgtggtaagaactttcagtttgtggtggacaaagtggcaaaaagattggaaggttggaaggcccggcttctttctcaagcggcgcgtacggtgttagtcaaaagtgtagtccaaactattccgtcttattccatggctgtgtttaaacttccgggttctattctggaggagttggacaagctcactagaagattttggtggaaaggggacatggaagggggcagatatctatccttgattgcttgggagaacttgtgtaagcctaaagtgtgtggcggtttgggctttagaagagctaaagatatgaatatgtgttacatggctaagcttgcgtggctgttggccagagatggaggagaactttgggttcgaatgatcaaaagtaagtattttcctaactcctctttctttgatgctagtttgtctgggagtgcgtcgatagtggctcgtagtatctggtctgccaaacagcttgtggtggctaattctgcttggcgggttggttcggagtcggatgtcaattta

SEQ ID NO: 22424 - DNA, 2067 bp, Cannabis sativa
aatattattttaaagcaaaattattatagagacaatcaatttgatgccacaactttttgggctacaaaatattttaactcgatgttttcacccaaaattaaataaaagaaatagttgattattatatatgtctttattctaataccttgaatcaataatctgtactttaactattatcatataagccatatgggcatttttttaaccagaagtctaaatatatttctatttgaacatataaattacataatggtgcctaatctttactactttgagaagaacattatgattgaatacccccaaaactaaaacacataatatgtaatatctaaaaggtggtataatcaagtcaaaaacaaataggatgtatgatttttctttatttcattaggtttgactatattatgtggtcttcaagcactgcctattcgtccaattgtctaaatttgcttaagattttatatctttacctaaccaaggcatatcccactaagaaaacacaatcagttgttattatgtttatctggatgcatggcaaaacagtcactctcacaaacaaaataatggagagaatcttatagacaatgtaaatcattaaagagcccaccctttgatggctccattgcaatatttttatgtgaattggtaattgtttggtgacagaggtgaatgaaaatgatggaacctctcattaaataacaaacgatattttttcttatctttttaatcgtattaattatgattctacttgttgttttttagtacactctcactgattagctttcaaatcttattagggggagtaattctttttcttttgtcgtttttattagtagcatagagaatagaataacatgtgcatcttctaattaatttcattggctagtagcaatagtagtagtcacatggcttagctcaaagcaacacaataagcacttggccccatcaagtataaccattcctgttgaagattccttcatagacaatgataccttttgatgggtgatgctataatttggaattattataaaggggatgcatgcaatgtaatattgcacatattctacaaaatatatatttattagagagagagagaaaaataaacaacacactgcacaacccatttggtagaaggggccaagccaacaaattacaccaacaacttgatttgatcccgatttagatcttttttgctcacttgtttttgtttatctaattcctaattaattgacatattataaccgaaattggctctaccatctctcccttgcaaatttgtgtttcaaaacagtactaatttcgccacaaagtcttctggagttaagaaaagaagaatttcctgaattcaatatttcagatagtatttgttttttttttcaaccaaaaaaaaaaaaagaaagaaatgcttccattagtattctaggtgtagcttgtaagatggtttagaaaatcttaaataatcaaagttctaataagtcatgtttaaagaattatgcttgagaaaggcacatggcttagaaatcagatcttgtaatgtagactactaaattaaattcaaatttttttttttttttgacttatttgtaccactgatccttaaattatatatcttttgacaagttagttcttaaactttatttttttaaaaaaaaattactcccgatctatataaattttggcaaattagtcctcaaactaaatttattggaaaattggttcccaaactcttattttcttagaaacataaaatactcactcttaaatgatgatattttattatctatatattttaaatctgttttatattaatatattatcaaattaaataaatattatttttatttatatgtatttttttaaatatgccaaaataaaaagaaaaaaaaacatttgaaaaaacttaaataataatattattattttttataaactaccaaaataaattatattcaaaagtttatttttaacttatgctccgccataaatccataaaattttactaattttgatgcaaaatttaaataattaataaatatatatatataattaaaaaattattaaaattat

SEQ ID NO: 22425 - DNA, 4145 bp, Cannabis sativa
  modified_base (34)..(67): a, c, t, g, unknown or other
ttatcgtttttgaaagttcatatttaggatgttnnnnnnnnnnnnnnnnnnnnnnnnnnnnnnnnnnggtaaaataattcccaacagttgtgtgatacgccaacctcttctcaaagagttgatgtcctggaatttgcttttgggaaagggatttttacactagataccaaatttagcattttttttttacatttttattactgtacgctttttaaaccttttttttataaaatatgtttttcatttataaatttaaaaagttctttatttacaattttacctttttgttgatgtcatattttccccctcattttgttacatgttacctttctccctctctccctcttttgcttttttttttcttttctgatcatttttgttgctctatccataagccatgaaagggtttttcaaaccgtctaaaacttctaccctaacccactcttttcccaacctcccatttcaataatgatcccctctcttccataacctccatttatttttcccttctcaactttttttttttcattgtataaatggccaccactaggtcaaattccaagtccccttcccctgctaaaaatttttcaaagaatcctaagaaagctccttcaaagtccactaattcaaaggttgaaagtgatcctagaataggtttgaaaggcagccaataagggaatttctaacgtccttgatgttttagaggcttctggttctaaaaaaagacctcttccatctaaggttgaagctcgtaaggcaaagaaaaccaagtcttcgaaatcattttaatagacccagtaagataagcataaattatacaatgtattatcgacttgtatttaggcttccatatgcctgcctacaaggcttatcaaatggtcaagaacgttcttaacgaaagtacgatctctataccacatgcactgaagtacttctcccgtactagtgttggtagggctgaactgtattcttgggtaccactgagtattataccacatgcacgacgtactcgttctatactagtgttggtaacactgtaacatacccttaaatattatacactacaccaaagcactccatatcacaactatactagtgttagtagggtatgacaacataaccagcatacagttacatacataaacacatacatatacatactttatgctaatcttacctcatttcaagattcaagcttgtcggttggcctgaatggaaaattcacgtgctgaacagaggccctatgtcacatttacataaatgggtaaacaacttgaataaactttctcgtgatcctaaactaaaaactacaggtagccctatcgataaacaacatggtaatgttctaaattctgaggaaacacaaaaattaaaggttctgatcctgaccaaactggtagaccgaattccttaaccggtgaaccagttccctggaccttgccttaggtaaccgttaaccgattctgcagaaccggttaacgaattctcctgcaaaaaaaccaagaacttcaaaactcactcaatcctatccaaaaatcaaccaaaccttctagaacacctataataccatcccagaatagtttctaaacaataccagcaagaaaaacacaagaaacacaatatgccattgttaagctaagtttgagtttcaaaaacctcaaacttgttcaactacacgacaaacccaaaaatctagcgcaaaccaaatacattcaactcaattttacccgaaatattgaatttaaacataacttaactcagcaacattctaaaccagttctcacatgctttacccaactaaaagcttaacaactttcaaagagcaatagttcctagggcgtacctccactaaaaacacttagaattcttgctagaatctccaaaaaattggatgatagtagctagtttcctttaggttcttgagagccgaaagagaaagagagaggaaattatgaactcctcaaaattctaggttttttcttcaatttcctaattctaaaaaagtcaaagataacaaagtaatatttttattattttttacttaactaaaaggtccagctatcatctagagagaaggacacctatcctcaaaaattcaaatggcaaaactaccattgccttggtacttaagtaataaattgacttaggggtaaaatggtccaacatcataaccccgtcaaaacctaaagtttgaactcaacatgctattactctctagaatataaggttctatgtttacccatgtaactttaatggcgttccgtagcattgtccatcgccaccaagctaaagtccaaacaaataatattgtattctttaaagcaagatttcacaactttgtattgaaatgttttcttgattgcaaagtagcatagggcacatataaatgtatctttgtccttgtaaattttttccttttctattatttcatgtcatttatcaatgacgataatcatttctgtattgtcaacttcttcttcttctttctggttttaagttgttgtaccatttttgtagcaacaagctttgggtagtcagtgaagtcaaaatatttatcttctgcatgagttttttttttgttgttttctagttgttgtatggttgactctgatgttaaagtcatagtgtcgaccaaaataacatcatcttgaactgatcaaattgttgctgcagttggttgttgcttgtttgttgttgttgggttgttactaggatgttgcacatctacctgtgctgagtatgatatgttatcatcatcatattattgcacatcattgattggttaagtgccaaaaaggtttgtgtctctgtgttgctgattttgttcacacacaattgttaccgtgtgaaatcagtttctttgcttaatagctttatgtagaacataagacttttatcatttttgatttgtagtggttggcatccttcttttagttggtatttcagttgtattggtactgtatcagggttgcattgtagcccatccatcattattttcacaagttgatagaaactacaatcttttcatagtaattctccacttgattcgtaatcaacatagtgttgttgtcatcccaatggccattgctctttaccaaaatgtatagaggttccatgtcctgaaatttgtgtatttgttatgattttttagtatcaataattgcaaataactatttttaatctaacaaaaaaacttataaacaactgtttttttcaataaacattaaataacatctaattctacggtatttgcatttttttaaaaaaaaaatactaattcatatattattttaaattgtgttcataattctaaacttctattttttatcagtcaaaataactattttctgacaaacaaccataaatgagatttaatttaacaaatattattcatttttacacaaacaactattataattctcgaaagcaacatatatacaattatttttttttttaaaaaaaatagtagattacatctgtatgcattagtattttttttagttgtaatctattctcatttatttattcagatcaaccaaatttctatatcattaattctttatatgatttccacgatctaaacagtatttttaaccatgaagaaaacttaattaggaagaatatcattaaagaatcattagaaatttttgtaccttgactttcttctctgtttcgtttatgggtaagcttcgaagtttatccgatctccttgtcttcaaattctctagatagtatgatttgaatttttgattgtaggttgtttttgtgttttttctaatcaatggaggtcgaaatctctgtgtacttattttttcctttctattttaacttttgcatttggatttttcgggatttgattgttttttggttgagatctacattttgttggcgctaaatttcttggtttttgaaagaaaattgtggagatttaggatggatgtggttcagctgggtcacgaagaaggaggagctttcctcaattattgttgttaggcccgtatttttgaaaatggaaacttttgttttgtatttttgtttatttttctttctagggtataaatgtaaaatagtgccactagttgcttattatagaaaaaattgttggatatttattttaccaggatcttagatctactcacagatcg

SEQ ID NO: 22426 - DNA, 2008 bp, Cannabis sativa
  modified_base (455)..(467): a, c, t, g, unknown or other
tgtcactaatcggaacatatacttctggatagctcactatcaatcttggttattcattcgggaatgagcgcgtgtacaaatttgaaaggcttgtaagtattatggctcccaaatggtttgtactgaaagagtgttcttcaaagctgacgaggattattgttgttggagatgagcttaatcatttaaaacggtgtaaatgagccacgatattctcagagatatttttaggcaataatgtaaatctataaatttctatcaatccttgtaatctaagtgaatcagaccattattgcttgagtgaaaatcgtgatagtataagcagggccggccctgaaacaaagtgggccacaggaaattttttttttgggcccttatgttaaaaaaaatgtggtatttttcaaaatcagtaaaaaaaaaatatataattttaaaaagggaaaaaaaatttttgggcnnnnnnnnnnnnngggccctaggcacaggcctagcctgcctatgcctaggaccgggcctgagtataaggttgagagagaaaccttttttcataatctctgagagtttgtgaagattcttataatcttgtaaacattgatatcaatgaagatatgactgctcctgttctgattgagatttagtgcattgcacatggctcgaactcgttaaacatggtgttattcttttttgtgttactgcttaattcattacttgaattttgagatctcttattttattatttttttattgtgttgcatgtttgttggtccggtatattgaatcgtaagtcattgattgtttccgtttcagacaacaataatattatattgattttgaaaagttcaaaaacctaataaaaatattaaattaataaaaaatattaagtttacttaaaaaatctaaattattcctaaaaaaaataacatttttaaattttatttataacacatattctaaaaaatcaaactaaaattattaaaaatctaataaataatttaaaaaattaagattttgtgatgagaaaaccaagccgatttctagcacatacaaaaaatataattcggttggtcatgatacctccatatcaagttattattaagtttaaatttaacgaaaaatagagattagggtgctatcattttgaaaaatagtaatgttacatacacatttaaattacacacattaataacacacaatgttgttgtagtaatattagtcatttatatttttaagtatcacttttaattatatggttaagattatttacgcatcattatgtatagaaattgtgtgtaatttgagtgtgtataaattatttttaaatagattgtgaaattataatttttgtaaaacataatttaaaataatatttaccatatagaaattagttaatatactttagctagaaagggacaatacactagccaaaaaaaaaagggagagagagggtagataaaaaaatttatacaaaactggatatagagaggtattaataataaggacgagaaaaataatgtgaggaaatattcaaaataaataaatgaaaaatagacaaaagtataatgagaaagaaaaaattaaggatgccaatcatgccaaacactcatatttattttaaagaatagttagaatagtttttgttattaaaactagaaaatatttttgtttagtgtaaacatcaaataaatcctttctttatacaatagtatttttgataaaaaaaaaataggtattgtgttatttgatcataatcaagcatggatggagtcgagtatgaaaataacaattctttcactataaaaagtcttcattcatttattattatatatattttgttcctaagatttagtcattggtataggaatttcttttgtacgagtcaatgaaagatcattttttgtagtagcctagccatagtggggtagtcaagataatgatattagtattttgtataacatatgatcagtactccaaaaacttattatattccaaaacaaatcaaattatattctct

SEQ ID NO: 22427 - DNA, 2081 bp, Cannabis sativa
cctttttctttcggcaaaaagatgacccccttgaaccatttttcacattttcttttgtgttatttgttgaagataacagatcactattgtccttcattttattttatttgtatggctttttcgaagttgtctttttgtttttgacaaattaaattccccatatgtacgtgtctgcatattctagtgtcgtgtaacacttgacaggttcagacaagctgaatcttgaacatggctgccctacccttgttaaactttccagagtttcaaaaccatttctcatcctttgatctaattcaattatagcttaatattcttggcttttattgttacttggtctttacttaaacaagaaaatcaagtacacgagccttcttgttaaataaaaggcaataacttttgtcttcagtacctagtttaataagaacagtcagaaattccagtcgtgggcttttgggtccaccccatgtactatttgcagcaataatgaaatttgaagggaattacaatttttttttaatgcagtttatttaacttggatgctatagtccaaaaaaagttgatgcataaagtacactgcaaaagattaaagcagtagtatacagtttacctccatacatatgtatattatattttatatgtgaggtatcttctatacagatcttaaaactcaattcggcctaagttgaaaaatattatttttattaattaattaattaaatttacctttaaattttatatttaattgaaacatatctctttttatatgtattgtacccaaaataccctgacataagagagtcacgtggaaagtatcttaaagtgataagggcaaaattggtataatgtttaaaaaaagaggtaaaaataatagactttaaaaaaaagagtaaaaataaaagaagacaatataaaaatagtatagagtgtaatttcttctaaaacgtctggtagtgttacccaaggccgccttaggcataaacgggctagacccgtgcctaggatccactaattttaagagtctaaataaaaaattacttttttaaaaaatatatatttttaataatttttaaaaatactatttaactttatagtaaaaattcaaaaaaaaaaaaaaatttgcttatacctcatttcaactcaaagccagcatcccaccttcgattagaaacaatcttgataattacttactgtacctaaagaaggcacagtccaagatttaagaagctaattattgtcttaataaataaaaaagatataataagattgtgtatgtatgaatcctcttaaataggttgtgatgtgtcatcactcatcaatgttcttatattgcccaacagttatgattacaacaagcagcttagttggtattgacctttcaaatattctgttgactgctcaacttgcaagtctcttaattaatcaagtgattaatttgggtttggagttcgacaagccttaatactttgattttgtttgtttcgttgttgttatctttcatgtagacacacacaccaaaaaaatataaacaaaaaaaatttgacactaaaccaaaatcaaagagggacatattagtcttcctcacaaattctaagaatcatcttaaaggctttatgtgaccaaataccaaattaactaaaggccatttccatttgcctgctctttcatcgtaaaaaattgatgattaatgataaatttctaatttatgtgagatgtttttatttcttatttgtttttgaaagacgtgagatattaaattttggacattgttatagcaccgatgactttaatatttgtacaaatttttaaattttaagcattgctattaggtaccagtggtgcctaacaccttctcgacatgtcgcgttgcgattagctagcgatactttctaaaaactattatattaaattatataagactcgatatttaattggaccaataacaatattaacacataagaggatgctagacatcactggtaccttttaacatttctcttaaattttctatcttgctcatcataaccaaatttcgcttattgatatagaatcagtcgtactgtacacaaattaaatttataaag

SEQ ID NO: 22428 - DNA, 4004 bp, Cannabis sativa
aatctatatattatattattataaataatataacagtcttgtataccccactacccctatcactataatttattcctaaattcttcgccggattctactgtttttggcccttttttcttttctgccgtctaaacccaaaacctgacaaaattgaagcttataatgattctctcaccaatgcctaccaaccaatcaatttttttttttttttttttaaatttacaaccacttattagtcaagttatatgctctctaagttacatggtttagtatttttttctttatttgttgtaattacactattatatttataaattttttaaaaatttcaaataatttataatgatataaatatatactttttcatattctaatcatcaccggtgttaaaaaagttttactttataactgtaataaatatagccgtaaaaacaacatgatattcaaacataaaagttgactaaaaatttataataacaacttgaaagatagaagtatctttttttcaatttaaaactaataacataagacgaaatgaactatatttatttataaatagtcttctcacctttcacaaatcaaattgagaaaaaaggaaaagaaagaaatggaactaaaaattgtttcaagaatgaacatcaaaccatcttgtccaacaccttctaacctcagaattttcaagctttctctattggatcagctaattccccaaccatacgctcccattgtcctcttctacctaccaaacgacaacaattattcagaccattgtgatcaaaacgacatctcaaatagattagaatctctaagaaaatccttatcctctaccctaacccgattttatccattagctggaaaattcaaagaccaactttcaatcgaatgtaacgatgaaggagctaattacgtggaaacccaagccgttggcttttctcttcgacaatttcttagtcatcctgggcctgatctcttattggtcaataaactccttccctgtcaattgggttccactgaattaaatctcacgggagcttacgtggcgaatatccaggtcaacgtctttgactgtggaggcattgctctcggcttatgtattgcacacaaaatcctagacggcgtcgctttgagcacctttattaaatcttgggccgccgaggcccaaggtttcgataacccgactgggcccaatttcgtggcgggctctctcttcccggctgacgattcattatggctgagtgattgttcaaaggcgatgttcggttctttattcagtcaaggcaagtcgattacaaaacggttcgttttcaactcctcgtccatatcgattctcaaggctcaatcagcgagttctgacgtggaaaacccgacccgagtcgaagcggtttcgggtttcttgtggcgatgttttatgaccgcttgtaaagaaaaaaacggcgtcgtaattaggccttcgttactaaaccatatagtgaatctccgtagaagaacgacgccgtatctaccagagaattctattgggaatttagtctggatgggggtggcgaaatcggacggagttgaggtggagcaaacccagttggtgagtttagtgagagagtcaacggcgagaattgatgatgattttgtgaagagaatgatgagaggtgaagagggaaagttttggatgatgaaatgggtggatgaaataggtgagttgggatgtagtgagggagttgattatatgggggtgagtagttggtgtaggattgggttttacgaagctgattttgggtggggaaggcctatatgggtgagcagtttttgtttgagtggttattcaatggttattagtttggttattttggtggatacgagatcgggagatgggattgaagcttgggtgagtttggacgaagatgatatggctattgtggaatgtaatacccaacttctccagttagctcaagtggatcctagtcctttggaattggattgactgtggcgcctcataattgcttacttggttactgattttaatattatttatttaaataagtacaaatattaaaatatatcaataaaaatttgccactttcttatgctaaaccttagtgacttgtatttaatctcttgattgcatcgattgcacgttaatgatcagttgacaaaatcaaccatttattaacatgttaatcttcaaaaaggaatcacatgtcctcagcctttattatatcccattcaaaattgatacgtttgagaaatttgacttttttaatgcatatattacactatctcaaatggtagtatcatttaatgttgttaaaaatttacacatcatctaaaaatataatagtttactttttgcactcttatttctaaaaacactagcatgtataacactctttaaaaatattataattatgacctcacataatattatttaacatatatcttaatttttaactacaatagcttcaattttttattaaaaaaataatgaatagcatcaatgccacaatatatagcatccatgcaaatttttagaatgacatcttcttctctctaataatatagcatcttaatgttttgccacataatatatctacctcaccaagcatcctctaaagttttaccattagaaatgctcttaagaaattttttttcctttaaatctttattgtgcaaaattaaaagactactttaatattaattcccattatacttttacaacctaaaataacaatctctctctctctctctcttctcttaattttcattctcttcactcatttcattactaaataacataaatttttaatacaaactatactataagctcggtgatttagtggtagttatttttttgatcggaacattatagaagaatttaatgggtaataatttttctttatttaatttttttgttggttgttatatttagattataatgttgttttaatagttgatctgttagttgttactgttttatgttgttttttgtgtgaaaatagttgttggtcaagttttctacgtttttttattttttggtatttttttcgtctggactgatggtgtccgataagtgttcgatagtggttcgatggttagatcagctccaaggttagggatgatgtgtaaataggcccgataggggagtctgatgggtctgatgccttatagtttgtcgatggtcattccgataatatgtccgatgcatttagaatcttgttttataccccatatccgatgtcatgtccgattggtccgacggttttattcgatagtttgtgttagaatttattttgtgggtctgataggtttttgttggaatttatcatatgtggtccgatgttggtctgatataggtccgattgtgtccgatgcttgataaatttatggcctcaggatttttttttatcactactctgttagatttttgttctaatttttaattctgtttaaatgtctgtggatgacaggttcaactgtttttgcattcattatgtataatggtgtttgggagcttgagggtagagattgagtttacaactgagttgaaaatttaacattcgagattgctacgaatgtaagctactcacatttggttgatcttttgtgcgaagaacttgatgttgacaaagtccattatgacttgaaattggaagtaaattacaagtacatgaaaagtttaatgtattgacctgaagttattggaaatgataagcgtgtaaggtcatttttgcctatgcttgtgaaaagctagattaatttactcccttatttctgactttggtgaagaagaatttatgtaacaatcctagtaccacattaagtactattaaggatactcatagcgaggttgggagtttcgttccaaaaataaatccagaggtgttggcagccgatgtgttacctgaactaaatcatatgatgccgacaaatgacattttagcacaaatgccctttattgatggttttagtgatggtccgaccttaaatggtatgttgagggcaatgatgatgta

SEQ ID NO: 22429 - DNA, 3460 bp, Cannabis sativa
aactgggtgcgggcagtttgaggcggtttgcagtttgatgaacacccctacaaattggtgcttcagcaatatgtcttcggtgtagttctactgcaataggtagtgcattatggaaggctttccaaacaaatatgcgaagcttagaagggatgtttaacttccaaaaaactgtccaccaattttcaagggatttgctactggttgtatcttgttgttcaacttgtgatgtagcaaattggtaccttgatttgaccgtgtaaagctcggaggtagtattgttccatatcatgacatcaggtgtgggaaagacacttagagggatggtgagtattctactgatgtcagcttggcaaaagttggatgatagagccgttaaatcccatcttctattatgatcaatgagattagaaacttgcagatcaggatttgaacttataaagcagtagggattgaatcgtgtgtggccagagagccatagatccttcttacaattgatggaatcacctgcacctactcgccatcgaattcatttcactaaaagttcatttccccagactatactcttccatgttaaagatggacaagttcccgatttagctctaagaaaatgaccatttaggaagtatccatggtgcaagatacggttgagaagagagttaggaaattccaacaacctccaagcttgtttgcccaggagtgcttggttaaaatggatgaagttgcgaaatcctagaccaccatgtattttggctttacaaagggagttccagtttttccaatggattgaattcccaaatgatgtagaaccccacgagaaattagccatcatactttcaatttgattgcacaatgtagtaggcaatttgaaacaactcattgcatatgtaggaatggcttgtaccacaactttcaaaagaacttccttcccccccccccccaaccgagaataattgttccttccaactactaagagtttccatattttatatgtgataccactaaagagtttcatcttgtctcgtccagcaaaagatggtaatccaagatattcctcatggcaaagttgaatcggcatgttgagtaattgttgaaaaaaagcttcatcccaatgtcttgtattagttaagaaagagagcacacatttatcaggattgattaattgacctaatgccttgctatagatgtatatgactctcttaattgatattgtagattgacgaatcgcacgacagaaaagcactatcatcagcaaatagaaggtgtgacactgatgaatgtacgacaaacactttcgcccataatctagcaaagcttgctttgggcctagatgaagctgcaatttgaattggtaatgacccttacaatcttgagtctctcctctttccttaagggcatattttctctcaaaaaaaatggtatggtatgctgtaaaaatttgatgtaaaatagtgtgaaaatgatattttagtgatgtaaagtagagaaggtgattgtttaaaaaaaaaaagtagagaaggtgatggaagtgctctctcataaagttttacttttatattttttctgtaaaataccataattaaatttatttgtgaagaaatggtatttttggaaagtgtaacaaagcccagacccaaaataaagatgaagagggaaatgggttgacaccctcggccgtactcctcagcttgcttcactttcagttgccttgttctccttcactcatggagctttctgcagccacaactgctggtcttctcagctctccaaccccatctctgccactccattcatccacacctagggtttcttacaggcctctctcacttttcactttcggaaaacactcgaattggagcaagctcacatatatggattctcaattgaccccttgtgcttctcgaaacgatgacaatggttctactttcaccacttcccacgttgattctggtaatgttactgacattaatcatttgttctttaacttacaaattgtgtttctttctttaattttgatattggttttcaattcttcaaggctcggaggctcgaactggggaagtcaaaagggtgactaaggagaccaatgtttccgtaaaaataaacttggacggttctgggattgctgatagtaatactggcattcccttccttgatcatatgttagatgtaactaattttttttccctataatacattttctttagctattgattttgtcttatttttatgtgttaaatttgattctttccatttggttaactttgacaaagaggtttatctttgctggtttatgcctcttcttgcctaatctcgatgattttgatgagattttgctctgtcattagaatagttcactgttacccaagtttccttaaactaagctgcttaatatttgtattgtgtaattgaaatttaatttagttttctactgtggataatatgatacgcactgaggatttgatcacattttagtatattttgaattttggttcctaaaagtttgtctgtatttgtttgcttagcaactttcttcgcatgggctatttgatgtgcatgttaaagcagctggtgacatccacattgatgaccatcatacaaatgaagatgttgctctagctattggaacggtattaaaacatcaattttgatatggaaatgagatatttttgtgcttcaatcatagagtttgaatgggttagtatgctctttttacaggcattgctgaaggcacttggtgataggaaaggaatttatcggtttggtgacttctcggctcctctagatgaagcactgatacatgtctcgctggtatggtctatgtcattttgttaataatctttaagctaatagggtatttagaatggtgaaattgaattacaaattctttagattgtaaaggcagagtttattgggggtgtcaattttatgctcgtgattatgccttttcacgagacatggcattacattgctatttcatcttcttttctttttaaagcccaaacaagtgaatcccataatgttcacttttacctttgggtaatatgaaacccatgtaaatatgtgggttttagatatatattataaattagtgaggattctcttgtccagccaaacatttctaactgtcacttctatcaatttatagcaagattctcatgcgcaatattatacaatagttatggacaatcacattatccagtttaactttgcattaatcagaaagtatttaactcctaatctcaaatgacttttcaaagtagaaactagaaatattatttgaactcagagtatattgtttattgtttaggatttatctggtcgaccatatttgggttacgatttgcaaatccctacccagagagttggaacatacgacactcaggtaacctcgtctacatatgcatggtggtttcatattcctccatctgtttccttcagctatagcaatgttgaaatttcc

SEQ ID NO: 22430 - DNA, 1513 bp, Cannabis sativa
  modified_base (1015)..(1015): a, c, t, g, unknown or other
  modified_base (1223)..(1224): a, c, t, g, unknown or other
gtcctgaatataggtcataacgtgtcgtgcaacaattttataggataagttcgatacggcccgcaagtctagtaatttagtaccgtgctcaaattcgtatcgtattttattcgtaccagcttatttctcttatatagaccaacaactgttttctacaggcttaaattcgtgttgtaaattgatgagttaaatactaaaatatatgtgtatattttataacaaataattataattattataattttaatactactattattttaatttatatatatttattactgttattgttatcaaattattgagattctcaatgtatcatgcttttgagctaatttattcatgtttgcgtactgtgctttcgggcttgttgtgccgtgtcgtgtcaaaactcatatttttcgtgtcgtatcttgtttaagctcatattttttgtggaatgtcttgtcgtgcctaaacacgtattttttcatgttcaatcatgctcgtgctaatttagtaccaatttcgtacctatcaaaaagtctgactcatatttatagcactagtccataggaatgttaattaacaattatatttttttaaaactagagtaaattaatatttaatatatattcttttgtaaggaatacgatattgaattaacattcgagttaaacacaattacatgtgggggaggagcttctttgaagagaactcatcatttagtcaaagaacatgttaagttaatctataagtctcaacattaaaattaaaattcaacaactaactacaataatgctataatgttgtagcattgtaaactaataaacaagaattaacgaggttcaatctcaagccatagtagcttggatctaactctgaagaggaactgccttgaggtcattctttatttagatagtcatctaaaagctttgcattaatgacccttatatagacttttaaaaggaaatttggcctaacatgtttaaatgtaaatcatggtgttttaatatagggataatttcacaaatanacaaaaacaataaaaaaaaattacaaaaatatggtttcacggaattttaaatatttttacagttttttttttattttatttacagaaaatacggtatttttatgttgttatcttgttaatttgttgttgcttttttgttatatgtatgttattttttgttattattttgatgttatttaaatgtctttttcatgttacttttatgtanntttcttgttgttttcatgttatttctatgaaaaactgtaaaaatgtaaaaaaaaattccttaaacgtaaaaatatatttttttttacaaaaaaggtgtcttgtataattattcctttaatatactacctaattaaaaatagagtttttatacttttaatattttttctttctaaaaatatttttacatttgaaaagtgcatctctctttcttttgagagtaaaagatattaaaagtataaatactttatttttaattgaaccatatattaaaagaccatatttcatatt

SEQ ID NO: 22431 - DNA, 3117 bp, Cannabis sativa
aactccagataaggggggatataggccgtatctctaaaagttggctacattggccaaccgtagtatattcctcctctctatggggagggacaggatgtggttcgttttatccctaatctgtagagtagggatggagcgcttgtaggtaggcactcgctagaagaggtagtgtcgaacctcctggatatcccaggcaatgaagtaattccaggcatatcccctaacttttgatagaggtgtactgttggtgtcacccaaccactggtagtcaacctgggtgaagtagaagtaccccgcctagttctgcttggagcagacttcaaatcaaaataatacccaacctcatatggagtaggttgaggacaacctagctcttcatagagaacaaacatctctgagaggtacttgatacttttcggggtgatttgtgtcagacacatctcgaagtaagctgctatgtctttgaaatatgggtgcaaaggaaacacttccccctactggatgtggtactctaactttgccatccaaccaaaggctagctagtgcgcttgctgatccctcgaaggcacctcacattggacgcctctcactagtccactttctaatattctatcaaaagcctcaacaataataataaatgaaggagagacctaccggtctccctgtgacccaacatcaagaacctaaggctatgaagcatgtaccaagacatggtctaaacctatcattgagggctgaccaagcccattcaatggctgcctatcatcatcaaatgagcctagagggctattgagaagatgtcacaagtcatgtacatcttcctcctaacaggagcaacctcctccaccttgaactcggtgtccagactctcagcaccttggtcgaccataggcacctctgcttggctgacctctaaatctctatcatcaagaggtcgtgtggcctcctccactatgtcaaccctactcatcgttgccaccctagcaatgtgaggattagatgatggtgcgctacgatacgaccacctagttttggccatagtgtatcactatcagtccagagatcactcaaaaattggcgagaggacagattggatgttatctcttaaaagtaagactgactggacttatgacaaagcggttgtcacctcctcagaccaacactcaaaatcacctacatagaagagacaatgggagatgagcaacctgacaaagctacaaggtatgagcaaagttttggccagtcgtacccaagggtacttgctagataaattacattgtacaaggttgggtatcaatgaagtacagtctcaagtattcctacttagacaaatggtgaatcctaagttgtgcattcgactataatggactcactaccaagtcttatacagagttcccaagggaaccacgtatgagattacaattgtatatgcctacaaggtcatcacgagacccttagtgaggtcaaaagaggataaatacttggtcacccacttggaaccttggccttggccgactagggtccccaagttaagagagggtcggctaggtcccatgacccagccaaaggccatccagggaccctatgcccaggcatgggccgaccagcttttcgggtaccccctatggctggccagactccatgatgaagacccatggctggccaagtcttgaacaagacctctatggtcagtcagggtgtatgttagatctaagtgtgtgcttttcaagaactcaaacacgttcttcatgttctttgtgactcaaagagccaagaatcacaacgaaggtcaaaattagatctttttcgtcaaaaaatcacacattatatatcctaagactatcatgcagatcaaaataccaaaaagattacaatctaacatgggaatcagaaaacattcaaagtgaagaaaagtttcatggaaacatgggaaatcaactaaaacaagtaaatagtgggattagaaagcttatccactactagaaacctttgttgaagaggaggggaagctcagattgtcaaaatgtcacaaaaatcccaggagttaaagcaatgtggggcgtcgaccactagtgagaaggaggagctttcaaaagtttctttttctagagagaatgaaatgtggaaagtgaagagagtttcccactatcaagcttatatagcttttgttggaccacttttttacttatcatgcaagtgttcaatcaaaaagcatgtagaagagcaatgcagttaacttactgcaacaagtgagatcagacagtcgacaataattatttcaaaggctaaatatgttgcaagtcttacccagttaaggttgcattagtaccaactaagctggaaagctcctatcagcacagaagtccgaacagggacttgggggaaaatgttatcccaatttttacccacctaatgtggcagtacaactcgccaacaagaaggccaagtcatctactcagcactttaaataacgaggagtctgaggactcaagcaggacgacgaatgatgaaccgaccatctacaagggggctagttatatttttgggagcgaactcaaggaaaatatgaagtgcagtgataacttggtatatctaccatattattattaactaaaatatgtttatggttaaccaattagcgggcttgaggaatagtcaaaccttggccagccctatggtcgaccacccctggccaaccctatggccaatataggtcggccagcttctagacatcctatggctggccatcatacatcctgcaggtgcctaaccagccagacaatggcctaacaagattttggtgcacaatttcacacgtggacagtaagctagactgtgaactaggccttaacaacccacaaaaacagagggaaaatatctattttcaaggggcattatagtcatttatattttactaatttaatttgtaaataatagcttattttacctatttctatgggattttaaggatctaagatctactatataaagagccttaatgaaaccttaaaaccctaggcgctaagtgctaagtgcaagttcaatgttttaagtgactaaaaccctagctctaagtatgataacttatctatctctctctttgtctctctctctctc

SEQ ID NO: 22432 - DNA, 1753 bp, Cannabis sativa
gcaattctaaaaataatctctgtagaatcaacttggtatataactcttatttctaaaggaaaaaaaaaacatcttcaaatcaatactaataattaaaataagtttaaaaaaaaaaagtaattaactatataagcaaggagtgctacctccacaaatcatggaaactactacacaagttgatagttcgatcaacatctatagacatgaatgtctgaatttcaccctcagagaattttgaccgggctgcttggttgatgcatagacactgaaagaataatatcaatgtaatcagattccgggaaatcatgatatgtagaaatgataaaattgagaagtaaaataaaactaatttcgttgaagttccaaacagctataacacaagttttgattaatttacaccatgcgactattctctcttttcatttttctaatctttttccaaaataatgaaaattttcattaatatatatatatatataaaaaaaaaaaaagcaacaaattcacatattatagagtgcatataaaacttcatatgatttcaaaagacttccaaagttttgagcctataaatacaaattcaaaaatatccaatcaatacattaaccacacacacaaagaaaacaaataaataaacaaaaaaggggaggaggtagattcaaacataatttctaactacaaataattgaattgtcaaacaaacaatatacctgctgataaatgatactcataataccagaacgtagcttcagcctaagcttggtaaggtgaaaggtatattgtgtatccaataaggatctgcaaaaaattaagtccagcaaattttaaattactctcatcaagacaatttcaaatattcactgccaatatattatggatgtcatcttacaaatagaaataaaacaaaaggcaagttgtaaagtgaacaattgagaatggtagttagaaataaagctaagagacaaaaatagatttcagaaaggaaaacaaattgtataacatgcaaggcattgctacaacttgaaatgattagcagtgcttttaatgagaagctttacttctatttctggactaattgaattctccacattttcaaggttaaaaacaaagaattttctttaaaatcatagaaaaactgttacttaaagattgatgtgagacccaacgacagtgcaagaacatagccgtccaactgtcctgaacctgagattgaaaatagaattagaggcaaaaagttgttggtatttttaatatataagttgataatgatctgtaggtatacaatgatatcatataaatataacaagggcacaagtctgaaagctttgttaatgccatataattgctgattgtaatgtcaagatgtgtgagagttgcagcaaaaatgcctaacaactagaccagtcaattaccaacaaaaatgcatatgtgagcacagcgcatcagaaaagaagttgctgaaaccaatagagctttaaacacttttctagaagatttaataataacaacttgatagtattaataagggttacaaaccttgttgaagaaatttaattagcttattaagaagcattggtccagcaaacccaacacaatcgttaagcacctgcaaaaccagcattatttagcatccggcaaaagttgatgggttgtgtaatattctattcccctttcttctttttcatgacaaagtttgctttattttgtgttagttttgtaaaactaattatactagacgaccatcaacctacacaga

SEQ ID NO: 22433 - DNA, 4858 bp, Cannabis sativa
cctcacttgcgtgagtatactacttgattgcatacacttacgtagtatttaataatttttcgcaacacaaattttatttcaaaattaattatataaatttgattaatttatatgatcacgaacacattaaacaatgaaaagaatagatcttcgatgatggagcaattggttccggagattacaaatttacaactcatgcacttagctatgagtataaaaatatagacgaatagcttgatagttttactcatgcataagcatataattaaacctcaaatatattttttaataatttattattattgaagtggcatgtgctcattgtaaaatatttttatttttatttaaataatatgtttttcttttccttattaatataatttttgtaaaaagaaaatatatattttctctatttgaatgtttttgtttttatgaaaattctctattttaatgtgatgtgttaaaaaagagactcgtacttgaaattaaactccatttggttacagttataacttacagagcttaaaccctagcttcgcttcaaaaaccctactgctctcactgctctctcatgttctcaaatgcgtcctctctacaattcctttcctaatcattccaccaacatgcaaaaccccgctcaaccttctcaacaggtacctctctctctctccaatttctttatatgaataagtaagtgcatgattcagacaatttattctcaaggctcaattttttgtttcttgcttttatgaaacagcaggttatggggcctcaatcccaatttggtttaaacaattctcaaattcctaacccttttggtagtccttgtatgcccaatgcgcctacttccatggcaactcaacccggcttcatgaacgcacctaacaatcgtttcccttctcaaaataatcttatgggagcgccccatttaggtaacccgaatggccctttgcctcaacaaggtaatccccaggttggatttggtccacagattggtgtaaaccatatgaactccattgccacatttcccattcgcgggcaaggatttcaacccggtaacatgtccaatttaccgcatttcaatcagaatatgggtttgccctttggacaattctgtatgccaaatcatttgcagaatatgaatcaatttttgcctatgcaaatgcaaatgcaaaatctttctcagtttgttcctcagaatacatacggggttatgaaccaagcactacagcccacaattcctcaaaatcctgcctttttggctagtccgcaatttggtaatatgcactataatcagattgtaccgcaagttaaccagaatcagcataacttgtctctgcctgtgatggatgtaaatacactgaaaccatcacctgtagcaaatcaacaattgcaagggaacttgcctatggagcaaactaataacatgcaatcttcaggattcatgggaacacaggtatggcttattaaaaagaagtcagtttgttttagttgaaattgagtgggtgactttgctcttgtatgagctatcataaatgatgttattttgatccattgatcgttgaggctgttttcttaagcctttcttttactttattctttcatcctttgaagtggtcctaaagtctcccttgctgttattagattactacctttaaatgtgtttctacatcttttattattacatttctttcttttgttttcgtcaatgtatttttgttttcaaattagttgttatcaatgatttatttgccactgaatagcaaaaactgtgtttactatgtttgcagagaaatcatttgcaaagtggtggtgggcttaatccttccaatgggaaaaatccatcgaatagaaacttcaacaggaatacaaaaggagggatgtctcaaggcaggtaagataatttgtaatgatttctatttgtttgctttctcatttatataagtggcttgcgatttacaatggagttaaattttgtgtagatctcagaattctcaatttcatggtatgaaacatggaaacaaaaagtttggaactcctaatgctcatagaggaagaggtttgtggatattacttttatcccaagttttattttcctccttagtccagctaggcagaaaaataagaagcaacagaagtactaatgtgattagattccttcacttgagctcttttgatttactctgtaacataagtaaaaaaaccatgagtgttgtttattgcaaagtgcccttcatttgggttaaagagacaagaaaaatgccaaaaaagattgctgctactgctactatgaatacaattattcagtgatgtggtttgggggattttttagaagcctacgcctgttatctataactgaactcagtttcgattactaaacctaactgcttcaatgtggacaatatattctaacatagacatatcacatacatgcagggtcaaataatgagaaggctggaaggtttggaactgacaacttttttaaccaagggagggaagaaaaaaggtaatttttcagtgcttttaagagaaaaaacacatgattgtaggcaactttacaatctgaagttaatgttttcatgctttatgatgctgagctttttggtggtatgaattgtgaagtgtgaacttctcttcaggaacaatttcagaaaaccatgctcatcagtatatgacactttatttgaactttattacttgctgaacttaaattgttgatgtgtgtgttcgtgaactaattagttggcatggaatgtgatagtgattttgaaaagccttagtcattgttatatgattaattataaatcccttgctatcttttcctgccaacactattatttataaagattgattgtactgcttgttcactgcaaccatgatatgcaaaagatctagaaaatgatttagtaaatcaaaatctctgagctgtttgttcaccaaatgttgtaatctttccataagaaggaaatgtactcccaaactaaattctgaacaccgaagtaactgctttgctcttgcttcatcaatttctctgtatttgaacattcttgtattcattgttcattcttatttctggattcttgtaattgtaacgttggaattaacttttcttttcaattttgttctttatatcacaaatgtgaagatctcttgctttgacgtattcggaagaagaaattcgaaagtggtgtgaagaacggagaaagaactatccatcccagagaaacatagagaaggtctgatttttaatctgtatttattgcccaaagttgcctcttttatggggactttaataattctttccacaattacagaagctaatgaaaaagcagcaagacaaagagagttttgagaaagaggctgagctacgccgagaggtacattgtctgcttctccccatctctgcattttctttattcattttttgccgaggctgttttcactggaaacagaaaagtctatttagtcagcatggccacgtttgcaatcaagatacagagctgctcataattctctagaaagctaggaagaaacacgtccccttctgttgccaatcgtgtcatcaaactccagtcatctcgtctatcttaattattaaatttccaacttcacacttaaaaggccagtacattagagattacaatacatctatcattacttgaaaaagaaaaaaagaaaagagagaggattaggggtaccggtgtactgcgttaggcgcccccttggaatgttctcaactgctaatgaccaaattacaggactatagttctgctgtgtttagatgtggaatggtataagaatcttcaagactggactatattttatcatctttgtgtccacagattgatgtagttggtcaagttactgggatacctgttggatagtatctgcttcattattttcttgatttcatttgccttcatgtaaatactttatataaatttctaatacatagaattacgtttttgcagcaacttaaggagattctagctaagcaagctgaattgggaattgaagttgcagaaataccggggtgttctctcaaagaagagaatgggagaccattgaatgagaggggaagatttcccaacaaatttgataaaaggaggagatccgataaaagagaacggtatcctaagaagcgaaggatgaatgataataacaacaataatgcttcctcgaatgttccttcattaagcattaggaaaccgacattattggagaaacttctcagtgctgacataactagagataagagctacttgctgcaggctttcaggttcatggtagctaattctttcttcaaagatggagctgataaacctttgacatttccttctgtaatattcaaggaaaagtccagcgaggacggcggcattgttgaagagaagtttccgaatgataatagtgatgatgatgaagatgataaggaggaagaagagggtgagatcatcacctaaattctcaattgtgttgtattataatatatgcttttgttttttgtgattagcttcgtaagattttgttcatttgtggaagaattggtttgttgagaaaaagccatataccaaatataccaaaagcacattacgaagcatgttggatataatcatctccatagaaattttgaagtacatagaatagaatgtaatgtagacttaacctgcaagttttgtctgaccccaaatggaaatagtgtttcactttcacctgtattttatattttacaatcaaatgtaaatttccatttaactattctacttaagagtcttatatatgaaataatgagaaatatataatttttgaaagaaaatattacaaagtatttaggccacagtcgatattattaatactatat

SEQ ID NO: 22434 - DNA, 5605 bp, Cannabis sativa
tatatatatatatatatcatattccactaaacactaaaaccaaaaccatatatatatatatatatgctaatttaccctaacactatgtttcgtagagaggagaggaataaagggatttatgaattcccttatttgacaagagggagaagggaagggaaatgattgatggagggaggaacttttcctccaaatacacaatttctaatctctcaaaaaatgggaaaattgaagaaaacgacaaaaaagctatctaaaatgacctttctaccattcaaaatataatatataattacattaaaaatgttaaaatagtggatcatgacttgtgttagagcaactagctactctatcatcatgaatgggagaatccaaggaagcttcaaagggaaaaaagggctcaggcaaggtgacccattatcccctctcttatttgtgcttgttatggaatatctaacccgttgtcttcaaaaagttgctagttgtgcaaattacaggtatcatcccatgtgcaaggagcttagaattgtgagtctatgctttgctgatgacttaatgttatttagcaaaggtactcaacaatctgttaaagctctcaaggatactcttgaggagtttagtgcagtgagtggtctctccattaatacttcaaaatctcaaatttactttggaggggtggattcagatgtaaagcagagtataatgagagattttgggctgatggaagggagctatccgcttcgatacttaggagttcctttaaggccaactaaatggaaagcagaggactgtggtatcattattaagaaaatgaggcaaagattacatacttgggctagtagacatctgtcttatgcaggaagggtgcagttgattcactcagtgcttcttgggcttcgaaactactggatgagcatttttgtgttacctcacagtgtcactaaggaagtggagaagatttgtagaggtttcctttggggatggaatggcaatagaagtaagatccacttggcttcctgggagaaagtttgccttcctaagaattatggaggtcttgggctcaaagatgggattagatggaatcatgctattttggctaagtatgtttgggctatcacttctaagagagacttgctttgggtcaaatgggtcaatagtatctatttgaagaataaaaacttttgggagtatgaacttaaacaagattcgagttagtattggcgtaaactttgccatgtgagagacaagttctcaagagaagatgtgcaagcggctgggagaggtaagaaatttaaaactaattggctttacaatagcaaattagtccaacatcctttcccctacaacacagctgtttggagttctctaaaccttcctaaacacagattcatatatggcaagtggtcaataataatctgctaactcgagataagctggctcagtttcgaattatctctgaatctttggagtgccctgtttgtgagatggaagccgagaatcatgaccatttattttttgactgtgtgctgtcgaatagagtgctgcagggagttttcgcttggctgggatatcaggcgtggccgattgctgctgcaggttggaaaagctggcttcaggttagaatcaccaacttcagacacatatttcttgttgctgtgttggctgcaacagtgtatagtatttggaacaataggaacaattgtattttcaatagacattctttttctgtcaactccattgttaatgatgtaaaaagaatcatatactatagattacaggtggttaaaaatagaagtatgagagggcatgagagaagctttgtagagagattattttgattgaggggctgccctttgtttttgtacagttttgcttagttggtgattaatgaagtattcttcttgatcaaaaaaagaaaatgttaaaatagtaattttaatatttatttcactctctattctttcaattttacttcgaataccaaataatataaataaatatcctctctattccacttactccctatcctttcaaaactttccatccatcatactctccctcctttctaccaaacattgcataagaggtaaagtggacatagtttgctagtagtgatgcactataatttaatgagtctatttatagtcattaaggtagtaccatgtgcctcaaatgcaattaataaaatcaactatctcattataatcctaattgcataatcggcatatagttatccacataaaacactattatgtaaattcatataaagtattataatagtatggaggtagggaatttttatatatatttatatatatgggggcaagattatggtaggacctagcaaaagtttcctactactagggaacttttttcactattgattttagatcatgtggttattatgatgtaaggtgtatactcttacaataaaactgcttgtatacaattaaaactttatacatattataaaaatatttaatgaatatttatctttttaaaaaatataataataattgaaaatttattaatttttatttaaaattattattaattttataaagttaatttgaattgtttttatataagtatttattttcaaaaaataattttacttacgaactttgctatattaatttttttttatacaaatagttaactataacaaaattgattattaagtactttcactacaaatttatttatacatatataattctaccataattatcttttaaattaatttactttaataattttaaacttatcattttaaagcatactttgtacctttactattgtgaaattgataaaactatttgtagaacttcaatgcgccaccaagtataaaatttcactgtaatcaatgtataaaatatgctttacattgatatgcttaaaattattaaattaaataaatttaaaaaataattatagcaaaactatatgtacaaataaattatttagtggcgaaaattaatatttaaataattaattttgttataattaattattagtataaaaaagtttaataaaaagtttgtaagtaaaattattttttaataataaatacttatataaaaaaaaattcaaattaactttataaaaaaataataataatttaaaataaaaattaataaattttttaattattaatataatttttataaaaataaaatatcattaaatattattataatatgtataaagttctaattgtatataaaccgtcttatcgtaagagtacacgtttatattataataaccacatgatctataatcaatggtcaaaaaagttctctaccaataaagaacttttgctaggtgctaccataattttacttaagtaattaattatatatatttcataaaggttccttataggtttcgcatgagcatagattctcactttgctccaacgccatgtctaagaatcagaaaacaacccaaccaagattatattattaattaacaacaatgtcaatatattatttatgtatatatatatatatatataaaaagttttagatcagaaatctaagaaactaaaagtaccaactataatagtattgctttgtgtaattattattattattaattatcatcttcatcatgaacactacttctaatccttaccaaaaaaccaaacagtcattcaaggtgtgcttctgtttcaaacggagatttaagcttcgagcactagatccaccagaagacatcaaaagaatttttaacgagtactcggagaacgggaatatgaccgtcgatcacctgcttcaatttctcaaacatgtccaaaaagaagaaaatcctaccaaagaagatgctgaggccattttcaatagtgttaaacatctaaaaatctttcacagaaatggcctccatttgcatgcttttttcagatatctccttggtgatctcaatcatgctcataagtctacggtatatatcttgcttttatagtaaaaactttaatgtcttcttaataatataacaaataattaggatatatatataaccgtctagtgtttttttttttgtgtgtgttaatttggtattacaaaatcacaccatgcatgatactatcctttgaaaagcatgatgatatttttttttctgtattattactcaaaccaatcgatgtccttctcatgatagaaataaataaaataatacatcaaaaataagaaagaacaaaaattactaaagatagcacttaaatagtagaatgaaattgtttgtctcaatttttctttttttcatgtctcggtaatatatgtagaactaatggacttctcgcatgtagtgcatagaaattacatatttacattatacaagactcaaaaaaaccatttggactatatattttgtaaaattataaagttctgaattttgcaaataacaatcaaaatagtccttgaattgaatttaatttttatcaaaataatttcaaatatatatatatactgtctttgctcctttagcagccttcttcatatgtattgaataaattgaattgaccttctagagttattgtctgtcgtattttggggtccaatttgctgtcccttgaacgaatatcatcgtttagtaatttgtttttttcttcatgaaaaacatatttaataccttgagttttcaataatactttattggtattttatattttcaaattatgcataatttagtactctaaagtaaatttaatgaatacaattttatcaatttaatcaaacaaatcttagttatatagaatcaaataattaaatttgaattcagaattcataaaattttaaacagtatcaaatatgtataatttaagagtataggatactaaataaatattattgaaaatacaagatacttataacttgtatttaaatgaagtacatggtataaatgtgtacacacccatcccttttaaataaaattatcatgtgttttctatattttttacccactaagacatgtttggaaaaataaagtaaaattggaattatggacttttttttttctttattttggccacagcaaaaaaaaaaaaagtttaaaagaataaaagtctatacgagtcatgaacaaattctttttttttttttgaagaaagtcatgaacaaattctgtttaaagcttggtatcaccaaaacccaaaacaattaatcttaggtaactcttaatatagctatcgaaataggtcactttagaaatagctaggcggggtcacaaaatagtattttataccaaagagacaatagtgggcaacttgcataactcagttttatttatttatttttgatcggctaatttgagttaaaatttacaaaattttattgtgggccaagtaggcagcactattctttgcttgcattgtttgtcttctcttcttcttcttttatttatttatttattttgataaatccttgtcatgtacctttataattattgattgtattttgaacaaaatcaaatatgagatgaatataatttaatcaaacatagaaaactaaacgggtaatcacccaataaatacaatgattattttttcccattaccatactattacttgcatgtattatatatgtacatatcaatttaatttgttgtgttt

SEQ ID NO: 22435 - DNA, 5334 bp, Cannabis sativa
ccaacactttccccaataccacagagcacacaagaagtaacatatgatttaatatcgatattcacgcatatttaattacagtaaataataaccactcgaggctagctcaagtggccataaggggtgcgtatgtgttggaggtcttgggttcgagtcccaaattatgctgatgtaatatataaacgcttaaatcagaaaaaaaaaaaaaattacagtaaataataaagtattgtcacataccatttggtacataccatttggtatttttgtcttcgaaattgatcctgattcttcattcttttcttttcctttctttttttttttttcaccatggaaaaatttgtttgtcgtgctctcttgtggttcttaaggagacgggtcacttatatataatatattctacccttttagaagatatatatattccttcctccaactggcttaaccccaccacacacactacacacacccttttagtactacaactacactactcccctttcttcctgcttataaggagctcaaatcctcatctttttctctcaacccatcatccattaatttacttacttttacacactacttgaccagctacaaattaaaaagaaaagaaagaaaaaacaccaccccccttttttttttcttgtgtgtgtgtgtgtagtgttgcattataatattatggcttcaaactcacttcgtagctcaagtagttcatcatggacagctatgcaaaacaagcaattcgaaagggcgttagctttgtacgacaaggacacacctgaccggtggctgaaggtggctcgagccgttggtggtaataaatctcctgaagaagttaaacgccactatgaaatccttgaagaagatattaagcacattgaatctggcaaaatcccattccctaattacaggtcttcttcaaaataaaactactaattacccacaaatactatacaagtaagtacttatttaaaatcatgtggtccaactactccaacatattattattattattaattagtttctctcttctccttatcattaggggcctataggccaacattctacttatatatatacatttaatgcaaaagccaaaaggtgttgcctgaccacactatgttcactcttcttatcctgtcccttacccaaacaaactaagccccatatatatatcagatctaatcctatacatatgatatataataaaaagcatgcaaaaaccttttagttgcattattactagtaataaataccacacgtgaatatatctgtatatatatgataatttattaatacacagttctcttttatttttttctttttcaggtagttctgatcatcttcaagtacgtatctatatatatctatatatatttatatatagttatgtttgatggcaacgaagtgaagaaagctgtagaaaaagttgggtgtgtaggaaagtgaatgaagataaaattagtttggtcttcactcaactaagattctctcgatcatgcatgttcctttttccttttttttttttttgtcttttttcgttttcgtttttattgtattattcctaaatatatatatatatattgatgttgttaattgtctagtctaatcttactgtttaactatgaaaatcaaagggtcgtcattcaatgtatgaactgtttaattagtattttataaattaatatgtatgttattattataaaatcatgtgtccccccaaaaaaatgattgtattatatacctataatgcatgctctcatgtccctttctatatatacatccacttttcttagtcaaagccacaaaatgataaacctttcaattctctaatgaataataaccacacaaacaaaaataaataaatgaaattctatgtactttatagtttgtaataataacaaatacaatgtaagcgatttttcgttaacttaatttaagaagttaattaattacagaatagatttaataaaaaataatgaaaaaatatgtgaacataaaatatttttatgtagttaaatttacatatagtataccaattaccattgtttttgagttttaattatatgtttataattgacaaaatttctataaattagagttgcctcttctcaccttttgagtgaaccctacttataagaatagaatgatgattactcaatcctataaaaattataacttataagtacggttaattaatgtccacatttaatgtacaataaaatatttgagtaagaataaataacttgtatatttaaaatataaagaagtagtctttgacttggtcaaaccgtattgtttaaaagcagatgcatggtgagatcattgagatgtgtactacgagcatatacatagcggagtgtgtaatacaagaagatgcataaatgggtgtgtaatacgagcaaatgcatatatgagtgtgtaatacaagcaaattcatagtggaatgtgtaatacgagaagatgcataactgtgtattgcgagcagatacgaaatccttgtattttgactaggtacatcatccttgtattatgaccaactacaagatccttgtattatgaccagctacaagatccttgtattacgaccagctacaagatccttatattacaactagctacaagatccttgtattaagaccaggtacaagatccttgtattacgaccaggtacaagatccttgtattacgaccatgtacaagatccttgttgcgagatgttgaatgtttgtcaaaataacatcccgacaacgctgaaatacctcaattcataaactttgtgattttgactaggtacaatatacttgtattatgaccagctacaagatccttgtattacgaccagctacaagattcttgttgcgaggtattgaatgtttgtcaaaataacatcccgacaatattgaaataccttaattcataaatcttgtgatccttatttagacgaggttgcatcacaggttgaatcttgagtttattcgacttgactcacaatgtatttattgcgagaattgttatatttatgccttgtgacttacaatttgatttgttaattaaatagtttaaaaagtaggcataataattaccctttaagtcattttttttatgttttgcataaagctgacttattatacttgcctcattccattatttgagtgaatccttatttataggaatatgatgatgcatggttactcaatcttatcttagtggaaagttacaagtagtaggttaatgtccacgtttagcgtacaattaaatatttagataagaataaataattattatatatttaaaatacaaagaattgatctttgacttggccaaaccatattgtttgcgaacaaatgcatgtgggtgtatactatgagtagatgcatatcagagtgtgtaatataaagatgcagagttgagtgtgcaatacgagcatatgcatatagctgagtgtgtaatacgagtaggtgcaagcaaaatgtgtaatacgagcagatgcatatctgagtgtgcattacaagcagatacaagatccttgtattttgactaggcacagtatccttgtactatgaccagctacaagattcttatattacgactagctacaagatccttgtattacaaccaactacaagatccttgtattacgactaactacaagatccttatattatgaccaactaaaagattcttgtattatgaccagatataagatccttattgcgagatattggatttttgttgaaataacatcccaacaacgctaaaatatctcatttcataaagcttaggatttcatgggcggttgttgtatccataagttgatcgattcttggtagcagaaaacactttttagggcatgccttgttgatgacagtgaaatcgatgcatactctatcattttttattcgacttggttactaatatggggttatctacccaggttgggtagaaggcttcaattatgaatctgtttatgcggagcctgtctacctcttcttttagtgattgtgcacgttctttgtccaacaatctcctcttttactgggcgggaagaaagtttggatcaatgttgagggcataagacattacagacagatcgatcccaaccaagtcatcatgtgactaggcaaaaacgttgaggtttactcttagaaattttattaaagctaattttatttcaaacagtaaacttatgccaattttaagcttcctggtcgacatggtgggatcaatttcaacttcttctagctcttctaccaacctaacatttgtgttaggttccccaaagtgggggttcacatttcatccctgccttgggcagattcttattaggcaatgcttttaccttactctgaactctggccggagttgtcctcctttttggtcttagatagagcgaggttataacattctcgtgtagttttttggtttactttcagacaacccactccatttcttgttggaaattttacacataggtgaaatactgaagtgacaacctttaggtcatataaagttggtcgacctaacataatattgaagacagaaggtacatcgatcattaagaattgagccatcatcgttgtgcttgttagagtttatcacaatgtaagtggtaaatggttttgtctaagtatagaaacactttggccaaagaatccatatactaactaagtgcaaggaaccatatcatttagtcgaaaccccatcttttcatatgttgttttgaacaaaatatttgaggaagctccattatcatccatggttcgagacaccattttatttacaatctgaataacaacaaccaaatggtcattgtggggataaataatgtagtcagaatatgcttcgatgaaagatatgactggttctccaacatggaattcttctacggctagaactatatttgtctgttcatattgtaaggccccaacatatatttctctagctttgcccaagtctccagcaaggtgggggccttcaatgataacctaaagatgttcgtccactagtggaggcatcgactgattttgagtgttatctgatttggtagccctttgttcttagtaggtcttgacatatttctgcaggtgcgggtttcctaatgaggaattttttttcctgcttcaaattattgcattcatgattgtcatgaccgtagtttccatgaaagcgacaaaacttggtggtatcccttttgctcatgtatttctttatgggaggagattttttatatggcactatggactgggtagttgtgaagattgtttctatatcctcgattaggatggtgaaagcagtgagctttgaggtattcttctaaggatgctgttcaga

SEQ ID NO: 22436 - DNA, 2015 bp, Cannabis sativa
  modified_base (436)..(442): a, c, t, g, unknown or other
tgcactgcacatcacattcacatgcattgtggccgtactactagactacgtggtccataccctcatatataatcatagttgtgctcttgggttgcccaaacaaacaatcaaaaccaaaaacacgccttcatttatttactaacataggttaattaagtgggatgatttagtatatattggagaatattatcctacatggattacatgtaaaagtattgagccatatataagaattaagtatcaagtcgtttgaaattaagtatcaattaagtattgagccatacatgtaaaaccaaaaacacgccttcaaaaacacgtttagaatgtgtacatcaaacaattaaggaatatcgttaaccaattaagtattatcacattctaaacgtgtcgccttttaattggttaacgatattccttaaaaattattatattaaannnnnnnagacttgatacttaattggatcaatagcaatactgacatgtaagaaggtactaaacaccatcgatatcctttagcatttctcttacaataagcatctagctttaactctaactttaatggacaacttaacattagtactattaattaatgctcctcaatcctcaccacactgcaagttagatcaaatacacatctattacaattacaccacacgaaatacaaagtaagtagctatagtagcattaatgattttcttaacaagatcagtcagaagcaaaatacaccaagctgtccaatcttccaaattggcaggccaaaaagagagaccaaaccaacttcaaatttactgaacaagcttctttgtaaagatgcaatcaaaaaatagatgttgatgggttttaatctcaatttcacacacagggcaataggatgatctcttgtcaagagatagttgttaatggcttgccaagctatatctaattttactagaggtaataaacgaaaggtaaaaagactttaccttaaacttgccttttattccaacactcagagccggcctaagcattaggttggatcattgcacaacgtcccttatattaaaagttccattttttttatcgttcttctatatatgcaatataataaatatttttatataatgtatacataataaatatttataacagtaaatatgtatttacaaaattaaaaataaaagcctcatcaaaatttgtagtcccaatacacatgattctaaaggtttaactttaatttttcgctcaagacctccaaattacttgggccaaccctactatagtaactatcacatcatgaaggtcaacaaaatttctaagcttaaggagtttcttgaaatatcagctatgatcctgcttagtatcaagatctcaaaaatatgtcccttttaagtaaataaaattgattcattgaaccctatgcatcttgtcttaaacttaacttctttttttttttttaatgaaaagaaagaagagagggctaccagtgtgactcccttacattttatttttttagttttaagataaaaccatgtacattttaccaaccctcaacatactttctccaagccaaacttccacattctaacataaagcaatatgttgatgagctagctaggacaacttgttactaatctaattaatcttcatagtctaaacacgtacgaggtcaatctagctatagttgtattgttcttgtcaaattatttataaacaatatattattaaatgatgacatgggcttatgtgtatcttgtttttcggtagctcaccacgaaagaactccacagttaagcgtgcttaccttctgagaaattttctcaggaagcatgcgagtgaggataaaacacgctggaaacacttgtgttggtttgtagggtcagtcgtcattccatgagctagagttacgtagtcgtgtataagaactattatttcgtgggtgtaagggcctaatggaagcttaaagtggtgactttaaataaaataaaatagatatacaatataattttctcgtatttatttgtagattttattaaatc

SEQ ID NO: 22437 - DNA, 6871 bp, Cannabis sativa
acaaaagacttatgcaaaggttccataagtatagggtaatggtcagaagaagaaagtttaagattaaaaagtttagcatcattaaataaatccatcaaactttgagtagtgagagctctgtctaaccttacttcaatccaatttgcggtgcccttgcctctttcccatgtgtattgataaccagataaatcaaaattgataaggttgcaatctgaaatagccttgtgaaaaccttgcagcagccactcaggataaggattttcaccaagcttgtcttcatgcgagagcgtattgttcaggtctcccattacacaccagggtagggtgaaatcattagctaatcgacgaagtaagtcctaagtgttttgtcaaagactcctgttcagttcaccataaactcccgtcaatcgccaacttggactattatcaacttaaatttggacatcaatatgatcagttgagtatcctaacaagatggcttcttcttcatacctccataacatcgctatacccccgcttctaccatgaacatcgactgaaaaaccccctcaaaacccaaagccaatcgcaccctctccaccgtatcacgacgacataaagtctcacgcaaaaataaaaaattgggcttattttagataacaatatccttcaagaattgtaaagtccacggcagttccagcttaaaatactcataatgagcggtgggcccggaaaccagtacccaccaaaagcccattttttgagcctgattgtgccattgaatcattatcatcttgaacaagcccactagcattatcctcatgggccacgtgactcctctcatccacacacatatcattaggcctttttcttttaggattagcaccaattaaatgctcatgagtatttttaaattcttcaatattaatagttgactttccatttgaaaaagaagtaaattgagaatttccttccatattaagctcaactgattgtccattaccctgtacaccacgattacctccatcatctcccaccaattccgtaagtggagtagttaccatatttggaaccaaaattcttccagcatcaggaccaccgagaaactgatgatcagctccatccgcctctatgcacaaccatttagaaccgaccatgttatttcttctacgcggctgagcatacatccactctccataaggcttctcaatctcctccaatggtgtcgtaaacaacttggaacaaaatcgttcagaatgtccaatgataccacataggaagcaaaaggttagagtacatgttcatatttaaacatggcctaaaaccaattgctgcctgtctgaagaattttcattcttcttctcaacggtacagtgatatccactttgactctgactcttagataatccctccatagcccttggaaattcttagggtcagtctcaacaaaggttccaataaacttagcaatatccttcaagaccaacatcgatttgaatcctgttttgagaccaaaaacttgaacccagagatccaatcgatgcaagacaatcgagcgtggatccacccatggtgtgattccctcaaatataaaatgaatccgattaaacgtccacgaactaccagttatcactctttgtatatcaagttcatgataaaattggaatagataaagattaggatccaattctttaacaaacacaccctttctcggttgccaaagagatgccatcatatgcctagtatcaaaatcaattgatctttcagtgagaaatcgcccaacaagacaccagcgttcatcaagaacctactcctctgtttccacaacatcataggacaaaacattatcctcctccccatcaatcgccacccctgcatgctgctcttctagagcctttatggacgctatcctaacggaacaaaaacagaccaaccaatatcaagacaaaacagagagaaaccttaaaccatgtcaaaggacaagaccaaaaccagttaaataataacttttaatatataaatatattgagaaaaaaatccatatatattatttttggtgagatgcatattatttttggtgtgatatgttttatgtgtaagaaatgagaatggattataaatttatgaactttatatattataaactttatcctccagaaagctgtatttattgtaaacttgtaaatttataagtaatcaatactaatactctctattaattggaaacatgagtatacatgtggtggtctttgaaatggaacgaattcccgtggtacttattttgttctttcctaaaatattttgagcgttttatgtctgcatgcacataattaataaacattactactttcccacataattaataaacattttaatttggaacgttaaaagtcgatgtgtaatatagtagacttgattttaatttcattttcacccaaaattatatttgttgctcatctgtaaataaatatatcattaatcatacaccacatgatatacatgtggtcgtcttaaatgtattgcaatgggaagagaagagattcctataccaattactcttttctttttctctcctttaatatttaacgtatatactttttttgaacagcatattttgagcgttatatatttatgtatatatattcatatttacagataaattgactagcccatgatactcttaactctcttactctcatggcgaaattcaccttgtcactcgtttctttcgcacttattctccttgtcttacaatcatatcatcttctactcaatccaaagctcactttctcattccaacccaaattatgttgcttcaaatccatggtaagtaggtttagttatagctctgtatacctccatactcgacctgaaaccactcaaaagtctataaaccatttgacccggaaaccaaaacacccacttgacccgcttacattacaagaggttgagagggttcgaaccattctctcttcttacccacctttcgtctctgccttcccgccaatccagtccatggtactagacgaacccgacaagaatcgggtgtccagctggaaaacgggtgaccagtttctacctagaaaggctactgtggttgcacttgttagtggtacgtctcacgtcgtaactgttgatttggacttgggtcgggttacaacccattttataagcacaacttctgggtacccggcagtgaccgtagatgatttgtccaaggccttggaagtggcactttcgtatccaaatttgaagaaatctgcagtggagagaggtattgaggtctctgacttggcttgcataactctttcggtgggctggtttgggccccatgaagaaggaaaaaggcttacaaagatcgtttgttactctagtcaaaacacatccaattactacatgaggcccattgaaggcttggtcatgacaatagatcttgacaaaggagaagttgttcaatttgttgataagggtcaaagcataccaattgcaagcgagaccaacactgattatcgatacaataaagatggccaaacgaagaagaattatcccaaaatgaagccattaaactccatatcaatggaacagcccgatgggcccagttttagcattgaaggtgggcacatggtgagatgggccaactggcagtttcacctgaagccagacccaagagctgggatggtgatttctagggctatggttcaggattgtgagagtggtgagtttagaaatgttatgtacaaagggtttgcttcagagttgtttgtgccttatatggatacagatgaggcttggtactttaggggttatatggacgctggtgaatttggacttggggccacggctaagtcacttgtggcactaaatgattgcccaaaatattcttactatatggatggagtgtttgtgggctcagatggcatgccctatattgagcccaatattatttgtatctttgaacgttatgctggggatattagctggcgtcacaccgattttcttgtgcctggttccgaggtatgcttttaatataatcttacttcctttatatcccatatttttatttttttaaggatgttcatttataaactcggtgaaactgatgattttatatttgttatttgatatgtaatagatcaaagaatctagaaggaaagtgacacttgtagctcgaatgactgcttcggtaggaaactatgattatatattcgactgggaatttcagacagatggtttgattagagtcaaggttagtatacattaatttaagagttataatggcatgaaaaaatatcaagtgtatgtaaaagagtaataagttttatgtaataattttttctttaaaatgtaaatatacaggtagagacatctggaatgttgatggtaaaagggactccatatgacaacgtaaaaaaaatcccaaacgaagaagaaatgagtggtcctttagtgtctgaaaacctaattggagttgttcatgatcattttgttactttccaccttgacatggatgtggatggaccaaacaactcatttgctaaggttagtttggtcaaacaagagactgacccctacgactcatcaccaagaaagagttacttaaaagtcaagagacacatagccaagactgaaaatgaggccaaaattaacctcaagctcaccgagccttcagaacttcatgttgtgaatccatctaagctgtctaggctgggaaatccaactggttataaacttgtccctgggagaactgctgctagtttgcttgataaatacgatcctccacaattaaggggtgctttcacaaataatcaggttatttatttattattttaatattgataattggcagtgttacattttgggtttaataaatattatcgagcattgttgttttgtgtcttaataggtatgggtgacaccttataacaagagcgagcaatgggccggtggatttttggcataccaaagcaaaggtgatgacacattagctgtgtggtcagataggtgcgtatacaaataattgaatgaataaaaaccaaaaataatttcattacaaatattaatgttaatttattgaacgtgatatatattatatatgtttgataatatttaataggaaccgtgaaatagagaagaaggacattgtgttatggtacacattgggattccatcatataccatgtcaagaagattttcctattatgccaacggtgtcagcaagctttgatctcaaaccagtgaattttttcgaactcaatccaattttacgtgttccaccaacttttgaagatgatttacctaattgtaaacaatcagtctcgaaacatttgtggtgtgtttaatttaattacttataatgcaaataaaaaggttgagaattgatttataaaggtaatgaaaatccttaaaatatataaattaattatatatgtattgattttaaaaaatatatattagtttaaaaataagactttactttttgaggaaaagaaactgttattattgttattattaatgaatacaaaccattataataatagtttaaattggaagtagaacaacctccgatacatacaaatcttatccaaccaagagcaaattttgaaaaaactcacttttaggaaaaaggattaaagatcataaacatcaataataaaatcttgaaaacaagataattgagatgtgtgtacccattaatgattaaagaaactagtaacgaacattatttcaacatgttaaatttgcaaactatgttggagagcccactgcaacaaagacttttgttatgcggccatgaactcttgatttctatatagaccagatactacacatggtgcaaatgaaaagttaaaactttgtctttgacaagtgatggagaaaattcccaccaaactagcagcaagaacacataattctacaagaaatagagagaatttccaaacttttttaattgccttgccaagtagcaaaacattaccaattaattcccaagcattgtaccataaacaacaagtgacagcagtcaaaatcttcttgtgatacaaaaagataatcacaaggataggagatcgaaaatcattccaccatttggctaacaaagaatctgtttttatttattgatttgaagaatgtaaatcatacaagcattgtgtagatagaaaatgaggcaaagttttcattgttgcaaactaaaagcaacttatatatgttgtaaacaaagaaactcgaactttaccaattgcaagaaaaatgatgggaggaggaaggaaaaggatgaagggcaagggtgattagaaatgatccagaaaatccatggttgagaaggtggttattgtaaaaacaagagaagaaactaataaaaaccagtacaaaactaaaactgccatagagcactttagaaggcagacactccaaataggaatttaataccaaatatagtaagaccctagcatgcactaatacaaaattgaactttacacttctataaatttggactttagaggaggtttttaaggcctttcagcatcagttttggaaaaattcgctaccgacactgatctaagtgatgttgtaggattagaaataaatgacgctaaatgttaccctatgatgtcagttactatcaaataactgatgccatatgtacactatgacgtcagttatatacaaataaccgacgctatatgtacatataaccgacgttataggccacgtatagggtctaaatggataattttccctggcgcaacaacctctagcaaccaatgcgcactagaaaattatgttaggatgtatgtaacatagtataaaaataatttcaagttataatatagaaataaacaattagcactaaaaaattaaatagtatttacccgatattctagggaataaagaa

SEQ ID NO: 22438 - DNA, 3831 bp, Cannabis sativa
  modified_base (92)..(119): a, c, t, g, unknown or other
atagaatttatacattaagcataatcatgaaataaattatgtgaaccatgcaatataaaagtgatttatgatcttatattaattagtaaatnnnnnnnnnnnnnnnnnnnnnnnnnnnngggcacaaaacccaacaacaatctccctataggatcaaactctcgcagtctagcttggctggaacatgtacaatccaccgtcaagctcttcaactcatggctgacctgacactactttacccttgcttgcacattagagcacccgtgagccaaggcacagcaagtaagcataatcaaacccaaatataacatataacatataacatacatatcgcatttaatacgccactataagtagatgactgtgccacctcactaatataatacgcactgcatttatgatgatgccaccacatctttagtctatcttgtatagacgccacgtgttacgctcacacacctatttactatataaggccttattatgatgattcgaaaaagtgagacttctacaaagttcgtgatgaaggtgatgaaggatgattttagaagagaaatgaagaagtcaactttagtttaaaattttaaagacaatttattaagttttattgttttatattttagtagcacatttaatatttattttatttaaataatttatttttaacaattatgtttttataataaagtttatttaatttcaaaattttgtgtgcaaagtaaactaaagagttcaatgttcatagtataattctaaaatcaagtttaaatgtatttaattatttattttgactaaataatgaataaataactatttgttatagtaatttatcgatgtttctataattaagtttataattaattaaaaatacatttttgattctatattactaaacttaagaattaaataagatttaattggaagatttgaattactattcaaatatatacatggatataaaattctattccaatcatgtataataaaagttcatttaaaaaatcattagtagatacataaatattcaattagaatagtctacttgaattaactcacatatttaaacattcattagttgaatctatttaaatcgatatgaaatataatttaaataaatgaaaagttttttcatagatgtggttggactacattgagattgggaataattaatagaaagtgttcatataattaaatctcaataaatataacaattaaaaggaaaataattttgaagagtcaaaattaaattttaatagtcataatcattaactaaattcagaagtaataaagtattttagtgggattgtactacttattaaaagaatatgattttaaagaaaaccatattgctctttataacaacaattaatatttttaaatcaaatcatgatctctagtagaattaaacaatgaatgagatttattgaaatacaagatatactaataaaggtttgaatctccaattaatttaaattagtgattgttctgacatatagaacatctaagcctgatgagaaacaaattaatagaaaagttactactttctaattttgaactttagagtcttaatatgattattcaataattatgcattaatagtctcatcaaatattcaatacactaagatgatactgagtatagaattttaataagtaagaaaatttaaccttattaaaatgatattgattactataatcaataagggtatgtgagttagttcagacaaattataatatttagatttaaatttcgatgagattgaattcaaataatataataaaatagtaattattatatattagatattcttggagaatatagtaattgatatctataataattaattgctaataaatagtattactaaatatagatttaataatacaaatatagaaattggggatgtcattaaagtactgaataatatatttaaaagatattcaacgtatgagatacaaaatttttgaatatcataattgtttaactgttaaaaattagagtacttgtataatgagattaaacaagtaataaatttcaaatcataaaacaatcttaattaaaatgatcaaagacagtgggtaaatgaagaactattttaattgagtgggggtattaaatatggtgggagtatatttaaaagatcattcaagaggtgaatctattttaaaaaaaaaaattattagaattgatgattaaaagaaataattaattgaagaaaagacacattataatatcgtttgagaagcgagaaataaatattcttattaattatgtaatcttaaataaaagaatcacttaaatgtgacaaggatgagaaataaaatcgatcattccaaacatccgacttgattagccatgagatttattgagttcattaattatcttaattaatataatcaattagatgtgactaatagagggttctagattaatcaattttaaaactcagttttgaatagacatatatttagtattgagaatattaaatgattaatcaaacaaaatgaacttgaaggaaataaaagcatgaatatactaaatatatactagaattaaattctacatatttatctaataatgatgtgatggtctttgagatctaaaactacattatgtagagggtctcgttaatatgacttagcctgaacaatcgaatgagatacagcatctataagagttatagaataagctgcacttactttttagtgaaagtgagagattattgaaatttatgccctaaaagcaagtaactaataaataatatattagagaatatataaaatacaattatgagataaatgatatattaattataagagtataattattaaatatctaaaaattcattattcatatggagaaggtataatcttgtaaagatgtacatgagaattaagattatacaatatgaataaaataagtctgtagtgtataaagtaatagaaatctttaatatggaactactaaatacattttattatatactatacttctactgtgtgagattttgattcggatcacatatatacatggacatgtagtaaagatattctgtataattagattattcatgactagaccgatatgtaataaatttatttaattaacttattgtttaccatgatagagttattcatatcacaatgataatcattagtagatccgcctgaatcttgagtatacatgacctcctatttgtgttcattgagttctttaattcactcattaaagtttttcaatgaatatgattcttaaaatttctattttaggagcttaataacatgagtggctaggaacatgttatacaatagtagaatctaagcttttttaatgaatcaaatattagttctcttgtagtgttaattatgagagtactaatagttggatccaaatctataataagttatagattaactgttcaaattgaatcaatggtacataaggaataaagagataattagaagggtaaaacattattttgaccaactctaattatgaactaataattagaggacaaactacttatattgattatattaatggactacaagtaagaattctgtaaatataattctatattatcaaatagtgtaatttatatttatagtggagtaataacagaattaataaacttgattattctattgatgagatcgataataatttattagagcttcaaaatatacgtcaattgtcccgagtgacctttatagaaaactgtaaggggatggttttatttgatgaatgaatttcgagtgaaaattaatttctatggaaaataaattcttaagggaaaaatagtaattcgtgaaattattattttgattaatt

SEQ ID NO: 22439 - DNA, 5214 bp, Cannabis sativa
atttgaatatgaacattctttttttaaaactagttcttcttataataggttaattagtacacaagaaacaataaattatttttggagatttctatcatttatgttgacaaattcctagatgagttaaaattcttggaaaaagaacttttctttttctttgtttttgttggtttataagatgcacatagataaagtaaatgggctccaaagagaattactaacaaaaaattattagtgtttagtatctttttgggagtcatatcaatattagttcagacctcatataatttaagaaaataacttttaaaaaatattgttaactaatctataatgtcacctataaaagatactgggcattattgatacccaataatagtctaaaataagaaaagaaaaaaatcttatttttttatccaaaaaagaaaaagcattgttgaaagtaaaataggtggtccatatcaaatattcataccgtttgccaaccatctttcacattttaataatggtggtcttccaaaatgtaattgaaaaatcttgttagaaaatatatataatttaaaatctatctatttttactaataatgattgtaactatagaccttaaaaaattgatagtcttttactaggttattaagaatttttacagtttaactatgacctatgtattattgtgtcccctaaatttttaaccccgttaaaaatgattcataaattattcacagtgttgtaaattgatctttctatcaaagtttgacaaataaaaagatagcatgactatttagtcagttatcacatcagtgtcatatcaacaccacgtgtgtaattaatttgaaaaaaataatttaattttttaatttagttttacttaatttcttaattaattaattaatttttagtttaataattttttaagaatataattttttatttttttaatgttaaattatacacgtggcgctgatgtaacaattgaataagcagtcatgttattattttatttatcatgtgtaacaaaacttgacagaaaaatcaatttagtatattgtgaaaagttcagtgatcatttataatgggctaaaaaattcagagagtacaataatacttgtcataattctaaacaaaaatttgtaatagcttgataaataggtatcatggttaagtaatgattagcttctaaacattggctagatcatgagttggcacactaactctttaattagaaaatatcattatgaaaatatgtacatcatttgatgagaaagtaaaggtaagtgctaggtaaggtttttataaaataacacacataattaattaattagaatattaaggagaatcatctttttttcttcaactataaagattattaattaaatataatgtaataaataaatataaaatattcttaatgagaacttctttttcacttaaatataatgattatggtcttattaatttaattgattaaaggttcttaacaatgaagtggaaggagtgttcatggagtccacttacaaatgatgattaattaagatatataagtaatcaaatatggaattatgatattttttaagggataattttttaaaaaaaaaacacacacacacacaaaaacaacaaaaaaaatttacaagaatacagttgtataaaattttacatatttttacggtttttaagattttatttaaataaaatatggttttttttatgtatttttatattgtattcttgttattttattgataatattttgttatttgtatattatattttgtgttgttttgacgttgttttttttgttactttcctaaagtttttttttttttttgtatttttataaaacactataaaaatatatatataaaaaaaaattgaacgtaaaagtgcaaataatttactaaaaataaccattgatgtaattttttatttttttaatgggcaaatgcttaatttttcatcatgcatttttatctttttaaggacccttattttttgcttggaaataatttatatttttagtatgatattatttgaataatatcatttcattaccttaaaatataatcatattaatattaatcatgaaattccaaaaatgagatttttagagattatttgatttggtaagatttcactttgtattgtattatatatgtacgaatgaggatatattctcataaaaaataatattctttatttttattattattattattatttggcacactttattattattgggatagtggtttagaagattcccaaacataatatatgtgtgaatttgagggatttgtcttggaaatggaaaacattagtattttttttttttggaagcaaacattagtattgttattgtgtattagtaatttaaattttctaatacaaaattcaattttttaaataataatttttgtaataattattaaattaaagtatataaaaatttattaaaatttatacttaattataataacattggtcataacactttgtaaatatattggtactatattacatttagcatttttttatatattcatcaataattttatttttttaaaatataattttgagggaactataataattctttttctttttcgaaaagctcataaatacatatataatcaatatagcgtagtggctttttcatgaaaagagctggattgcatgtaatatttttaatgaatgattatttatttattttaattaatgagtaaatagcagtataagttattaaagttttgaatttgtaataaatttagtgtttacttttaatgacataagtatttaatatttgtaaaactgtaattttccttcaatttaatatgtacagactccgttttaaatttattaaaagaatatttgaaaataactgatactatatgtttctgtgtgaacatgataatatagaatttgggtcttatatgtactctgtttaagataataacaaaatttgtattgacaaaattagaaaaaaattacagttttagaaacatgagatacttataccgctaaaaataaacattcagtttatattacttacaaacttaaaactttaactatttatgtcgatatttacctttaattaattagtcttatttatatatttataatcattagtagctttggtaaattatagtcatgagttggaatcattgatttgcatttaaaaattgtaaattttaatgtaaatatatatatatataaatatttatattgatgaattaaataaattttgtgaaatggttaaaattaattgagatgcccatcaaatttatttccataaataacgcatgcattcccatccttgctacttttattttaatatagtaagttatgtttacttttttagccacaataaatttgtggtaaaaattaatttgagtattaaatatatgttgttttttatttaaaatttaactttcaatccttatatttttctaaaattttaaaggcaccattaatccaagaaagctcgaaggacatgcatgcagggcgactctaagtataagtgcgttacgtttatgtttaggacccacactttctgggaattcaaagtaaaacataaaatatcttattaagcttttatttaaataaaattaaatgtactgtaaataataaatatttaatttagttggttgaggtgtatgacacgttatattatagtgtagatttaagtctcataatactctttttcaatattttttttatatatttaaccaatcttaacattaaaattacgacgaacataaaaaaataaatatcctaaaaatcaagacaataaaattttaatgtatgaaaaataagtcaaaacttgttttggtacactattattcacaagagagctagctagaaccaaagataataaattagataaaaaaaagtttttaactcatataagattgttcttccaaccactctcatataaattatctttatatatataaagattaattaagctatatattattaattaagagaagtaacccatattatatattataatatttcttattattgttagctagtggaattgagtatacttttttttacatttgttattattccattaattatcaccatcaacattcccattaagctattgggttagtaagaatcacctctttcaccaaaaaagaatgtgaaaacatagaaaaaaaaagggtttggatataataattatgaactccactaattaattaagtttgatgcttatttccaatgatcatactctattgtggttaacactttaaattgttaatggtgtaattaacaatttttctaaaatatataaaacccaatcaataataatatatgacaaaactataataccaccattttatttctatatatcaataataatatatgaaattttaagaaattataataaaatacttttatatgaaaatttacattagttatagtatgcacttattcgttttttgaatttttttattaataatgggagttcaaaattgtttagttatatgcctacttgtttatttatgcaagtatgcaagtgaattttgaattttatttttgatactataaattattttaattattttaaaaatgtgtttatatatactataactacaatgtatacaaataatttctgtaagtgctaaaagtagagacatcagtcgtccatacaataaatataactaataatatatatgttaggatattgatgtttgatattattagaggtgtttattcaattcaattcgtattattttgctcatagtgcatctgattcacactaagtgtagattttatattttagatccaatctaattcgcacaatagctcaaattcaatccgcaaaagtgtatattaaatcggttattttagatttattacttttcaatattatattatttaatatttattaaaatatatattatttttcacataattaacaataaaataaaataaattattgtagttttatgtctcaaacaacaaaatagaataaataaataaaataacaaattcaaaagaagaaaataaaagttgtctgtagaaagaatatttaatttgttttgaattgtatgctgaaaaaaaatatatgtaagaatggattatatatttgatctagggccggccctgaaacaaagtgggccacaggaaaaaaaaattaggtccttatgttagaaaaaatgtagtatttttcaaaatcagtaaaagaaatatataattttaaaagag

SEQ ID NO: 22440 - DNA, 1933 bp, Cannabis sativa
atatatatatatagcacaaacatgaaatgtaacaagtacttataataattaagtcaatatggtttcacgtacctttcttgttcgtacgcgcttgagacctacatcgatttgttgttctatattttgaagttctctcatgctcaaaagagctagatcttctcccatacagttcctacatacatgaattaaacataataatatacatatatcaattacctgcagagatctatcattatatatggatataaatatatatctttctcatttatatataggcttctttctcaatcaaattttcatgaacaaataaaaaataataatttgacaaaaaagtataaactctccattctcagctcgatcggtgcataatataatagagtatactagtcgtattatatggtgttcaacattacttgatgtggtgattgattcaaaataatattggattctacatacacattttattctcatagaaacatttttatagaatctttatgtattaatattttgaatggttttaattagtgtctgaaaaattaatgataacatggtactggtggcagtgtttaaatagttagttggctcatgtgtaaaacatgcatatatatatatatatacatgtgtattttctcaaatatatatatatatatagttgtttatatgaagacaacataggcagtatttacgtgtaccttaggttcttttgcaaaatttcaactctgctcatcagctttgggaattcaaacgtccacttactactatcctgcacaccattaattattttcatttattattcataactataataccaagttgcactatatacacgagcattgttattaaacagctagtggtgtctattatcttttcgacaagtcgcgttgtgattggctaccaatgctccttaaaagttattatattaaactatatggaatccgatacttagttaaaccaataaaaatattaacacatagaagagtattaagcaccactaatactaatgtcttttgacatttctcttatatatacatatttatataaatacgtatcaacctgtgattcagagagagtagtaggagcagcttgcaggtgcttttgtgcattagtagagtagctttcgtaacgttccaggatctcctccatgctgcttcaccacacacatcttgttagtttattcatctcaattatattaatgctcaaactccatatattcatactacaaataacatatatatatatatgtttgtagagctatacacaatcataatagttgaaggaatcctatcaactcaaattattaatctaggctactttttattttatgttgggacataagtgttcaaagctggagtatatatataaatatatactaaaattatgtgaatactatatagttctcaaataaaagggagaagtgtgtcaaaatccaagaatcaagctcacatctcatataaatgcctataactaggttgtggcacttagagtcctatgatccgtacgaccggctaagctgcatgtgcaatctaatattgtttggaaaagtgaagtccgagattgtgtaagtacgtgactattcagttaaagtgaagaggacttaaatagattaataaatacaacctacgataacaagatattttttttataggcccattatttaagaattcaaaaattaaggttgcttaaataggaacaggtgacctcaatttaatgtttattaaaaatgtatatttcttttaagtaaataaattaaaaataaaaagttaattttcctaagcaaaagatttgtaggggggccatggtgtagcttcacccacggtgacaaaagaataaaaaatagagttacaataagagacaaattttatataatttttagtatgtatcaaatttaaaatattttgaatttactatcacattcattttttttaaaaaaata

SEQ ID NO: 22441 - DNA, 4253 bp, Cannabis sativa
ttaaagaagtcttttattgtctttatcttaaatggttttaaacggactagctagtgtgacgtctcgggaaatcggggcgttacaagatggccattgctttctgtaccatgtcgcctactgagactcaagggttagtttgaaatctttttcccgatgatgtcgaagatgcgactgctgctaaagtcacagatggtacgaccagggtggtagatgatcccaacactcctgccattaaattttttctttcttttatcgaacttcttttaatcggtacatgggtactcgcgtgttgtatttaagaaaacttattttgccatattttcgaacaacatatccctttggggatactccttttgttaagtacttttatcactaaatttgatgtgtgcttttaattgccacttaatgcctcaaaagactttaatctcacacaactcattttctaagtatgctcatgcgattaattttcacagcttagtgtgatgaacattttctaagtataaacatgcaaaaatataaatacttcaaaaattttgagaactttgaaaactaagactttattagataatcaatagtacaatatatgattacactccctatacttaggatattaatgaaataaattgactcagtatatacatgtgagtactattgataacaatactttaaatgttctccattccaagctctgccaaaacttgagtcattgagatcggataatcggtaagttacgttaccaatttttacagtgattaggtaaggaccttcccgattatcgccaaatacgccatgcacagaatttcgtgtactgggcatgactcttcgcaataccagatctcctactcgcagtcttgtttctttaacttttgagttaaaatagtgagttgtgcgctattgataggctgcattttttaattggatctgatcgcgcttctcttctagaaaatcgagttggatcaagtgattttctttaatagtctcgacattgaaaacttctcttcttattgacctagctccaaccttgactagtacaatggcttcacatccatatgagagtgagaagggggtttcactagtcattgagagaggagtagtgttgtatgaccacaaaaattgcggaagctcttctagccacatgcattttttctcttaaactttaccttttatggtatgcttgatgattttgttgactgcttctatttgcccattactctaaggatatgcgactgctaaaaaaactttttgaatcccagatcattgtacagtttacgcatttccttacaatcgaattgcttcccattatgagagattaattggtagggaatgccaaacctacaaataatagctcgatagacaaacttgcgtaactttgcagctgttattgtcgctagagcctcagcttcagcccccttggtgaaatagtctactgcgaccactacatattttacccctctctttccttttagtaacttgccaattaaatctatgccctagactgcaaatggccagggactagtgatagaatttaactggcttgttggtctgttgacataggtcgcaattcgttggcatatatcacatttcttggcgaaattggtcgcgtctgtttgcaaggttttcaagtaataaccttgttgcatgatcttcaaggcaagggaattacctccggtgtaattgccacaaataccaccatgtacttcttggagtatataatcgcattcgtctccatcgatacttttaagcaactgttggctaaaactcctgcgatacagtttgttgtcataaatgacatatcaagcagctcaatattgcaactctttagcctcaagtttatctttagggagttttcccgttgttaaataattaataattggggttatctaagtgattttctcagttatgttgacttgcatgatctctttgcgaagaatagttggatgagccaacacatcaacatgaattacatcgagtaattttgcttctcttgttgaggccaaactggccaaatactctgcataagaattataagcacgaggtattctactaataataacttttttgaatttagataacaacttacaagtataggaaaggtatttcgccaagtgtcctcccctagccatatattctccattgatctgacaaaccccaatttgggaatcactgaatgcttcgaggtactcgactttcatttgaagagcaagccttaatcctacgattagtgcttcatactcagcttcattgtttgaggtagggaattcaaaccttaaggtggcatgcactttgaatttattaggacttgatccttcattatttgatgccccatcaacatacaaagtccatccttctatcgatcgtaattttggatcgactcgttcttctgtaatgattgcacctcgtcgcttagaaattcgagaatcaaatcagtaagggcttggccttttattgccgaccgtggtttgtattttatgtccaattggcttagctctatcgaccatttaagcagtcgccctgatacttctggttttgccgattcttgtcgcaaaggataatttgtcagtacttcaatgttgtgtgcttcaaaatatggtcgcaactttcgagaagcaaccactagtgcaaatgctagtcgctctatttgtggatagcgagtttcagcatctagtaggcatttacttacatagtaaaccagatgttgtctaccttggtctttggggattaacactgagctaattgcgtattttaacaccgtcaggtagattgaaaaaacttctccagacatcggcttggatagtattaggggtcgccccaggtgcgtttttagtgcctaaaaagcttctccgcatttatcagtccactaaaacatcttatcaccttttagaatcttaatgaattctttacatttgtcagaagaatgagatacaaaacgatttagtgcatcgatttcaccaacaatttggtttggcggggggtcgcatctccactactgcctttagttttgctggattggcctcgattcctcattgatttaccatgaaatagagaaatttccctaagcctacctcgaaaatgcactttagaggattaagtcaaattttataatgtcataggattctgaacatggaatctagctgagcgacatggtcctctatgtgttgagattttacgagcatataatcaatatacacttccatggtcttacttagtaaatctacaaacatcatgttaactaatctttgatatgttgctcctgcatttatcaaacaataaggaattaccttataatagtacaaacctcgattagcaatgaaggaggtgtgttcctgattaggctcatacatcgggatttgattgtatcccgagtatgcatccataaaactaagaagtttatgacctgtggtagcatagacaagttggtcaatgatttgtaaaggaaagctgtcattgggacatgctttatttaaatccttaaaatcgacgcatgtgagccatgagccattggtcttttgtacaagaacagggttagctaacaagtttgggtaaaataactcccttatgaaggtgaatgccaaaagacggtctacctcatttttgagcgcctagtatctcgtggggtccattttacagggcttttgtcgtactccttgcacttcacgatcaatgttcaaccagtgacacatgacctctggtgatattccgaccatgtctgaatgtttccatgtgaaaacatccaagttttgtttgagaaaagtgacaagcttttctcgctgctaaaaagttagtatggaacaaatttttaatactttagtattatcaaatgaatcaataggtacctcgattgtttcttcagcgacttgtgctgtattggtatagtcgaggattttaggatccaagtcaggtttttcaacacgcaatattttctcaattctgaaaacttcatgtcaaggaagaaaagtgtaacaccctactagttaaggcgtgttaacgtaatttttaacttaatcgtgcagctcgttgctaatcaacgagtttattaaaaattgtgaataattaaaactttatttaacaaattataaataccaaaataacttacttatattaaaccgggatcccttttacaaaatatttacaaaagttctacactgcataatataaaagtttgtcgcccaatgactatacaaaatatgcccaactatcccaaagaccatcgctccatgcctaaccgccccaacatgcacaatcttcatctgctc

SEQ ID NO: 22442 - DNA, 2372 bp, Cannabis sativa
tcatccttactgatggacagtccaaaaggacaatacagatacttgaagacatgttacgtgcttgtgtgatggatttgaaaggctcttggagcaagtatctagcactaatagaattttaatacaacaacaattaccagagtactatatggatgactccctatgagatgttttatggcagaaagtgcatatctccaattcactaggatgaaactggagaaatgaaaaattaaggtcatgaatcagtacaacagaccaataaggctatagaaaagatcaaggccagaatttttgcctctcagagtaagcaaaagagttatgcaaatccaaagcgcataaacgtagaattctaggtaggagatcatgtattcctataggtgtctccgatgaagggatcaaacgtttcaaaaaaaagggcaagttatgttcgaggtttactgggcattttgagattcttgaaaaggttggactagtagcttatcgtctagccttacctccagcactttcagcaattcataacatatttcatgtatatgttacagaaatatgtctcaaatcccactcatgtactgagttatgagaaccgagaacttcagtcagatttatcatatgaagagcaactagttcagattttaaatagaaaggataaagtccttcgaaataaaaccatagctttggtcaaagtgctctgaagaaacagtaaggtgaaggaagccaccggggagttggagtctgacatgagagctcattatccagacatattcatattagatttcaaagacaaaattcttttaacgggggataattgtaaagaccgcttaatttcaaatataataaattagcagataattagggcttaattataaaattagattattaattataatttatgaatttttggtgatgtatttgaattctgggtgtgctaattacgttatatatgaacttttatgtttttcatatattatgctcggcaacgttggaacgcgacgtttggccgatagaatcacatttttgtatgatttagtattttagtaatagtggggcaacctatatagacattgggaatattaagattattcgaggtattagatttgataaaattacccctaggtggtaagtatgccttttggcttaggcaagggcaaaatggtcttttttctatttgggatatttgtcctttattgattttatttatattaattgaccaaaataagttattatatactagagaattaataggttttattcttttattagttagaaaattagaaaaaatcaagaaaacacattctctcttcaactttctctctctctctctctcaccctcaagataaccagcagtaagtagaggattttcagctttattcagagtattttagcaagtatttggtgtatccaattcaaggcaaatcccttagctctcctctctttgatttcttaagttcgaggttaagttcttaaatgattttttatggttagggttctgtatgtttaatttggttttgattattcaaaggttgttttgtagttattagagttgaattaagtaaggtttaaggcttgtggtgaggtttgatcaaggtttaagcttaatagctcaaactttgctctataatggtgtttttggattctggtatattacttgatgttattgcctgatttttacttgttgtggcctaattaggaggtatggaaggtttgagatcatttggggtcaatttgacttgttaagaaggtttttggggttttctacactaacctcgtccagcaatttagtgggacctgtaaaaaccggaattctgtttaggccctaggtaaccccacagaactggtctgccggttgaggcattttagggaactctagtttttccctttttgcaatatttagggtatttccatgttattcattgatagggaaacttttagtttccattttaagtcaccgaaaaatgatttagcatgtccctcattaattttacgaataatgtgatttaggggcctgtaaatcgtgagcagctgttccactcaggttgaccagcacacctgaattcagaaacaacgtaataattgtataataatatgcatatgtgtttacatgtttagtgtgcatgtttatggagcctgttatagcggtatcaatataaatagagttatgtttggctcaagtacaagatcgatgttatcacataggtacgactagagtaccgagtatagtctgatattatagtcgatagtactgtcatatgaacgttctagaatcattaccgtgttggacacggggatagggttatagttgggtgtaagggcgcctaattataatccgggttatttttatgattatgattatgcttttcttactgagtctgtcgact

SEQ ID NO: 22443 - DNA, 2361 bp, Cannabis sativa
  modified_base (46)..(49): a, c, t, g, unknown or other
  modified_base (623)..(635): a, c, t, g, unknown or other
cataaaatttaatatatgtgccttacacgtaattttttgctagtannnntatatatatatatatatagtgtagaggactaatagaaaattttaaataacttttaaaatgaaggtgttgttgtttcatttttcaaatatttgaaagcttttttattttagggttgatgtaagtgtactttttaactacgcagatgagatgatataaattctggttacctttctataaagataataatatagattctcgttatatttcattttagatatttgtttctggcatgcatagatatgcttttataaactaaatataattaattatatgatagctgacatttactaaaggtgttatacatgcatttcacaccagacacacatattagaataataattataaatttaataatctcaatataaacttaaaatctctttctgtaaagttattataattcactccagcttgattgatcgatcgtaactaatagcattaactaaagtaaattaagtaatacataagatttgacagagtttgatgatgtcagtggcctaagtgactatatccattggatctcaaacctcaagatagaaagatgatcagagatgtctctctttctctctctctctcnnnnnnnnnnnnnatatatatatataaattatatactgtcatcaatatgtatagatctctctctgctatatatagaatatcaccctgtataatatgccaattggagctgatgataatcagttggagcagagggatagagagaaagagaaagtaataaaattgatgaaagtaagtacatgaacagtagataataattaaataaaaaaaatgggagtggggttttagtataatggcagaagaaatagaaacagtgatgttgttgtagtaaataatatattgtagagagagagagagagagagagagagagagagcataataaaaattaaaaacagtgatgagttgagattttgagagaaaagggacagctcttacttccggtctcgtagtaaaccaacccgaccaaggcgcgcccaccaaagcaaatgctgggttttcctgcactacgtctaagtatttactgtatataaaccttttattataattttttaattaatatttttttttgtctaaaatacatacccaaataatttttttcaattttttctatagccgccggtgttcattatagtataagcaatatattcttgtaatgttttgaaattttttaaatagtttagcataaatatagttgaaattttttgaacatacatataaattagaatattaaaaattttatttttgtaatgtaaagtatttgaaatttttcaaaaatttaactataacacatactacattgaaaacaaaaaattctaatttcaggtgaagaattaattaagaaattataataaaacgtcataatttaactattaaatatatataacttcaataagaaaggctgtattttatcataaaattaaaaaaagaaagaaatgttaaattattttcagtgtaatttaatatcatatgtcaaatattttaatattaaatctcatactttttttttttttttgttatatcaacaattgagatgatattaatccaacaaacttccttataatgtaatagcacgataaaagtggcctctatacatttttcaattgatcaaaccataatctatcatgattcctcaaaatccttaggtacaactaaaaaacgtcaatttttaacgtaatttttcaaacacaaaagagaaactgagatctttttataccaaaatattgtgtttcgattctccaagcattgtacaccactatcgcaagagccattgaatacccttgcttacaaaaagaagaaagacacaatctagaaatccatctcaatatattttccaaccatctcttaatggactctaaacacattttgctatagaggcattcaaaaattaaatgattatcattctctcacacctaaataataacttatcaaacaaaaagtgtcttgacagatattgaatcaatagagcctttcttctgttggtaacctgtcaatactcgcatgggagaatataggtttattatgtttaaggatattaagccttccccaaacttgcccacaccaccacaccttctctacaataggattcaatgcttggcgtatcaaagtacctgcagctagccaatttttttctttttttttttcttcaaaaaatacctatttaatcttatctttaatcttgacagtgtatctcaaataccaactgttatccatagtagctatataattccaccaattgcaattctccaagtaaacatatttttttacctattttacctaaataaagggaggtttttaaaatgct

SEQ ID NO: 22444 - DNA, 1826 bp, Cannabis sativa
ggctatgtcttcaaataaagaaagcaaatagtggggaaaaaaaggagcaggaaaatgccattgttgatgatggttacgacagaaataatagttatgaaagtgttggtgagcttgtagtttctatagactaatcagacaaacattagatcttgggctcaggttgttcatttcatatgactcccaataaagattggtttgagtgtaatactagtaaagtcttgctaggaaacatcaaaccatgaagtgttaaaggcaatggtacatacacatgatggtttagaaatagttttgacaaatataaggttcgttcttggactaaagagaaatctcatttaactaggcatgcttaatcaccatggatactcttacagaggtggtgatggtagtcttaagtgaccaaaggttctttggtggtaatgaatggagttaaaagcaatggtctttatataatgcatgctagtattgttattggaatggctacaattgttgctgaaataggttgacaaaggctcagttatggcataagataataggccatgttagtgatgcttccgagagcttcagagacaaaaaaatgttgtgtggtgacaagtttgagaagcttagtttctatgaacactgtgttttgggcaaagctactaaggtgaatttgagtaactcgaattacataactagggatactcttagttatgtacacttagttatttgggagccttctagaaaataaacacttggtagaggtagatactttatctccattatagatgattgttgaagaaaggtctgggtatatgtttcaaaatctaaggatgaagcattcaaaaagttcaaggattggaagcggatggttggagaatcaacaagaaggtgaggaagttaagaacttaaaatggtctagaatacttgaccaatagatttaatgcatatagttgaaggcatggtgaggaataattctgtgaaaggcacaccacagcaaaatggattagtagaaagaatgaatagaaccctacttaaaagggttgatgtatgatgttaaatgcacacacatgccaaaatttttaggtaactgtgattataacaatataccttatcaataggtgtgcctcaacaaccataatatttaagaccccaaaagaaatctggaaaggtactcctacagcttatgaaaatttaaaagttcttgtctatgttggttatgctcataagagagatgataagttggatcctagagcacaatagtgcatgtttctaggatattatgatggggaaaagggtttcaaactctggtataaagaaggtcagacatcaaggtgatgtcacgtttaaagaagaagagttttatctggaacttgaagttgaaagtatcttagatttgaacaagagtagaggtgataaagatactataaattcaagaattgaggtagaactagctagaaattctgagaattaagataatcaactttagcctcatattggtgagcatgaagaagaagaagaagttgttgaagaacttgagaacatgacaaattatcaactcataaaagactgggctaagatccaaagatgcaccttctcggtatggttatgcatatttgatatcatttgcacttctaatagctaggtctatagttaaaaatgagccttcctcatttgaatcagctgttagatgcaaagaacaactgaaatagaaatattccatgaaggaagagatggattcattttgaaaacaataacacctagcggtgtattgataaaccatctaaacataagctagtaagttgcaagtgaatcttaaaattgaagactaacaatgctagatatggaaa

SEQ ID NO: 22445 - DNA, 3646 bp, Cannabis sativa
aagaagatgaagttgaaaaaaaaatattttataattttaaaatattttttttagtttttatttttaaatttttttaattaaattattatttaaaccaattaaatactgacacatggcattttatttgtgttttaacagattagttaagttagggaccaacggacttacaaaaaatgtgattttaggaattattaccgctaatttttgaggttggggattaatctacatcaaccctaaatttttggggacttttgccgtaattataccatatagtaattaatagtgaaacgtagggaggtggtacaaaacggtacaataatgtgtgtatttggggtgatagtggtagtaataagttgaacatgaaagagtgaattgtttatatataatagaaggtcagtcaaagctgtatgagagtcgacaatcgacatgtacaaggtggtcactgcccagtggtcccatcccatgcacttctgcagaagaagaatatattgttttcattttttgtgttgtgtgtgaatatcaacttagactaatgaacaccaccagcacgagctcacattaattgaacttaagagaaatgctaaggctggcatacaaaaattttgttagttgtaatattattattggcgtaatttaatattaaatttaacttattttaatttaatcaatattataaaaaatcgttaactaataagaggtaaaattaaataattataagaggtaacattataaaaatactaggcgtccactttgataaattttttatattaattattaaattaaaatatataaaattaatatttaattacatcaacaacatttattttttaatatttctataatcaattaattttttgaaaaatcaacttttgaatttgacatttgactatatttaacaatggacacacatatacattgtataagactataagagcactttgaataatttttttattcttatatttaaaataaaggattttatgtagaacatcgcttggtgttataaccagttattacacccaaaattatatcgttttttgttgagaaaaatactgatatttagttaatttaatttaattttaaaattatgtatatagtcaggggtatttatgtaaatttattttattattgagttgtattttttcttaattagttatgttacatttttgaaaggagatgtaagaactagaactattaagtcttttaccatattggctactgttggtggcaatggacgattttgcagaatgagatggatcggctacagaaaataaaacttttaggaacgcatataaataggtgaggtttcatttcgcatcttccattaattattgtgcacatatggagcttaaggttggctatttttagattatgaattggaaattagactataaatttgcattatgatagtcctttgttgcttaagttaatttgtgtgttagtcagaatgaaaacactttcactaattgttttctctagtagaaagacattgttgctacctagtaaggaggaaggtgaaagtctaccaaatattgtcaaattatttgaacttaaagagtaatgctaaggggctatcatgctagcataaaagattttgttcggtatattgttgttggtgtaattttatattgaatttaacttgtttcaatttaataaatattataaaaaatcgttaattaattatgaaaaataatgtcaaccaattataagaaataatattataaaaatactaagcaccttgataaattttttatattaattattaaactaatatatataattaatatttaattacatcaacaatatttatataatcaattaattttttgaaaaatcaatttttgaatttgacatttgactatatacattatataagactataagagcatctccaatagtagcattttttaagatgttatctcataaatataatattttattttatatcttttccttactatttttggcactcttacttctaaaatcactcttcaaaaatactataattatgatctcacacattattatttaattttttaacaacaataattttttagttttaattatttattaaaaaaataataatggcatcaatactgctgtatagcattcacacatattcctaaaatatcattctttttcctctaatagtatagtatctcaatatttcgccacttcatctatccacctaagtaagcatcccttaattttttaccattggagatgctctaagagcactcttgataaattttttattcttatatttaaaataaaggattttatgtgtaacctcgcttggtgttacaatcagttattacactcaaaactacactatttttgttgtttcgaaaaatactgatatttagttttgtttaatttaattttgaaattatgtatatagttgggggtatttatgtaaatttattttattgagttgcattttctcttagctatatatgttgcatttttaaaaggggatgtaagaattaaaacttttaagtttttcaccatattggctactgttaatggcaatcgatgataattttgcagaatgagatgcatcggctacagaaaagagacactttaggaatgcatataaattggtgaggtttcatttcacatttgccattaattattatgcacatataaaacctagggttggctattttcagattttgaattgagaattggactataaatttgcattatgatggtcctttactgcttaagtttgtgtgttagtcagaatgacaacactttcacagattcttttcttttgtggaaagacattgttgctacctagctagtaaagagataggtgaaagactaccaaatattgttaaattgtaggattcgtaattttgaagagagtgcactactataattatggtctttagaggcagttttttcaagtcattatataaaaagggaagctaaaaggtgtgaaaatacctacctggtttgaaatttatatttagaggcagttttttggtaaaaaccgtaggtatagaatttaattatatctattttatcggttgggggttggggtaaaattaagagttttttattaaccctatggcatcagttatttggtattaaccgacgccataggtgcactcattattcgacacgtgtgcacctatggcgtcgatcaatactaaataaccgacgacataggtttatatatcagaccccaaatagtatcgtcttctccatttcacaacttattgaacacgaagaacagccagccatagcagccccatacccacgaaaaaatcctcgccaaccacccataaaaaagcctcattctcctcattttttcaccattttaccctatttttgttttaaaatcttttattttcaatacctaaacctatactgtaaaaaagtttgaattttttcccttctatcactataactgaacctattataaaaaaagtggtggtataactccggccacccattttaatagaaaaaatattgaatctcaatgtccattaaggtataaacatgagttctattcattttattaatgtacattgctatattttcatttttgtaatttgtttttgggattttttcattttattaatattatgttttgtgtgtgatataggtggccggatttttgttgcaatttatcgtc

SEQ ID NO: 22446 - DNA, 2537 bp, Cannabis sativa
  modified_base (1473)..(1475): a, c, t, g, unknown or other
  modified_base (2404)..(2407): a, c, t, g, unknown or other
tggtatttacccttttttttatttgagcatttatatattacaactatgttttactggaacttaatatatatatatagcacttaatactaatatatatagtacttaatattatatgtatcaataacggtataatatcttttataatacttggaagtgatacctattaacaatatcttttataatacttggaagtgatacctattaacattttttttcttttgagaaatactaaaaaacaatagagatatctaaaattctctaagatataatataagtattagtgtaattaagtattatgtcttatgatttaatattattttgtatagagtatcactaattaaccaaccgtaaaacaccagtctaagtaatactaagtacaatagtgcttaataacactgttgttttcttacatatatcttatgactcacgagaaacgtttatgcatgtaccatgtaagttggattatttcaaaattgtcccctatgaacaccataattactaatattcacccaaaaaaatgtagggtaattttatagtacacaatctaatttgaaatagttgttctgataaattctttggtacataagaaagttttttaatcttaattttttttttcatgaaggattatgtatttgatagttgttgtggtaatgtgttaaagtagtaacgttgatgaataatttttctctaatgtgtttcgttctattgagattgtgtttttagtcttgttttgaatgctccaagagatagagagcaatctcattatagaagattagatagaatgcctaagttacatcacaaataaaaaaaaaataccaaaatgaatcttttaaggtttatactataatctttttcaataacatacttatgaatttttcatatattattactatcatagaagagtgtgagcagggccgatcctgagctaagacgaaggaggcggccgccttaggccccctaccgctcagggccccatttcgaaaaaaataaaaacaaaatatagttagtaataaaataaataataatacttttaaagttaaatatgtgttgtagtctagtagtaatttaattagtttaataattaagaggttgagagttcaaattaacatagagccgatcatatttgaggttaacttaaaaatatcttatctcaaagagggaaaaaaaaaaatcgacctaacccaacaaaaatggtttaaatgcattgataaatgataagtggttgggtagagctaacttcattatacattgtagaagattactatatacctaaatttttttatagatcatatatactttttgttactctaatcttaattaataaagcaaattgtgttctctttttatttagtttgatatgatcatagtcaatgaagggttggtttaagagcaaataattttttaaccaaacttttaattaagtggatatacatagactgtagtttgagctatataaatataaatatatatatnnnaaaaaaaaaaaaaaattatagatggggccaacaagatgtcatacggcttatcccacagtgtaattgccaaactaaattgttataatgaagccattaatgcttatagctagctttgaagcactacaataatttagaaaaaaaaaataattaaaaaaaaccaaaacaaaatgttagtggaatgtaaatattgtggatgcacataaattagttgtgcatgctctttagatgaatgaactacgtacttgtttagttaaataattttctctttttttttcgagatttttagttatttaacctgtatgacactattagttttcaatgacgtattattatgttaaaaataaagtaagtatataaacaataaatatataatttttttataaattttaatcatactcataatattaatcctagcaaaattttattaggtgattataattcaataactatgagtgtaatataaatttcataaaatattcctacataaatagtgtagaacaaacacaaaatgagtgtaatatattatttaattatataaatatatagacacaattttgcatagagagggaatccaataataaagtatgaaaatgacattttacccaataaatataaaacttacaatatgggtcatgtgctcttaaagtattgtgaatatgtgtcgacatttatttcgatggaactaaggatattgtaaatattagagtaaatagtattgggtgattttacaatgcaccctcttaaaatagatgtattgatacactcttgatttgtttcggcatcaagaaaaaaaaattagtctaatttattttcatattcatgtacgttatagctatttaagataacctataaaattttgactaattccgaataatttataatatagaaaaaaatgttcaaacagtctattttacatgcgtataaaatannnnagtcacgcgtgcaatacactgttttgaattagttttcgacgtattaaactttttcaaatttcttaaaattttgcaagatgtcttaaataactataacatacatgacaataagaaaaaatttgactaaaaa

SEQ ID NO: 22447 - DNA, 1684 bp, Cannabis sativa
tacccataacataattggtcacttaattttgtatcacactttataatagcatatacattatacatatgtgcccacataggatttttaatccaacagtattatatctcacataattaaattttcattttaataattattataaaatatacaacaaattatttacaatacacctctacatggtaagtactattgtcacacacgcatcaatgcatcataagatacttgtctattctattttattttcttctccttttctatttttaaaatccggttaggcaaccaaacggaattgattttttttttttcatgttacttgtaagatgaaatttgaaaggtatattccgaaccttctatacttcattttgaaaacaaattatgtttgaattatatcatttgtcttagttagtcataattatatataataatatacagtacacactccaaaaaagaatttctttccctgcagccggcttttgcagatacatgataattttcataagcattttaaaatgttattttattagtcgtacatatagtctcttctcatgaataattttctggatttgaattataataataaaatacaataaagagtaagaatcgaggataattacaaagaaatgaaatatgtacaagaaacgacaaagaaaaagggtctctatcaagtaattaagatgaatatgttttactgtacaatgatgatgctggctcctttgaaattcacctctaaaacttaataaagactctgactcgtttataataataataataatgacaataatatctttcgtttttgtacctatggttattaaataattgagtagattagcagagttgacaagtctatatctggacagaaaaccaagcccaatggcaaatggataaaagtgaaaataatttgggcccaaaagaatgacatgtttgggacttgctagatcatgaatccatgataatacaactgagtgttgtacaataaaactcttgtgtcaagaagattcacagcagtacaggtaattatttggataaattcccacactgggtcctcttgaaataaaaacaaaaaaggctcaaagatcctctaacattaaaatatctacaactctaaatatatttattaatactaagaataaaaataaaagcaacaatacatcatgaaatatcttctaagaaaaatattgggtaaaattttgtttgattaacttttttttgtatagataaaattctccctatgccactttgtatatatatttgtgcacatatattatgtcccttttttgtggcaatagtttgtctatctcaattttttaaaagttgctttgggatagtatgtaagtaagggcggcacaaatattttgggagctttgtgcaaaattttaaaattagactttttaaaaaaaaaaaattgtgtacattaaaattacaattctattactagtttttttttttttaagatttgtacaaaaaaaatttaattatatattttttatttatgtatatataataggaaaaaagaaacaaaaataggctttttcttccaaaaaataaatgagaaacttacaaaaatactgtttttttatcaaatattttcaaaaatatcgggacacggcaaactttacatttttactgtccaagcccatttttatttcttttatactgtccaggcccaatatatttacttttatac

SEQ ID NO: 22448 - DNA, 3135 bp, Cannabis sativa
atacacatccaaagacctttgagatgttgtaattaggtgcttgttgaaacaaacactcaaaagggctaaggtgatttagcacaagtgtaggtatcatgttgatactataagttgcacactgaaaagcatgccactagtaagtcatgtgaagaccaaatgtaacaagaagagtaaggcctatctcagctatgtgcctatgctttctttccacactcttccattatgttcatgagtatgaggacaagaatgttgaaaccaaataccttgatctcttaaaaacttgtcacaaattctgtattcacccctaccatcagcttgaacctttttgataggtaaattaaactatttttcaaccaggctcttgaactgaaaagactgagatttgacagtcataggaaaaatccaagaaaacctactgaaatcatcaacaaaaagaatgcgatacttgtaattatctttggaagcaatgtgtgatggcccccacacatcaatatggatgatttctaaaggctgattagctctagtgttggacaagagaaaaggaagtctatgaattttcccttgttaacaagcattacaaaaatgtaggttctttaaagagtcaggaatattagcttgagtcaagattttagtgagtatagcaggtgctaggtgaccaagaatacagtgccacaaactgatatcattagaaagaatagaattgtaaacaatagcattgaaatgtaaatgggaagaaattgaatctttattcatatctgttgaattacatgaacactgatgacagtgttaaatacaagattgggcattaaaattttgtgacagtaaagcacacttagactcaactaaatgacactgatgtttgacaaactaaagccatcatcaccaagaaggtatagaccatctttaagcttccatttgactagaactgctcttatttgtttgtcattgacaaaacagcaagttttatggaattcaagaagtacattattatcattagtaagcttggaaacactaatgagatttttagtgatagaaggaaattgtaaaacagagtttaagtgtaaaaaggaagagtgtttatcaggcaaaaaggctttacaaatatgagatataacaagtttcttaccatcacctacaacaactgtttcatggccagagtaaggaactacactatccggagcctcattgtaagaaatgtgatgagtagctcctgtatccacataccaactttgatcatctccaaaatcagaacaatttgagcaacaaaggcagcaggctcataatcaagaaatttctcagttagatcagcttcgggttgggaatttcgaaatgcatttatctgagtgtcacttctatttgaaccaccttctttgtcattgaaggacaaaattttgttgaaatcaccaattgcaagccacggtaacaaaggagctacatccgtcaaccgttttagcaacaaccaagaagcttctctattttgtatggcaggctccccataaaaggcagtgaaatggaaagtatggcagccattaatagtgacaaaacaatcaaaaattagaacagtttgagcaacaaagatagcaagctcataatcaagaaattgctcagtaagatgagcttcgggttgggaatttccagctacagctttgggtgtgacccaatttttatcgaacctataatgacaagtaggatcagcatgcccatatctcatacaaacttgacacaaaagtcgattgtgattagcatattgagggtagtgagttaactgatttccacgattaaggaatcttgaagaagaatcatatccaaatcctctcccaccattattgttggacctaaaaccaccatttcttgatctaaaagtgagattagaagccatttttgttgacaaatccatcattgtagtgtgcctttcaagcctggtttcatgagccattaatagtgcttgaacttcctcaagagacaaagtgtcacttcgagaagtcataccagaaacaacagaattgaactcaggtccaagaccatttaatagatgaagaatcaagtcaagatcagtaatagagtgtccaacaataacaagggaatcacagataactttgagtttgttaatatagtcaaagatggtatgattacctttatgtgcattcaatagttggctcttgattgcaacaatcaagcctttgattgacttaagaatttctattctaaggccttccaaacaacatttgagctagtgtagctggccacagtttcgagaattcattctgtcaccgatgatgtgatccaagaaaagagaagcttttcttgtgccattgttgaaaagaaggatttggatcatcattgacgagagaccgaggtggagacagatctgtgagcaagattttatccaattcatgaccaataatcgtgggtagaacttgagatttccaagctaataagttagtttgatcaagcttcatcgtaagagaagaggtaagggagtgagataaaggattccaggagggagtcgccatagtagccggagttgcatcaggatcagacacacttgtaggggtcgaattgtcgccagaagatgccattgacaaaggtcagtggctctgaaactatgaaaggaaagaaacaagggagaatagagagaacaaaaattagaaaactatggcaaaagtttgacctcattaaaggtgtttcatagcacatgtgtgcaaaatcgttacaaaacaaaattagttagtgagtattacaattaattacactaactgaaaaccaataccaacttaactaaatcaactaactaaactagacctttgttatcattacacattatccatgtgagatattctaacatggagaatgcaatataatgttagggaagtacttaaaagtatgagcattgttattggacaccaatcatgtttagcaccttctggttagcaatatttcttaagagttattttcttaagttatatgagacccaatatttaattataccaatagcagtatgacaccgaggaaggtgctaagcatcaatagtactttttaataattctctaaaagcacaagtgtggtcaccaataaactagtgtcatgtcatataaaaaaaatattctcttgcacaaggtctcacgttgtacatat

SEQ ID NO: 22449 - DNA, 2677 bp, Cannabis sativa
ttttgaagccaccattaataaatacataatccttcatgccttcgaaatggagaggatgatcttgctcccctgctatgaactttgccggaactatgactttgtcatctttcgaagttaacaggtacttccatgatctgcacagtgaatatattttgattaattatacttaattcttattaatttttaataggaaattatataaatatatattaatttgtacatatccatagctcgataatagctcaatcctcctgtaaagccagtgtggttgaacagttgggtatagcagtcgaggacttcttttgttagccaagatggtaatattttgggaattggtaaactcttgaatcctccatttttttcttcaggtatcattaaaggatttaatccaaaagatgaataaagaatctttagtacttgttcagtttccattgaagcaaactccttttccatctctcctatttcctatacatatatataacaaatcaatacatataattatatattaagtacctaatcaaaatgaaaaacataaaaccaatctcacctgaaacctacacatgtagtacaagtccccgtagtaatccctaaacccatccaagaaacttttatcagggttcatggcaatgtaaggcacactaaggttaaccacagctctcactttgtcaggatgtaacaagcaaaagctccaagccatgaaagctccccaatcatgcccaaccaagaaaattttatcgatattcagaatcttcataagggcaagaatgtccttgatgatgttctcaacgctgtaagactctggatctccgggaacttcgatttctgtttttccatagccccggagatccggagctatacagcggtaacccttgggattcagataaagtatctgattggcccaagattgccaaacctcaggaaagccatggaggaacacgatcgccggatcggactctgacccgactgaggcaacattcattttgatgttgtttatctcatatatattttcactaatggaactccaatccattttcggacctatattgtttggctttgttatattagaaaaacatttgatgagttttttggtggaagaaaagtgttattactcttatatatatagtctgatctctcgacttggtcgatcaaattaattatactctagtattcaaaagcttattaatttatttttaatcatttcacatgaattattctcttgataaaacttttatttttgagctgggcacgtgccgtagactttgttcatgctgttagtaaaaagaaattaaaataaataaagacttgactttctaaattgaggtgatataggcaagactagagtttattagacatatcattatcttgtataacagatctactatttctcaatagaggttattaatgattgcagtttctgtagtactaaagaaatttacgtttggtttgataatgattggatattaatgtcatattattaatttatttataacataatatatcatttttttttttcttttggacagtggactttctctcaattgttgatatagaaaaagactactattgacttaatatattagatgtaatcatgcgatccattatttcacatgatatacataataaattaagtgaaatgatttctttataatttagagtgttatatgagctgtgacgattttcaaacgccatacgagatagttgggtctatctcactcttctgatttagagtgttatattaaaaacttaattaatttttcatttcacatgtataataattctcttgatttacttatttatttattttgaggcaccaaaaaaagactttaattgttcgtgcattatatgtttactggaaagaaattaaaattatagttaatagataaagacttgactttctcttctatagaaaaagactacactttatatgagatataatatgtgaaattgtgttatttttggggtaaattagtcacctatattgctcatcaataactttttacaaaaaaacaaaaaaagaaaaactcttactacttccctatatacaaatccaaatcccctgaaactaatctttatctttatcttcaatcttccaaatatctaaactatatatgtatctcgtttacaattaaatttttacacaattgacagaactcataacagtaagaatttcttgataccaaaggcatcttttttgggtccaccaaactaagtaaacacaagtattcaaagtcataaatctggtaagaaaattagactaatagtgcaaaatcaaaacaactaatctttaaataattaaagaattaacaatgacaagatttataaacattaaatagagattggggaaaaataagtacaaacaaagtaaacgaaactagaaaacagtaattgctaaaaataaagaaatcaacactaagatatatactggttcaagtctaataggtcgatgtgatttatgtctctgctccacttctagaacaccactgaaatccttatttattgattgagcaagaataggtacaatacagccgagacgggattctccgttaacttctcactaagtgtttcaactctcacacttacactcaagaatcttcttcatctacaaaagattcttcttacaaaacccaaagccaatctatctcttttctctgcacctctcaatcttctctctctctct

SEQ ID NO: 22450 - DNA, 3485 bp, Cannabis sativa
attttaaattagttttatttttttgaattttaaattttgaaaagatatttaatgttgttacaacaacctttaatttttcaaaattttagttggttattattatccagttttttgcacattgacgtggcaagacgaccgagggacacgtgtcttacatttgtgatacatgggcggaggtaaatgtccctagcagcctgtgcaccaagcagggtggaagattgaacatctgaccaggtagaagtttattatgtcgagcagcttacaagggttagttacttcagaatgatcttgtaatgcccagacacgaagacaatccatacaatcgttggactgaatcaggaaaatatggcagcctgttatagtttcctattttgtgtatcataattttgtaatcattgtaatttcctatttgatgcattgtaagcaaaagggaaaccatccctaatgcattaagcccctataaatagtggcctagcctcactatgaggggggtggaaagaattgcttcagagggaaaatagtgatctaagagaattactcaaagatataagagctttcagagaggaaaaacactttgttctttctcttaagttaatacaatacaaggggagtaggctataaccacactcacaaggccaagcctctttaaaatcttgtgttttttttactttatcgttttttttctcttttaattatattattaatctcttattaagtgactcactatcgttggctaaaagcgaggtccagattttggtgctttcattgagagcaaaaatccaagttttttgtcttaaattttgacaggcatataggaaggttttacaaactcgtagaggccttgttgatttgggcgaccctatggttgcagatcccaatgtgcagactcctggaaacacgagaggaccacttgggaaaaaccccgagcaggtcaatacacaaccacctactatggcgcatggagtgacttcccctctggctggaatcacactagtcgtgcaagagactgggaacaccaatttagcagccaatcaatccactcccaacactgaggtctcgtctaccactaatgttcagaggctagttggagatgatactaaaatcaaaaacctcagagcagcccttgggctaatgcaaggtcataataacgctttgcaccataatcaggaggatctctgtgcagctctaaaccttgcattcgacgagcaaaaacgtcagtttatagaatggagggacagggagatggaaactttgagggctccataggtagccattgatgatcgcacaaagccagccaccgtactgataagaagggcctaccaagtcgccaattaacaactgactactgtgtctagtatccttttcggtggttcggaagggtatgcagttaggcgtaccatataaacccacaatggtcagccgtccaatccacaaccacatgtccaacttatgggccaaatggtaaatgaccagatcctgccggacaatcccttggggtgagttagatacaccaactttaccccaactgaaatttctggccaacatgctagccaaacaagtcagaggccaaggccacctggtacttcagtatttgataggttgggcattggacatgaccttaggactgacctaaattgaagaaggggcctagacgaacaataaatcccaccagctgtccatccaagcatccacatctaggatccagttcaaagagatccgaatgtaacacaagcctgtcaacaggccaaacaagttcatccatttgtgccagcacaactggatcaacttaaaaacatggtacaaggtttgaccgccacaaaactcactgatctcgaaattgaccaagcacgtagatcacccttctccccagagattgaagtccttgaattacccccaaaattaaaaatgccaacatagaaaatgtatacagggaaagaggatccgttatcccatctgaagtattttaagatgcaaatggttctgcaaggagtaagaggtgatgtctgatgcagaatatttcctgccacactcgtagaagccacccaaaagtggtactttaagctacctttagggaggtttaactcatggaatgccttctcctcagaatttcgtgcatatttttcctcctcccgtcaacttccctcacatctagaagacctgtcaaagtaaagtagatgccaggataaccccttagagcttatataagcatatttatgaccaaagctacaaaagttaaggggttgatcgaagaaggaaggctgaccgcaatacttggggcattaagccagtcggagagttgtggaaggacatcaaaaggctgatcgtggggtcaatggctgaattttaggatcaagcagatggattcattaagcttgaagaagatattcggcgcgtggatactgttggacaaaagaaaggccagcaacatcccaccccggcaagaacatccgttaagaatccacactaccctagaatttcaaatttaaatgggaagagatctaataacgctaacaggcagggtaatagaaagaaagtcatatttactagaaatgccaaacaacaccccatggaaaatgcctcaaaatttacttccttctcaatcctgacaaacgacctagagacaatctacgtgacaactcagtctatggtcctgtacaagaaaccatctcccatgaagaaggatgtaagtaaaagagatacatccaaacttttatcgttttcatgcgggctacagccaagacaagaatgaatgtaataatctaaaatgggaaattgaatttttgatcagaaagaataatttgcatttataaaagtatgtcaaggctgaccagaactaaaaagccgcccaaggagacattaacaagaaccagttgatgcctccacccgtggacaggcatttacaagtcattattgggggtccacatatttcttaagactcaggcaaagatcgagaaaagtatgcccgagctttacagtatgagcaaaatgaaacagttcgtgccgtggaggagaggaagccaaaaataccacatctaggggagccaacaataaccttcactgaagcagatgccagtcacgtccatttcctgcacaatgacctcctagtcatagaagtgaaaattgcaaataagactttggcacatactatgatagacaatggagcttcctcaaacatcgtgtttaaaacaacttatgagaaaatgggactccggcttaaagatctgacccccctacacccagcttgtatatggtttctccagccagagcgttggagtctgggaaaaatctacgtacccgttactgttggacaagctccgaggagcataactgtgatggcacaattcttgataattgatgttccattcgcttttaacgtcatgttaagccgattggccctatatgacttaaaagttgttacatcagttttccacctgtgcatcaagttccaaacaaagaatggggtgggattgttgggttttatgccc

SEQ ID NO: 22451 - DNA, 2630 bp, Cannabis sativa
aaaaaaaaaaaaaacatatattaaccaataattttttaaaaaaacttttgctttgataaatgataaatttagttggttataaaagtcaaataaaattaggcaattaagtccttctgtactataatatatgtacatttttagaacaaaataattaattatatgcatgttctgttcttttctaaattattattaattgatttagaatatttatacgcattattaaaaaaagttattgagccgtctaattcaacttaacacaaagtcagcttgataaggaaggattgttattactttattaagtgaattgagtatgtatctcaagctaatgcgggactctaacgtgctcctcacgcacagcgtggatcatgccacataattgtgaacaaattgatattgggatacctaacattacaaaattggatatgctctgataccatattagaaaaattattgagtctaactcaccctaacaaaagacctcaatccattaccaaaaggcattctctttcaatttgcaacaaggtattagagcaattaaaagttttcgttgtctctgcttttgacctctatttaggatatttcagtcaatgtgtgttcgtttctagtgttgggatcattgacctgtttctaaatccacaagttttgtaatttggtcttgtgagattcttttaaaatgtcttgttcggaccaacgtggtctcttaaggtccttcattatacttatatttctaagtccaaacgtgatgatggtaaagtgtcccacattgagaatatatataaaaatattttaacttaatatagagattactctacttagccccaattaattttatgttgaaatctcaatctcaatctcacataaaattaaagaagcatttacatcatcaatattccatattaaccaagaaaaaatcattcaatttagaaagaaaataaatgatcatatttaaaaaatatatatataaattagtctatttttcctgaccacataattatgtacattttcgtgcaactttcacatttctaattgtcacgaaaaggaggcttatatacttctacattatttgttgatgagatatgaagatattacttttatgatgagcattactattaaatatggttaaaaatatttttataataatcattaagttaaattgtatcggatctcataattaataatactaacaatgatataatatattttaagtaatattaagcactactaatactcttttatcatttctcttatatccatgataatgttcattcattttcttatgattgaaaattttgatttgtgagctatagttgattggttatgatgtaaatcttcttttattttcttgttgtgtgtgaacctcatttagatatatttagctaatcataagagaaaaaatacactaaaaattaaatttctacaagtgtacatatatagatgcattaggctaagcaaaataagcctaattttatttgacttttataaaattaaagaacgaaataaagtaggcttaatctttcttttaaaattgatttcacattagtttatgacatcaaattgaggttaaatattaaatcattcgtatccgcaaattgtatctataaaaatagtttaatatttattttttcaaagtattgaaagcaagcatgacatcaattacataaaaataaaatatcatacactatgttaataatttaaagtacaaaatattgtccttataaaactaaaaattcttaaaaaaaaataaataaatatacataaagaaatatgcataataccaataaataaataaaaattaaacgaaacatcgttatgaggaatttaattgagaatcggcgcgcccaattaaaggcgggtgtacatccttaactaggacaaacaacaaggtactaaaatattccttaatagttaattattatcatatgaattagcaaaattaattatacaattacatgaagcaatcttatatcttaaaatttaaagatttagaaatccctaaaaaataataataaagaaaaaaaacttttaaaatcccacacaaaatttgctctttgtttccataaattttttcctactctaaagtggtttgtattgttataaaatctttctataaaatttgcggatcactaaatagtgttactaaaaatctaaattgtaatagtgttttattatcaattacttaattttgggaataactctaacaaagatggttatttttttgtcaaatcattttagggccacttcttatcgggatcccaaaaaaataagttaattcgtttatacatgataaaagttaatcaacaataatacaaaacaaaatattcaactagtgtaaactgtttcattcccttgagttagaatctcacttaaatatttttttgttttaatttttctattacaataaaatagctacaaaattttatataaagttattaaggaccctataattttgtctcgccttaagaattcattttctttcgcacgcctatgagtagtgtatacatttagaaaaacaaaattttcaacaatttcagctactaatataaagagttgtaacttataactttttcttatttataattgttactgtaaacatttattttcacaaatatatggcttcttttttaaaaaaa

SEQ ID NO: 22452 - DNA, 3473 bp, Cannabis sativa
  modified_base (3207)..(3207): a, c, t, g, unknown or other
ggagtgcaaatcaattctcaaagtgaaagaaggaatcattgagaatgaaccagtgctgttcaaagccaggtaagtggctaagggttttactcatgtggaaggaattaactagactgaaatcttctcacctgtggtaaagtacaaaatgataagattaatgctgtcctttgcagctcaaatggagtttaaagttgaacaacttgatattaaaactgcctttctgaatggattcttggataaagaaatctacaggaagcagccacctgggtcttaggaggaatggaaaggagttgaattagtgtgcaagcttaacatgtccctatatggtttgaaatagtccccaagataatagaataaaagatttgacacttatatgcaacaaattgagttcaaacaatcagcatatagttgttgcttatatttcaagaatctggagtaatctacacctacgttttaattgttctatgtggatgatatgctcatcatgagcaaagataaatccgtgatcaaaagtatcaaaaataaacttaaaagagaatttaagatgaagtagcttagaccagttcaaaatatacttggtattgaagtttcaaggaactggaaggaagggaccatgaaacagtccagatacatcaagaaagttattctgaagttcaacatggaagatgcaaagagttcatccaatctgttaggaggaaagtctgctcttttttttttttttaaggaagagtgttcggacagttcaaaggagaaagaggaaatgaaagatgtaccttatgctctggtcttaagatgtttgatgtatgtgatggtgagcactagactggacatagttcacactataagcatcctaagccagttcatgtccaatcctagcattgaacattggaaggccctcgaaaggttattgatatacttaaagggaacctgggattatggtatgagctatgagaaagcaaaaggagaattggtgttaaaagggtttgtgaatgctgactatgcgtcaaatagagataccaatagatcaaccacttcctatatttcttgacaaaccaaaactgtatatgctggaaggcccatttatagtccatagatgccgtttccaccatgaaagcaaaatttatggtgaccacagacacattcaaggaagcgctacagctttaggtatttttgattgaattgaaagcaattaaaaggtggagtgattgtgtactcagatagccagtcatctatttatctttgctagaattcagtttatcatgaaaagagtaaacatatagacataagactctactagattagagagaagattgaaaaaggactggctgatgtaaagaaggtcagaacgaaagataattctgatgatgttgggactaagatcttaacagtaaacacattcaagcatttgcttggacttgattaatctcagaagttagtaaactgagatttttggaacactaactatgatagatgcgttctttcttaatcactgtcaatattttttaatttgaattaactaggttgggtttgtggtgtagttcctctaaattaaaaaatctctataagactgtcccagtaatggaaagttagttgtctcttagaagtatgttcccggatagctaacttgtccattcaaaagaagtctcgtagaatgatagttgccattcaaatgaatgttccaggataactattgtgtccactccaagtgtagtctttaggagagccaaccttcctctagaaaggggttttggttggctagttgttcctcccataagggtgttccagatagtcatctctagctgggtctttcatatctggaagccccttcaacattcacttctgtccgttgtccagcaagtgtgtctctcttccaaaagcacctattcttgtggttgcgtggagattctgttacaaagagtttgttaagtttgttaagtcgtaactaacttaacaacttaacggttgcagccactatcttaggatctttatctcgagaccataaataccaccaacacttatcatttcaatacactggattgatgagtttcaagaggagtctttaagtttgagaaatatagagattgagtggtagagagagagagctacaaagaaaagagagagattgagtttgggttatgtatgaagaatcttttgtagattaagaagattattggataagagtgtgagagttgaaacactttaagagaatcaaatagaggtctttctcgactatattgtacctgttcttgctcaatcaataaataagatttcgtgatgttccagaactggaatagagctatagatcacataaatctattggacttgaactagtatatatttttgtgttgattttgttatttattgctttaatcgttttttatttttaatgctgttcatctttattttcttcgattactgttttgcatttgttattcttgttattattaactatttgatgattaaattttaattgatttaattttgcattttagttttaattttcccataaatagtttagctttttgttatgtcagttaatagttaaactcttatttattctgttaattaatgtaatggacttagtttagtctataaatactaagtattctgtaatcattcaattcattcattcagtaaaagtttcagcctttctcttctcacaattctcaaatctcactaaagaaaaatgacacaaagatctcatatgagcattgaacttgacaactgttgcgtgagaaaaaaccaaaaagttgttgtagggaaatagaaatagtattaaatactctcgtgtagccaaaccattggaaagggaagtgaaattcgatgtaaatcttagtcatggaaaatattttaatttgctagaaacatgttacttatcatctacaataatgtaataatctctacacactattcgacattcttcactttaatgttgtaaggatgatgatgatcattataacatatttcattccttactttcctttaaaagaatataccaacaacattaaagtttgtctatgttgggattaaactcacttaatctctcaagtctgtatgtccatctatttgctcatcagatgaatctgaagaaagctgctgcaatttataacagttggctttaataccaacttaaaggggatcgaccaacaactatatataggggttatttcaaaggtctgaggagagagttctgatctctaatctccnaagttcatactttagattcagtttagagagagcgtccaagatcatagtgagtgtgtgtggagggatgtaaaagagagtatcactcttgaagtgatttccctcaatgtgaggcatttctttgtaattacttactgtgttgagttgtaatcttggactcattcagttgtatactattgactattcctattcaataaagatccactattcatccattattgagttaagttttctttgtcttatttcaattaagttcaagttttggtttt

SEQ ID NO: 22453 - DNA, 2442 bp, Cannabis sativa
  modified_base (2204)..(2219): a, c, t, g, unknown or other
atcaattcaccattcaagcagctgaaccaatggaagattaggcagaagtttcactatactctttttagtttttctaataatattccatatattaagacttttttttaatactttttcttctattttaaggtcgcacattcactttaatttttgttgcataatgtttgctttaaaatctgcaaaacttatgacttgttcctccaaattttctataagtaaataataagtattatttagatatgacttatatatacccaaatttatttgaataaccaattataatagcacaaatattactttgataaaacaaatcattcgtatgatcataccttcacattcaatctaaataagaaaaaataagaaaaactaaactttacctaaaactaatatttacgtgcctcagcacgtaactcctacctagtataccaatatccacttaatctatttgatcttatatttttaaattacatcataaattaacaatttcgtatttttctttacatctattttatataaagtgtcgctttgtagttttgagtcaccatctcgtgacaacaacttgcctgcctctctctgatagtttccataatgacacagctgtcaatcgcgaaagtaaaggcatgtgttacagtgcgaattttaataacctaaaaacttgagatcagtctcctataaaattgacacgtggatccaatccttaaaggatggatgagatattaattaagaaatcctcaaaagttaacctcaattgaaccaaactcacgagacgatgcggccctaatagagtctagtcgcatactacgccgtacatagtgtaagataagcaagactgagaggaattcagacaagacgcgcgtatgcagaaacatatgcgatgacaaagtagccttctcctatgactaggtaaagatcgtttctttacataacaattggtcccaatgacgaaacgtattcaatgacccgatagggactcgcatgtcctgtgttgtcgatttataagatgtccttcaaagcgactcagatagaacgtaggcatccgagtaggctcattagtccttttatgaatataaaatgcacctaatgcctgcgagcttgtgtgtgaatatgaacaagcaactcgcaccccatgtgtcgtatacgttgatgcacttattagaacgaattaaaattattcttaatttattgtattacatttattctgattttatattgttattaattgtaaaatatttttataatcggtcagttatgtataactaaaatgacacttgctttgtatataaaagagtgatccataaagattaaacatagcagaaattatttgcaacggtggactaagccggccatgatctaactgaaccgctatattcttgtgtccattttattttttccagttgttatattattttggcaattttctttgaatactcgctgtactaagtagagtacacactgtttctatgttaattatttattgtttgcatacattttggcgtagtcaaaattcctccgacaacaattaataataataattataatagttattttattattgttatcattattaataaaataaaatatttttgaactaggtaaaaaaaaataggttttaggtctgttcttaaatagtagagcattgttataatatatgagacctagtactatttaaaaataatattttataaatgattgatgatattatataataattattaatttaagttatgtagaaactaatacttaataaaagtttcattagtatttaccaatagtagcatatttttctattttaagagattttgtttagattttgtttttgaaaataaacgttcattgataaataaaattagactttaaagttataagatttaagtatacaagttaaaacacaaccatcaaaatacataaagagtttccaacaaaaacaaaaataattttcaatcctagttaagtttttttagattaattgcacatgttttgcttctccatcagcatgagatgctgactataggcaaaattgggattcagctaattaatgaggactccgaatacgataactttgtctttaagatccatgacatgctttaaattaaattccatttttcaccaaaactcaactcaatcccacctttcttcctcctataattatatttatattttatatatcatatcaaactgaaaaccctattattattattattatnnnnnnnnnnnnnnnnattattattattattatttctcatgtagtttcctcttccgtcaagctaggtctcttacatagtcacatgcatggtgcacattttgatggtaattgaagtagttatttattattaacaagatttctcactgtgtgacattaatatttcaaaataaaatccatatataactgtgtataatatacatggatgcttccatggtgcaactcaaatatctattagtgtt

SEQ ID NO: 22454 - DNA, 4856 bp, Cannabis sativa
  modified_base (114)..(118): a, c, t, g, unknown or other
tgtaaagggttttatttagggcacaaaacccaacagtctccacaaactatctaaaagtgatctctaattgcgaagttgctaaagatgcttgggaaaagctgaaaatcaagaatnnnnnaactgatgctgttaaaaaggctcgacttcgatctttagcaaaattgtttgagaatttggcaatgcaagaagatgaatccacctctgaatttcatgctaagctgtgtgacatttctaatgaatgcgcttggaaagatttactcgaacaagaaactggtgagaaaggttcttggagttcttccgaagagatttatgtccaaagtgacatctatcaaagaaagccgagatgaaatctggatgagttgattgggttgcttcaaattatgagttaactcttgagagatgggaaaaaggaaagaaaattaagagttctgagatggagaaaatcgaaatggtagttgcttttattcaaaggaagagaactctaaagaggttgatctttctgataaatttactggtttgaaacaaagtcatcgtgcctggttcggtaaattaagtcaggctgttaagaaatttttagtttgttagaaagtaagttagaccattctgtgctctattaaagatttactaatggtatcatcttgttagttttctatgtggatgacatcgctattaatgaaaattatactaaagccatctcatcactcaaatctttcattcatacctagtttcacaagaagaacttaggggtgctcaagtgttttttcgggagtagaagtcacccagagtaaataaggcaattattctatcttagaggaaatatatacttgacttgttaactgagacaagaaaattgagagaaaaaccttgtagtactctaatgaatccagatgtgcatcttaaaattgatggggaaacatttaaagattcgaagaaatattgtagattggttagaaagttgaaattatctaactgtaactcgtccagacattgcatcagttagtgttgttagtcaatttatgtcatctccaaaaattcatcattgggcagcattataacaagttttgtgttacttgaaaggaccaccaggacggggtattgtttacaaggatcatggacacatccagattgagtatttctctgatgcacattgggtaggttccaaggtagatagaagatccacttgaggctattgtgtctttgttgggggcaatctaatctattggaagcgtaagaagcaaaatattatgtctagatccagtctagaataagaatatagagctatggcacaatctgtgtgtgagatagtgtggatttatcagcttttgactgaagtcaggtttaagacttcagttccagcaaaattgtagtgtgataatcgagttttccttcgtattgcctcaaattttgtgttctatgagcaaactaagcatattgagattgattttcattttgatcgtgagaaaattcaataaagtctgatctccacaagatatgtgaagactagaaaataattaggggttatttttagaaaggctttgaatagagtgcgagttgattatctttgtaacaaactggacctaattaacatttatactctagcttgagggaaagtgttagaatatatattagttttatattaattgtaaaaattacaaacaattgtaattacttaatttcttatttctttcctagttttctttttagtttctccaattttgtatataaatacttgttattctattaaataatatacatttcattcaccattttctacaattattagagtaaacacatgtatcatttgctctcttcgtaaaaccaattatttgcataactcatcaaaaacttaggttccattgtctaggagtctatcattatcatatagggatattttatgtacgaactaatcaaaccattttcactatttctataaaagatgtatgaactcatcaaaccatgattagatagcatgttgtattgactacttcaccccaaaactttctttctaaaccagcccccttaagcatacatcttcccctctctagaattgttctattcatcctctcatttaggtcattttattaggtcttctagtactgtgagatgtcttcaatgcccttttgcttatagaatttcttgaattaattttagcaaaatttgaggccattatctttctttagctttttaatcattttccacgttcggttttcaacaagctttttccaattgacaaaagtattgaaaacttcatcttttattttgagcaagaaaactcaaacctttcttgagtaatcgtcaataatactaagaaagtaacttgcgtctctaggccggtgttggcaccttaaggtctccataaatctaaatgaatatagccaagtggcttttcactagtgcgtaccctagttctaaacttaagtctgcaactcttattatagacacagtcttcacacaatctgaactttccatttagttttcctcttaaaattccttgcctctccaactaagtcccctttcactaacatgataagtctcaaatgccatagtctagtctcatctgtgtttcactagttgaaacaatgttaactacaccaacaactgtgccatttcggaattctcctctcttcaccaccaaagaaccctttgcaactttcaacgaattctcattaatgttgatggtgaatatcttttctgcatcttgtccaattgagaatagatttctcttgagatccgacacaaatctcacatttagaacaattctttgaactcctcatgtagcttcaaaactactgaaccaattccttggataacacatgctttgttaagcacgattcctcgcgtctttttttcaagattgcaaaacaaatcgaattcttgctagatgtaactagaacatttgcatattcatctctttctaagacgacttaggcgtcttctttcgcactgttcttcccttgctttaactaggctttcaaagctcgacatttatctctgaaatattcttctttcttgcaaaagtaacacttctttccagttgcacctttggattttgatcttgatctttgattcccttcgttgttgttcttgagccccttgtattatatattaatatatgtttacatatattatagatcttcttcttgcaaacatactctttctccttcatcttttacgttctcatctgttctcttctgaatcttctttgaatacaatgttacctacacctcagacatcgtcaatgtctccttgccatagagcattgtatcgacaaaatgtgcatacatctttggtagcaaatttaacaaaattatttattgatcttcttcatctaacatgactccaatgttgtttaaatcaaacatagttttgttaaagtcgttgagatgtttttttaaatccttgttgtcattcatcctcaaaagtgtacagtttcttcttgagatagagtttatttgctagtgatattttcttgttgatcgctgcaagtttgttccgtaatccgagtgcattttcttcatttaagaattctctaaggacctcatcttccaaactgagtaagattgcactatgtttcttcgtctcaacatccttcagtttcttcttgtcatcaccaatctccttaatagcttattcatcaatggcttctgcaataccatgatggaactagaatgattttcatcttaatcctccataatacgaaattatttgctccagtaaactaatcgactttaaatttgacagctgtcattttcttgatcctaaaacttagttcttgataactcaaccccacttgggctttgatgccattttttgtgatctgatctgaaatcaccaatcaaaaatagggaaacaaaaacaaaaccaaaagaaaaaataaaaacaaaaattgcaagctatatagaataataaaatttagcagaaatattgaaaactaatacactttttattgattgaacgaagtataaactgtgtaaactaatagcaagaatatttataaagtttcttggaacatcaaacaaaagatagatagattataactaagggattggtctgaaatgagaaatacattagttatttatagcaatataacaaactaaagctaacagacaattaactttagattaattcccagaggttgtaacagctaactaaccagatgcaactacaacaagtatctcagaccacttcactacaaaataattctacgaatttcattcatgttgcaatttatcatgaatgaatattttgtagtccaaagagtcataaatgtttctctaaatttcagcggttatggaaagtcaattgatggttgtgctttaatattagttggtttagtgttcatgaggtgagtttgtttggagtggatgattgtgcattattttagattggtgttgtttatatcatacacctttgattactgatgacattgaccataagaagaaaggaaaagtgagacaccaattctattttgaagaagcttcgtgctagtttgagaatctaatactatattggggagaagagagagagattagaatatgggacatttcaaggaaagtttggtaccactatactaatactatacctccaattcttactaatatcattatactaagattgtagattatcgtgtcaacaattaatcaatttgatttttcacggtcatatgataacaatcacacattttgacattaacgataatgtactaagcatttctatcaaatctttagggtgaatcgcaacttcacaattcaaagactttaactacttcaggctaaaaaaaaattgaaatcaagaccaactaaaagtcatctaaatcaaacatagaatccagaatatatgttaaaaaaaaaaaaaaa

SEQ ID NO: 22455 - DNA, 1948 bp, Cannabis sativa
tatatatatcttaaaattgagtacaaacctatatcatggagaagtgcagcaagctcaacctgacaaagaaaatttacgaaattattcatgaaaattgaggacccaaaattaagccaagcccatcacaggtgaaagtggctcttaattttcatcaaacaaaccagaaatggtataaacaaatggggaagaaataaaaattcaatctttacaatttgcatggagtgaggatttgaggagaggccttcatcttgggcgagcgagagagcaagatctctgaccctccaaacgtgggcagcgtcgtgggaagcgtcgttcccattcatggctttctccaccaacttctctgcgtttctcactgtctcactccaacccatttctctcttcttcttcgactcaaaaatggtagactgagtatccacactaccagtacgactacgagtacccaaattttggtttttgagtttgactgaaaaagatcttgtctttcttagtagggggctaatccgtggacaacgagtcaaagtcaaacccctaaacctcaacccacagtagggaatatcaacatccatggccatgacatgatatgacgtcatcaccatcattgtctacacatgttggcttgtcctatttaaacacttaatttatgtcgtttattattttttgtgtcgttttattcatgcaatagatatgttttctcctttatctatttctgtcgtttcaccatttgtgtcgttttctgtaattaatgtcgtttatataattggtgtcgttttaacattttatatatttctgtcgtttcaccatttgtgtcgttttttgtaataaatgtcattttttgcattttttgtggacagactttgtattgtattggcccgtaactagaatttaaaccaaaaaggattatttatgatattattcatataaataatttaaaatttgaatttttaattaattaaacatgataatatttcaagaaataagctaaacaaacataataataaataatatatattgggaaaaaaatgtaatttttgtaaaagtatggggtacgtttggtaatatttttttaattagtttttggtttttaaaattaaaaaaatgaaaacacttttcaaaatcatgttctataaaattgtttttactttttaattttttaattaagaatctaaattttttttaaaaaaagccactttttcaaaaaaaaaaattaaacagattttttatcaatattttagactgatctgaccccaatttagaccttgaaaaccaaattaggattcggccctgtacttggacccacccccggtcccaacctcggacccaaaacaacttaaataaaatcaataaataaaaatgaaaacgaaatttacagaatatacttttattttttgtttttgaaattaaaaaaaaaatagttataaaatacatttttgtttttcaaaaataaatttttaaaaataaaaattttacttttacgtatgtgattaaaaaatttaaaaataaaagtattgacaaatataccatattttttacaaaaagtaattaccgtatttgatatatatatataatttaaaatctttaaaattaaaagaaaaatattgtttttgtaaaagcatgtatcgtttacaattatgaaaaaattgatagattttaaaggtgtcaaacattgaatgcaccttttggctcggatcatatacataatataataggtattatgtggtagctactagtagctacatttatttatttcttctaacgtggagtcacttatgccattagtcaagtatgatttttttttaaagcaaatataagaatatgaatggttaaggctaactatcattatttattctacttcactaacaaactactctactatttgctttccttatccaaactaatttcaaataataataataataataataataataataataagatcggaaga

SEQ ID NO: 22456 - DNA, 5134 bp, Cannabis sativa
  modified_base (1161)..(1162): a, c, t, g, unknown or other
  modified_base (4623)..(4630): a, c, t, g, unknown or other
aaatccctgggtgctcttgatcagtttaatcctagtcacacaatccgggaaaatgtcatagaaagaggggaaactctaaccaatttctttagaatttgttaatgaacatattttttattatttaattaataagcatgcctagaaatttatttaaaacttttaaatttcttccagcttattttttaggaaatcactttttattttttggaatagataaatagtgcatgaatgatagaagagaaacaccacaattttaagaagaatacaacaatcttttagagttttgcctaaagaaccatagtgatccttaaaaaaatttggtgtcctgtagtgatcattctatagaattgcttgatgattttcaagaagagtttattgacgatcctaagcataggataaaaattatgaatcaaaatggtcaatattattttataacatggaacgtatagggtaattacacatttatttaacattcactataatattttactttcatattaattaacatggttattttttagccgccattggatgttggtcataggtataatattgagaataattattttcttaaacccgcttaagaagccacccccatttatcaatattgaaagggtatgtttagagctttagattactatgtacaaacttacattcgtaatatgtttcaatattttaattctttgaagtcataaaagaataaaaataagtatatactcatctttattataaatataaacatataaaaatactttcttttaattagttttaaatttttaatttgacagtttggcgacctatcccaatactgtgaggaagaacatctcgtagcgctttgacaacagtggttaagtcaattgctttcttatttataaatattgatcagtagtattttaatgaatttttgtatacaccagtaatttattatatatagtattttagagatttgtattatattgtaaaatgttatttattaattgaagttactaattattattgttgtttttaaaaattattttaattatttattttttagttaagttttttatgcatattcaatataattataaaaataaaaattagatttattaatcattgcaaaaaaaaattaatgaaatgtcataaatttaaaagaaaaaaaaatgtgaaacacctacattnnataaaaggtcaccttttaagacctttaaaaaaaaaaaaagtgggataaaacgagaccttttatcctgatttcttaaggacttttatcccactaccatacattctggtttttattttagcaaaaatcaggataaaaggccttaaaaactgggattaaaggtcaacctgttgtagtgaataaccgtcattgtgccaatcgtagtccattttacaagcaaaggtattaaatgttgagatactaaagagacaatcgtatctcccccttctatcaaatcatatcagattaaggcatggtgcgaagaccaaacatgtgtcacccatccaaccagcttagtggctagataagtccacgtgtgagcaggaggttggcatgtgaacttgggggataaatgttatcgtaatttctgcacagggtgaaatggcacttatctagatgacatgtggagaatatttaatgatctggatgggtggcacgctctatgaagttccgttcaaggtaatttatcattcataaacaacttttttgaagaataagatggaatatccgaacagggtgcatcacaccgtccaaccaatatcaacctcccagccaactcacatacaccggccagggtaaacgcgactgaaatatcttcagagatgctttccataaatgttcaagcattcaagtctcgatcacactcctgatttagtgggacagattcacacccacaagaaattataggaaaccttcctaattttccttttagtttgatctattttaggaacgtaaacaagtttcccattttatttcttgtttgtttttggaagtctaattaatgtattttttccatataaatagtggagtcatttcacaagcagggatccgaaatcagttatttaagagagattcaagagagctcttaagctgtaaatttgtaagctttcaagagagatcaagaacttcttacttcttttctcacaattaatacaagttaaagaggagtcggctattacaaccatcacgagatcaaacctctataaatctatgtgttcttattgcttaagtacatataattattattaattatgatctatcattctaattatttaattaattcagtatcgttagctaaaagtgaagtcaataaggaactttagagtcaaaacccttgtgtgggtcatgaaaccctaagtttggcacccttgggtgtggctctcgacaccaagtgattggttagtgagtttataatcttcattgatgtgtcatgggtccttaaatacaacatctcaaccttatttaattctctctggtcttggtcaaagtcccttaagtttgacttttttatttctcaaaaagcggtgtatgtatgacaaatatttagaagtaaattcaaatgtaaagacaaatgtgacatagcaaaatagatgccaaaatgagataaactattgaaaagaatcaaaacaagctgaagctacaaaattttaattattattcccattagatttgatcaatatgcagttgttttttttttttttccattcttaaatatatttatttctttataatgcttttcattttcatttttctaaagtccacttttgggatcttatattacacatgcatctaatgtcttcatcataattttgttgactacacaaaggtaaacaatacatatgtatttgatcatgttcatgatctataagtcaaaatattcatgagacgacttcattataaataggtttgttttgtaaactttattgtgttctattgtattatattatattatattgtatagtattgtattgtattgtataacagattgtgtaaatttattatatattaaccataaacccaactctgaccccaaccttacctggagaaggacccggatgcaaaccctgatctcgaacctgaccctagaccttgaacaccgatcctaaccccgaccatggctttgaacccgaccctggacctggccaagccctgaccttagcctcagacctaaacctggacacgaatcccaaacctggagctagaccgcagatcgaccccaaccttagattaggccctaaccttggctgcggacgcgtatccctaccttgaacacgaaccccaaccttggatcctggcctcgaaccctaaacccaaacctggcctcgaccctggacccataccccagacccagaccttggccccgacctcggaccaatttcttatgtattaataatatgattgatattgtattaaaatttatgatgcaatgcaaagtttgattcaaataaataaataaataagaaagaacatgtaaattgtaaaatactaaaattcattgcatcagccaaagtacatgagattagctaggtcggacgataaaataataataataataataataataactatgttatgacaatttacactacaattttcattgcgtataatctttagcatatatattgattcatgtccttgttagatccatgatctatcattttcagtcttggccggacatgatatagcttaatctgagtatatccaatttataaccaaattgattgtgtcattgatgattactgaaacttctcaaaattgccggccaccaaattcaactgcactttatgaaattttgcacctatattatatgattataatatattaagtatacttgttagaagccggtaacgatttgtttaatacccttttgaggattctgtacatgaacaaagaaatgcgtacatatattaccatatcacatcacgtgacaataatataacaagtgaagtcatattcatatttattaatactattatttgtatcaaaaatatgcagtttgaactatataaaatacctacattagtacagtgacttttagatatgcacctaattggtcaattataactcgtcttattaggttctttaattgtttctataaatatagaacaatgtatttgtgtagtttaacggaacaataggatatggagttaagcagatcatttcactacacaattttctctgctactttgatattttctttggttggtgagtttttttctaaactgatcaagtatgtatcactaagacattaaccattctatgagtgggtgtctaaactgttgtagctttaaattggacattaacaaaatccactatactgtcatcatcatattttacatatttaactagcactaaaatcttctataactcaatttatagtggcttatgatacctttgatccatttgggagcataaatatcaaatgggatgttgtctcctggaccccagatgggtatgtggtaagtgctatatatcaacttaattattcaacttgacctcctttactaccacaacaagaaaaaaaaactgtaatttttagtgacaactttttacttataatatatttttttgtaactaaaatgtaacttttagccacaacaaaatattacttgtaactaaaacataatatttagttacaagttgtnnnnnnnntaattttagtcacaataaatattgtgactaaaacgacatttagttacaacaaattgtaatttttgtgactaatatatctttatagtcacggatcttttagtcacaacataagactaataatttataactagtcacaattttttttacttttactcacaaattttattgtcactaaaagtaaaattttttgtaatgtagtcatagatactttactaaccatcactctttcttttctaaaaaaaaaaaagaaagaaagaaagagagccttataatttaaaccctttcaagagatttatcttatacaaatgtacaaacaaggtgaacactagctactttaggttagaatgaacaaaaaaaacaattttctaataatagccatctaatgctgctactgaagagtttagtttcacaatttggttgcatttttaattagcatttatttgtcttaacatattggattgcaactcaatgatcaggcaatggtgagaatcgaaaactcccaaa

SEQ ID NO: 22457 - DNA, 3478 bp, Cannabis sativa
ataaaattgtatattaaatatgttcaaaaataattatattatatatgtatagtgtataatatatatgttcggtcctttctcagtttaataagtcagtttgccattgacactaaaaccgaccgtgttaaggcggttttaactgaaggcagtttttcgatttttagttttttcgatgttcggacggtcggtgtacttggtttgatcggtttctaggattttttgctcacccctagcacccatggtatttaatccgaatagtgagaggagtaaccattcaaatagaaaaaattattagaacgaagaataaccgcactgcacatatgcaagtatggtgctaatgcagtattaatatactacaccccatacatatatatctttaagttattatatttatttgttacctttgatttcctgtttagaacttttttaaaactataattattgtggttgatttttttttagtattttgatttgttcaccaaatatttttgaatagtaaatatatatagttggatttttagtttaaaaagcatttagaatgttgtctaattagatttttaaataaattaaattaattataattatttttaaaaaatcgctacttataatggttaagtgtaactatagtttttcttcaatattatattggttaatacccgcacaattactgatggttattagagcgagtatggttacataattaaaggaatgacaataataatttaaaaaccgtctccaatccgtacaattgccattctttttagtgatgttacacatttactcaaaaagaaagaatgtatcatgttgttgatcattcacatgaagcaatcacctcgaatagattccaaattaatataagcattaatcaaaaaactcaaacaaactcacacacacaatgtttaattgaatcaaacccgaccttgaattctcttaggatactcgttctctttttattgagttatgaataaaagtattacaataatgcataagttacaaaagggttagatataactatttatagatgttgttatatcagtcctaaataaacctacaacaaaagactaagatgacatggtatgttttaagacacctcggcttggcctctctagtttgatactgtctttctgttattttaagttaattaattctgatatgtaactacttttgtaatcaggattcttaagctataaaaggaggccttgacttatttgttattagtgcagaaaatatattgagagaaaaatagagagacttatgtatggtgaggttttattgtatcttgtagcaagaatgatagatatgaataagagaggagcagaattgagaaaccagagggaagcaagggtgtttcctaattgctctaagcttcatgctgaatattgctcgagggagaaaatcactattgtgacagttcaagttatcttgaacaaagtcttgtaatctgctattattcacagtgaaaaggattccttaaagggagttcaagggttcaaggggaataggctctctacaaattgtagaggaaagttcgaacccctctaaaatttcttgtgtcttttattgctttcttttcttaatttcttgatgcattactcatattcttcttgctggtttttatttttattttatttttctagtttgagtgttttgctggtttcttaattcaatacaaactgaggttgttaattgcaacaaatggtatcagagttaatggtttatgtttcataagtttttcagtttggtaacattggcatcaaaccagaagaaatagaagagcaagtgtttgaatcttggtctgaactgaagcttcaagaaaatcaagaatcagatttaaggagaacaagaaatcatgtccactaccaagatggatatagaaaagttcagtgggaagaatgacttcttcctttggagagaaaagatgaaagctcaccttggaaacatgggattaaatgaagctttgaaaggagaggataaaatgtctgaactttggaaaaatccaagaaggagaaaatttggaaaaaggcaagaaacaccatagtgttgagccttgaagatgagatcttgaggaaggtggttcgagaagagacaacagctgcaatgtggaacaaattggaacaaaccttcatgacaaaatcaatgcctagcagggtctacttaaaacagaaattctattattataaaatggatgaaggtaaatcaattgatgaaaatctaaatgaattcactaaacttttatctgatctttgcagcttaaatgtgactattgaggaagaggatcaaaccatatatctcctcaactctctaccacaacagtatgatcagtttagggatacaatcttgtatgcaaaagatagtttggtgttagagaaaattattggggcaatctattcaaaagaaatgtcattaaagaatagtggaaagcttttaagaaccaatggggaagttcacttcacaagaggaaggaacatacaaagatccaacaaccaaaaaagaaactacaacaactcaggctacaagaagaaaggaagataatcttctaaagattcaagtagagatagctctaaagatgacaataagtgctatgtgtgtggaaagactagccactacaggagagactgttatttcaacaaatacaaaaataataacaggttcaagaaagatggtaaaagtggaaacaagcatgaagactatgactcggccaacttcactgatggctatgattcaggagaggttttgatggtggcttccaagtgttctaatgataaatggatactggatttaggctgcactttccacatgacataccagaaaccatgactaaagaacttcaaatctacaacaggagggaaagttgttcttggagaaagcaatacctgcatcatagaaggaattggggatattagcatcaaaatgtttgatggtatcgtaagaacactcaaagatgtaaggtatattccaaaactcattaaaatttttgtttttgaaaaataaaaatgtgttatgtaactatttttgttttttaattttaaaaatagaaaacaaaagtgtattttattttatttttatttatattttttaattttattcaagtcggatctaggtccgtggtcagattctacgcagaggtcgagttcagtgccaaggtcgtgggggagatttgggttcaggtctagtcggagtctaaaatattgattaagaagaaaaaaactatttgaaaaaaatattaaaagtgactttttttgtttttaaaattttgactgtcaattaaaaaattgaaaagaaaaacagttttatagaatataattttgaaaaatatttttacttttacaattttaaaaataaaaaactgattaaaaaaatgttaccaaacaccacccctaatgatttaaggtttaacttcaaaataataataataacaatgaagaagaaatagaaaataataataataaaaaaacaatggaagagaatataaaaaaaa

SEQ ID NO: 22458 - DNA, 3137 bp, Cannabis sativa
  modified_base (3097)..(3112): a, c, t, g, unknown or other
ataaatttgctaaggttactatatgggaaaaatcaaaacaatatgttcacggcctcgtgaaattagcctgtcatagaaagcaattttgtgctacttttatctatggctcaaactctttggatgagaggaaaaatctatggatggggttagatcaactcaatttcccgattaaaccatggataattatgggagattttaatgctgtgtttgggtatggagatagaatagggggtaatcacattactagagcagagatggacgtcgcttcaaatcggagtgtgttaggatcgacagacagattacagaagaccgagactcactttacttggtctaataaccaaggtgctaaggacaaaacttacgcctgaattgaccatgtgttgaaaaatgatgattggttggacttgtttccaattcaactgcaaatatgacttgggaaacagtgtctgatcattacgcctatgttgtttcttcttcagtggtttaggatatcgggactaaaccttttatattttcaatttatggataggccatagagaattcaaaaaggtggtgtcagagagttgggctaaaccaatcaagggctcggggcttttatcttttcacttgaaaagcatgagacttaagcatcagttaaggaagttcaacaaggagatgattggtgatgtgaatttgaactttcaaaaggctaaggagcaataagttgaggctaagttgagagcacaatccaacagtgacgatgagaattttataaaggcagaaagagaagtagctgagaagtattgtgatcatgaaaagatgttacatagcttcttagttcaaaagaataaagtcaattggttaaaaaagggaaatgaccataatgcctacttctatgcttctatcaagaaagatgggaggaaaatagaatcaaaagctacatgaatgatcaagggcagttggtagaggactacactgaagtggtgaagcactttgttaatcatttcagagattacatgggaagtgctatccttgatgtttgcagttaccactttgaaaaactagcttcgagttcatctctgaatctcgaacaacaacttcaacttataaaaccatgaactaagaaggagataaagaagagtctattcagtataccaagcattaagagcccaggacctgatggctatggttctgagttttataaaataatgtggccagagtttggagatgaattctgtttggccataaatagtttcttcaacacaggagctattcctaattaatttgatgagacaactatctctttgattcccaagacagataacccaacaaaggtgattgactacagactaatggcctgctacactacgatttataagtgcatttcaaaggtaatgtgcacaagacttgccacggtccttcctacattaattgatcaaaatcaaggagccttagtgcaacacagaatgatagctcacaagtctttgttttgtggatgatctaatccttttctgtaaaggatcaaaagctgctgtcaggcacctaaaaaatgccttggaagattttagtaaggtgacaggtttgaccattaaccctgctaaatctcagattttttatgggggagtaggaatcaaaaaaaaagaggatattggtcatgaaataaagctcgaggaaggacatttccctcttaaatatttgtggggtgccaatgagacctactgaatggaaaatggaagattgtggagtcattattgacaagataaaaagaaggattcatacttgggatacttggcacttatcctacgctggtagaatgcaactgattcagtctattttgttggggttgaggaactattggatgtatatttttattctccctcaaagcacagtcacagaaattgagaagctttgtagacaatttttgtggggtcaaagtggcaacagatgcaaggctcacctagcttcttgggagactttttgtaaacccaagaatttaggaggtcttggctttaaggaaggggagtaaatggaaccgagctatcctagctaagtacctttgggccatcatggaaaagcatgatgttctttgggtcaagtggataaacttggtttacttgaaaggtgctgatatatgggattacaatttgcctcaggagacaggttggtcttggaaaaagatctgtcatttaaggcagagtttcagcaaacaacaagttttaaatgcaggaaaaaaggggagattcaaagcttcaaacttgtataacaacttgttgtccaataagcagattgactactctcatgctatttggtgtaagttaacactcaactgtttactagaaacatgttatttcatctttgtattactgccgaggacaataatttcccagtgtgtggaatggtcttggagatccatcaatacttgttttttgattgcaatttctctaagaaggtgattgaagtgatttttgagtggactagttttgaagcttggtatctaaactttgataatttgttactaatgctatccacaaaagcaggttgcactaaagatcatattacttatgccttgcttgccgccactatttatgatgtgtgtcttaaaaggtacaagtgtatttttgagaaagccatttactcagttaatcatgttgtaaaagagattcaaagagtgataaaaaatagattatatagtctaactcataggaaattgacaaattgtaattataaatttttgagcaaaattctcatgtagtttttggtgggttgttcctgctctagtgtaattgtgctcttgttgattaatgaaatttcatttctttgataaaaaaagggacaagataaaaaccaagggataaatacttactcgagttgcctccttcaaaagtccacccatctatagctccaaagacatctcattccctccgaacaactgatcatttatctcagggagtaattaatcctacaaatgttgaagcatcactttgcctttttggtctcagggtttagcacaataggagtatttgagggcctagggagaccaaacccatccaagcttcctccttttgcacccttagacttagagatcttcttggttagtggtgttggaaatattttaccnnnnnnnnnnnnnnnnaccaagtatgttttattaacatcct

SEQ ID NO: 22459 - DNA, 2241 bp, Cannabis sativa
tgctatcatatgacttattttgttgccctcaattttaatagtaaaattaattagaagtgccacaattatgtaataattatatttagaaagaattttttttgataaaggtcatatattttagagcacacaatatagtagagttagaccatctctaatggttacattaatttgctgtaaaatttataccaatttgatgtagaatcttctatttttggtccaataattctaataatttacaccaaatatcacattaaatattctactaaataaatatattttatttaaaaattctcacattttttattgtttacattaataccctaaaatagctaatttatgacgtaattatatcatgactagtaagaatttaaaatcttaaaataatttagtatgaataaaatacatattaaatcaactaattaatattttgcatttttttaaaattagttaaatgaaatcacacttaatgtttattaaattattattttatttaatgtttatttttatttatgtggttttttttttaaaatttcataccatagtgttatattatttttatttatttaatattagttttttgttattgttattttttgtatttttcactattttagtgttttaaattaattattacttttctgataaatttaatttgagaaaaaaaaatgtaagattaattttttaagaaaattaaaatcagagctataatgcaaaaaaaaaaaaaaaaaactatcgataaattgttgtagactcaaaatctaactattaataatatagaattcagtgtacattaatttagtgtaccattaaaattaaattgtgtgaaaattatacaccaatttggtgaaatgaagcactattggtgctcttataagttctccgaattattttttgtagagacataccaaatattttaagattaactttcttactatacaataaaataacaatatgttataaaataatataaatttagtaagaagaaaagaagaatatgaagagagaaagagaaactgaatggaaatttctaagttgtttattccaattgagtaaattcttatttatacaaatacaagagtcaaatattaagaaacaaagaaaaagggaagctaagaaacaaaagaaatgttgattacaattaatggtaataaataaaaaatttggacatccacataattattaatatttataacacaatcctatttgacataattttttcttatatttatagcaattcttaactaggtttttttgacaagttaggaatcataccttttttatacaaaaaaaaaatcaattatttctaaaattaaactcagtccttttttcaataaacctattagattcattaattaataatagtgttcaaaattatggaacacacttcaaaagaacaatcctccaactaaagcacacgacctgtggagaaataagagtcgcttgccaaacaatgagccaacttgtttgcaaatcgtttaacaaaatacaaaacaatataagggaaacatgaaggaaaagttcgcacatcttgaacaagaagaccaaattgggaagacagagaaatttttctttggatagcttggttgagagcaagctatctttctccaacaaaacgtgttcccaaggatggtaagtaatccaacttaaaacttctttgatgcctataatttcaataatttcaggttggacgcgaccaatcttacccttagtaaaggcttctagcagattgccatgatggtcacgagctacacatcccacaccaaaccgatcctcttgctcaaataaggccccatcaacattaacattgatcttatgtaacataggtgcaatccaacgctcagaatatcgccccccatcgttcataggagacaaagaaagaccctttctttcttgagcacatttatactgatcatgttctttgctgatgcaataatatttgaagcagaccaactcttcttttgccaaataaagtcattccgtgcacgctaaatagcccaactcatcacagccgcttcctccatctcacaaacatgccccttgctaaacaaaccagcaaccacttgctgtatgtttcagagtcgctgccaatgtccaccaggcttcgattccatgcagcctttgcaaacacacactccaccagtgcgtgatacagtgtttttagttcttactgaaacactcaaaaaaaattaaaaataaaattaggtgctgtttcgtaatagttttgttttctaattttttaat

SEQ ID NO: 22460 - DNA, 1624 bp, Cannabis sativa
taattgtatcacttttaaataaagtagattatacctaacataaaatttaatatacgtgtctcgcacgtaattttttactagtatatatatatatataacataccagatatgttaaaaagaaagcaattgaagttaatacatttaattaaaataaaacttaatatagaaactaaaatttatatagaacaataatatgacttattggtcaaacctaacaaaattggtaggaaaaatgagtcgctggaaaccaccactttttgaatacatccgattcttcaactactattcttcaactactataaaggagcaaccatattaagaagattgtttaataaaaaaccaatcttctataataatacaaaaaaaaaaaaaaaagagatatagataatgaattttggcttttatacatgaaattcggctattcaccagaagttaacacgggtcttacaaaagaaataagaatcagctcaaagaatataaataattaaattgcattatttaatgcggtttaattaactcgttctaattaattaaaattgatagaaatattcaaattcgatagctatatgagcatacacgagataagaataatagctattgataatatagttgacgagacgatatgtcaatgtccggataaatagtgtatccaataagaactaacaagacaagacattaaggagcttgcaactcattgacccacgtatttatacataaaaaatataactacattcacccatctcgctctttacacaacagagtagccacctcgcaaataactttacgatataaatgacactgcaagaagaagaatatctatacttagcgttttttttttctatgaaaacggataagaaggataactcacatttagggagaaataatattcttagtcagcataaccgtttaaaggataaagacaaaggatggctgagtagttattagatattatcccatgcgcatataaatgaaacgtggagaatgtccacgtttcttgagcagttgctagtaaatagatcctaataaaaataactatcatcctatacacctataaatagggggagatttcatagaaaaataggcggcgaattaagataaaatactattatttacctttattaagaattgtactatgtattaaaataaatatctctaagtgtagcatgtaaattttaactaaaaccacgtaaaatatttggagttcatttattattattattattattttgtaatatatagaaatttttacaccaaaaatccaaaatgataaatttattacataaatacctatacatggctaaaccaacttttttactcatcttctacattttattactatttcaacacatcatttctctcttttttctcttcttttttcttttattttcaatttttttttttttaaaaaatagtaacctccatagctgaacacttacatctccacaatcccaactccattttccctcttccttttgttcttcaaatttttttcaactcccattaacagttttccctttttttatttttttcttaatctatatataaatatggttgtaactcattcttcatcaactcattcccctgttcaaaaaaaaaaaaaaaattctaaaatggagttgaaatc

SEQ ID NO: 22461 - DNA, 73304 bp, Cannabis sativa
aatacatcctgtcttttcaccttagtagtcctatgcatagtcagtactatagccccaatcatggctactaataaaataagactaggaaccaaaaaccagacgaaatagtaggtataaagtaaattgcccaatgtttccaaattagtccaacttcgtacctttccggcataaaccgtatatctcagagaggtcgtatttctttgggttggtagtaatggaatggtttcattatctaaaatgaagaacatttcccaccaaaagatcagtccaataataccactcactggtaaatagcgcaatacttcttcgtgaatctccgctatttgaatatggaacatcataacaacgaaaaggaatgaaacggctatagcgcctatatgaactactgggaagatcatagcgaagaagtcgagacctaacaaaataagtaaacctgaagtgtcgcgaaagactggaatgggaaacaaaacggaatgtaccggatttttagcacgtgcaaccatcaaaccagagaccaaagctgggctcgacaaaactgaaagtatcatggtacgtcgtccttccctgaaatggaactttcatgctggagcaagaactagcatgaaagtcgatctattacgaccagcgcggttgttcgtatttcattttcttcttccaagccaagcccttcttagaaagcactcactgagttacttacggaatctataataaggatcaccggtggcccgaccgacgccgatcccgaaacaaagatagttcggctctcttttttcggtcattcagatgaaaaattccgtgaagacgacgagagatgccgcctgctctttccgttccttctctttcggagtggagcactcctgtttgttcctttctaataaaagcttggtacgtgttctgagcgagccttcacgtgacgtgaacggtacctatgaagtggaatccgtctgtcttgtcttccacctcataagggactcaaaatctccactgctattgtcaagcttggacatacttaacttaacactgaccaaattgagaccgtggccacaccttgataaaacagtgatgatgtggtctggatacgcggctcttcgatgggggaaggaccacgctagtcgtctgagtgtgtggtgtgtagtgggtgcatcttagtgtcttcttactacgaaaaatcaatgagaaaatatatgattctcgttctcgaaacgaaactctttttctctttcaaactaggaggattggcatttggccaagatgtgatctatctctttccttggttgtagtgaaactttggttttctttagcgaggaaccgtttcactcggcggacagtcgaatgatcaaagctaaaagctttaggcatcttttgagcatgttcagcttcaaaaattcctggagtcctacttctcacagaaagaaaacatggctagtagataactattttgttattgtagaaagcgatcttgttcgggcttggtctctcgagcctttatcaattccagaagtggaggagcctatgtagaagaagctgtagaagagcaccaccacggttcaggtcggggggattaattcagctgcaaggatcgtgaatcaagcaagggaagggaagaatgagacctgaatttggaagtcacccccgaccgagacctagatggcaacctaacctagtacgtcataattgagaaagggaacaccccccccagagccagaacacaggcgccgacctctccgccaacagcacaagtgaataagagaagatcacgtctccaaaggtggcggtatcaccgtctacaggtcgagtcacgagatctagcactcgacgccgtgaataaaaaaattcgggtgatatacgaaggcgttggtccatcggtgcctcaggggcaatcatctgcgccagtgtataaaaagaaattcaaaattttgacagtagcgagggacaaaaaatgttgattccggctacttttgccacttatgatcagtgttcacaagagcgagacggttcaatgtcttacaatgttcaagcagcattcttgtcggaaggattttttaggaggcccggacacctaccgaacatccctgaaggatggaacaacatgatgaagaaggcggcgaaggtatggaggaaaatctgggaagagaacaaggagatctctgaaaaggggaggcaagaaagtagtagaaatgttgaagaggagacaacccgctcttgaacttaagactatgcgcgtgctcgatctagcaatcttgtactattgttttgatgaactgtcactaaactaaaaaagaaagaagagaaagaactgggagttggcgcctacataactggttgcttgcttaccaagccatcctggcaagctcctccagttctattattattcttgacttgacttattattataaaaactactcactatcaaaatgaaagacgatcgattatctacccaagaagatagagagtcccacatacgagaaaaggtcacaaatagagttgaaccaagtaacattgcaaaggcataatgatagtagggtcgggatatccccgccctccgaaccggacgtgaaggtctcccctcatccggctctctgcaggggaatctccactcactgcttcccctaatatcctccctttaccacatcatgggggtttacaggagatcccagaggctcgctcggaacggctgctataccataccttttgactcaactctactctagtagtcactagactcactatagtagtccgtccggctgctcttgctgaaatcattactcttcattctcccgtgctctagcaattgcgctccctagaccactaccatgtagttaggtagggacaatcaatccgtagtgacgggaatctaggaatgaatgaggatccctatcaatataaaaatgaagaatatataattagagttttatccctttctctcactcaatagatgtttctggtctgatacggtacagtccaatacgagacgatggaatgcaatgggatggatggtagagggctgcctgcgcccaaaagcgatgattcacttgtccccttgtccatagggacctcgtggcatacaaccgaaacgactcccgctagatagccgcccctttctctctttttacagcctcgtggacggacgaaagaagggaagttacagaacggggcagtgaaggctcgcgaagtaggcagcaagcaacagcttctcagccccctaacctttctatgatattattaaagcgctagcgcgcccctttctctaaaggggcgtaagcacttcactcgctaggggatgggattcattcacttgcactcctgctagcactacaaaaagctccggtcttaacgcccctactactgctgtgcagcctttcctcgggttcgtagagtcgggtttcccgtttacccacaacggaggagccgcccccaccaggcaggcggccacaggtcataacgcactcttcgcacaacaaatccactttgaagttgacttattcgctcggccaatcgtcggaatgtgtacgagataccataagggcccaatatctcaatagcacctttgtctaaagcttcgaatgagacttcatatccgaaacgcaggaacgatctgactagaaagtcattcaaaacttgatcgaagaaccagcgtttattgaagaagctatagagtcgattacaaaaagtactagtttgaaaggctcgttggaattgatccgctacgggatttacattatacgcaacagaagcacctgaagtactaaacggaataggtattagtttggtaatggttggagcagcaaactctgattcggcaagaatctcattttttggtagtacgaagggggaattggcccaaaaattggataggggtcaagacgcagtcgggcgccggcggctgactcaagtgccccccgaaccgcgcgaaatggtcgcctattacacggctcactaactctgcctggggtgggggtacctattattcgtcggcggtccggcgcacccctactcacttaaaggataatgcttaattacgaaggaaattcattcttaatctagagagttccccttcgttaagcgcttcgagccaggagtagacatcatcatcatctgcagacaaatccagatcctgtttcatcattagcttagctaaagtggaatagtatgactggctttccggaaaatgagacgaaacccgcttgatcgatatgagaaagatgcgctcaaaaatacctcctaaaccccccctgccaagtgatcgagtttagtctgaatttgctgtagaagttgctcccgcttcggacttacttcaaggaaagataggattgggcaattccgccggttctgttctaaggtattccctttcattagctacgcgaggttagaccttgactgaaaggaaaggagaagggacgagtggctctgatagcacatagaaggcggtttttgatagcaccgctgaaccagttgccactcactggctccatatctccttccctttttatcggtccccctggaatggaaagcgatatatattccccccttaaactctgtactctagctatccagctgacgagtttacccgagctcttgtgctccggggaataaaataagaataagaagagagggtgtctaaaaaaggaagcagaggttcttcacgtgacatagctacgctcaggtttcaccaacttcgcgtcgggttcacttcagtgaaatcttgttaaagcaaaccaacggttggttgaaccttaggacggtcgcgaaaggaaccttcaacatcgggtcaattcacactcactacatactccatggaattgagaacccagcgtaattggttttctccagcggctctttttcctatattctttcagatggcactgctacgtctgcccactacagagcaggcctgactcccgtgagcaggtccgctggcttttcgtacggctttttacttttatgatccggcatgataacaactcgaactccacttctattctttcaagagaaaggcaccgagatcccgcgtaagcgtcgtttgcccgttgccaataggatcgacttggttagtaagattcaattgtgagattaaaaaatacgaaagtaaggggccggaaatcttgagatcaaaaggttgttctaaaggactgtaaatccttgctcctaggatccaagaaggggttttaggaaggactccaaatccttcctaattacctaacttaccctactagtgtagtgtctactgactgagtcgtgaattagattggatgggccgatggggaatcaaattaggagttgtggattggaattgtaatccctttcatttcttcaatcattgagttgaactaataaataactcaagtttcattcaaataaatcatttttacttaaggttcatactatacaactatttaaagtcaaaaagcagtagaaactagaataaacagtgcagtagcaataaatgctcggtacttccataatctcatcatcttgtttttttttcattctatatccctccccagtctcgaatcacaagaagttggagcagatctttgatcttttattagtattcccattccggacgcatacatcgagaatccagtgtgcaattcattttgataagatagatagattgtcccctattagtcatataggtaaaaaaaaatggttgtgctcccgggaaatcaattctactctattcgatggaccaggaacaatcgaaaaaagccagaccagtacgatatctctttgaatcctgaatatggtgatccccccgattgtaccaacctacctatgtctctcccccatcaatcggtactagttattgtcatgtcatttggattccttgacttgatttgtccgatgagaaatgcgaaacgaaagaaggatcctcctgctgggaattagatcctactctttgtcccccctcttcacagaaaatggagagatgaattgatcgattcatcggatcctaggtcgggactgacggggctcgaacccgcagcttccgccttgacagggcggtgctctgaccgattgaactacaatcccaggaaaattaggtgtgcagcctaaaaattcttattttattttctcattggatttcattcgaaccatttagtttcgccgtgttgtaacagagacacgaattatatactttattagtaaattattctcattaaaaatctctaattaaatagattatctatttatgcggctgtaaactcatagtgggctaattcatgaattgaatcaaatgggcccttttacggtagagtcacgctctttaaacgccctaagaagcgtaagtcatcggttccaatccgataaggggcctttatcttttccacgaaactcctgtcttagtcttcatttttcagcagagaatatagatatgaaaaaaaaggggggtaaccgcctggcgagtcgtttttttttccttcgtttttaagtggaatgttcattatgatgagttgtagtcgattaggagaactgctatgtcactacagggtatactcttcctcatgtttcattattcatattttatgtcctgggacatagatattctagatacccattatgaatcgccaaagtcttcctacttctccattgttccaatcagatccgaaaaatgagaaatcaatcaaaagtcagtggacctgaattgaatcatgactatataagctattctgatatttagattcgatatagatgaaatcgtggaagcggacctttgatttccttggaccacgtaagaattcgtcgtccgatttcatcttcttgttcctggatgctccataggaatccatcgctattcctttcttccaccgagaaaggttcattccgaatcacaagagcaatttctcttttttttcgttatggtaatgcaatgcaagaggtctcggaaatctggttgtttctgatgatgaaaagagcttttttatgttatgtgaaattgatgaaaacccgatatttaaaggtcggtaatgttagaagacgactgtcggtatctgatggtaagatacctacggtcggtatatctttgaaagctcagacggagagaataaacggactcctcgggggctacttaagttaaggcactttagtgcaaaccagaaggactggagctgttggatgttgctcagtgctgctataacttaacaatcaaaaagctccgcgtcgaacttcagccccttcgagttggccacggggcaacagcctctgacgccccacaccattgcggcaggagggggcttgcccatcagcctactttggcaagaggtggcaggagcgcaacgatctagcccaaacaaacctacttaaacaacctacctaaaggcttggcccggtctgaaggaagaagaaagtagaccctgtagagaagcggataggaggggtagcctatagactcaagcgatcagctcggtgaaaactcaccccgtattccatgtgagttagttgacttcgattagaccagaccgacccagagaggaacgtgcccacgagggcaccaccagatgttttagataaacttacttgagtatatcagagcggaccgcaccatgggctagcccataacccactgcacgagtggaatactttttagtcaagtagaagggccaacctgagagcgagttctcaattttattttttattcatttgtcacatataggtaggtataggcgaataaaagataacgattttcgaagctgtgctaatggtaagaagaggttttaatcaaaaatacggggaagtatgaaattttccaatgttcgaccaatccctcgtctagggcaatagagggagaatgatcttgatttactttgtcactatacgaacactgatctacgaccaccctcaaagatggtcaagctttttactcgcctcgcaccggaaagcaagcaacaactaagggaatagggaatagggagcttcgggaggagcacttccactacgggatagagaataggtcctgttttttggaaggaacaatctttgaaagaactttaaataagagcttttcctcctcggcaagtagagttacctcagccagttaagttaccgggtacctctgtcctttcttctgttagctatctcaactcttcgagtcgagttctagttgctataagaaaattatcccatcgagttgtgagttcgttccagtggactatataaacatgcatagctgcgccttatgagggaccttattatgggcttcttagttgctttgcttatgccagctagcttttgtaggcttggttgcttctttcggcttgtacgctctgtcataggcttgcttccctctaaacaggtctttcatagataagggtatagtctcactccttctatcgaggggttggttttccctctcttttaatttatctttatgcttccagcgagggaaatctttctcgactcacagataagggatgtatgattcccgaaccttaacaaaaaggattgagctccgcgcatcccttgatctccgcctaaccggggctaggctagtttcagtgtttggttcctgacttgatgggagtcacaaggctttaaagaaggccgaggaacggggatgaacgagattcgttttggtttttatgctttgaccttgctcatatatcaaggctgagtctaactccttatgtctcggaaagacagatgtgctttctgatacactggactaaggtgactaacccacaggaccatagatgagacagagactgagacaacgatttgtcgaagacactgtgcccgaatcaaggaaagcaactgtgcctgagaagaaagaaagagatattgattttgaacagcctttaagagatagggggtgccacaagcctaggtccccaagagagataagagatatttgatattggtttggtggacagagcctaggtcgccaagcctaagccccccgacagagagtatggatcacgatgtctcaaaaatgcgtcttgcttaggttgaagcaaatgccagtatagttgctgttcttatgccgctattagtagatcaaacgctcttctttctctgatctttcggagtccttagtcgagtcagatctgcaccgcaggttaatctatccttttttggagctttactaataaggtttccaaacctatatgcttcaagcttatggacacttcaagctcgtaccttcgcatcttgcctttaggttttatcgacttgcatgctgatgagctctttccctcgggttctgtgactcgagtaacaagagctccacgctagagcacaaaagaacggcatctctctatcggattgccttacccctttctttgatatcccattggcttaccccgacggtatttgtatcggtatctcgttctgatagacttgcttgcgcatcttgtctttggtttgatacacttatagtccagtggcaagatcaatgtcttttattggcttctctgtccctggaacaatatctcctcttttctttctttgtttttttcaaataaagacctctttctgtcttctcgggcagtggatttgccaactctattgctcaactatcggtctgaattcctcttcatcttgcttttcttggtttgtggattctatttccccctgtgcttccacttcccctgcctcgagatcgtgcccttttttttttactcgactcgctccctgctcaaaaaagtagatcttattccgcaactcgggtcgatatgtttgggagtcatggtcacatcatgaatttttctacctgtcgcgctcgcgtcattcgctggccagtcgggaggatagtacattccaactcacatgcttcccaaaccaagactcgggggcaacagcgcgactgcttgatctggatcatccggaactacatctaaatctctgactatggcgactaggactctctttggatcacgatttcaaaatgcctggatcgctcttccgggccgggtcgagcctttcaatagtgcatcgtatgtagttgtagcgagcagttccttcccagatcgagaagcttgagcaagaaattcccccattacagatagaggcgcctatagccttgcctctggctttgcccccttatctactacgggtgaatctcttcgatccggaattaaactatccctaaaaaaaaggctttgctgctgccgccgctgggccgacttaaactactgccataggtccctctctatccgggtcctcaccctccaccggaactcctgcgggttagagagatggaactactgaagctgctccctctgcttctggaactggttaagggttggagggcaatcactttttagatcatggatcccttcggacctggagcctttcccttgacaaccgagcttgcctaagtacggcgtagaagagaaaaagtctaggattgagatctgagcaggaatttttcccaggtgagtggctacgttttagggtggtaattggttgcttggtcgagcagctgcctttggcacggaaggaaaggtgttccatagcatctggggccgaggccctgttctggttactacaattagtgtagcacctttattttcagggcttacttcggagagtaccgcagctattgtttgagtataatcctggtatccttctacaatcgtctttgtggctcctgttgctgcagagcctctgtgctgttggttttaccctgcccggtaacgggtccttgaatattctcaggttccgattgtcgacagctaagttattttttacttcctccagtaggtaaggcaataagttttgcaaagtccaacaggcattagtagcgtgcccgcggtacctgtggaatcaactgtatgcgtttgggtgaaagttcgtgggtttggtgtagtgaaagagaaaaagtagcttcagtttctgaacagacagggcaagcatacctaggaaatcgagattgggatcccattgatccagcggaagcaacggctagggcatggacaataaaagatccttttccatagccggggtccggaggtttctcgtagccgcagaagctacgacatgggcatagctaggtgctggcttaagtactggtgaaagtacctgaaccagtggtgacatcggcaggagaggctccagcactggtaggtaagggcgaagtcatcataagtggttgactgggcctaggaacatcggtcggggcccgcgagcttttaaggcaaattcatcgtttttcgctcgtgtttcatgcgtgcctgtatgaattgcataagtcattgtgttttggcggtggagaagtacagaagtgaacagtgtgctagtctttagttgtgcgaagcgttgtttgttgacaagacttactcaactcactgctttcacctgcttccggtgacaactaccactctcttataaatgggagggtagagtaccaagacataggggttggccagcgaaggcggtttatttagtaccagatatacgtatttcgaattcttttcatggcagttcaaagacacgagagataaggaaaacagaaaagcctctcaaaccagagtaggaattcgatcaggaatagacagaaaaaggctgctaggctcctttctttctcatgggaggggttcgcatccaacccaactcgatacccctcgctaggacatttaagtgagtcgggttttgatccggttccgaaatgaggcggtgttaccaatgactcgataccccgcagctaccgaatgaagttcgtccttcccccctttccctataataaggtgcaggagcgaagccactcgaacgaatgtgagaggagcgaaaggagatagatgccccatatagcctctcctctccggggttgggtcgaaaaaagaatcgaattgggttgagagaagtttatgaatcgagtgaaaatgaaaaagaaaaatcgtaaataaaaatgggcaagtgtgcttgcttattattattattatattagaattagaaaaataccaaaaagatgaagaagaactaaggcacttgcttcggcgaaacctttctccgtcgttacggagttcttctgctctaatctccgaaatcgaaggtcagctgactgaggagttagtattgattcatgcaaagatgctcctctgaagctagagtaagggattgtccacctcaccgccccgaagagcagtggctttgttgttttgcacgcctacagagagatattccaaaagtaccgacgctcaatcgaaagaaagagcaatcaactatatgcttaactcatgccccgggggtacaagatcttattttactggatggaaagccggtaaaaagcatagagcgtgcgggctcagctctcgcccccccccgtgacgctcccaaaccgatcgctatcgttttcttgctttcttgttgtcttgaattgttatagaacggctttctatcaggtatagttggtaggatgaagcgttagtggatatagcaagtgtgccggggatgcggctcgggcgtagtaggtctggacgcctagcatgaaacagccttctctggtagcggcactataccttagtatagtatctctctagcttccagtctatataaaacgtagttagcagaggctcgagagacctcgcgtaaagggctactttggcatcggctctctctcgttaggtaattaccgaggcgaaagccgctctctcggaagtaagtttccccgccatcttagtggtactagtctaataaactttcacttgaactgccactcggatttttttttgttgtggtaacgcccttctagaattacgtttaacgtccctttatgactttcccgatcggcgcctcgggtcggtagccgggctccgggacattactaccacggctactatcgacccgagcccaaagaaggaaaagaacggactaaagcgaggagttcattagccatacatagtgaagggggatgggggtcaacctctttcatgacccatggccccagtgtgtcacttggttagcatttctagaacaaattaagtagggttggttttttgatagggaaacaggggagttggctgtagttgagacacgtttttcggatggacgatatggatttattcgagatggttaaccacttttttaaccgtgagagggaggtcattcagaacccgctggctccagaaccggtggaagttccccacgccgatccccatcaagaaagaacaacgtgaggaataagctcaagcggaaaatccattcacactttgattcttgagcaagttcgggaacattgtgagaaggggaaagggcggctgtccgttcactttccggaaatggcataaatctattccagtgccgcagagaacattctgtctcgcgatctggaaatatctgcggagatggatactgaaaccctccgcggatggggggaggagataaaggagaaccctaatctcctaaaatccctcattagggaacacctgtaagatgagtctgccgctttctttcataacagagccgagaataacggctggcatagaagtctctcgcgcgcaaggagatgctgctgctggtactggtagtactggacaagctctcagggaataatctctttcttatttctgcctttctttcccatgacgactaggaacgggcaaatcaaaaatttcacttcgaattccggacctcaacatcctgctgctcatggtgtttcacgatcagtattggaaatgaacggagaagtggtggaacgtgcggaaccacatattggatcactccagtgcggcacgaagccgctgacgccgagtcggctcctatgccgctagctatgccctgcttggtcccccggcacggtggaggttccgtagcgcgtcatgagcaccgggctaaggttgagcaactcaagcgaaccgccccaccttactacaacatagggacagaagggagaaggttgtgaaggtggcctcgttatccacacctccggtcggatgaatggaggaccgaccgacccgggttttcatgagcgttggcgggtcctggagtgcctgtcaagggcgctagcgcataccccggggtgatcatcaccacctgcacctcacatctcggcacagtggaacgtgtaacccgcctgctgtctcattcaactacatttgttcctgtaatccatagcctaacagaacgcagcagcgagggacaacccgcccatacagccagcggggaggatggcactactggcaaagaccgtctggcgaaaacgccgcaggcgcgaagcgtggtaggcctgcgccgggggagcatagcatagggaggaaagggagcccggacggtggaagagccaggggaggccgggtcatttgacggaaatggaaggcttttcccctattagagaaggccctatgaagtaaagggaagtgcatgaattcttggaaaaagagggagcgagcctatataaaaaatgtaataaagtaaattcaatgaatagatagagtcaacggtacgacagacagcgctgcctacacgcgaattagcttccgaggtcgagcagtctcaatttcactacaggatttgcgaatgaatgctgggctgggccacctcgaatggcgtgagccgcatgcggggagacccgcacgtacggtttttagggggatctggtcgaaagaccggccggcgcccacccgactagagggactgagaaattaatagagtacaaaacttatcttcaagctttaccttattctgatcgttcagagggcgatcgcggagtcactgaatgaagtcctccgtttctttcggaggtgctgacccgcagcgaggcagagatgactaagtgacatatggaatatggcgacgacaacagcatgtcgtagaaggagataacaggtggagccaacgacccactaagactaacgtatctacaactacatccccgagcggcagtcaaacggaggcgtgaatgcaagatgccagcggaatgatcggccggacagaggctagggctgcttccttcccaccgcgtccttccttgtgtgtcggagatataaagcgagtgcaccggaaaagaacgggaactgggtcgatctattctatggcgaagcatccgaagcataactgcacactcacacgatctttgccgagagataggagcattcggtggaaccggtgaactacacttgcttctggatagatgtgtgggacagagggctcgtggtaccagctgcccacccttcctcctctgctttgagaaccgtgtgaacggagagtgggcagaagggaaggaggtcctcatacggagtcgcacacttacttgagcagtgcgggagactggggaatgggtcgagtaaactcccctggggccgtaaaataacagacgaagctttacttagatagggctttgatttgattggtatttcttttttcttagtgattggaaaggagggcgcctgggtatgttatagaaagggaaggcagaggtagtacttcgaatggcgaagagaggcggctcggcagggaaggaaggggaaatcgtcaaggatgacttctttgttggcgaaacgttagcgccagtgattctctgagccggtctggatttccaacgcctcgggaaactggtcgagatagatgacagcacctttttcctctcttccttaccgggagggcaatcttatcttatggccttcacctcccgcccggcacggaaatagaacccagccccccttctgatccattcatttctgcaagcaggggggatccagagctaagccccccttctattgcataacctaaaaaagagagttgcaaagtaccgcgggaacgatacgctttggttaccggcgaacgcttccaaaggcgaccagctttccatactagttgttacgttacgctgccatttttccaatatcattgaatagcatggcctggggctaaggtaactcaagtgggagagccgtgttatgggtgaccttattgcacggttcagagagcacttgtgtatgtgatgcaagtgaacgtgtacgaaaaagctgtcgtaaagtttcgttgttcgttccgtcgttgaccctatctatgtttctatgatggcccaagaacacgcttattctttagccgtagagagacttttgaattgcgaggtaccattacgagctcaatatatacgagtgttattctgtgaaataactcgaattttaaatcatttacttgctttaactactcatgctatggatgtgggagcattaactccgttcctgtgggcttttgaggagcgggagaaattgttggaattctatgaaagagtctcgggagccaggatgcatgccagtttcatacgaccaggtggagtggcacaagatctgcctcttggcttatgtcgagatattgattccttcacacaacaatttgcttctcgtatcgacgaattagaagagatgttaaccggcaaccgtatctggaaacaacgattagtggatattggtactgtcactgcacagcaagcaaaggattggggattcagtggtgtaatgttaagaggttcaggggtatgctgggatttgcgaagagcagcaccttacgatgtttatgaccaattggattttgacgtaccagtaggtaccagaggagattgctatgatcgttactgtatccgtattgaagagatgcgacaaagtgttcggatcattgtgcaatgtcttaatcaaatgcctagtggcatgatcaaagccgatgatcgtaagctatgtcctccatcacgatgtcgaatgaaactatccatggaatcgtgcgccgtgtgaaacgtagatcatcgccgttcttaaccgagactcaggttaagctccgtctcggaaccttgtggggttaggagtaaagcatcccgaggttggcgtatctcgttgggcgtggagaagcattgggaaccccaatttctttcttcggagccgtttcttttcccgtccccccgccccggcatagcgcttcgcttccggttcttcggaagaatcaactgacttctcccttcttcattgatctgggggaaaaggaaccgtctacctgttgggaagctagacatcaagtaagtggcttgatgaggataactaagctgacacgccggagttggctgctggcacaacagggtggtgccttaccgcaccacaggcgaacgcgcggtagcgttcgtggtggtgcttcaggattccaatgtactgcgtccaagatcagaacgagcttgccggcggaccactgccgtcccattcttgagtgagctggagcgcagccatcttatccactgaactagctagaagctatcgcttcgggtcgaagcactaaaagaaaaggaccgggaaacgcggcggcataggaaccacgggaccccctactagtaaagggaaaacggaagtgcgctcctgcgcaccagccgaaaaagccctttccccttttcataataataaggtaagcttcatagctccggcttcttttctgccctttttttaggttgggttgctggatacgggatcctcgtagtaggctggaccaacatccagccgagagagggcagcctttagaagcaacaggatttcatagaaagagaacgcttcgcgttttcttatcttcttcccgccctaggagtaggagtagcacaaaaagagggagtagcattattgacccaatgataaaccactaacaccttcctcgttggggctccgcgcactgggaaaacgctctagcgacgggaaaccggccactaggtacaaagctccaataaggtatcgagagggctatcacagtcaggtgcgaagcaattaccccctatttgtaaagtacccctcttcctatttagggggttgaggcgagaaatggcttgatgaaccgttccgttcgccacgcaccggccccattcacttgcaactcgtagaggctgtaagtacacagtgccccacaactattcatagtatagtggggttgaaacacgagagtgcccccctttctttcaagcaggccactttttccggaacgcagtccgggataaccgtgaccatgtatatatatatatcttcgatgctgtcatttcgaaatgtccgcttcaaccgctgtttcacctcccaaaaagcaaggttggcttgacgagcgcagatgtgaggaagcgggagcaataaaaccaaaaatctctttcttgtccttctacttaaggggcaaagagaagcgcttttgctactgagaaagcgaacggtcagcgcgaaggttcaagacttagccgagcgttagcaaagctagattctcatagcgaggcgcttcgagttagcgaagcgctgtagttgcgccgaagccctatgtgctataatgctgagccaaggacgctccgccttatctatagaagcagtcaactgagttctgaacgaattagctccttggtaatggcttaatctatagatagaaagccctatgatgggaaactaccacgttaggtttggagagagatgggaccggttatataatagggggagcagatgcaagctttttctttcaatagccggccaaatgactacaggatcatcggtctactctacctcaattcaccatttcgaaccttatacagaaggtttttccgtaccagcttcttctacctataccgcagttgaagcacctaaaggagaatttggtgtctttctggtcagtaatggaagcaatcgtccctaccgtcgtaaaataagagcacctggctctgcccattcacaaggactcgattctatgtccaaacatcacatgccagcagatgtggtcaccatcataggtactcaagatattgtgtctggagaggtggatagataggaatactagttgctcgatcaggcccctagctttattgcgagccaaaaaccttgatggattccccttcctcttctatcctcagtactagagatgaacgaattccatacgcccagatcgaagaattttctttctgttgttggtgttggaatttcatgaacgcggagccaacgagttcagtcgaacagcgtatatagtaaatagaagtggaagagcgtttctttagagtcgtttaaaacgaaacgagccacctgatgcacaaagattttcttttttttttcctttttctttgctttggtcgagaataggtctcctccgtttcctccttccatacagaatgaactccttcttcatgtcctgtccttcatgaatgcgagttcagcgaactgcaatgctgttgttgttccccttgaaccgtcctgggtccgcccatctcgccgactggttcgtgtagaagaagttatacccccgaattctgaatctcccattgtagctactatgtcagattcacccgaaatcccggttccgcctgaaccaaccactcacgacattctcaaggctctgttggcccaaatggaaagcttgaacagggccatcaataagtaagaagtaagctccttctactgcacctcaagcacctccggttcaagtctttgatgattgtgaccaatatgctgaagactctcccgaccctttttaacagttacagaagcggataaccgctttaaaatattagcccggattacgctttcaaatcaatagttcactaccgtgaactcccccccttttgtttgaacaagccttgttactacgttactaaagaaagtgccatactatcgaactataggcgagatgaagtgaagcaagcaagggaagagttccgacaaagcgattgatccagttaagataagatcgatagatagagtacgggacaggaccaacactaacaggggacgtagaacatatttatttaaagttaaaggaatcgccagacagaactaaaagctagaagaaagatgaccgggggccgggaatcgaactattaaattcaaataaggaccgatgatcatcaacagacctttataatcaactaaaaccctgactataatcgattatttgcacagatccgctgaaataaggcctatattcgcatttgaattgacctctcgtactgaggacgacctatgagatggtttgaaccgggctttctactaaatcaaagaagcaatagagaagaactaatggacagaccgcataatactctttactggaatgaaaagaaagagaagggattcacgaggagaaagatactttttaaagaagcgattcgttaaacaagggatgagcgttgaacaagcagtttaaaccgattattgtacagttgacctcagacctattcccgattgcagaagcggaaagggtatttctttagtaaggaaggaaagcaagttagttacatctatcttaaagtctgattcggattctgctctcgctgttctcaaagtagcgaagttaccagagggagaagctctgattcctcttgttgaatcgactctttacaacgtatcgtattacttaaaagcaaatacgttataagagttgtaagggcgagaggaaagagacaacagctgtttactagcaagcattgaaagcagatgccagaatgactctttgaactgaacgacgtaataaataaagaaactagctgccgcattcaattggtgggacgagatgaggtgcggagcgaactgtgataacctttgtttttaccataaaagccgaaagaaggaaagagaacagatgaaagttcgcccaaaagaagcgagtgactcaagatatgccatcgctcttctctcttgacctgagatttgggggagttctgtgagcgaggagcgaagcctttcggtagctgttaaaaagaatcaattcaatcagctccagagctaggagttctatgtctaggttgagggttgaggagagtccttttagttaatcttagctgctaccctacttatcccagctctaaaggcagctactgactcgtcaagttgagtcgactgtgattcttcttgttccgctgtgaatggtatcgttatcgtattcagtagttttcctggctcgctaaaacccttcttcttagtcttcggctttcactggattcactactctaagcggggttgactctatttctttctatgctatgagttagcaggtgagaagggctttagcgctagtgtttagcaatccggctgacattgaacttgaactagctgctgccattgaaagagaagagagtgaagtgacttccgggcttagcgcttttccggtgcagatgaataaagcggtcttttatctttatgttgctgtttcggggaatgtagttgaattcgctttgggagtctcttacgtattataaagaagaagatccccgctcgagggctttagcgtttgattgcgttcccggctctccgctaaagccctttatcccgtgcctgggtgaatatgaatgtctttctcccggcttactacgatttccgggtggtgggaagaaagtcattgctagctctttgaacgaatacgctcttgggccgcaagaagagcatctctctctgtctattcaaagatccgagacagctagttcagttggtgacataggttctccgtctctactctcctatctctcaccctggttgggctctggcttagtgtgattaaactgtgaatcgagtcaggaagaagaagtccagctccaggcgataaagaataaagaaggctatggggaaagatcccagacctggctcgctccaggcagattcaattctttctcccccagacccggcataagagaagggctttagcgaagaaagagatgcggatgaaagtgatctaaagtaagtagccgttacttctgatcctagtggctatggctcaggagcgggataacaaaaagtaaggattcgactagctttctcacatagttcaggttgaatccgctacgcacctttggttcggtggtatcctgtatataggagcaaggcagattaaaggaaggaattgataaagcgtcagttagttgaaatgtcagatctttcactcacctcaccttatcccattgcggtgcttcgtggaagttttatttggcagaatctatcccaacagatcatagaacttaccatctccaggatgacagaccataagttcaaaaaggtcacgtacgggcactgatcaaaagcacatacattcattaagggatttctcctcaatcaaagtagtgtaacctagctcaattcgcctcattgattccttctacaagcctgaaatctcgactcctcctttctttctgagcccagccacatttctatttggttatgctatatgctagtacttgttgcgggggcaggccatagacctactaagtcgctagctatatatatataatttgctcaagtgtgaaagcggaaggtcctgcacataaaaaatattccactgcagagaccttttaaagcctttgattacgtggtcaagacccggtactagggtatgagatgtggcagaaaataccccgaatgggtgtagaatcaactcgcagaaatgcccggtcaaagaagggcttgctagaactctgaagaaaggcttaaagcagagttttctcactaactcaggaaaggctcaatcatcagaaatggttcgaggagagcttcaatcgaaaaagcctacttattctactcgaaaaccctattaggcagtagtggcaagcacagcagaaaggggctttcctagatgtcaggcggggaatcctcattgtgtactacctagccgactctcttagtgtatcaccggagtatatctaatgtctcctaatgcagctacgaagggcaatgctttgtggaaaccgggcactgaaagagagatttcaatggatacttcaaaagcactaagacagtcggaagcgccccaagcatgatctgaaatcataccattaggcttccttccagtggttgctccggttccttcctcctgcaatgaggcgctggcgctgaggtctgtaagcctaaccagaaaacgagaaagggaacctaatgttccacccattgactggtttactactggattgaatggaatgagaccccatttctttagcaaagaatgaacaacattgagctagcacgtcagacttgcctgtctacttgagggaaggtgtgaatcctgtcttctgtgaacagcaatcgcgtaataattctcgcctgttattgtcgggtttggctagcccatttccaatccgggcttgggttgttagtttgctagaacagggctttttgattaggaaaacctataatgaaccggatatctcctcagaagttagatttggaactactatactacaacctccgctcctgacctaccaagcgctaagcgtacctacattaatatactttcagacatagctccagatggtgttcattctagttcttttgcaactgattatgaaactcatttcgcagtatagggaggtgggtttaaagacggaaaggaagaaaaaagctcaacgcgcgccagagactgatgaggcataggatggagtcatgccaaagccagtccattgcctcaacgttggattgatgggttgaaatcgcccattcccgatagcctaatctattttcttttatgcccatctcaaaatctctcgtttcaagcatttcatccccccggccttaaaacgtcttcaaacggtcacaggaacaacataacgaaacaaagaagacgagcccttgaactgccaggcaaagacggagacctgagattgagcctaagaatctgtcaaccgaggccttcgttctcaaacactcccttatttaagaatcagctttccccggtgtaaggatgaaggccgtaccccttgtgggaggaattgttttagtcccagctcccagatgagaagaaggaagcccaaggaactgccattaatatgaatgagaaggagcggaacccgaacccagggacgtctgatcgctcagattggactcttcttaatggtcacccttgggaggactaaatcaaaggatcaatcacctagcctgtcactgctgtaagctaattccgattggatgcttcttccggacctctgacagctcaaccaaggcttcctcttcaagattcgacccattgctagatgcgagatcgggcactgcagccttttcatactttcctcctgagtctgatggaagaaaaccttgacttctacattgcgaacaacacaaaacatccggaaatagactactcccatatcctacgctaaaatggaaatatcctactctgaggccaaagagagagactcaacctggtgatgccaatccttgataacaagaacacacgagcaatccaacccgttggatttccttttcctcttcccattcttacttctgtaggtttcccggttcagcaccaaggactaaagcgcctagtccggggcacatatagtgctcttataatcctcctcctcccgtaatattagttaagacggctacggcttgtaggtgaaactcacttgtgatcccattcacataaacatctctgattgcattagagagaataggtaagctttctgtatcaatgatctcatcgcaaaaagcggggagggtccgggtagcggataattccgaaggtttagaagttcggaaacttgtgcatagaggcagttcttaccagaatctacagcacgctgacacagggcatgaatttcaggggtttcttccctatgattccacataaactgtgctaaagcggaaaaagaatcataaaaggaaattagtgcttgttgtctgtccatcttcaaatttcttcctttcttgctccttgctcgcggagcggcataccgaaaaaaagaaggctcgagagaccagcccataggttatccctacagctaccttgttttgccaccgagaccaaccacacctataattctacacactagccctctctttttacctctttcatccactttacaagttgacggaaaaagtagctatcgacacccttatctgacaattcggacagatatcccaataatggaaggggatctctgccatcgcttcccgttacttcggtaatgacccacgaccactgttgcgaagactggggggatacgtatttaccgtcagcggtcaaagagcggataagggtgataagatgcctacgaaattctgtacactgatccctttccggatctttcttttttttcggtttacccccaccggcgtcactcgagcaaaaggtgtcgggcttctgtcatcacttacgagaattcaaaactgactgaaagatcttaaggaaaaagagccaacccttctattcctctcccgagcttgagctttcgcaaatctctgtctgtctagccaaccaattacgcttaccaatgaatgatatgggttttcaaaatgcttaggcctccttcggttcatcaaggaaaaaccctaccctccctttctgtccttgaggctgggttaattgaactaatcaaagtgtcgcggaagcccctactacaacctttgctcaggcttacaggagctaacgttgaaacgtctccccggatcgagattcgaatcttccgctctcctttcgctcctctcacattcgttcgagtggcttcgctcctgaaacatccacttcaattgattctacttcatctcccccaggcacccctttctctccttaccagcctggacaagacggatgggatgaaggatagcggacaaagcaagccagccaacaaagattgatccagttgctgttggggactttcccggggatgggagtccttcatatcatatgaggattcacctctgaaactcgaaagagtaccctacgcccgacaacaagaatcgcctgatccaattagctgttgccgactttcactccacctcgcttccttccccagatgattttgcctactcattgaccagtgacttcggcatcgagacactgactcccagatcagctaaccactctttgtaaggcagagctactttctgatcccgatccccaatgacaatatcgtcaccagtgggattgggggctatgagttgaactgaactagacctgtaatcaaaactgtggacatgggttaactcctatcctgtaggaactatcccacattgaatcgacaacaagtatctttcctttcaaagattgctgcttgaaacgaagtctgactcttccggatacgcaacgccccttctggaggccttacgacggctacttttattgaagaattcggcgtaacgactgctttcgatggcaatccttgattgatttcggaaggggtgcgaaagagttcaacactacgctcatttcgtagctctacgatttcagggtaaaggatttttgcttagcgaatccccttgcttttatgaaacttttcacattatctttgtttttctcgatgctttgaatagctatccggatagcagaagtgcaatcatttgcgaaagctctttcttcgcgctcttttgaatctaagttctattcgtcctcgggcactcttccaacttcaagaaaacgatctgatgtctatatgcttaacacatgaaattggccttggctagaatagctaataggcgggtagattgcttcgcacctgtctttcctctttcttacttccgagttggtgagtcacttgctagtgtcgacagcctcggttataactgtctctagaatagctaataggcttgcttccttgctagcatgccttgtggcgaactaaactgaaaattgattatataaagaggagttgtgtctttcttcaaaagagtcagatagtggatcgagaaacctccgcccaatagagcctagcccgagagaggtagggtacaactcttacctttcctgtgtggaccgaaatggtcccgcgaagccgatcaccggtagcctaagatcctttcttactattgaagaaagatagaacagagagtacagtagtggataaattgtggatgtctatccaggaagatgaatcaaaaagatgtgaacatgaagaaagaagagagagggaatgctttgccagcgaaccagtagcaatccggtgaaaagccagtagcacgatagcagttcctcggtctcagtccattcaatccattcagtcaagccagtcgcaaaccggtctgtctgtcaatcaaggaagaaagctctagttcaaataggtaacccacgaaggaagacgggcaaatggttgaaagctagtacggtaccaataccaatgctttgattcaactagtagcgaaggtgccaattggtatcattccaatagctgtccaagggtcaaggggtacacagccggtaaaccaatctgtcctctcactctttcttttccattcccatcgggatgtgctaaactgctttcggttttcgctttatgcttgatagtttactttctagggcatataaagttttgtatcatacgagatttagtgcaaggagcagcctaaggtaaggcaaagaagtcaaagaagaagaagtagcgatatgccgccttattttattattataaaggctaagagactctctttcacttgacgagctatcatcatgggggtataaaactttctcagtgctacccaagccggcagctgtctgctttgtaactgggcaacctctcgtagactactgttcttgtcttggcctttgttcacactatcacatcatatggtagtgtggttggcagcggaagtgaatctgattcagaaagaaaagcctagtcgtccaaaggccctaagtgagtaaggtgacatacgagagggaacttctagaaatggaattcttccccgaaaagaggtccagacgatgcgcactcctgatgggctcaccaaatctatagcaaaggaggtatcggttgtgcaagacctgaaaactgtcccatcctagttggccgggaggcatgggaccttgttctaccagtcgactgagcggggagaagaccagattcataaggaagatccaaccaaagatgccactgccaccgaaccggtgaagacccattactattcaccgaaggttaaggctttcttagagaaggcgggatactacttctggttcattttgaatatgtaagcctgagtcaatctactattttccgttaaaaaaacgctttcctcatctaaactcgcatagaagtagatggaagcggcgtggttaccatagctcatgcatttctttcaatctcaggaacaggaagaagatggttttcaaccagttaaaccgagaagaaccagaaagaaaaaggatgactccttgatgcccccaggcccggctacgagatccagggtcagaccttcgagtcccaaaggtaaaccttccgatccttccctttgttaaagaaatgccttgttttggaacgctagaggagctttgaagcccttccttcagctggtgcgcaggagcgcccttactttactatacaaggtagtttacttgcttacttgttagaggaaggtcttgaagaaccttactatacaaaaggggctactgatttcatcgttaggcttcttcttgctgtttggatcaagtattctctgctggtggaactactagcagctctctcagtttatttccaggactgagaaaggaggaatcatcactgcttctgaccagtaattgtatcgtgaacctgctactcttctttgttctctggtttaacctgtaagattcaggctgccgtgagctgcgttgagttatttgctgctgtgtgtccctgcctgcatccttctctgacgctgccgcttggagtcaacttttgaggctctgctactcttgtctggaaagtatgtcctaaggcaatccagactttcgcagcagacaacctggaacaactcaatcactactccgaacagtctggacccccttagggggttagggggaataactaagacaacacaaaagctgttacgccattgtatgttccatgttgaccgtcaacaaactcgctgaaaaacggaatggactaagacaaagcaaagaacaactatgtaagtcagccaacgccggtagtaggatcaggagctggaagacgagtgggtttaacacctcctgctcctcgtattagcaatcgaaagcctgccagtaggaaagcaaaggttatgtaaagttaccctaaaaaatgactaaaggcccccccttactagaaagccctgaagaacaagaatctgaaagagaagtgctggagtagctgctgacgctatacgagttgtctggtgcataaataatatacatgttggtgaaaccttcattttctttgtgacagatggtgtgctgttgaactgttgcaaggtcatcttcatggccaaagaagagtcaaaatcaaatggaagaaaaagagaagagagattgaagagtatagaaaggagttgctgttcaggccactgcaattatgttatgtctcgatcggatatccaagaggttacttatacaccaactgtactgctgctagctcagaagcttttggatcaacaatggtaactcgaactggcggaaagggagtatagctttgttgagggtgaacttactgctcctggctctacctcatagagaggcatatttattggtttaaagtcgaggtaaacgactgattcttagtcaactcggttagcttcctctgcttccggtggtgggaccaccgctgatgcggaaaaaaaaggctaggtaatgtatctccaactagctctaccctggtcaataatcggcccggtggtttttcgactggaaccggaatagatcttgggcgaggtggtggtggggaagctgctggtactagtatcgaaaccataaggggcgtttacgctggtactgaagctttgatactcgtgcctacgcagcctttgttcgcatctctcatcgattcccctatggagaagagtaaaaaataagagcattcattagttggacctttatgctaccagcctctgctattgacactctttctatactatacgagctgtaggatcatgagcatcacccacaaaaaggcatacatagaaagcggtttctcatccgggtcgagatcttaggccggtgcggcaacccattgatccaccggaataaaagcgagctgcattggggttagcagcatttgaaaccaaaaaagcgattcacttggtttcaagctgcgtagcgatcctaagagatcagatcagagaattgaagagcggagccaatcacagattaggatctcgtcccaccaattgaatgaaaatggcgttgaaactacccccagaacgaccgggttatagttaaaccatctccggtgagagactcggtcaaccgagtcgaaaaagaagcaccttgcccatattgataccccgtttaaggtattccaattgcaaatcggtatctatacgcctctacttcggtttgatagcttgttaaggagcaccccttagcccggtaggggggagaaagcagtactaattgtgggaacatcagtttatgccggaacaggggtgaagaaagcagcatctccgccgccatatccatattcaatccccccggccctcctgtttacctcattgcaggggtgaaagctgcaccatcactagcgacagagtcattacgctaaaaatcttctagttacggatcgctaaggccttggatgacttgttcctcatattgcctcaggatcatcaactgaaactactgatgcttactcatatgctggccggtccggttaaatccaatggaatccgccttagtctatacctatacgggtagtgctattcggttcaaggtaagcagctgaagcaactgcagggggtacctatccaactctctctgccgctggcattccttgtttgaggcatatcgattatagaagacatatgggttcggacgcgagcgaagggaagctaggtactatggttcaatgggtgaggatgctaggttacctggttctcaaatcgggtattgaaccctctctccctgcaactcaatctgcttctatatcctccttttggggtctcgatctcgaactcaaactgatgcctagctgcctgaatctctgctttcttctactaccagcgggctagctgccttagttatgttatatcgatccctttggttggaggacggatctcgctacatactagaaagatgttaatcgccgcattggaactacctaccatgaaccttctaccccgaaatcccaccacttagagtccataggaggttgcgggatgggaactatcggggcaacaccctaccattataccaaggggaaggggaaatcacagtaggtttctatggtttttattcctcttgctctaagtatatgggacaatctgccctctggtatcgggcatccggaatcagtctcgttaattagcaatttctctcttgccattagcgaatcccttatttccttctggtaaaaggaatctgtccaacctctatcgggcatctagaaagggtcatcccttgcaattcaattgggaaatgtttcacgcaatagcgtgaaagaagtcctactaagctaaagaagcagatgaagcatcgggtcttggagaagaataagatcacagagcatagcaaaccgctaaaccatgtgcgcgtgattgctcgcctatcatgagtttgacttgcgctctaaagctgtctttttgagaaagaccggagagaacctttatgacattcttgtggataaagcagtcggtgaagctttttcttatgttgtttaacagggaaactctggcaaggtctattattcctttttcccagtgggtgcaggcttcatcgaaaggctctccgcctcgtggcattcttggattcgcttgcaaacaacacttctcctctcgccccccttggatcattttcaaaaggctttgcccgactgacttaagagttacacctttattgaccagatcccatgagtgctactaaatggcacgtcagagctcccctctcgtatcatgatttgccgcttgattccgaagaccaaatttccttgtgatttgttgattcgcatcgatagaaccagttgtgtgccacatacatggcgcaaatcccgagcttcctgttaccgataggcagcaatccaagtcgctgagggacctaactaagagttcccctctggacctgagagaagagaaggccgatctcctgcacagattctcaatcaatatgcattgaatgaaggaattggtccattccctggccaatattgggtaagcgcgttcacggatcaagtcatttcatatatgatgttccccatcccgatgacccgcatacgatgtcaatgagcgctaggagaaggaaggggacaatagcaccgctcgcctcgctttgaacaaaataaattatcgcaaccaaaaggagacaaccatttgtagggaaatccattcgataggaggtataggatggaaccgaatccgcttcgcgagggtctcgttcgcacgactaaaagaaatttagctaattgacggcatgctaaggagtaggaaaaggcacgtacgcgggaaattcatcgaagtaacgcgatggattcgcaggaatgaacgaagaaaaagccttcagacaattcaacatcattttttatttatgttagaaggtgcagaacgttagaagcaagtgggcctccggccacactaccaaccctcgctacggcttcttttgaagctctagttctcacgcattctagcttcaagatctggctttcgctttgagcgcgaagcggcttgctgagatcaaatgagatatcccaacctttgattgtcaaacttgcagttcccatgaaccaagcacaggataggatggatggtgtaccaatccatttcgttgggaagatggcgaggatgaaagaaggatatcgagagagaaataggaaaaagagtacggaagctagagctgagatataggctagctaaatgccctaaaatccgtgtacgaaaggtccgcgatcctgggcagtacatggataacccgactcaccaagcgcttaggaacgtgtggtgaaggcggaatagagtttgccgttgaaatgaggacttctggtgtaaccaagtttgaagggcggaatgctaacgaaccggggctacagcacctgtttatcccgaatcctccgaatcagatgtggggaaaggatgaaacatctggacggggtttggattcgaaggtgggttggaccctttactggagaaaggaatggttttctcactctgggaaaaaagagattgcattccttcccgcttatgggccgatggcaacctacttttcgagaggatgcaaaaaggtagcaacatgcattccgttcctcgtcccaggacaggaatggatatttgggctttgcagggggggtttaggacagagaaatggaatagaggaggtactagccagcggagggagaagcacctagctccaagtgatcctattcgtagctcttctgctctttttcttcttccataccggacctttgggctcgatcaactatctgacttgaatgaagaaagacagtaaaccataagctttttcttcttctcttatgatatttctagtttgtgatcgtctccccaatatgagataggttgcagctatagtcagaactccaactgggacaatctagtttaaaccatgaccatctttttatctttctatcatatcgcgttatatattaaggcttctaccgcctccactaatacagtacaacacgaatttttgggggtttcttcctctcttagtattaatgcctttgtccggaggccttcttgcaccagctcttaaagagaaaagactgtcttagtgtatgtcccacgacctgtgggaccgacagtaagtagttggaatcatcaactttctcgatcttggcgggtcgcttacacggaggtagagtcagctgaccgttagcgatcaacatgtcaaagaaggcgtataccttgctttcatcgaaatccccgactttagagagtcgttctttgagataaatttgcccgcttcttttcatccccgttttcgttcttttgcgcaggggtatgaggcctcagagggacaactttttggataaggcgttaaggcggccttctaaccctcggcctatctggtcccgtgcggattaacaccctttcgtttctatcgaaggcagccaaccatatgaaagcatttgatcgtcgcgaccggtcagggtctagcactagacctgaaaatggaagggctgcacttcacgttgatgtcggctatgctttgcatccgatgactcagttcacagacctagtaattcaaaggaagaaagcagatggccggcttccctcctcctagtatccttactggttgtctgtcttttcttttaggccgaataggggaggtccaagttttcacctgatggggcactaatagcgagacacattcccagtgtctcgatagctcataggcgttttaggagccctattgagctgcgcaatcgcgcttctttcgccttacttaccgcgtatccaaacgaatagattgaagaagtaaagtggtttggttgttgtgcgcgccggaggcctaaggggtagtcgagttgcttacgaggggtgctgtacgctaacggtaattacctcccaggaaggagagccgcataaaaagagactctaaacagactgtattagagcagcagtcggacttgttgcaagaaaaggtagttgaatgtgttaggcgaagagaatatagcacgtagaagcttattatagagtcggtagttcgacggcttaatgcttgccaaagagagttctatagcccttaagataaagatatgaccgtaatatttcatagagagagccttttggctcctctgaaataccccaaaaatggattgtattcatgtggttaccacgtcagatggttgaaaaaggggttattgctaccggctgtataactcgttttagctctggacaaaagatgggaaccagggagtcagaccaaaaagaattagttctttgatccatttggtgtccggaaatccctcattgatagatataaagagaacacagctattgaagctattgaatcaactgtgggacttgagctagttggcatatcttaactttttgaatcttcctctatagcatccgattactgattcttaaactgacacaaaggagatagaagaaaatctttgcactgtattcgcgacagaagggctttgtgcaagtgaagaagaaagcttgagattccaagtaaggcattctccccgctaggggaggtaggaaaaacctcagtaaatatatcacccacgcggtagtttacttgcttactctttatttattttctctctcaatgctcgtgcaaagaagattgactgatgccatactatactcttctataaaaaatagttattctagtgcagctaggagagctaactaagactaggagctgttcgggagaactccgattgttgacgattttaaatagacgagatcagatcgtagaatatcaaagtctgttcccgcgtccctggttctatcaaaccagactatttcattccagggagcgctaagaagcaaggccggagtgagatgagcgtaggttaggtcagctaccaactaagctaggaagctgggaagagccggtacggctaactttccggtgtgttagtgtcgttccgaactcttaattgactactggcatgctcaacggcctaggagcgattgcccgacagccataagacctgaccgctatcagactgaggagtagatttctttcatcgatcacccattccccctttacccaatgccctcaatcgacgggagaagaaaccgaacgtactgtcaagggcttactgaggccccatctgcattccttcttgcactagaggccaccacaaaaagccttgtgccaatcccgcagcgtcgaaacctttctcttgaaccacgggtcgtttcatacccacctgcacttgcaaaggcagacgcatccctggcttcgtacggatagatacacgtcttcgaatctctaaactcccaccctctatcggaactcccatacactcatctccatacaacatgtccgcccgtataagccaagtctaactcttctgagtagtcaaacccccacggagcggtaaaagggctgggacgcttgagcaggggctaaagacaggtacaggtgtgactataagcgagcactttactttccttggtctgcttgttcattcggaggattgaccaagagcgctcggtgtgatctaccgacggcccatacgtccgtttttcgtacctcacaggtgattcaccctaaaacacaattcttgtgcgtattgagggcctctgaatcgatttacctaagactagaacagtccccccgggaagtcgggttccttctcttctttctacccgcccacggcccgttccccggaagtgcccccaacctctaaaaccttacgcggggggatagcatagcacagtacttcgggcctggagtgaagcagtctggttctttagaacctggggcgaacgaacagctccttcatctcggaaggacaactccttcacttttaaataaagcgacgccccaccgtgcccacccaacaagctaggttgcttgcaatacaatccgcaatgcaatcattcagaatgaaaggatttaacaactctgggtagacttccagtttcataacagcaatagcaatagctaaattgcaatagctgtagctgagctacctaacaagaccaatcagatcattttcagtccatcgctcataaagaaccaataatctttccgcagcccaaaagaatggcttttatcctaaagaagcaaggcccttgcgtgttagacgctaccattttcttgcttgtgcatgccaacttccaattaaaatctaatagaaaagataggtctcccgctagtgatgcggcctcgctagctttctgataaataagatgaaactctataaaatgaaagtaatcacacgactatctatataaaaaagaactcgcgggaccaaaagaaagattgataactgatgtcaggtaagggataccgccaccagagaagcctgccgttgagccggcttactcgcccaccatgtcagcgccttcgggttagttctttatggagtgctttctttcataacaattctccttatggaagtcccccacaagatcaagaatgcttgttgccgcggctttcttggtttggctggctcagttgctattgctacggttgcttgcaagacaattgcaataagccgcttaactgatttagtttaggccaggatattgaatatctgggataaaaaccaggctgcgacccatctttgcaaagcaagagcgaggccaagaagcagcaaagcagcactcgtacactagaaggatggggcatggtggatcgcaaccatgctacagcggaaccaccgggatatttgtaaacaaccgtcgcaagcaacctctcatcggtcttgactttaggagtatagctctccgaatcagcaataatttgccttcgtcggcttactattcaaaaaacctcttccttgcaagcaacatcgtcatcatagatagacccctcgatatcaactaacctcttgttctcctggctcaacgaaatgagcttgtgcgtcgaatctccggactcgaaagaacgatgtcccgtttccaaacacacaccttacttcggaaaaaatccttcttcctgtcctcagccccccctaacccgacggctgccccactttagtgttcacgtagcattgtaaacaacctcttgcaagcaacctggttatgtcatacccatatcaaaaaggtaacaaggtttttgaacccctcgtagcgttagctatagctacttttggcaaagaagccatcgagctgagagagatcctctctgctcttccaactcgatcttcggcgggatcgaatgctttcccggtagaggttgcttgcaatatcggctaactcaaatgaaatagagacatacattcttcttcctaaacctgaacagcaagcagttcttgacggaaagatccaatcttctaaatttcgattctttttgagtcactttcatgacttcacacaaacctaatcacgcaatcgaagtgttagccttttgcaagctcacgcttcagagggattagctatctcaaagcacgtgccctctcttaccaaagctgtcatccgaaaggcttgttctcactataaactacgcaattagctgttcgcaggagacagataaaaaataaatggacaagaaatcccgtcttttgtttaaagaatagaaatttagtacgggcgtcatgtacctcaccgatgatgcgatgctatgcgacgacagagacatagaggcgggacgttgcactatcaagattagggagggaagagtggaagcttcagttccttcccgagaacgtagagtaccttgcccgtcagagtataatgtgtctcaacaggctcggttcgggactatgtgaagcagttcacaaccgtcgatgttggacgtcaccgagatgggggagaaggatcgactcttcttctcatggactcaaaaagtgggcggagctagagttgccaataagtgaaggactgggcttccgcactcgctgcagccgagcgcctcgaagttcaggcatcaggttggacaaagaaaagagaagtcgagtgggcctatataactccaacgaaaaataaaattggaatggatacgggactgtgatgcggcactcgaacgagaccgtagtctcgggaggaacccctaatcgtacatttccgtttgctttttgtttgtagtaaggggtagacgagacaaggttacgcgctgggtagcgcgtctgtttcgggtacagaagcgacgaggggtgctaacccggccacccaacccagcaggtcaggggcgggccataggttcgaatcctgccacctttcttgtggatcatcctgtggttaccggataatgggaataacaaagcagaaattttgaaatgagcacgagatgtcaatatatgaattgtttcattatccgttatttctgggtcttttcgttgcattcacttacaacaagaaacaaccacctgcgtttggtgcagcacctgcattttggtgcattcttctttctttccttggtctttcgttccgtcatattcctaataacttatccaattacaacgtattaaccgctaatgcacctttcttttatcaaatctcagggacatggtctaatcatgagggtagtattttatcatggtgtcggatcccaagtttttatggattccttctttgttaccggggtcgaccccaaagccataatgtatcaaaacgaggaggccatagagaaacttttttttattcctttgtctcgaacttcgtgaagaactccattctatctcgccctcgttacgaacaaaaaagtggggctgcgcaccagttgtacactcccttccttacatcccttgttgattctgaacttcgttcgcgaaggaaccggacttttgacgggccagcccttttttatgcgccgctttcccctgaaaggaaaatgagctttgctcctctgggcgctaggcgctcccgtggttcgcgagaaggaaaaaggatgagtcctttgttgcatctgacacgagatgataaagagagagcttcgtctatcgatgaacagcggattgagggagctcttggcattgctttgtttttctctcctttcctatcagcgagttccgatccttttgttcgaaatttcttcgttcgtaccgaaccgcttgcagaatcaaatcctgttccacaagatcctatatcagctatacatcctccttgcatttatgccggagccgtcgccagtgctatggcctttggcttatgtagatcaaaaaagatgaatgggattgtggcactccactcgccgccaatgcggaaggatgccgccgaaaagaatggaacgctgcttcgctctgctggatgcgttggatcccgtataacaagcgagctttttaccctcaaattcaaagatgctatttgctgctatcctgctctattgttgcgtagcaatagaagcctgctcatgttgcttcggcggcgctttttcgccttctcttcgctctggacaggagcgctagtggacacggggaaggagcaggcgaagcgtgtcgttcgtaatgaaaagaaagagaccactacttcgcctctttgttggaccgccggcgcgaacacagtggtctctgaccaagaccaggaaccaattctaatttggatcttgacatgtcggtggtttttaaccgtaggcatcttgccaggaagttggtgggctcatcatgaattaggtcggggtggctggtggtttcgggatcccgtagaaaatgcttcttttatgcctcgggtattagccacagctcgtattcattcagtaattctaccccttcgtcattcttgtacctcccttctgaatattgtgattcttccatgctgtgtctcaggaaccttttcaatacggtccggattgctagcttccgttcatagttttgctacagatgatacgcgaggaatctttttatgttggttcttccttctaatgaccggcatatctatgattctttgctgccagatgaagcagcaggcatcggtccgtagaacctataaaaaagagatggttgtggcgcaaagtactcttgtgcatctaggtcactcggctcgcgcgcaaccccgccccgttatggtatggaataattgaacttattgctgggctggttattcagagccagcaattggctgccggatttcgctccgcaactagaagaagatcgcttcggggggggaggaagctgggccatctaatagagtagtcccctatccctatcagcccgatgaaatgataggggagtggtgaggtgggcctcttccaccagattactttacttactttcattcatgaaaaaacagtacaggaactgatttaacaaaaggggccgagaactacatagatctgagactttcttccctggtctggggggtagtttatgtaggcaacaactgttcctaggtagctcgatcgcaaaaggccaaattcatcgttgtcaaagcacttatccaatctggctctttagtggagtccgtgcccctccgttccaaaggtcaaagaggagtacaagccaaaaggtgccatagtcgtcgcaaaggttcaagcaaggactaagtcgaaagcaaggaggaagtaggtctcaaaagaaaaaggaggcggtttaagaattcccaagcgcctagtcagttgaagggtcagttcaaggttagcgtccgattgtgcgcaatgaataaatcaatgtatttgcggaaaatgggacgctgaaggtcaggggtagccgatgttagcaacttcttaacctggctgcaccaccttctttttagtgaaaggtgagctacggtgccccaaaccacaagcaaaggcacgaagtgtctcgtctctgcataaaatcctatctccgtaccgagcaaagcgcaatgtggtaataaagaaaagtctgggttcggtcttccggtggacggcatcgatcgtaaggtggatctacagtcttgaagctccttctcctgagtcgacctttgcttttgggcaaaagggggcttccttgcctgttcttctagttgactacgttgtggttccttctttccattccttggaaatggtgtccgtgctactgaatcccccattcatccgctttctaaggtctccccctttcctggtgagagaaagccaacctcagctagatggaatatcataccattattctgatgattctattctgcattctccgttcaaaaccgtctactctataactaaagaaagaaggaacagtagatagtacactgtgcttctagaagacattcttagcccgggtgaccggatttgagtccttgccttcgaaccaagggcttttttctccattttcaatgtttcactcgtttcactcaccttattcaactgtcttgcatggtattttgggaggacctttttcttccaataagactattggggcctattaatcaacaccccttggggacccccaggctctggatgacaaagcagcaaggaccttccatcaacaaatctggtcaggccaacagccaacaaggggctgttgatgggacaaactgattgatgggagttatttttgttgttttacagagtagacaggcttggaggggaggggcatcggtaaagcatctgtagcaggcggtagtaagctcacattcctgtttttgttaattaaattggtaagcgttagcgcccctttctcaatcaagttctttcgcgcccttgcttcttgctttcgagccggaaacaacgcctttctgagtcgactaactagaagaaaagaagcccggacatgtaaacctcctcatttagttttcctttcagaaaagcattccccacatctcactggaacgaaggctactttctcaccgtggcaactgcaatcagagccctacaaaagtaacctttgccagtgggggttttctcagaatcgataccaagtgagtctgaatttccctcaatagtggtatttccgtcaggaagaggtttgaacccctctctatctgataaggtaatgaacgacgtcttctgcaagactggcaattcctcagacatggcctgctgctactgaggtctgtaagcctcactatcattttgcggcttcaaagaagaatgaacaatggcaagaaaagcactatgctgggtcagacacaaaccatatgggtgtcacaaataagaacaacgtacctcaggcaaggacgaaaggccaacgggcaacaccatccaatcatcttttgataatacatataatcttccaaacaatactgccgacaatcagacggagcataatcttttttcttttaataaagacacttctcagcacatacagatttcttccgggtttctgcttcattcaagtcttaattcaagtaaggtctctcgagcctcccgctacacaaccggctagaagacccgagtacgaagtgggccctgacggaacggaatgaaacttaagaagagaactcaggcgctcattgattcttttctagtgggtgaagaaggctcgagagaccttgggttactacggcatgttcagtagctattcgcttacgaagtggctctctctcttttaaagtaccacttctcgcagatcttaggatactgtcttccctatccttgctaggctccgtctttttattggatttatcacatgatatttcaaatttacctattcattgttatttgatacattgaggtcggtaacgttggtgaattaggtgttgatgggggtacggaaagagagggattcgaacccacaaaagcctacatagcagttccagtgctgcgcctttttccaaatgtcccgtaagtgaatcatctcatcgattggacccatggaccaacatagattgggctgggagtaagaggtcgctgtccgaaggagtgatcctggctggttggtcacgcaggggataaccattgagccaagcagattgccataggttggtgtccttgccgtcaccaatgacacgtactattccgctttggagaattggctttttggcataaatggacttccaggaagagtaggccgagtatttaggctccacatctagtggacagctctcgggaaagttttttgctttcattattcggcaaatgaagtcgcggtacatgtgagaagtctccagagcaagcttggaaggccgagtttttgagtgcaagagaacgaagggcaaggcctccctcctgccagggttggcagacggaccaccaattcaccgcatggatttttttactttcaccttgggaccaaaggaagtcacgttgcaggacttcaatctgattgattgtgtagataggaagcttgaagttgctcaacatgtgattgggtatccctgtacttattttgtcggggttttgcgcccaggtcagtagctgacttttccaaccttgcagtctagaacccggttgactatatttctcatttgtgcttttgtgggccttccagtgagagggagaatgccctgctagtctttacttacacagaagaataagatggatagaatgggatttcaagggaaaatagcctatataagagaaagagttccccagcttgaagtcaaggcaagtaacttcttccactagtgggacatgcccagaaggagctgctagagtaggttgctcaagaaggctgttagggtaatcaaacctgcaatcgaatccccagcgactgttctcgctgttgtcggaataagcgctgttaggagtagcactagcattagcaggagcaggaagagtaagtagcacgtagcactatgactttcattttggaagaatgggttgtttccaggacaaatagcgtatataagatcggatgcagacgcttttgggacatgaaacggccatttcgcctagctagtacaatcttgatgccgagaattcggaatagaatgccctctttggaactggtagtgtcaaagaggcgattctcaacgcatctgagaaggcaagtcttttacttgtttactgtttcgaggtttagcaagaggacaggataggctaaagagaggatgaggctcgagagaccttgctttgaatagcaggaattcgtaagtggaaagacctagcactttttttgacactagacataggctgctaggaaggaagactctgaagccgattatcccattgtagcaggaaaacaaactataaggtaatcgggaaaggcagaaagtcagaaaagtattcacttcttgcaaagatgggcctagaatactttaaaggactaagtagggaggaggggtaagcgtgatttggaagctttcaatagagtctgagacttcatatatgcaatactcctcaaaagccaaagccagatgcatcacttacagttcgtcggtatccccataatacggatttgggtacccaccagcagtcacttaccagtagacccgaagcagcagcaccatctcgcctagtatcctttggtgtcacagcttcccttcaagttacggttccaggaggtgaagataaagcacatcgagaccctgacggaacggaatctagaggcaatgtagcaagagcgagacccgtaaaaagagcaaaacccagcaggataggcatattttgtagccatgatcgtgataaagatcaagccagctgtgtacccaggcaaaggacacagaggctgaggccgccccttaccttatatgctgaaaactgctagaacaagcgtaggatgctgactacactacatctatatagaaaaatgaagctctatcttcctgtcttgccttctttacaggactactatcatgaacaacccgaagaaagtattcaagtaggcaccttctattagggtagatattgtttataatatggcttactaaagaatccgtactagcccccttctccaccttttcttctccctactcttttatttctgcttaatcccccaaaccgggggttctcgcattttggtcccctctccaaaggaggataccgtcgggagagcgctgctccaaattattctgggaaaaaaaagaaccacattcagacccagcccgaaatcccgaactttttggcagaaatcgacctgtttaggtttcggataaaggtaccttttttgttgaagggtcgtgggggagtattgcatgggtgacttccacgccgtagcgcctccggatattgttggctctaggcatttgctattaaaatcccccttttgattaccctgcccctttctaaaagcggaagaagacaaatgggctaaattaagaggagggtggtagtaggtctttcttacttactcactcgtaagtccaagcaagcagccaatccagtaagtaagtggagcctagtcaactactgtagagcccattgatcgaactttgacaactctacccacttctgattccggaaaatcccatagcatagtacatttgtagataaataggcgacatcattgtaaacatcaattccaggaactagatagaactggtactggaagtggctcaggaactatttcaggttattgctctgtcaaattttttttggtcactccaaaacttccatgacagaatctgtacccccctatactgaaccacggatgaccgtgtctgacgaattgtgcatatcttctataggagaagatattttatttctctgccgcggagagacttactcttcaattccattaatacaaagtagatgaccaaagccattacaatgaattagtccatgcaaaagagatgggtttgatgaagatcaaaaacagcatcatctagtggaattatcatatgagactttcgtttcgaaacaaaatggttactccaacctacagaacaaaccctactatactaaaaaaacccaattgaaattcttacttaattttaaaccaataacaaacaaatggaaatcagaatggagccttaccagtgcaacggcattgatcccagacgaaaagggtcgcagacaattctggacgctctattcaatagtagaaagaggagccacaatgcttctgttctcgtgtacaagcacgatgcagcaccatgtgggcatgccgtcgacgttgtattcttcaatctcggagaattcttgaaggaggatccttatgtttgttgtcgcgaaagggacccgaggggttgatcggacaacctgggtcggaaaacaaacgtgtgtaatccgaatagcttcggccttcgcttccactttctgcaaggttcaatatttggattgacatggtggtattagtttcttccttcttctgcagcatggcttcttgaatcttattttaaacagggggagaaagtcgatagctaaaaccagatttcaatttcatttcaaagcatagaatattgtgttatttttcatcacagaagtggcgttcggatctgatctcaactccaagcgcgaaaatcccttttaaggtaggaatataataagcggagaattggatatcctgaatcttttttgtctgtaccgtgccagttctgccgctcatggatatactatactataatataattatattatagtaaacaagtaaatgccctagttctctctctctctactggaattgggcggagaaagcgggtttttcttatatatttttccaccccagtctaaggctaagttcctttagttcaagcaatcctaatagacttctttttccccaccagccgtaatgtcttcctaatctaatccatagcgatctagccgagtgaggtaagatgtttgagtttgatattaagtaatatcaagtcttgcttagtctaaagagccagcttagagcttagataatctccctaagtaaagtaaagaaaacaggcagccccacaatagcagactaagcctatacagtagttggagttcttattccttttagccatttaataagaataagaaaatgacaaagctcctgtgaactgaactaattcaatacccttgaaagccgcagttccttttcctttttttgtatgcaaaaaggtaagcagggaagcgagtgaaagattatcatatgatgagaaagccagtctctttccatccgtcccaattatttaccgcagtcccgagggttaggatcaagggtacggtcgagttccttcgccccttgaatatcatacctagaaagagtaaaataaaagtaaagccagagctagtataagaaaaaaacctcctgtcccgagttggcttaagccatgcctttactaaactaaacaattctcgccatctcagagcagagggcaagtctcaccccacgggcacagctttactacttccaatctcctaactaagggccttaccaccaacatcgcttcttccttcaacgcaacggcgaattcaataccagcttcaccacgcccttaaagcgcttaatctagttatattactggttaagttaaaggctaggaaaagataatctcttgtagctagtctttttaattcgctttctgctatctttcaaattgaagttgaagtctgagttgcagcactagttccagcgagtgggagaacctagggagctacccgggattaaccaagaggatactaatataactatcaatttactatggatactaagtctttgccaaatcatgacgagtaggtagttttcttctatgtggttgcctttgttttatcttcaccaagcgagttgaataaaaaagcgaaagatttttagcagggaatcgtttctgctattgcccttaagtagttgataatggggactactatgactacaagggtatcctccttttaaacagtctattcttatactagggatttttggttacaagagcaggttggttataagctagtaagtcagccagtgagatcaagtccttttggataaagtttacagcctttgggggtgtctttacaggcgatttccttggggtttatgggtatgcttacccttttaggttcttttctccgttttaactaccctcagaccggacctgtagctctggcgttagaacttgggtttaaggccgatagaaggccttagctgttggttgaaagagtaagccaagccttctttttttcagagtcaagtagactaccttttctgttaggagctagaagcttagaagcagctaggggctaggagctaggagttagagaggaggaggggggaagaagtcactcgtatgaattgttgttacggttacggtatgtagtgctcaaccgataggaacgagctacatactttcagtgagaaggagatgggctaaaaaaaagcgccttgcgcactaggagtttgaagatgcccagagtacagcgcaacttagaccttaatggacgagaggctctttcttattctcgaattccctgctcttaaagactcgtacaaagaagaaaagaagttccatgccatggcacttgccttcccttactcttactaatactaatgtgcaatcattccctccctcacatgcatttgcaacagattctaactaagaccggtaatctccggccattcttggcatcttcactagttgcccctcttctcaaagggctttgagaagaagatgaatgtcaatgtgccattttattctttcttcgggatactgcttaatcttcttttccttcggcgaggataccctagttcaaatcgttttaggaaagtcggcatttttagtggaaaggaaaggacttataccatgaacggactctttgccttgggtcaatcagttccttggcttactaatgaccacttcgagaagaacctatttgaaaacagtttaatgccacatctgactcaacagctccttcttccttttcttcttcatgtgcacaagccctttatatgcaaccacttcttgaacaacctattcctattcatgcgacaacagcacattctatgccatcttccttatactattgattaaatcaagcgattcgtgttcaattgcacaagccattctaaggaagattagaccggcatctgccttagccctgtctccctccctagctaattgaataccagcttcctcttatattagtattatatgtcacttccttgtcctattcttttagtatgctatgcatggggctgtaggttgctttctttgatcttatctgctcacgaatggtctgcttaagccaataagatcgaaaaggctatctccgagtggcaaaaaagagtgcggcacttcaagcaggaaggatgcaaagtaatccaagggaaagctagacctcgagtgaggaaagacgggagccactctagtgacctttgggtccgtactaaccttaccagttattactgcctagtgcccaaactgattagagagttgttgaataagcaaatcggctgtttacagttacagcaaacaggaaagaagagcagtcgtgtggaaggtctttcttcggcctttgcttcctcttcttagcctagccgcttccaggtaaggagaaagaagtgaatccgaatttggcgggggaaggaactgaatataacaataacaagcaagaccaaggtatatgaccaaaaaggccttgtcacgagctggactcgaaccagtacctctgggagcaaaagacatacccagcgaactacctttcattctgatcatgactttgaaaaaagaaagaaggaaaagtttttttacggatagataacacactagggtggaaagggaaggctgcttctcgggcaaggttggttgctagcgaggaagcatcaacatatgcatacgcgtacgcagatgaagctagggcaccaagaggatctagctagcctcatttcgtcgctcttgggctctcgcttactcagccctcaatgaacagagtcgggaaagggaatcaagcaagagcgcgttaagggaatgaatgctagcttaagcaaagcagttgcgcggtcatagaatctaagaaggaagcctttgtgcgtagagcgctcaagaaagacaagaaagaagacaaagtgccgttagcggtcgtcgatgaaccgagttgtgtcgattcacagaagcggcttggttacccacccacggaagcaggccgtgcagtgaagcaattcagttagcgtgtccggtcagcgattaacagactcgggaactttcatattccttccctctgggtttctagcttatagctgatcccttgattcaccgagtcggcaacgggatagataaacagagtcggcttattaactcgacctcgctcctcggctcaggttggcaataaagctgctagtggccatggcatggttaatgagccataagccaaacgagaaatgggcggtgactctgatggtcagcctatcactcttccttagcgctagagagagaaagagaaggggagatgtaagctatagcgcgatagccataccaaagcaagctaagcccgggaaggctttaaagtgagtgaaggacttcgtctttcaagacaagaatgaagtctacagacccggtatcaacagagaaagtaggagatcacttcttgtcgacttcgcttgctagcgttaacgacttcccttcccagtgttgaggagttcaaaggtcagagacggacattgtgacgagtgaaacttaacaaaatgccaatgttcaggaccctcactttaattaaacctgttgggtaaactaaaccaaccattaaagcttgaaaactctctctcgcattaattgctaaggatccaataaggccaacattgattccttcagacgtgtcaattggacaaatgcgtccatagtgactaggatggatatctcgtatccgaaaactagtagttcgcccactccagggcccaaataactcgattttctcccatgaactatttgcgttaatggattcgccctatccaccaagcgttaactgctacacgagagtacagctaacctaagcgggaagagcatattgaattaaaggaagggaattgcacaggaatgctagactcaactaattgtgccttccgttttgtttactctacttgaagagagtccctagcgtactatactttgagaaagtgaatgctaccgatacttgatcatcctctggcaaaagctgttattgaaaatcctgctcctttcattaagtgaaagcgctttcctcgaccaaaaggagtatttgtttgtacagctcgctatagatagactttaaaatccatactacagaagagcagcaaaggaagaaaaaaggggataggctgactaagagcagttggaggaaggaactgacatatgtttttttcatatggccataattctcgggtttccatggatggaaatgaatcaataggggaagatacccacaccgacgcacagaaaataggcgaatacatgagaaagggcaaggccaaggagaatcctaaagtgactgttcgagaatgtcctcttgcgagaataacctgtttgttttccggacaaatatgccaggaagcaggaaaggaaggatcaatagtcaagatagccacggacagaataggtttttcaattcaatcagaagtagcggcacattcatctgcttctttaacttaacagcggcccctgcttctattagtgaaatagtgaaagcggaatccaatacctgtagcaggaaaaaaccaattgcaatttataatgttagcatgcccccatgtgggacttcttaagtaagatgagcgaagaagggaattctccgatctaaagccagaactagccattggatttgaatgcccacctgagaggataagccgatcttattcgccgacattcaactagaggactgcgtttacgctaggaattgatggcatgaataggctgcctattgaatccgcagcaggagcaggaggagtagcacgttttcgaccaggaacagcagataagctaacagaaaacgatctttagcggaggattttggcacattcaattcaacacgattatcggcataaagcctgtttgccccttcctgacctttctttcggatcaattgctattgaataggcagctagaatagaagaagctgctgttgaatcaatcagctgtgaacgaatcgaatgttgcaagaagaagagctttggttatatcttttgtcttttttgccaggttagcctttctttgaaagaatacggggttagagccgaatctaatatgaccattttgaaagaaggagctgcacatgaagaagagagaaggaggacaggagtaggggggggtgtgtaatcaatattgcatcgacgtttatgtggacagataaggttttgaccgcttcccttagaatctttttggactgaacttgatccctttcgagctaaatgccaacaagagaaagaagaactagcgactctccttctcgacacgagaaagcttgagttttgtttccagctaagagtgattgatgtcataccagtagcccttcttccaacaaaggttattccgcctgcgggttctggaacaactccaatttctcttctttgctctgattcaattccaaaaaaccttcttgcaaacaagccattcgcttccggaccaggggatttgcccactgctcctcctaagaccggtaatctcgcatctattgatttcattgggatcggtaattccatcaaagcaccttcgaccttccctagtttcgaatctagtctcggcagcaatcctcttcggggatatctttcatatcaagtggatagcttttgaatcaaaggcatttttcttttttgtgcacaatctcttcccgctatgcaccctctttcgtaggaatccatgtggtgtgggctttatgctttggatcattcctgcttcattctaataggatagaatcctcctcgtacattaactatgccagttgcttgccttctccttcaaagcatcttctcgaaataaagtttagtcatccagttcaatgatccgaggcaagtaggcgaaaaagacgggcttcactttattatgctactttttctcctcctgtgattcttgttcactcggagttttgtctttctgatgaaagataaatgccctctattcttgctaatgcccttaagaaactctctttagattgagacccttttttcgtcatgagctgccctaagcccggaagtgacggaactcgacgcccttcgccccttgaaaaccgactccattctgcctgtactttcattaaagacggatactcttttgaggcctaaggactatggttccacagcccgactgctaatgaaagtcttcctagcctagcagagagggattgggtgcttcttgctttcaggaaagtgaggcatatttatatgttcaaattatcccataggtgtctgctctgatcttcctctctacctccagaactcggaggttctcaggcctcggacgtactttacattggagaggaagcgagttagtaagttaaagaatgaaaaacttggattccattcattttcatttccgggtagaggagcgaaagtaagtatacatacaactaggcagccaatagctaggacggacagtagcagtaagacttccaaccgcaagttaacttgaagcaagaactcttaggcaaggaggctcgagagacctttcgagattcgaagaatagcgtataaaaagagtagtcagaggcaattcgctaatatggagctgtttatatcggttttctttcctctagcatgaagcggggttgaggacaagagaagagtaggggcaatcaaagccaatgccacggggaaggaaaaaggaactgaatataacaataacaagcaagaccaagagatatgatcaaaaaggccttgtcacgagctggagtcgaaccagcacctctgggaaatgaatacaatcccagcgaactaccattaattctaatcgtgacttgtaacccggttcacctttcagctacgtccgggggcgctcggtccttctatctaatctacgccattcccatattttcttttagcagcatgggaaagaggccctgtgggcccgctaacagattcgccccccctccccattattgcacgaactctcctttggcaaggagcgaaaaataaaaacaaagatattaatgaaggcaacttgaagaaaaagagtttccgccaagcgcacccagggttcggacccataaacaagcaaaagctggaaaagaaggccaaagaaaacgaaaaataatttcacttttccttctaaaataataaagaggcaggtgcttcgtgcaaaaattctgcgttcattgccatggaagccctttagaaaaagaaggaggacaaaaagaagtcctacaaatgcgaaaattaataatctaaaaaaggcagcttctttgttttttaacaggaaacaaagaaagagctgatttataagatataaaagcgaagcgagccagtgttctttaccactgcttgctacctttcataaactagatggatgggagaaggaaaaggaaggaaactcgatcgctggcttgaaaaagcgttcatctgcaccggctttcttattcatttacagagcacctctcctcttgcttttcgcttgcaagaacatagactttcttttgccttaaacacaaagaatccaagacagatggaatgaaactatcaggagcgaagccactcgaacgaatgtgagaggagcgaaagtcggaaagggcaaagttattccaacttgaactgcaattcaccaaaaagagaaggcctttccaatcaaaggagaaggtcttcaaaaagagtacagtcttgatagtgccagtgataattcgtgagattccttctgttcaaaaaaagataataaaataaagataagtaaagagattcattatatttttactaatagtaaatagtagtaatagtccctgttccgtaatagccagtggacgaggaagaaagtttgacagcatatcctatttaatttacagttggttggactttaatcccttagagatttttttccacctatcaatcctctccggactgtaccacaacttgtcccaggcccaaagcagaagggtcaaaaacttaagaaagttatcaggcgcaggctctcattaaatgaaaagtaagcgcatttctttcaagtacttttgtaataaaagaagcctatgaagttttggcatctatttccattgcagtagttttgtcaagcagatattcattgtatccctaaactattgagtcattcaaatcctttttctttttcgattgagaaggtctcttttgagatgggttctcggtcaatctgttgaaatgaaagcttgaaggcacaggcgagggaaaatccatagtagcggtcaatacagtttcttaggcaagtagggagtggagtataggcaagcaccttacttttcaagcctttacatacagttcatcgtgtggtataaagcaaccatgctagttgccttttctgtcggtacatgcgagcttacttcgattccagccaattcctccctttaagcttcactctgtcttagtgccatttcctttccaggcggatgagggactcaaaaaaaaaatgttttttggcttaatccgcctttactaaagatcaaggagtacacttgtactccggctaataagggaaaggttttttttttcaaatccaagtttgactctgattagatccttagtgcaagcgctaagtaagcaagctaccttatgtaatgtaaaaaaaaatcgaggaaaatgacgtcaagtagaaacgaacaaggtcttacggcacgatcactatatcttttctttttctttatctctcctctatagaaagaggggatgatacgtggcgtggtatacctgatcatttggtcaacgagacgtacgtaagtcgacatagctccatgtatatgttctttgtttggccataaatagaatgaaatgaaataatggtgagcctagtagggcgacgaacagggctcaagggttattgaaacacctttctcttcttcactcaaagaggcaatgcactctttgaatggtacttgattcataaagaatgaatcttttggttagaagttatacggactttataaaaggaaatgccacgctccgcgtgtcacgagatatggggcgttctaatcgaagggtcatacttctcggccctattacggtaaggccaatgcaccagccagccggtggggtggcgaacacgctgtgctgtaagctaagctgttcaccttgtagacggaggagatatagaaagtgtgccgtgcgtgattcataagattctatagtagcaccagtatattctttttttcacttagcctgcctctcccatgactttccggaccaaccaacccggatctgccctcgcaagtctctctgcatttttggagcagagcatgcaaaatcgagcaatggatcttagaaaaattcctcgggtctctagttgaaggaaaagcccgggtagaagcacaaaaggagagaggcaaagtagaaaggggggaagaagtctagtgctagttcttactgaaacttctttatctaactttcatttttgagtggtttctttgtgctcttatttggattgaaagaaagacaaaacttccctttctttcaaccgacccgacggccagagatatttttttagaaggattctccggataaataattccaaaaaagaaagaagagaaagaaaggcgcatatgcgggaagggggccccactacttcttcattcagggggggagactcaaaccttcccactgggcgagaggtgcacctaacccacctacccactcatcaatcacggtgttcagctgacttgcactgatagacccctattgtattggaattaggctcccatctttttactgttgtcaactaatctcgtcaatgttcgattctactctatgttagaacatttctgtgaatgctattctgatctaagtggtcttattctgtgtcccgtgctaggaagcattactcctcttttcattccaaattcaagaatacgaccgatacgattgattggtctgtgtgcctctcttattacttttttgtatccccctgttcctcggatacaattcgatccttctacggccaaatctcaatttgtggaaagccttcgatggcttccttatgaaaacatcaatttttatttgggtatagacggtatctctttattcttcgtgatattgaccacatttctgatccctatttgcatttcagtgggttggtctggtatgagaagttatgggaaagagtatattacagcatctctaattcgtgaatttctaatgatcgccgtgttctgcatgctggatcctttactattctatgttcttcccgaaagcgtgctaatccctatgttgtgcggagctgagcatcttctattcgctgggataaagcttttcctctgcaggggccttgtgcagtaaaccccctacgggcggtcgtccgtcgtcgtaaagtcgtccccgcgaagctttcgggaagaggggtagtcttgtgtgtaagcatagcatttctggtcgaacccgcccaacccaactaagaagaaccgaacctgacagacacatctttttccttttgggagggtactccgagtagtgggtacctcgtaggacctcgacccgcctactcgggtcttgtatggatatgcaggaaggggtgctcctaggtgtgtgtaggggttgtgtttgttcgcgagaatggattcctcgtcaagtcagtttgggggtgtggacacacttgcgcgaattcgggtaacggctacaagggagaaatcgaaaggaaactgtatccggccagggatggacgtaaactcgtaagctaccgagggtagggataatcgtccaggtcttattgtgaaacaaaaaagccgccccgccacaacaggcgggttggttcctctgtcgtcgccggggagctcttagtgaggagaccttaggataagttgctaaaacaaacgggaggggaggatcgacccgtgaagtataattccgaagaaagactgttggcagcaggtggagacatttatttggcccccttcaaaaggaaatgcgggcagggttaagctcggcagagggttcgagaatagggtagctgcccttaagattcagataagaaaaaagttccaaacctttatgcccgtagttgtgctgcgtacaagttccggctaggataattgggaaagatcaaaccaatttgaaccgctcacatcacagtagtagtagcgtaaaggccgtaagtcgggggcggccataacataaggttattactttcacatctctctctctcgagatatctgtagatagagagagagatccgctgcgtgagcaacccgactgtgcgttacatgtgctctacaggccgcactccatctttcttcccaacgagctcatttatcttttgatttggaagacgggcgttgcgttcggttcgaaaggcatggttttcagtatgtctccagataggcccccactagtccggctagctagtgagtggttctttccggcgagaagcgggccgtgccctacgggcgggcatctcccgcaacgcaagctgcattgttcgccaccacccaagaagcaaaagattcgagagtccaggcggaaaatacatgcatagatagtggtctaatgacaaaggccgacgacggaagctcgggacggagccgtatgatgcggaagtctcacgtacggttccctgagaagggagtggctacctactggagcttcgaccaacaccggtcaattcagctttggggccaccccttactctaccattattataggggtatggggttcgagacaaagaaagatcaaggcagcatatcagtttttcctttatactttacttggatctgtttttatgctattagctattctgttgattcttcttcaaacaggaaccaccgatttacaaatctcattaaccacagaatttagtgagcggcgccaaatctttctatggattgcttctttcgcctctttcgccgtcaaagtgcctatggtaccagttcatatttggttacccgaagctcatgtagaggcacctacggcaggatccgtcatcttggcaggaattccatcaaaattgggaacccacgggtttttaagattttcaatacccatgtttcccgaagcgacactttgtttcactcctttcatttatactccaagcgcgattgctataatatatacttccttgaccacttcaagacagatcgatcttaaaaagatcattgcttactcctcagtagcccatatgaatctggtgactattggtatgtttagtcgggcggcggccgttaggtcacctattttgagttatggacacacaaggccaaaacatgtgtgccgggcgtgcgacccatcaacctactagcaatgggggggaaaacatagcatgtcgcaacaaaagcttgattcgaggcgtcagcaaaacactgccgtctgtttcaaaaacaaaagccccttagcgccccgggacgggagtgggggacggccctacgcgcaggcaacagcagcaccggctctacgaagtcagaatcgaatctttctgttggctttcccaattcattcgtgaataagaatgaaagcaactacgtacctcgcttctagctgcttcttattatggcggctatgttggcgtggcggaaatgaacgaaaagcgatatgaacgtgctattttcaaatcgattgatagatagccggatttgttctgatagatcgaaagagtatgaatggatagagagggaatccatcaataataaaaggagcctagcagcctatttctatctattgatgagacaactatttattcttgatccatcagaaagaaatcgatatgtatctgatggagtctactacatcgtacgtagagcgcccaagcgctttttaggccagctcagtcagttctcttatccatcggtccaatgcactgggcttatttcatggagggaaaagccacaaaaatgtagttgtgttgttgttgttcgccgcctcgacgcattcccttctctccccggcatcgtcccacacagaaagaaagagcgcagagccccggcccgacccgtaggtccgctaacgtaaagcgaggagttgagcctgaactggcgaaccgaagtcactttcggaaccatacttcctacagctaacacgtgtccagtccagcgggaacgcgcagcgcaaacgaacgtgagctgctataccgaatcccccgctggccatcggggaccgagtggtaaggccatgatctgcaggggaacggatcactcattcttccattggggacaggtgcacgaacgacaactccaaacgtcacacatccgtcgcctacctaccgtttaggtggcaccagcgagatccagctaaggtaaggaacttcgtgtcgcggctgctccactccgccgcggtctcatgaactgaacttcgttgccttcccgcgcgcgaagcgaatgggcgctgtgctgtgggtcagtttcggggcggggggcgaagagagaccagaagaatgattcatttggatcgacgagctttttcagccccaaaactcagaatcaatggaatgtctgtctatccatgaacatctattctatctgtatatctaggggatctctttatacacataaaattttattatggcatgatatgatcgcctagccgtagccgcatatcagctgcgctcaatatgcgggatttctgttggatcagatctttcgctttgacggaagcttttggacctagcgaaaaaaaggacttttcgccttcgcgcaagcaagcgcgagagaagcaaagtagacgctttgccagaagcaagacgagggctgtcgtagaagcttcgcttcccccgaccgactaaaatacaacgcgacctactttgattcaaaagaaaggcgaagggtttggcaacaagcaaacggctttctatcatagttgcaagggttccaaaccttaattaagtaccaaaggctgctttcggttggtttcataagggggctgttcactacaagctatcagcgctgccttagattgaacggcaataagataagtcgacgttcaatctctaaggcgggtttccgctgagaacggaatagtgttcgtgtccaaaggtgaacaacgccctagcttctagagttcgctgcttttcccaggccgaagaagggcttatactgctcgcctttgtttgatatgttcattcagtaccaatacaaactacaactacaccaaagtggaagggccactatagaagctagaagtagtagtatagtagtcggcctaacataacaaaagcgtcacgacaacaaaaaagtacccttatgaatggaatcttaagtagggggcttagcccgcccgcctaccaatcaaagaggctgagagtaagcgtaagctcacccgaaagctcgaagagcttcccttcattcgcttcgcgggagccgcacagcacatagctggaagtcagagggcccatattacctgcctaacccctcgctccgagggaccgtagatcggaaagcaccttctaaaccaccccattcatccaaaagagaagggaaggggcctatgtatttgcatgacccctgcagattttaccctatctacacccggagccaatcccctatcggtcctgccgccacgccgcagaacgggagctcgtgtgaaaccttttatttctggcgtaacagcggtggaacgtaacaaaatattacggtcgcgtaacataagggccggaggtatggtaaactcggccataatatgacacccaaagggcccggcgcgcacaatcctatcctatccgagtttaccccttgcacttcggacagccgtccgtagcatcataaggtctctcgagccttgtcttccctccaacgactagcttccgtttcttgttccggtccgacaacggggacgctgcccttctcctgccgtggaaggacttcagcctgtggtccaacccatggttgtttttttcctcatccccccattgctcagtgctccctgctgcttcgctgggctttacccgtccccggcgtggacgcgggcttctataagagaatgagaagctctcaacacaagaaaacgccaaccgcgctacgcccacccgagttcgttttctgccgccactggccggccgctggggaaacacagccccctctcgggaaacggggggggggggagtccaacaagcacttgctgcagagggggcccacaagcacccggcccgccccttcttcttcagtaagccgacctctttttcgccagtgctgacgcagtgcgcacgtagataaggaaagcaaaatcccagtgggggggggggagaatgggggccggtgcctttcttttacggcctaaactcctatttgtcagccgtggggaactgctgctcggtcggggggaggggaaaggcttgggcctacctatcccgataggacctcataaaggaacgggagctgttgagaggttccatattgccgagccgaagggagggcagcacttctgtacgtgatcgtagtatgtcacgtcgtctcggccccgctgcattgaagagtacctatgcactatttccggttcactgataaggaagatagagttggggtgggggtctacgatgtgatactcaagtatgacccggggagatacatgctaactatgggtaggaagcaggaaccattatgtaaataatttcggggggttacagatctcttatactaccatcgatcgacagagcggaacgactagaaaaagaagtgaagttagagccgtatgataggtggtaactatcttgtacggttcggggggtaatcggcgtactccgatcagtgggggggaatctttggctctatcgaacatacagggaattggaggtagcattctaccgatgttaagtcatggactggttccttcagccctttttctatgtgttggtgttctatatgaccgacataagactcgacttgttagatattacggaggttcagtgagcaccatgccgaatctccctaccatttccttctcttccactttggccaatatgagttcacctggtactagcagctttatcggggaatttcccatctcagtaggagctttccaaagaaatagcttagtagccacattagcagcgcttgggatgattttaggcgcggcgtattccctttggctatataatcgtgtggtttctggaaatttaaaacccgatttcctccataaattctccgatccaaatggcagagaagtttccatatttataccttttcttgttggaggggcgaccgtccgttgaactaccaaaaaaaagggtaaaccaatgtgatcatgacattgtaggtgcttgcgatgggacggatgcgactttcctcagttggtttgggtggcatagcccgttgcagaagtcccccccccccttttttttgatccatttctttagtctttagggagccaaagcttgactttactaataaaataaggctcgcgcaggggcgctcacgttttttggttgagccgtatcttgctgggtgggaccgagataaagaaaggacggagggcaaccatgcatggtacttctcgaccgtgtctccgaggaacagttgaacgagcgattcatgaatgctgccgggttggacgagccaataactcgaacgcgttcggtctgttttttgagcaagaatcacagcgttaccttaccttcaccatgatacggactccaagttcttatggcagagcacgaggggatttctcatcaatatgatgatgggaatggaaaccagaagcacgaccggggtcttcgtggtccaagataataaaaccatcaataacagtaacgtaagcatgagactttttggtagtaccggtgaaccagatggccgcggcgatggaatctgggacggaggactcgtagtatctctctagatctggcaaaagaaagcgaaagaccccctaacgtaattcgaatgggggctaacctgaccgcggagcccactctggcctcgcagggcgggcccctgtggttgcgagctggagcagccatagcttatggctagagcaatgggaggggaccccaacagagagaacagtaaggataacgagcgcggagcccgcttttcgggcggcaggagctgcgggcaagtacttggtaggccaacagcccagtgaaccgggtggggcactcgacgaaaggagagcgcactgagcaagtacgagaaattggccccgctgagctttatttaagatagaatggggggaatcgaaaggaaaggcttccgtttccgttcttggtttgggggcttccgggctcctctcgatcttattcgtagttgggaagggggaaggagtctaaatcaatggacattaatgaaccatcattgatggacgttgcacatgacacgatcaattcgactcaaggtccggcgctaatagaagttgctgactctcctagtagcgaaggaaaagggcagtacttttttcgtagtaatagtgggcgggtctcatgagatctatgccggcaaatacgagattgggccccttctcaaagatttgatggaatggcccagcccacccaagagcgcttatgtcatatgggaactcatggctggaaacaatccttatggttttgatatccggtaggaataataagaatcaaagtccaggttggttggtgagcctagtgataggagactatctagcttggttcggagagcacttgttgggttaaatcttttttttgttgctaaatgttacggcctaaatgctgaactattgaccctacttgttcggatgggtgttcaccccaaagtgttcccggaccgcatgcatacatccgtaagtaacttagtgcaacacggcaaatttcattgagaggaatcagcaaagaaaagaaaaacgggtcaacatcaacatgtgtatttgagagattgtcctcgggctgaggagtgtccacatgagttcgttgaggtgtctacacaggaataaaaacctcttgtatattctgtcgagagttcggattgctccacctaagtagaacgaaaaggaggtagtaatatcaaagggggggccagaagcttcgcttccggtagcttgctgactctcctagttagaaaaaggctctttggcgaattctttagatctgggtagttgagtccatagagagcctttgaaagcttacacaaatagtatagatgaatagagtcttcataaccgggaggttggcctcgacctcttctttgagatctccgtgaaggaaagcgttcttgacgtctaactgggatgagagttgggccagtgctgaatgtaagcgggtgcgaatggtaccattttgagcaactggactgaacgtgacgtctcggcataatatagaccatactctttctttttcatagccttgagcaaccaagtgagctttcttactcttgataaaatttgctacaagccgtttgtacctctatataaaaaaaccatcttacttgtatttgatcttgtaagcccaccttgacccaacaatgtttttgtcaggtggtggaaagacaagatcccaggtttcattcttttgaagagcttccattttttctaacatagctcgtttccaattctcagaagatttggctttatcgtcagataagaatccggttccatgattttttagatttctgaaagacttgtgctcaagtcaagagagtaggaaccataggagaaaaatagatcaataggagtgtggatcttctgagatttggagaaggagataaggggccctgagactcaagagcttcagacaattgattggattaccagcattcacttgcaactcgtagaggctttaagtctgagaatgggctgtgacgtggactggtcatgcctgagcatgggctgctgaaaatccgaagatgaatgctgctgtaacgtcactccaggctgctgctgctcaagattctcccccaaaattttagccgaatccgaatagaagagaaaaatcgactttcatcaaaccggtcctgccctttatgtttatgttcttcactatatccaacaaagaaagactccaactattttcttttgagaaaacttgtttctttgtgaagcatcaatatgaggaaaacagagacatccaaaggctttgaaatgaaataggaatagtctgaaatcttttgaaaaagcttttgatgaggggagtcaccagcaatagtcgacgatggcaatccgtaatttatatgcactgctttattaaacgcttcggcccataggtactgaggaactttgcttgcatcagtttttagcagtctaagtgatgtgcctttgtttaaggggggcaagcaagccactgatcattaactcaatctaaacttgttccattgcacttatggttatacttctcacctactaaatctctttacgttctccaacacaaatgcaaaaaaacacaatgcaactttgctgaaagatgaatgcggtataaattgggggtggtgtttatggcgcacggagtggcagtgactcgcgcaagtcgagtgagaaggaggactttctctctctcgcccgactcgcccccccctatctagtaaggctttggcagcggaagtagggaagaaagaacctcgaaaaaacccggctccagctacctttagcggctgtggggatcgctccctgtgatctcagtcggttcggctgcgactgagacgtctctttagaatttatactggtatacttattatcgaatgcaacccattcgtatttcattctttttttcttgccgtaactttgcttttctttgcaatacagaaccgaagacgaaggcgaaggaagctccagcggatcccaagaataaggagaaaggaaaagtagtcgagcaaccggtcgaatcgatttcgtccgacaaagaaatgatctccgcacttcgtcatgggatgaggggcaactagaatcccgacgctcctccttctcctcccgaggccccttcctcttgttagggtcgattgtttggccttgagcttgagtaggtcgaagattggaggctcggtaaaggccttttcccttaattattagttacaggggagagggctaaagccctatataaagggctttagccttttctttgccccctcctaaaatagaacctctaaggtaacacgacagggttaagttaaattcgagagtctatgtgcatacgttacgccctttttgaattatcttttttttatagattccatgtgtagaagatcatgcggcattaacggcaccgacaatatgaaaatatgaagtgatgtacctttgcaatcaagatgcgtccaagacatatataccaatatggaggtcaacctaattcaacgatgcacgtgaacaaggtccggtttgtaaagactgatttgaattttccatttttaagaacgccacaatgtttccatttataggtcaatcgcatcattatccgctttgaatttatcccgactcgactacagaatcaatgcaaccctcagggaattcatatatttatatagatataaatagaaagtatattttcgattatactatccgttaaataaaataagaaataggtcgtacccactaggaagcctatcaccaactattttcataacggactatggatagttttactataccatagtagggtggaatttggagcgaatgaaccacaacaaactaaagtgaccctgaactaaccctaagatgcgatggttttatacatatgggcatgcgaaagaaatgctttccttattcccatgaagtcaggatttcttaggaccaacataggagggcatatatcttgactatatgccaccttctatcgcactatagtttttatttttttggtctaccctgtgagataccttttatacctttctatataccgaattgaggatatttttgtaaccatcctaaagatcagttgggtgggtgccttgagccctaattttatagacagatagtctactgccattactccggttctatatgggagcgcttgaaatggtttggtttaaccgaatgctcgcgtcggtgtttctgagccctttcgctccttgaatcactgagaacaaactttctacaatcctatagtagcttatcgtagctaacagatgatcttcaccaaattgggtcagaatgtagcccgatccgaacgcaattagatgtctcaatactgactacctacccggacccgggccggaaaggggtaaatatagcccaaagaattatggccctacaccgagaagctatttgtaagggactctctcagtctcaagttgatttggggttgtgctcaataactgccgtcccatccctcattactgatgctaattttgcgcctgtcttttttctattcacttttatttcttttttgactgaaacgagattggccagccaggtagcgtactgtaactccgcaagtccacgttgattaacttgtccacttctcgcacaattgtgtctacaaccatcgagtggtacttcctcgggggcagctgggtgtctgatccctaacgttcaagcagtgaacggccacggtagtcggcaacccgggtaggaccaagtgaaaaaaaaaactaagttgggagaaagcattcctatctttctttggcttatcgaactatcaagtggctatgtgaaatgaaagtttaccgattgaaacaggatactatactggtcaataacaattttgagaaagcttgtcgcagactcagaggtttctaccctcctaaaaaccaaagaacgggaaagactccacgggaccccatttcccccaaaaccttctctcctcaaccgggcttcccggaaaaatcctttccacgcctgtaagcagaatgatttcgaaggtagaataaacatagccccttattatcctgtcttcttggatagtaaaggcaaatgtggtttgaaagaaaataaaagcttcatcctttcattcggaaagaagcggcaagagaaggaccagtcaggcattttagaaagtgaaaaagccgattaggttgccacttgagaacttgaacaccctaccttccgcctccggggccttcaattggtcctttcgaatacataccgaatgcgagatgttccctcggccgtcgaagtggtgcttgacataggccgcacctgtcattcttaggccactctcgtccaatccatcgaggaccattctccttcgtagacatccggcccttggtcgtagatcagctgttgcccatggctggcccgggaagtagtctgatcgcggtatcgatcctagtactcgatctccagtggtagggaaccactctgttttcttacggaccgtcctcatcatgctgatgcgtcctgttcccccttgtaaatattctcgggtaagaaactccgggagggagttggattcccctttgatgtgctctatgtcaaaacggaacaaagagaacatggcttgccatcttgcaaagatcagtttggctgccagatcctttgcatccttctccaggactccctttaaggatgaacagtccgtccttaaagtaaagtgaatatgcacctggaattttagaatggccttgagagcagccaagacctccttctcaggggtatttgctttgcgcctcattccatacgccggaagcgaactggatcacttcctctttcttttctcaccatttttatgtttaagaactgcgccccacccctatttgtttgactaaggctggaaagggtcaataggaataaggtggagaaaatttttggggagtcgatctagattcgaatgcaaatggcacacccgacaccttttgacataattgatgcagtctttgctcagtcttggccagtagtatccgagatgaattcttttcctttcgtcccttctatgtcgggctagtaatacgaagagcgtatggtgaatccattctctcttggctggggttttcctatattaaaaagatgggccttgagcctggttaagaaaggaaagccagtaactcttgtaaaccagcttaagggtagtgctagggacagtctcagtaccactgaaagtgcgatagtccttcaagcgggcaaacaaagtccttactcctattccaccaactactcgcgtctcgtatagagtttttttactatccttttcgcatagactcgcacctgtatccaaagccagtttactcaagagtaagaatgaaaggcatttcgcaagcttgaatccctataaaaaaagtcctttacagctttagcctggaaagaaaagtatggtaacctccgatcaaaactattctaggccagtttcagttgcttttcttcggctttctcttacattcttacatagtcatattcaccgtagagagctctagagaagaaagatccatctttcccttaaaatggaatagtaatagctagggcggaaaagcaagaaagcagtaaagttgtttaccagttcaaaccagctagtatcaatatgctttcaagcctgagtattttaagcaagtttctagtctcatacctgtaatcgcatattaccagtagctcgtgtacattatgtcttttcttttattggcatagtccgagtgtattaatatttaatactttcatccagtacagcctctatcttttagccagccagcggggtaaagagtaaagagcaggtgattagggaggaggtggtgcttatactagcactagcatatctgcttgctctagagattcagagtgaaaaggttttattcgaaagctgctgacttctaactcttctccatctgacctgagtagaaagtgggttcttgtggcctaggagactcctctttccttatagacagagccagttcttgcctattcctaagtagtagtcgtcttaagacgtaaggtagtgcttagggttgaagttctaagcaagcccatatccctcaaactcctttattctccgtatgacaagtgccgtctatgactagtatgcttgattgtgcttatccctctttctttccttggtagggtggttctagttcccgggttctgatatggcggctataggctctcgataatatatacatcattttacctaggagtggaggtatgaggatttctttttatttacgacatgcctctttttccgcgggtatcttccacgtatttgagaaaggctgttagaagcacaagcttgacttcaaaggggcaaagaaggtatctttctagcattgagctagcaggttcaagattccatcctgtgggcaatcctgtttgaaagttttcaaagtattgcttcgctcctcgctttgattctttctgctttacctttagttttctgaaatccagtgcttgcttgctatgaggtaactcgctcattagtagcaggcctctcacttcgttctctttgattggcacatggatgatcaactgaaagcagcaccttccatagtgagtcaaatctctttcttctttagcaatcatatctttcgaacccaacaactcatggggtttcttgttcaatcgtctgaactagctaatttaggattggagctgtggctgccgatgaaagatttgactcatgagacctgatgaagaagatgtttaggaaccccttaggatagatccccaaactctctccacccaggggagacccatttcttagagagtggagcctccctaataccattccctttgcccgctattcacttgctctggtatttgagacttcgtctccccttgacgcttccgctgctgcgcttttccttcaactgcatacctacttagaggtttaagtcctataaagtctaaaattcaagcttatacagggcctatacaggaagagttcaatgatcggattcttttgtcggcacagcctctttgataggataaagctttggaggaacaagattgaggttaggaagatggggtataattcctcgtagtgaatgaggtaaaaagaaagagctttatatacgaaaaacattcaattacgacctggacgaaagaaggttagcgaccttacctcatctttggattatatcgtcgagccagggctcgcagatcgagatcttccaatccttgatctagtaccaaatttaggggttgatgagatggactcgtaatgtacaaccgatacaggagaatgaagttcgtaacggaatcaaagcaaaagtggtacaactcgattcgatgaccccctaaccgtttcaagtgggactcttactactctagtctaccttaaagctagctcgggcattcgttcgaatccgtcactggacttattccgtgggcggggtcgtagtttcttcctataggctagcccgttactccctttgatccgtcatttttcgggcgggagattgtgacccaacagatgggacctaagccgaagaagtcagcccaaccagatcaagtggtagaggcgggatattcaaaagaaagggtttggtattacgtgtaaagccctacttccttagaaagccggtcagcttgcttcttttttacgcgtatttgagtctagtttaacccggcggggctcagaagcgcaggctatggctagtacgctcctaagtgtatataatagtagttcggtcaagcttaagcaggcataggccttagccttaggagctcagctcggagaaagaaattgaggtgtctattgaccatcaaaaggtgcaattttgacagaggctgaagccttcccataacaaagaaagtcttcgtctaagccagcctgggtaagtggtggtcagcagtccccactaccatatgagttagtcggaaaggcagatagccaagccagaggtgacgggagaaaagcaaggcaggggcttagcccgagcacggaagacaaagcaaatcgatatttttctaaagaaaaaagagggtgactacacctatctaatctaacaacagagctagcgaactacagctcgaaagcggcaaacggaggaacggtaacgacgtctgggcttgtggttcatggtcatttctcttctcagtaaatggtctatcttctataatagaaagaaagagtttcctttactcgcttcgatggggcggtagcacgggctagctcaattgggttatatagggcaaaagcgcctgccgaatcaacgtgatagggggagaggaaagaaaactatgcgttcaagttccgaacccaaaatggtacacttttcctacaggcaaggggttgctatcaaaagccggcctaccaacaactagggttcgacgtaaaaagagggcccaatcccattccggacgtaggattggcttgagaaagcaagactagaagaaagattgtgttatagaggggtagactgattctcaaagctcgcacgggaatcgagtacttcttaagcgggaagtcaggtttagtagaagggtagatccagtagggttagaatcc

SEQ ID NO: 22462 - DNA, 1615 bp, Cannabis sativa
ttataattaatagcattaatacatacagtaagtgagtgattcaaaaaaaatacaagtataattgctttacaaaatattttactttggtaaattggtactctcaaaaggatagttaaggagaactcgccagacagcacaaaataccccccttttctatggaattctcactcagataacgactaagccaatcatacaataaataggtagacaaggatcttattcatgtggatctatagataggtgtttatttacaaccaataatctttgtaaatgagctcaaaaaagtcaccatccatgatagctgtacaaaacagtgcatgctctttggtggtggcaagattaaaatgccttgctccaaattgagatagttcaagaaaaacaaagtgcaaatgatgacatacttatccgcctttctccagttgcaatgagcttctcatcacgaaaactttctgaacaacatactttccaaatggatctttcatcatggcctgtaaaatttcatgtaatttgatactcaataatctactttaaggcctcaagacaccaccagaaaatccatttagtttatatccagtcagcttaataccaaatatataataggatgcctaaaagtctgcccaatgagacaaaatttcataaatttagctagtatatatgatgtaaaattgcctatcgttataattgttggtttggatagacaacagcatataagtaataaaaaatatattaataatgttgatctataaaaaagatatcaattcagccatatatgatagatatatatgttataataagaaagaatcaggtatacctataagggttcattttccttggtgtaaccaagcatttcattcaccaaaagttgacgctcctcagcagcaccgaaagataagcacttcttaacaacattagaagcaaatttctgctgactcatccgtacaattcggccagcaagttggcgtataattgctgtcctccctagtggtttacaagttaacatagattttatatacattactaaagatatatacacataatttcaaactgaaaattataaattaatcacataataacatacaatagtataagctaaatacaaacccccaaaatcagtttctatcaaacaaataaaaattgagattggttatacacagtttatattaatccaagatgaattgattttaactaagaattaaaaaaaaaaaaacccagaactagcagctagtatgaacacatttcaaacaaaagagacctaaaaaaattagatccagtgacgagattcaaacacttagaaccaaggattagattcaaacaattttcacaatcaaagagagagaaacagagaaaaaaataccgattgaacgcgcgagacaaatcaccggaggccatttggccctacgattgcacgagttcgcctgaggagcagaggtgttgaggtcgattggtgtttgcacgagagaaatggccaaagtttggccttttgtcgcacaagagaaagaaggagagatagcggttgaacaattagggttttcaattttgagtgatgatggagagagaaagagatatatatggtattaattttgtgtttttttctgtccgaatttttttttataat

SEQ ID NO: 22463 - DNA, 2892 bp, Cannabis sativa
aagtatttccacaataaggctacgggtaggaaaaagaagaacgcaattgtggagattatgacggaggatggccgcaagttgagtactgaagaagatattgtaagtgagattgagcgttattttggtacaatattctcctctacttctcctactttgcaacaggtggaagagggtattggtaatgttgaggccagagtctctcaggctaagcgggacttgcttgaggctcggtttactgctgatgatgtgtttgctgctgttcgagctattggggccacaaaggcgcctgggccggatgggttccaagcaatctttttccataggtactgggatattgttggtccttgtgttactgctgtgtgccttgccattctcaatggggagcaatcggtcaagaagttcaataagtcacatgttgtcttgattctgaaagttagtaagcctgggtttgtgaaggaataccggcctattagtctttgtagtgtcatgtataaaattgtgcctaaggcagtggcattacgattgaaaggtacattgtctccgttgatctcatcgcttcagagtgcttttgtacctggtagggctattcatgatagtgttatggtggggtttgagttgctacattctttgttcaagaagaataatggagtttgtgggtttatggcgttgaaattggatatgagtaaggcctatgatagagttgagtggtgcttcttgcgtgccatcatgtccaggtttggatttccgaatcggtgactggacttgattatggactgtgtgtcttcggctgagtatgcttttttggtaaatgggaggcctcgcggtagtgtggtcccttcgagaggtttgagacaggggtgtcctctttcaccttatttgtttctattctgtgctaaggcactttcaatgctccttcaacaggctgagataaatggtgatttgatgggttttaggtgctctcgctctggtccgcgggtctctcacctattttttgctgatgatagcttgatatttggtagagctaatggtagggaggcggagtctattcgtcggattcttcagtgttatgagagggctttcgggcaacaagtcaattttgataaatctgcaatcacattcagcccgaatgttcaaccagcagatcgtactagtgtattgggtatattaggcttgagttcagtggccactcacgacaagtatctggggttgccgacagttattggtaagaataagaagcgcacgtttgctagtatttgtgacaaggtccagaaacgtgtgcgtggttggaagcagagtttcttttcagcggggggccgtgagattcttattaaggcggttttgcaggcagttccgaattaccttatgagtatgtttcaattgcttgttgcgacgtgtgataagctgcgttcaatcattcttcagttttggtggggtacaaagggtgataagaagaaaattgcgtgggtgaaatgggatgatgtttgtcagccgaaagtgaaagggggattaggctttaaggacttggtcctgtttaatcaagctatggtcgctaagcaagtgtggcggttgttccattcgccggattcgttgcctggtcgggtattgaagcataagtatttcccgaaaatgtcaatattggaggctaaggatcgccaagattcatctcatttgtggtcaagtttggtttgggggttagagttgttacggatggggatgcggaaggtggtcggggatggtcattctattgatgtgtttcgtgacccttggattcctcggtcgaggacttttcgccctattacaattgttccttcggccaatgtgatggttcatgaattgattgatgtaggcgggggttggaatctccaggctttgtctcaacacttcttgcagatggatgtagatgttggtgttggtgctgatcgatggtgttggcattatagttctactggtgcttatactgtgaaaagtgggtatgcggtggctcttgatgtcttgggtgaaaggttaggctcctcttcttgtaatcaatctcactagtggaatgggttgtggaattttaaggtccctcagaaagtaaagatcttcctttggagaatgtatcatcgggctcttcctactaattcacagcttattagacccaaggttcttgtgcagccgatttgtaataggtgtggggaggaaatggaatctctcgagcatgctttagtgttttgctcatctttacttcctctttggactaatctgcgggtttggcatcatttataccgaggtcggacgggttccttagcggagttgcttgtttatttatttgatgtgcttagcaaggaagagtttgagttgatttcaatggtgtggtggtgggtgtggtatgataggaattctgtcttgttcgggcaaaaacaatcgcggttgtgtgggattgtcgagcttgcgcacgaggcattggttgaatttcaaggggctggtgtgggggttgagggggctgtattgaggagtgggattgctggtggttcggccatgccccgtagatggtgtcctcctttgcggggcaagtttgtgttgtctgttgatgcggcggttactccggttagggggtttgctgggtttggggggtcgttcgaggtggggatggtaaggtgtgggcggcctgggcggtgggtggggttggggagttttaggttgcggtagctgagcttttggctatgcgtgttgggttacggtgggcgtccatgctgggctacaagttggtgagagtggagatggattcttctgttgttaattcttggattacttttccgaattctatttttagtataaaccaattgttgaggagattatttctctcttagctgctgttggtggtagttcttgttgtgccattccgcgtgttgc

SEQ ID NO: 22464 - DNA, 1586 bp, Cannabis sativa
gaagtggttattagcccaattatttttgttgttgtttcctaatggaaaaatcacgtctcttcccccaaatctcattggattattattattaatattagtttgagtttgagggttcgagtctccccttaatcgctgcctctgcatggcctcgttatggccattaatgttagttgccgcagaattagcagctacattgactttcacttccccattcatgagtggaggcattgttgctgcagctgcagcagcagcggccatccgagcagactttgtatctttagctattttttccattctcttattgatatccttcaaattctggtcaatgagccaagtgagatcattcaaatctgtaacagttaagccttggaggttcatcttaccagagagattgccatataagagtcgattcatctccttgtcacgattctctttcttcagcttcttcacttgctcgctcaccttactaatcttttgcttcaagaaagtttcttggttcaccatcttcttgctctgctctatctcgggcatcttcttgaattttgtcactatacggtgcacccctgctggagatggatacacctcaggctgagtatcatatgggttgtaaatgattgcacatgcatctacaccgcacagtgtgctcagctcgcttaccttcttcatgagacctttctttctcttcttataagtggcttttcgagaggagtcattgttgatgtaagctaacttcaccttctttctcgtcatggcttggcttgagccaaaaaaagaaaaaacaagagctagggagagaaactagcgatagtgtgctagaatgggagaatatatatcccaaataatactttttgtgcccttcatagtatactttgtggtactatttatttacaaatattatagagaaggtggtaaaagagcttcaatgggggaataaatgttaataatgaaatatggtaactaattaaatttcttttttgctattgtgggttacacattgtatggaattggacggttaagatgtgtttcaaaatttagcatataataagacattaatggttattttttttagagagaagaataatatgaaatgtttgtgtaaccttacatgataaataataatatgaataaaaaataattaataaaagataaatcatataaattcagataagcacatgcacacactaacatcaatggccaggattaatgaaagtctggcttaattttatttattaaagtttttcttaatttaaatttatttatttattattgctcaaaacaataatagccatttaaaatgtaaatagaatgaaaatgaaacaatatttattttatttaatttttttgtttggttatattttaaaatatttaaatatcattttaatagaatgatttttctatcattttagtagaatgattatttcattttacattaaaggagagaccattctaatattagatgaaaaaaaaaattaacaattttttttattaattttttttgtgttttaaattttattattcgatttgattcttatttttttcaaccaaataccactttggtttagtattttggtcttctttatatcttt

SEQ ID NO: 22465 - DNA, 6981 bp, Cannabis sativa
agatatggatgtatatacttacaaaactttcattgaaaaagtgttcatccaccagatgtatgtgttgaagacaagatagtcgacacttttccagttgacaccatgtttatcaatcgattcaggcattattatacggttcaatatgctgtgcatatttggatcgtctgaatttgactcaaccaaaaatggggcccaataaaactccactgtggcattatagtcctaataataataacaagaggtccacaaagatcaaataagatactcaaaaacaagatttagaagccaaaactttcaaaccaaaggtcacaacaacacacatctttagaggcaattaaatccaactagtaattcatgcttccattccaccactaattcactataataatttcgataaaatgtaaccacaaaaatttattattgaataaaaatattagagaatattggccatttggctatgagtttcttattagaatctcagaaaagacaaaatgggttgcttatatattttagtagaagtttaataaacgaggcattgaatataattggtgtttaacgagaatcatgaggttggaacttgaaattatcaattataaatatcactaactacaatatttggtcttaaattaacaatacgaaaaatgtttttgttgactttattggtacatattttattttgcattaaaggctgagcgcgattatatgtttatttactctaaagccacgtaatagtgcaatttgtcttgacattatgattaatcatcatgatagtgatgaattgattattcacattaacaatattctaaaagttttttcccatttaatttgctgaacccaaaaaacagaaaaaataaataaagtacctcaattctgaaaatatttcgagagccagacttgtgtaagctcttccttcccggaggtataacagattgagctaagcaaaccattgattcccactgatttctattcagtgagtccccaacaaacatgagcctcttgttcctcagtttctctagtaataatcttgctttgaacctttgatgaatatattaaattatataattaaaattagtataaaaaaacaaaattggtaatcataaaagcattaaaggaataataataaaagaaaaagcttacttgggcaaagagcaatctctgggctgccatttccaaccttggtacatggaatcctttcttccatttctcatacaagtcacttgggctgtgagaaactcgcattcatcttccttatataacgggtgggtagaattatcataaacccattcccctgtatacaaatcgcaatcttccggtggcaaaacgacatcttcaccgtcgtcgttttcttcctcttctcctcttccggtgagaactggcaattcaatcttctgctcctcttctttaattggttccaactttattttttctggggtttcatcagaatcctcagctgggttttcctcaagcgaagtttgagaattcttcactgctttgttctcatcgtcgttctgtggttttccttcttcaaccatcgccacaaccttcgccggctttttgctctgttcgggcatcgtttcttggatttcttgagctttgggccgtgaaaaagggaactcggctatggacttaacgtcctcattgtacatgaacaccccaaataagaaaatggagaaaacaacaacgaaaatggaaagattgttgttcttgcgacccttcattgcccccgtctccgatgggaacagaggggttttccggcgaggtggctgcatggacaagagagaaagaaagaaagaaagaatacgaaattgaatcaaggaatgaacgaatgaatgagaagagatggtgagagtgagaaactaatgggaaaatataagaacaaagaaatagaagaaagtgaagagagagagagagttaccgaattagagttgggtttttggggtttgtttaattaaaggagcgtttggtgaaatgggttagtcttgaagaaatggttaaggcatttggtggagggagaattgtctttctcaagctgctgctgctgctgctgtcatcgtcttcttcttcttcttcttggttttttttatttgtttatttgctttttctttttttatattccatggctaactactttcttcatatttttgtatatattttctcttaaaaaaaataggagagagaaagagagagagaagagtgattccaaagggttatcagttatggctacattgggtctctttggcgggcagttggttattatcaatcactccccaaaaataaaataaataattataaaacacaataataatattaatatacaaataaataataataataatttaaggtagtcattttgttggggtcaaagtcgaataaggtcaaagagcaacagttggtcagtgatctgggtggttctcgagttacaatcagataagccggacggacgaggaaaagatcatctttacttttatagcaaaacgacctgtcgttcatttttcttaaaattctttctcagagttgatcacttatcacaaactaagagtcataaaatgttgattgaaatggttgaatatatcacagataattttcatagtatattctttgattagagttctggtatggaatgatctaaccaaatgtcaccaacatatttcatcttttaatctttataaacttaactttctcatatatttttttaataaattgtgcaattttattaataacaaaactaaattaatagtctctcccacttaagatacaagacggagattagaattataaaaataagaaataattagtcgcctaatttttaaattgtttaataaaaagattagattaaaaagattgaagtattacagttaaacttaagaacacatattcatttttatttatcgcttagaagacacaatagtaaaaattgttacaacagattcatttgacattgtagcttaagcactcaactattatgcaaagtccgtaactgcattactaacaactccttcaatctcaaagaacttttcattcataaccagtaacatcaatttgatggtgagctatcgaagaacaaaaaataaccaataagaaacaaaacaaaattatgtcacacagacaagactaaaatacttaaaaccatatcataaagacaagactaattacaaaagcaaaaattgagtcgcaataacaaaacacaatcccatcacacctatgcctaaggaaggccgtcgggcctggtcggagataataaacaacctcaggtagctataaatttagaaactaaaaaacttacttttttgatatttagttttcgtaacaatactccttaacttcatttcacaacattagttataattaattgttaaatgctaataagaaccaccactagtccactacacaaatttaaccataatattatacaaataataaaaatataacacatgtacacaatcataatttcagttgtgattaacaatcaaatttaattaatactttaaattataaataaaagtaaaaataaataaattattgccatataaggaagtgggcaatatatatcttatattatatagggtaaatagcggtataagtacccaaagttttgagtttgtaaacggtataaactcaatgatttttttaagtggcataagtacccaatgtttataaaactgtaaattttctctattttcgtcagtacaggctccgttttaaatttattaaaaaaatatttggaagtaactgatgctacatatttttcgtccagaccaaataatctaaaatttgcgtcttatatgtgtcctgtttaagacaataacagagcctttactgatgaaactggaagaaaattacagttttacaaacattaggtacttatgccactaaaaaaaatcattaagtttatgccgcttacaaacctaaaactttgggtacttatgccactatttaccttattatatataaggaagtggggtgctgatattttttataagtggtgtcctatataattaatttgtaatatttttaatttttttttcttatccgatacttaattacatcaataacaatacgatactaaaaaaaaaatactaaagtaccaataatatattttaacaattctcattacatatagtgaatgtgttcactaattttctctcaaaatggagtagataggattcaaacaaattattaaatgcctatttatttttaatacgtgagtttgagtttatacgaaatatttgaactctaattgtaatatgattaattatttgagatatttcaaaaataggtgaaatatattatatttacaaaatatattggcatataaaagagttataattataattataataatctatatatatggaggatatccgtttattacatgaacatagaacaaaatcaacaaaaataaattaaccacaccgtttaccatgataacttagatatactaagtgggtacgtattgctcttttaagtataatataaattgtttttttggttaaatttttttaactatcgttttgttgcatttaaccctttaaatttaatttgacggtaaaactctcctaactactaaactagtaataaatttaaagtgtcattcgattaactattactctgggctgtttatgtgtatactcttgcaactaatattattatttaaaaattattcaaaatttattttaaaattaaaaataaaatattttagaaaattaaaaaatattataaattttaaaataatttttatatttttaaaataataatattaagtgtaccaatataaattgaatacatgtaccaaagtgtactcataagcagtctatattgacaattaactataaaaaatagatgacaccttaaatttgtaagcagttcaataatttagagaattttataccgtcaaaatttaagcttagataataaaatacaaataaaataataattaaaaaaatttaaccgcaaaaaactcatataaatttgaataaaaacaatagtaatataaattataataataagaataagaataacaataacattagtttacggggacttgaaggaaacacaaaaaaaaattaagcatatgataattcataaagtgtcacattagattaataaacaaggttaataagcctacctataatccacctcatttgattttgtagattttaacattacttaatcatcttttctgttgtgacctcgtcttcttcatctataattggtatcaaaatcaaagaatataatgtatttattaattaaaaatcaacctccacttatgtgccttctaaaactttggtaggccaccaactatcttatattatagcataatttgtttcacataaatgataaaactattcctatgttttatatcgtacgtgacactcttttgatttgacatatcaaatcatgttgggttttattaaggaaatttgaccattcatgtttaaaaggagaccaaaattaaaaaaatttatttcacaaaaacataaagatagcaaaataagttataaaaataaggttatataaaattttaaatatttttacgatttttataattttatttacagaaaatatgatcttttattgtattttttgttgtacacttgttaatttattgttgttgtttaatattattttcctatttattttacgtagttttcttattgttttaatattatttttatagaataccgtaaaaatatataaaaaaaaatttttgaacgtaaaaatataaaaaagttacaaaaatagtgtattatgtaattatcccaattaaaaaaaaaaaatccaaaattggacccctatcaaattgatgcttatctttcttctgtttccaaaagtactcctcccttttgaaattctcatctattctctctttctctttccttatcttagactctctctttctctttcgaaccctttgaaccgtttattgacatcattaactctgctcgccacaaattgagccccacctactagttcatcataattagcccccaattgcagcccctgatcacaccctcagacgcgaacccctgcgttggaacccaaccccaaatagcgacacccagtgagttatatatattatacattttgtgttaagtttggattttatccatctaaagttacgattttttttttcctattgtggagtgtatgttttgtttagtataggtaattttatgttgaaaaatcaaattttgtaaaaatttaagaacaatcattaaacctacaattttctaggttttttgtgctttgctcgatattgttcgatgtaagtttgatatcatcctttaaataactatatattaaggttggagatgactatacgataggggtactataagggttcgatattaaaaggtatactttattcttacctttactcttgtattgaaattactataggtgtattgataattatatggttagaaagagagatatcggtagggatataacaacgtatcgatagggatctaatattaccctttattaactatgtcttgagattgaagatgactatatgatagggtacgaaatatgtatgataggtagttcgatagctgtgtcgaccagtataaaaactttatccgtaacttttagatactactaatactaggcacctattgtactcctatcgaatcctatcgatcatttttaaaaaaatcacagagaactcaaaaaatatagatttcatcaaaactcagtttttaccaaaaaaaaaaaaaaaaataacaaagaataataagaaaccacaaattgaatatctaaatagtattttaaattatcaaaacaaccaataacaacaacaattccttaaaaaaataataataacaagaacaattaaagaaaatcacttatccatttactttcttcactatgaaccaaaatgtagcaccaatggtatttttcctctaatttcttataatgttcctctggtagagtgttgtttagtcaaagaggagtgttaattacaacctcctattacaa

SEQ ID NO: 22466 - DNA, 4339 bp, Cannabis sativa
cgatcttaataatatttaaaaatattatttacaaataataatttttttttgttagggcctattttttaatattagaacagggtctctaaaatatttgagacggccttgctttcacgtctcactcttacaaaaaaaaaaggtcaagaataataattcttacataaaacaatgatttcatattattgaatattctttgataaaacttgcaaaatatcaagttatacaatttaattactaccaacaaattaaatagagaaaagaaacataaagcaaacaataataatatcaataaataaaacaaataacaattaagggattaaaacattaatcttcccccaacatatgaattaacactaataatattataattaatttaattctctgcatgatgttctaatctcacccttagatttatcagtgatgacctcaactcttcccaatttgaccatagcttgtccaaatttttgggcaaataagtcattattcccaaaggctagttgtttcacaacatctttagttttttcatcattggctaaatcttgatcaatcttgagaattcctctcttcattactaattggttgtagaatgatttatctacaaccaaggaactatcttcattagtttggtccaacgggacgatgttgttgaaactcgattttgaaggacactttgatttcaaagagttcaccaatgttgagttcattgttgggtcaggcttcccactgccattgaagttgtaaactcgatcttggaacagactgcagtgtgctgttccaacggtatgaccacctacacgtacgcatgcatgcatatcgaattctaggttaacgggagtaaaatgtaaaagaaaaaaaaaagaagggccgacgtataattattttttgtaaaaaatagtatagcaaaaagattgtgtcactaccgaaacaaaagctatccttttgtaataaatttttactcataacatagattttttgtaactaagtgttacttttaaacgtcacaacaaaaagttatttattattaaaaaaataatatatttaaatacaaattgttacgaaaaacacaatttaatcataataaattgtgatttttatgaataattaatataggtttaattaacgcagaattttattactaataaaaaaaaaattgtaattgcaactcaaattaattttaaaaaaactttgttagtgcctcctatatccgtacttattatttatgtctctatatatatgtaatatttttcaattaatcccaatttatcataagtctatatcttttgtaatgactgaaaggtatcatttttgaatttatatttgaacacgttaagttataaaagaaaactgcatatataatttagagaaattctataatttatctatattaagaagcatatacttatataaagtaatttaatatgaaattctaactcaaaactaattgataattaccgagaagataaaccatgtcggcgatgtcaagtcctttttggcgaaatgcactaatggaattagccactgaaattgttggaggtggaagattaacattagtaagcttagattcttttccatccaatcttccagtttccacaacataattcactcttccttcctgaaatttcaaatttatataaatatatatttatttttcaaaaaaaaaaaattaatgcattatatatatttatcgcataaatacttaatgtttttaagttaatacacttttatatttattgcttttttcttttacggtataaatacttcatacaacattttattcattttcgttactattagtctgtttagtactaactcgactcgctaaagtgacaagtgtcaaaattaattatataaaataaaaaagatatttattaattaaattatatatatactaggtattagtaatatgcaatgcatatttgtttatagttgcattagagttattattacctaattattaatttaaataataataatacaattaaatttaatacagttcaattatattttttttaaatatataaagtttaattttaaatttgtctataaaaaatatatttaactaattttattaaataataaaataagtaaataggtttatatattttatattaatataacttagaaatttattataaaatataattaattaattgaattaacttctaattcaaatttaaatttaaattcatataaaaaactatctaattttgttgatacttttaaattaaatttaaatatttaaaactaattaattttttttaaaaaaaaaaataattaatttattgatttagcggggttagtttttatcgttaactttaacggaaaaataaaaaaattgttaagccaataatttttgttaaataattacatttaatatagagatagagatagagatataaattatttgaataattatataaaatgaaaagatatatattatttttgaatatatatatttatatacttacactggctaagttgacaacatctcttgtagcaatagcaatgatatcagcacaagacacaacttgatgacatttgctctctaaatctttcttaatatcatctataacattataacctcttacacttctatttgggccagcgttcttctcagttgggcttccatctttatttttctcaattagaatagaagcatcacatccctatacatatacatatataattagaaaataatcataataatatatactaattaaaactcataatgaaagtatgtgttagatatgtagaatattggaagttagtttaaagtttttttttttttctggcttttgaagctccaaaaacacttttgttgttggttaggtaactaataaatttttaccttcaactctatttttttttaacaaaagcgaataacttcctgagaagctaaaaaaaaaagcaaaagctagaattcggtatggtgcttaattttgttgagggatatttttgctggtatatattgatcgagatttggatgctcaagtagaataactcgtcatgctcttatgttattcagtattgtactattaggtattaaattatgtgagacccaatattaaattatagatattattggtgccctttattgattcatgtagtgtccaccctatgcatgtaagatggtcggtgttgaataattaccggtgtcgcttaataatactcatgacaacatattataataattatatattaatgcgctatttacgtgggatactctaacagtaacgtgtaccttaacaaagcaatcgtggaactgcatacgaagaagtgcggccacaagagtccggtcttttccaaaagctaatttcacagcatctttgattgtggcttcaacattcacttccgttgttgttgtttgagatttcgagttgaatggccagaagccggtggtggtggtggtggtggtaatgttgcattttttgttgtagtaaccactttgcaatgctccataacattgcccaatactcaaactcaaaattataaagatacctataataggagccatctccaaaaccctattattcttcatttttcaaatatgtataatgtatgtatgtatgtattattattattattaggatttgtgaatattgagttgtggttttaatgtttttttgtgtctatttatagggaatgagaatgtacttgtagaccttaattataaatatttatatatatgcttggcacgtatatatgatattgttggtgatcaattttgatttttttgtaagctggacaagacgtgctatatagtcgtgtgtatatatatatagatattatatatatatttgtggattaattattataatattttgggtatatatttataagattagtgtgttaatcatgtgtttaattaagggtgtgatataattctaagacaggtatgtgataattttttgccaatttttgagtcaaatccgacagaagatttataattttttttctttttgacgtgaaacatttataatattggtcacactacaatttatatatataattagcattaattggttggtaatttattaaaaaataccattatttatgcttgcatttttttttttgacaaaatgatttaaatcatatttaaaaattactacagtatctataaaaaaaaaatgacattttcatatttgctcgagtttcatgtgtttgatttcatgtatcttagaacattttcaacggtagtgcttagaaaaagtacttaataatatagcagaatacttgaaagtagggatgcacatttcccccacggggatggggccccgcggggacccacccctaatggggtgggaattccccgtcggggacggggatcacactctccgcc

SEQ ID NO: 22467 - DNA, 10406 bp, Cannabis sativa
ttctcataaaccaagaattcggttatataggcacactttatataaaatagatatatttttaaaaaactattctaacatatatggtttcagatttaaattaaaaaaatataaaaatatgttgtaattagcactcccttctttaaatatagaggggatatataatgattgctatcattcatttaacttacatatatgtttaatttataaatgataatgtatatttatttttaattaaaagtgactccctacttcaaattatttaaaatatatattatttggttttttttacaatgcaatgcatccctaaaaatgattgttgataaactctgtctatttcgatattcagaagaatattttagtttaatttttttcataatcgtgtacgttataattaataagcttttttataaaattttaagaaatttgaaataatttacaatataaaaagcagtacttaaacagtttattttacattcacgttaaataaaagagtcacgtgtgtttgactgtttcaaccctgttatcgacatgttaaatctttttgaaaattttaaaattttataaagtatcttaaataactacagcatgcataaccatgaaaaatttttagctaaaacattctcacaaatttctaaaattatattggtaccacatttttaggaacgcattgtagaattttcctacattattttttatattttattttagggtgattctacaatgcaccctccattaaaaggagtgtactgatgcaccctctacttgtttcggcatctaaaaaaaaattttagtctattttttttttcatattcatgtacgttcggaataatttacaatatagaaaataattttcaaatattctattttacacacgtataaaataaaatagtcactcgtgcaacatcctgcttgaatataattttcgacatgttaaaatttttcgaattttttaaaattttgcagaatgtcttaaataactataatttacatgactatgaaaaaaaatttgactaaaaaattatttctgatactaaaacgataaaaatatataaatgtatccttttaaagcggatgtattataaaatttctctttattttatacttaaaaaactttttttttgttacttcgggtttaaacttggtatcatccaatataaaaacgatgtcgttccgtttgaaaaaaaagaaaagaaaaaaacgatgtcgttatctagtagcctgttatatcgggtagaagattccaccaaatattccgtaagcaacaatacactactccagtctccagatatggataagctctataaatagttgactaatctgaaccgttgacacatcagactctcttaatgtttttagcaactaacggtccagatttactttcctgctaccaagttaggtgagcaggggtcagaaacgaccaaattaccctttaagagaaatgatcacaatcggatctaagctacaccaatgaattctactgcagaggattattgcttttggggtcagagtcagataatagtgggggtgggggcactcggactcccaagttccaagtcacgtgacctgcactggatttatgaattatccaaacaggggctaaaacggttattaacggaaactagaaggggttaattgtaaaaagataaaaataaaaataaaaatgacaaatactaaagcagagcaggtcagaaggccaaagccaaagcaatgccgcctacaaagcaaccacttgcaaaacgacgtcgttttgggggaactaaaatcctgaaaacagtgacatttcttttgtcttattagtcttggaaccagtaagtaaatatctccttctctatatcatttcttccttacctatttctccaattattatttattatttattaaaattaaaaaaataaagtcatcttgttatactgatccttaaaaaagatattaatcttcatcgtcgccgatcacagaaatctcaacctcacaaaatagaaaaaagaaaataaaaaagaaaaaagaaaaaaagacaagaagatttcttgacgagttctgaccgagtccacaactcaatccgagttcgcctgagtcaagacacggatctaatcagctcgctgctctgagttctctctatcgatcgtcttgagctttgttttggaattagtcgtctaatgtgaacgagttttggtttgataaggaaggggaagaggaagaagatttaatcaattcgatgaatatggatcggtctgcgattactgtcggaccgggtatggatttgccgatcatgcatgacagtgaccgatatgaccttgtgaaagatattggttctggaaattttggcgttgctaggttgatgagagataagcaaactaaggagcttgttgctgttaagtacatcgagcgaggagacaaggttagtttcggtgtattgtaattataatcactgattttttttttttattctttatcttttccctacttctatttatgtaaactggtttgattgaccttaattacttcttatggctaatttttattagtttcctgatttagcaaattggtttggctttagtttgtagttcggattgaatttaaatttaaagctttttttttggggggggatatttacgaactctattatccagttatttaatgaacatataatgaaagtctcgtgaagaaaaaaacgttggattaacagatattcaactgaagagaagagaattgttcaaaaaaaaaaaaaaaaaacaactaaagagaagggggaaaaaacagtgttgactaactgtgtttctttaagctcttttaacccgtgaaaggaattattcgcagttcacagttcacacaagcgtggtttatttaattttcgccaaaaaaaatgaaaataaaaaatttatgccataatttgatttatttaatgcggtacgtgatttatagaaataaattatttgcaaatttaatgcaataatgtgttttcttaatttaaatgggtggccttgataagtgaggggtcttaggatagtcttaattttgaatgatgggcaagaagtggttttgttgaactgtaacatactctaggtgattggagtatttacaaatacaatgcatctctaaattctgcatttaaaagatgttggtagcgatgagattttggaagtgtttttcaccatgacgattttgttttgcagattgatgagaatgttcaaagagaaatcattaaccacaggtctttgaggcacccgaacattgtcagatttaaggaggttggtagattttttgcttttttttttttttttaatcttccaatccatcccctttccattaattaattcgttgctactcttgctaaatgtataggtcattttgacacctactcatttagctattgtgatggaatatgcatccggaggtgaactttttgagcgaatttgcaatgcgggtcgcttcagtgaggatgaggttcttattcagatatccttgtttcttcttatttgttcctttatttttttcaggctgtatattgttgtttcttttcgtgtaggctcgtttcttttttcaacagctcatatctggtgtcagctattgccacgcaatggtattcaaatgttaatttattttcatttaactttaatgtggtatgtcctttatagccaatgatatatttgttattgttttctatttttctttgtaaagcaagtatgccaccgtgacttgaagttggaaaatactctgttggatggaagtccagctcctcggttaaagatatgtgactttggctattctaaggtatcaagttattttcttacacctccgtttggtttgagtattggtcctgtatgattagattaatataaggattttggggttatactctaaaggtagttaagttagtgggagagtttattctgttaaaattttgttgggcttttacattgtggagataaacataaaattttttgtttggtgagataagctacctagaatcctaccaggtttgatgaaacaaatctaaccaaacaaaaagtatttgcacgtcaatgcccatggttcttgtttgttctttgttctgagactgatttaattagaaagcttaatagatgattaaggattggtgattacaaatacttttacatgtaatcaagggtaaggtgctaatctttttatgcgtggaatatttttttttcagtcgtcagtgctgcattcacaaccaaaatccacagtggggactcctgcatacatcgcccctgaagtattgttgaggcgagagtatgatggcaaggtataataatgttttacttactatcaagtcatgttctgagagtgcctctctgctttgaattataatattaactaattaagaataaattataaatatgtatttaacaactcattgattgctggaaccaatcatttggtgaaaaagtttggtactaggctactagcaatatttatcgaaaaatctttctctgtttattgtgcttattctgacttcgttggaagaaagatctctatgtttctggagttttgctgtgctctctctctgtatatattgttgtaacaaaaataattttaaaatgttgtgcacgtggtctggatttaggccacaatgaagtccactatagacctaaacttgacctgctatgaatgtagcaaaataatagaccttccatacattaaaattatgcaaggaggaacaagattaggcaaggtgcttgggcttctaatgagtggagcagattggtcatttaatctttaattgggtactgaatataggtatgccttgggatggtagatatatatatatatatataactacgttctctacttctacttatgagggtataggttgttatgccttagttctaagtgtctcggattatttggaatttcaattgtactataacacagcattacagcactcatatcctccagttcttggatttactatggcattacttatttctaagagtctgtttctactggtctgttaagttagatcataaaacaaaatagtgatttctgttatattatcactaagagaggttttgtggccaacaaaagcctttctgccacttgctatctcttgtttacttttatgtttttgtcaaaaatattttctcactatggaaaatgaaagattcctactttagattttattaactgtaatctgttccttcaataaatatatgctgttttgagagagtgttttaatcatagattgcagatgtttggtcttgtggggtgactttatatgtaatgttggtgggagcttatcctttcgaggatcccgatgaaccacgggatttccggaagacaatacaagtatgtcaatttatttttatttgacatcattaggtactattatgtacatttcttgacttaagacatgtcatcattggtccatgcagagaattctcagtgttcagtattcaatcccagaagttgttcaaatatctcaggagtgtcgggagctaatatcaaaaatttttgttgctgatccagctatggttagtaagttttattctcttaagattgttctgctgcaaatctttagagcaggcttggcttgcctttaaagctttcctatcactagaagttgggtttttatatttttctcgccataattggtattttattaagttttatttcatgaacttgcgtctccaacacattcttaaaacttaatacttacgcaaattcaatgtaatctagaacaaaggtgaagtcatgttccatttcctctcttgctttttgtgcttctctcttatctgaagtaaaacatgcattgtcaagcagttgaacaacacttatcttatctgaaccatttgcagattgtgacgcttaacaacatttttgacttttttaggataactcttctagaaagtaatataatatcgttgacaaagtcattgatttttcttttgttgttggtttgtgctctggacaatcccaactgtagaagatttggatttagctttcacatttgcaaaattcccatcattttatgtgagactcatgaatatattatgcagagaatttccatgcctgagataaggaatcatgagtggtttctaaagaacctccctgcagacttaatggatgagaggggcagccagttcgaagagcctgatcaacccatgcagagccttgatgcaatcatgcagataattgctgaggccacaattccagcagctggaactctcggtcttaaccattatatgacagacagcctggacatggacgacgacatggatgacttagactccgattctgagctagatgttgacagcagtggtgaaataatctatgccatttgattaccggacacagctgctggtaatttcaaaggaaaatttctgatgaaagcaccctgctttttttttttcttctttttttcgagttatggctttgcctgaagaaccagcgatgggaatgtgtatgatagtctttgataggttagaataggtaaattgttacttggagtcatatgagtaatgtttataagaacatgcagttttataccttatgttttatggaggcatttgaagcttagtgttttatgagaggtgtggtaaagtggaatgaaccagaagtatgtgtgataatccccacaccctcattcctcctcccccttccattgaacctatttttatttattattgcttttcgtttggttctgtacgtgtactttcttttcactctgttggtttatttggtcataaaacatgtgtttgtatactttgtaacaatagctgtcacaacagtttttatatgaaattcggtagatcagtcattattattatgccttgtgacaatttgtatgcctagtttcatattccaatttatgttgttgattagaatagaaagtgggttgagcaataaaatgaaaatgctcagattgttaccaataaaagaataaattgttgtatcacaataatgtcaatcaacaacttcgattgatcaataaaacataataaaggccaatctatgtgttaaacatgaactgaaagtggagacattgcattggatgatggacttgccatacaatacaggccaatcttcatcacaaatggttagcctaggtctcaaattgatggttctcaagccaatttaagttcacactatccttggcaaccttaatctctgtttttgattcaggaagcagatgaaattcccatagttcttttaactcctcatcacacacaacattctccaatcgttttaagtccagaactgacgaaggcaactccgctaatctggagcagttgttcatattgagctttgttaaatggcacaactgacctatgttttcaggcaagttccgaaggctataacagttggatatgtcaacaaacgtaagctttgagagcttgcagatggagtcgggtaagttttccaaatcgatacatgatctaaacctcaacactagtagattaatcaagtttccgatttcttcaggcagtttcgatagattgtgacaatgtgttatgctcagcttctttagcttgattagatcacatagtccagcaggaagttcctccaaatcatcacaatagtcaatgtttatttcttctagatttggaaatacttctgatatcttcaccgaactgaaagcttgaccgatttcacacataaacagagacaacttccgcactttcttcagtacaatgtgagtttctttcagagaaggaattgaaatgcgctctagtcttattcttgtaagattggtcaaagaattaagcagctgaaagtcacttaattcagctgggaagaaagcataatttgtgattaggagaacctttaggttgctcatgttcttcacaaacttgggcaaggcatacttcttcattctaaagtttagaactagaaccttagctttcggtagttggatgtcaaacaattctgatgagaatgattcatctgcaaaaatgaaaggaaatcaatttgattaggtccaatccagctgatattctgtagtatatttggatttagtcactttagtcgaaagtggaggaccgaggtgagagaagcaccagtcgagatagctaccaaggcggcattgaaaggctgcgccttttcttcattccaccacgtgggaagatcatttccagttaattctacaatcaatctttccctctgttcttctggaacctgtctgctctggtggatagcaagctctctaagcatatcatgctgagtaatgaagtgttcactgtagtagtcatcgacttcgttctcatcttttctactctatcaaaaaaataagttgcttagaactttattcttaatgaatgaagctattttatgtatgttaagttaaagcttcagaggtattaggcatgagctatgcagtgtggcagaaatgaattaaaattttctttgaccattgaaaatagagtttatattattatccaaagacaattaagatgtaagacattttcatacattagactatcaaattgctataacatgatataaaattgcagcatcaacttgaaacttttagctaagtgaaaactaaaacaaaggaactcataccttgtgaccacaagatttgccaggttccggatgttaagatcgtcaaggttagtaatggcatggttttctttgactccatacaattctgtcattatatcaatgagggcagttgcagggattctctggtcttccgggaacaaaccaagatccatgaaacaattcttaagaacaacttgcttctcatccaagacatctaagatggtttgtaaacaagaaagaagttcactctcagaattgagaatagatgagtctgtagaccaactttccaattctctctcccagattctttggtgctgtccccttagcgatgaaccaattagtttaagggcaagaggaactttcttacagtgatccactacctgcaattcaacacacaaagaaaaatcaattattatttggatggttcctgaaatgaaatcactttatcttatctgtgcctaaaaattatagcagcatagtagtaatgtaccttcttcacaagaatatctggaatgtctgcatctccatcttctattgatgcataatgcttgaaaatagccattgcatgttcatcacgcaacggttttaattcatatggaggtccgaatcttgtaagctgaaaacgggacgtcaccaaaatcttgtactctaagtctggtatttggaaaacaaacttctcaacgagtgactctgatccggaccaaacatcatcaaggaccaacaatataggttgcttatcaattgtgtcgaaaagttgttccaatttgattactgcatcgttgctgtccttgaaagcaggcacacaacaacctttgtgttcataaagttcttgaacaataagattcaagttgggacactttgaaacagtcacaaacaagatattgctcttgaatttgtctatacaaaatacaaaagaaaaaaaatcttagtgaaagatgctctaaatagaatcataagcagataaatacaccaaaatataaaactacccaaatttagcaattgaaaataaactaaagaggcaaataaaaacacatattatcaacagaaacaaaaggggctatgactaatgtttagatatgaaatgggtgccttaatttaacacattatcaacagaaacaaaaaggattgttttccatttcaagatatgaaaagggtacctctgatttgatcatccttgcaaatctttctggctaatgtggtcttcccacatcctggtggagcagtaactacaattggtactgttgactcattgacccttaaaagcttcatcttcaactcctcaaggggcttattcaatcccactataaaggagggtggttcaggaacatagcagcaaccctttagctcattttgactagaaaacacatcactacttgactggattcttctagttagaatgtcatgactttccttggtcaaaagaagagtttcattcatacttcttaaaatctgaaaatctataatcttcagccaacgctcaagatccttatcaaatttctgaagcttggtggtgaatttaggccttttgtaaaagtaccaccaattactatacttgatacacttatgaactagctttgttccctccaagaatgtatctttaataccttccaactctgattctggccgatctaaagccaaattggatttatctatctcctcgatcaagggtttcagagattttacagttgacttgatgttcttgagctcaccagaaaataatagaaccttctgtaatggaattttgaccacaatatcaaacaacatttggaatgggggtcctagagctgctccaccaactaatgattccatgctatccttcatgggtattcaaaactagaacggaaaaaatcaaatgggtgtgtttcagaacccaagaaaatggtgaaacaagaaaaacccagatcaaa

SEQ ID NO: 22468 - DNA, 5057 bp, Cannabis sativa
aaaaaagagagagagagagagtcaatattttgaatttaagatgctcgaaaaaaaaaagtaaaaagttacagacttcactttttctttttgctatgaagtattactacttaactagttttcttaaaatttagacttatatgcttctgggttttggcagtaaacacccaattgtcaaattttgaatttgaattttatttgaaaaattgtacagagcttgaaatgatgaaggaaaggtttgcaaaattgttgcttggagaagatatgtcaggttctggaaagggagtttgcacatctttggccatttcaaatgccattacaaatctatgtggtaatttctctctctggttttatggaattttaatctggaatagggagctgtatatggttgagtttttaagttttcctgtttcttaaactgatatcttatctttaaaaatgcaaagctactgtttttgggcaactgtggagattggaacctttagcctctgagaagaaagtaatgtggcgaagagagatggaatggcttctttgcgttagtgatcaaattgttgaattaattcccacttggcaaacatttcctgacggaagtaaacttgaggtgatttttcttatgatcaacatatattttgcttataaggaaatacaatatttcagtttcgggcttaatagtatcgaaaattcaaatttgcctttattaagagcaaagttgccactttttattttgttggtaattatgaccttgttgaaatttgaattcttgggcaatgattcaaaaaaacttctcttttttacattttgtaggtcatgacttgcaggcctagatcagatatgtttatgaatctgcctgctttacgcaaattagataacatgctccttgtaagttctaaaatctagccttagaaggattttgttgttttaaattggagaaaagattctgaaccagtgaggccttaatacaggaaatactagacagtttcatcgatacagagttttggtatgttgatcaaggagtaacagccccagatgctgatggatctgcctctttccgcaaaacacttcagcggcaagaagagaagtggtggctccctgttcctcgggtccctgctggtggcctgagtgaaaattccagaaaacagttgaatcacactcgggaatgcaccaatcaaatattgaaagcagccatggcgattaacagcattactttaaccgaaatggaagttccagagttatacttggaagctctaccaaaggtgagaaagttagctggaattagctcttcatttcagggtctttcaatttatttcttctgagaaatgaagagcttaaattctgttgttatgtttacagaatggtagagcttgccttggggacatcatctataggtatattacatcagatcaattctcttcagaatgcttgcttgattgccttgatctgtcctctgaacatgttgctctggaggttgccaaccgtgttgaggcatcaatatatgtttggcgtcgaagagctcattcgaaacctccaattcatccgagccgctccactacaaagtcatcttggggtatgatgaaggaccttatgattgatggagacaagagggaattgctggcagaaagagctgaaagccttctgctttgtttgaagcaacggttcccttctctcacccaaactaccttagacactagcaaaatccagtacaacaaggttattatcttttcctgaaaatccacctttgaaaaacatattctggattttgtttcatgtacttatttatgatcacttgtataacaggatgtgggaaagtcaatacttgaaagctactcaagagttttggagagcctagccttcaatattgtggctcgtatcgatgatctgctctatgtggatgacttgaataaacagtctgataaagttccatcagcttctaaagtcagtgtgataactcacaagaaggtgtcaatctcttatccagtgcctgcctcaagcactccatataaatcagcttctaccactccaaacttttcacctgcgccgctaattagccctgccaggggagaaagaactccttttctccacagcaacagtactaacaacaacaacaacaacagtaacaagcctggtcgtcgtggtttcggagtaagaagagttttgacaaattatcttggtgttgagacgaaaccgaggatttgtggcaattcaactgaaggaacagctccagttccaagcagttgtggcaaagaaaatattaatcgtcgaacagactcatcagctcagcaaaatggaactaaattacttaaaaaatagtcgttaaattcttgtttgtttgtgatttgggagtgtgatagctatactgagaaaaacctctgtaatttaatggatttgttgagtttcttattcgtatattgtacgcatctgaatgtagctaaaagtagagtgcagacatttgattgcttgttacaaattctttgcaaatatcatcttataacttattttgtcatcttcagcctgttcctttaccgtattcattagaataaaagaaaaaaggaaaataacaagaagcagaacataacatactatatattgtccttacaaaagtaaaaatactatgtatgtatagtatactgacgatgctatttcaattaaaccaattaaagtgggaagttaaaataatgaaatttaaatcttaaaagaatatggaataggggcattccgagaattgaactcgggacctctcgcaccctaagcgagaatcataccactagaccaaatgcccacttgttgctaaatgtttactgtttcatagagaacaaaaaacaaaaggtaagtggtgaaataattaagatgcttctcttctaaccgaccaaggtgatactacgcaaagaaagaaacgccaaacatataagatagaggaaaggatgtttaaaattcctcacatcacattcaaattgagatgatcacacatataatattatagataaattcacgagaaaatgaaatgttttattttatgaaatgatatataaacgtgagggtggtgcaaatcggataataataagctcaacacaagcgtatatgattttactaaagttcacgagactaatccacacacaggcagtcaattactttgtgtaggaattcaactgtaccgtgaattgaatataacataagttaccattccaaaataaaaactaaaaaatacatttgctcagtcaacaagcaataataataataataataatgtggtatagttcatccaaatgaaaaagtctccgcaaactttagttctaaaaagttgttcagtcgttcttatcgatcccaaaaagaatcttgtgcaataatagtcgagtccgaaagagagttcccagatgactatcatgtccactccaggtcttgttctcaggatagctagctcttcctaaaggagttccacctggctagttatccatcctgaaatggtagatccgaatactacaatagacttaatcctattcggaagcgcctttagcgagtgtacttggtctgtgagtccagaagctcatacatgttcttggaggccatggtacttaagctgatgtggagacttcgctaaaagaggagttggttaagttagttatttctaactaactgaacaacctcatttcttaccgccgccgactttaggatcttaatcctaagcctataaataccaccttgactttgtcatttgtacaaagtctggatacacgagttcaaaactttagagatgagattgagagattgagagggaaaaagattgagaggtagagagagagatgcagagaaaagagagacattaggtttggattttgtaagaagaatcttctgtagatgaagaagattaggtttgggttttgtaagtgtgggagttaaaacactttgtgagaactcaacagagaatctcgtcttgactatattgtacctgttcttgctcaattaataaagaaggattacggtcgtgttctagaactggagtagaggcatagatcacatcgatctattagacttgaaccaatatatatatcttggtgttgattctttaatttctgcatttactgttttctggttttcaatactcagtttgtccttgttttactgtcgattgttgttcttggtttgataatcttgtcataactaattgtttgattgttttgaatttcattaatttgatttttcacattaagacttaattttctcataaatcagagcttggtaatcaatcaagatcgtagaatcaagattctttccgctgtaaatcttgaagaaacttgaatgtcattaatagtgagattcgaattggagaagtttgatagaacttgggactgcactatggagagaaagtctaaaaggaatcttagtacaccagaaagtctccaaggttcttggagatgagaagttattggcagaaaaaaaaaactagaaatggagaaaatggcgtattacacgatcatcatgtatctatcaaataatgttgaaagaaaactcatcgcagaaaagacgacaaaggagtttgggataaactggaagaattgtacttaaaaccatcaattgctagcaagattaatttgttagaaaggttatacagttttagaataatttcgtccctttctttaaatgcgaatattgatagatttaatgagattattgtagatttggctaacataaatcacaaggttgataaaaaaatcgaagccatcatcttgttgagatcacttctaatcgcacattaagaaattaaggcagccattaagtatggcaaggattttattactttggaagatgttcttgccgcacttaagtctaaagatttttaattacagttggaaaaagaatccaagaaagaggaaatgtatttggtaagaggaaggtcacccaagaaagcaagttcaaagagtaaacaccatcactcttaataaaggtcaaagtccagagaggacacaaggaagtgttacttctgtagaaagtctggacacttgcaaagattttataagaagtacaagtggtctttgtatgacctggttgtttgcaattagaataattgt

SEQ ID NO: 22469 - DNA, 2854 bp, Cannabis sativa
caattatgtcccaatacctacaatcctctagtcttctactaccatttaaaagataatgatgatattactgaaatatccaacaagattaagacctctttatcagaggtcttaaccctttactaccctctagccggcagagtggtcagcgacagatttgtcgactgtaacgacgaaggagtttcctacacagttgcccgagttactaccccgagtcgtctttcggacgtgctcaagaatccaaaccctaatgaaatatgtaagttacttccatttgaattgtttcccatcacagaatttgccctaggtgtccaactcaacatctttgggtgcggcggaatcgccattgccctatgcattacgcataagttagctgatgcattgtcatgcatcatgttcgctaaaatttgggtcaccctagctcgtggcgaggcagatagagtgcctcgtcccgagttcagtgcttcaacactctttcctcctaaggttgaacctttattcgacgtaactgcgggcgcatcgaaggagatcataacaaagagattcgttttcgaggcttcgaaaatcaaggatattagattggaacaccaaagcaatgatgtccagaaaagtccctcaagaattgagtccttgtcagctttcatatggaatcgttacgtggctgcaatcaaagacgagttattggaggaaacagagaagggttacacactgattcatgctgcaaatatccgtacgaggctcgagccacagctacccgaacattcctttggaaatattagtcgtgttggagtggtagtattgaaaaccggtgaagagtacggttatgaagtgactaagctaataagagaaggtataagaaaattggatgttgagtatttggagaaggtgaaaaaaggagaagatgaattcttggatctaataatgagctatagtagaggtattactgaaagaggaggacagtccatatttcgttatgcttctctagtttgtgtaggtttcctatttatgatactgattttggttggggcaaaccaatatgggtcagctcagcaaatctgtgttttactaatttcgtagcttttatggatagtaaatctggtgatggaattgaagcatatattgctttgaagaaggaacacatgactaagcttgaagcagatgaggactttcttagagttgtttcttctgttggggctatataggtttttggagaattatatattgatatatatatatatatgtgtgtgtgtgtgtgtgaatgatgtatttggttgaataaatattatttgttcgtaataatttataatattgtgtgttgtatataaacaaattaatgggtgtatatatatattgaatttctgtttaccaaaatataatattattgtatatacgtacgtgaagttatatataatgtgtacgtactttttcattattaattcagccaatctataatcaatgtggaaaaattacaattaatctgcagaatcaaattaattaaaacttaattaataaataattaacaataaagattaaaaatccacaaacaataattagagataaaattagagatgaacggagctaacaaacaaggaaaaaataaagcaataaaataataaaattaacactaagatatatactgattcaaattctttagatcgatatgatttatgactctatttcaattttaaaatactatcgaaattttctttattgattgaataagaaaaggatacattacagtcgagaacaattctttgttggattctctttaaagtgtttatctctcacactcttactcaaaaatcttcttcatctacagaagattcttcatatacaaatctcaaacccaatctctctctacctctcaatcactttctctctcaatcttcaactacaaagtcacctcttgaaactcttccaaaatcacacacttcaaaatgataacgatggtggtatttataggttagggatatgtatcccaaggtcggggactgcaaatgccaagttgttaagtttgtacgacttaataaacttaacaaactccttgtaacaatatggccgcgtcaacttgagttactaaagtgctttcggatgagacgtatgctctctggaagaaagaagtgacgctagagagacttcccgaataggaatggcaatagctgaagtctactatccgaaagtcccttccaagagggaacaactagtcatccgcaactcctttccgaaggaggactagctttcctgaaaactctttcgagagtggacaagatagacttctaggaacgtcattcccgacgacatctatcattccataagaatttttctgaattgacaagttagactttcgggaacgcccttgtggatgacatctaattttccataacaagaacaacttttggagaagctataccacaaatacatagtttcttcaaattcacatatgatggtggtgaagaaagaatgtacccatcaatgttggtgttcaaaaaatcacaatatactaacctctgacaatgatcaagtccaaacaatgctcaaacttgtttattatttttttgatgaattaggtgaattttattgcatttaacctgtaatttgtacaacctataggcaccataaccacttagatatggcctagcacttttctatacataaaatttataaagaatttaaaccactcctcatccttttgactgacttttctaggcaaaaccaacacaattctctatttcacagactctttgattctgccaactaaatgtgccatgttttgttccttcccttgccataccaattcattcctagttttccagagatgatacacaaggctggctaaaccaacagccattaccttttt

SEQ ID NO: 22470 - DNA, 1789 bp, Cannabis sativa
  modified_base (1716)..(1731): a, c, t, g, unknown or other
atataatcctaactctagctatgtatgtataatattcaagctagagtttccatatataaacactcacatgcaatagcacatgctatagtttctccttctctccttttctccatatataaattaaaagggatataaattaactttatactacaaccgaccttgcatgatcaacctcacaaacattatattattttccaatgtttaatattactaatactatatacatgggatttgatacttttaatatacatacatatattttaaagaaaataaaataaataaacaacctagtatgaacatatattatatatttttgtggcccattagactttccaaaggataatgtctaaacctttaattgccaaaagtgggagctagcttgggttcacttcatgtatttcacatataattttatacgtacatttagtatagccattcaaatttatataaagcctgtcggtttgtaactttgtcgattataacaagctaaataatgatccctattgcaagacgccaaaaagataaagaataatttgacatgaagagtcctttaatttaaagaatattatatacatatatattctttttatttaatgaaatcaaatttggtaccatatttgagccagatccaagatatgtcaattgactatatccattttgtaactgctctgctctgctatatcaaagaggacaaatatcgttggacaactgcccaaaaacagactccaccaattagggttttgcataggattcccattatcatatcatgttaattaatttgaattcattgctcatattacttataattatgattatacattgtgttgtattcaagtgtgttatataaatatttatatatagaaagagaatgagaaggagcgagctagctcttgtatataattataggtaacaaaatgttttatctttttcattttctttttctgaaaatactatcacaaaattaaacggtagaatttgatgtatttgatatatatcttactcaatttgatgctaacaacatagtttcacacatttgttaaaaagaagaaaaacaaatacctaagagcatcaccaaggacaccgcaaatcctttgtttggtgatgaattcttatctaaggaggctatatatatgtcgaatttagagtggaaattacagtctacggtatacatgtcgtgcactgtaacacacggcatcttgttttttttttttttatatattatatttaattaatataaatttatattattaattgtatttatgaaattacaatgtatttttttaaaattggtgcactaatgaactcttgcgtgtttcggcatttgagagatttttttagtctatatttgttcatggttgtgtatattatagttatttaagacatcttttaaaattttaaaaaattcaaaaaaaaaaaaaattaacacgctgaaaataaagttcaaactatctgttgcatgtatgactattttatttagaaaggtgtaatttagttaattgtggtagttttagttaattaatataatattaattttttattttataaaaaaattaatataataatgaggaatatttttttagtgtaatttttggtgttgtggttagagtgaagatagtttttaacatcaaatttgataatagtgtgacaccaaatttaatgtgctcattggagatgctcttacttaagagaatatttttttattaattttataatatnnnnnnnnnnnnnnnnaaataaaaattatgtagatatttaatataaaaataataaattttattatatatattta

SEQ ID NO: 22471 - DNA, 1464 bp, Cannabis sativa
agaggtaaaaatgatagactttaaaaaataaggtaaaaataaaagaggacaatataaaaatggtatagaatgtaatttcttcttttttttagtaatgcgcatttttgggatggagcccgatggggattttccgtctaagtagggaacggaatggatacaggaatatcattttttgtccctgaatgtcaaacaaagtggggacggggagtaatggggacccgtaggtgtttgtattttttttagtatattagtgtgttttttataaatttttaaattacattttgtataataattagtacattaaatattaaatagaggtgaaatattttaatttttatgtaatttaatattttatatatttaaatttttaaaataaattttatttttaggatcctctgtttcgttcccgatgagaaataaacagagatgaaagttaaaatccttaagtgtcgtttgctaacatttttgttttctaattttttaatcacaaaataaaagtaaattttttgtttaaaaaaattttgtttttgaaaaataaaaatgtgttctgtaactacttttatttttcaattttaaaaatagaaaacaaaagtgtattctgtaaagttcatttttatttttattttttttaagtcgggtctacgtctgaggtcagatccgggtttgggttcgagtcagaggctgggttcagcgctagggtcatgagggggatttcggtccgagtctagtcggagtccaaaatattaattaagaaaaagaaaaactgtttaaaaaaatattgaaagtgatttttctttttgtttttaaaattttgattcttaattaaaaaataaaaaagtaaaaacagttttatagaacatatttttaaaaaatatttttacttttttaattttaaaaataaaaaattaattaaaacaatattattaaattacaaaataaaaaactaattaaagaagtgttataaagcataaacataaaccctataaatagtcattctagatgaaaggctaaggttttcagagtttgaattagcagccatggctatactggcctttcccttactcatttcctttctcaaaccccaatcctctcgcatttccttccacctctacgctcctaagtccttctctactcgcttccccaaccccttcaccgcttcacgccgctccactgcaactccactatctgcaattactacctcctctgccacaaccgccgaggctccgcagcctaaatcctctcttcttactttccagcaagccattcaacgtctccaggtttgtttccaatgtctaattgccttttacgccatgaacaattattcattgtatgaattgcacttctgatacattactcttcaaatttttttactgtttgttcaaattgttggtagtgtttttttagtagcaaatttcctttagttaacaaatgaatataatactatgcctgctttgggttatctgc

SEQ ID NO: 22472 - DNA, 3887 bp, Cannabis sativa
  modified_base (411)..(411): a, c, t, g, unknown or other
aaaaactaacatagtcttgattgattcttgagtaatgatttagaaagataattattattgcacattgatcttttatttttattttttttaaaattgaatataactattaactatcatttttcccatgttccaaaaaaggctcttctttttaatataatatatttaaactaaactaacttatatatatatatttatataattatatataatcaatttgaatctagattcaattcatgttccttcattttctcatcagaaaaagaaaaatggcatgtctctatacctaacaaagattcaaaggtttatgtaaccatcactaatttttaataaatgcttattttttttagttattcacagtataaatatttaaatttaatactcaattagcagataaatatttaagtttaattnttaacggtaataatacttaagttatattaatttatataacttcagtaggtaactgatcgtcaagtctcaagtcaatattcacgtgacagtccttaattaatgcagatcattaaattttttatttttatttaaaaattaatttaaatatattaataagaaaataatacgtagataatgaattgacacttaacagcgagttacttacagaatttttagaaatataatttaggtattataattgtaaaaaattaaacttaaacatttatctgcaaccgagagttaaatttaaatatttacatcacaatttttttttatttgaacaaaaaaaattaatatttaagaaaattaatgtatataataacaataatgtcataagaataataactatataaatcaataaaaatgtggtaattattatagcctattgggttgtactattttttttaacttcaataattaatgcacttattccaattctgcaatttgaaacagaacaatattgaattatttgatttgagcatctttcacatgaaatgatatttataatagtatcaccctttagcatgatatttgtcattctttaattaattttaagagtaaataaataaatattatacatttaacttttaattaattaaaaatcaacaaatttgatttgagtgataataatttagtttatgattttgactttcaattttaaatatatatttgtttgattttaacataacatgcaaaaagacaataccacttttttttgttatatcttttcatttacaaaaggcaaaaatcaataaataaaataattaaagagattcatatgttaaatcatgatcaatctaatgtactagctatcatccattaaagaagaaaataaggtcaccaaatttggtcccatcaaattactttagatatggccaatattaaaaattaaagaaaatattatgcaaaaataaataccctttgaaaattgtaagatatataaataaatacaaattattaaatatacaaatatattgttggtttggtagaatcaaattgaaaattaatttattaattaattgatagattagttgaaaattagacaaccttttatttaagtagctatgattctcatttactcattattcttctttctattaatagttcttgattcttcaattgcccaaaacttttgtaatcttaatatacacctctaatcatattaaagtaatatttcatatgcactcaaggattaacatcttttttcttttcacaaaaaataaaaaataattaaaatttaaatttgctagaatattttcctctaatttccaccaatcaattttcaccaagaaggcataaatgagtgggagagaaaattgccaaaattccttctttttccttttttattttcctcattttgatcatttattaatggtaggggacccaatgaaaattttaattaaattaaaaaaaaaacccacaagacataaataaataatagaggtggtaaaatcaatttttttttttaaaaaaaatattttttattattatagtttttataggattattagtgaaagtcccacatgaaagctcatgtaaaagaataaaaatagaggaaaaaaacaagcatgggacacatgggaacattcttgccacattgagattctacaaaagagcaagcttttttaattaggcattgatcttcttgtgtttggaatcatgtgtcactttgcttcttctttttttgtacctataatttaagtgattcaatagtaatacaaataactaagaataaatctagtataatatatcttttttaaagttagtcaagaagatctaagaagaaagaaaagaaaaagtagtaggcttattctattggaaccttaatttctataattttatgataaattaggttgatattttaagtaaaaataatggaagtttagggcttttcttgaatttatagacctttttgggtatatttgaaaattagtgtgtaattactagatcctttaattaccaaggtaataattacattaaaatatattttaggcgagttatacccatatatatacccatatataatttaatttttttttttaaaatttacggtttgggttgcttcaatagttgctctggtggaatctatgtggattgttatgtgaattttagttgtgatttaggttgctctgtgttagttgctatgtgaatttttctatatgaatttttttcgtaaaaatataaaaaaaaaaaaaataaaaaaataactattttaaagtgtaaaaataaaaacactcttatattttaagatataaaatattttagatgtgagataaattagatatgaattttctatataatttggcaattaatatttaaaatagtatttttcttttaataattacaaaatgtaattacacctaaatttaataggaactatgagaattgaagaatattatttagacttttaactatcttcaattatatagttgaataaacacacaaaaataaataattgcctaaatctaattaataagttattttgtaatttccacacctaaagatttattttaaattgtttgacaataagtgttggttattttgatgaataaattttgtgatttttcaatagtttactagatggatcactaatataaaattaatttatatttggaaaagaaaaaatatatatagaatgttcatgaggttattatagtcaaatattgttgcataaatgacacctcctagttggaaattaattaaattaaatttaaatttattttttcacacccaacacatgaagttgccctctttgacactaacatgtcacatggctaaataaaaaaaaattatatatatagccaaacacatatattttttttatttatacatacatatacatattaatataattccatttaatttctccttgaaaaaaggtcctaaaagctttatgtttctctttaatatattttctctggctgtgaatactttctcatgatgagtaagaaaattggtaaaaaaaagcatgcatacacatgatgaatatacttttttctctataactattgagcaagtcttaatatctaagaaaacttttctttttcttttttttcttaaaagataaaaaatcttcacattgaaggtttgatagttagtttcaataaatcatggttgcatgcccatttgtatgaaatactacccttttttttttaaataaataaaaaaagaatttccacatatgttattttttaaagtgtaaacaatcctttatttttggatgtaatgatatgtaaatatataatttaatttttttaaaataaaaaatcctttatttttgggatataattgatatgtgaatatataatctaatgtttttaaaatgaaaatccttttttttgggaatataattgatatgtggatatatgaatcaatttttttgaaaataaaaatcctttatttatttttaagaaaatgaaaaatgggttaggatattt

SEQ ID NO: 22473 - DNA, 1858 bp, Cannabis sativa
tgttactaaaaagctcttatgaacttggaaaagcaactgcccatttaattcatttccaccaaaggaaaaaaaaaatcatattttacaagtccaagtttttgaaatacccccaaaagagtaaacatttaatgataaatgaagacccgcataaataaatcgaccatggaaaaacccatggttattattcaacaatggcataggtatagctatgaaaagggtcttgtaagtaatcatactcaatccaagatccctagttatctgcaatctgcaccaactgcttcaatgacggacttgaagccgtccctttctaagcactccgacaattccgcctaataaagaaaacaatacctcaatataagcatctctagtcaaagttatatagtaccagtaggtagcacaaaagtgaacagccaagcccaaaataagtaactattgacatcaaacatgtcttatatattcacttttgtcttcagattcttggcttaggtttgtgttgtgttaatgggcaaggctttaactagaagtacacattttttcagaaagaaactcaaaatctcatcagctcaagtcatttccaaccatcaatgaaattccacaccaattaataaatccaagcaccaaacacattgatcagacaatttcatgcacaaactacttttaaatttcagcatgcattagaaaataccttgatttggggaatgagggcaggtcctccgtaggcaaatgctgtatatagctgaacaagagtagccccggctcttattttgttatatgcatcttcaccactaaattaaaagacacagaagaaggggtaagaaaagtaatgactaaaaatggaaagttgcttgtagtaatcatcaaggagtgttatcatcttacctgcttatgcccccacaacctattaatggaatttttccctggtaagaataaacgaaaaagttttaaaccctctaacgtaacaaaataacgaactaaagtttaagcaactagtaacttgtaaatgtaaacgtaataatgtaaactttgtatacttgaatgcaaaaccttttcatctaattcatacacagtatgataagatatattacgtggactatgaagctagagtatgaaagcttccaggtcttaaaatataaattcaagtcaatagtgcaatcctttccttctagcataaaagatattaagaagataatagtgccagctcgaactctttatctttgtaatatattatttatgggagaaatgtaaatcattttgtacatcacattctcctccgtgcaattctttttcattacgaaagcttagtcagtagaaaatttttcttattacaaaataggaagcatacccttgtcaaaatgtacgtctctctcaatagatcagtggagataccaaagagaggcttcccacttagaccaccagtttccgaagctgctggatttttagctatagtctctggccttgaaatggttgtatttgatattatctagggaacaaaaccagaaaagagtcatagatgcacttggatagatgcatttggaagggagcattttctgtagaagttgattagaataaatataatcattaacggtctgaataaaaatgacatgcttaaggtgattggttatttctctctttgataatgtttcaaatgatcaattttcattgtgaaatatgcattgcagaaagcattacatcaattatacatcacttgatgtaacacagctaaaacatccaataaaacctgattactgatttttttgcaccaaagatgaaacagttgcttattagctaacaacatggtttcagctacaaagcaggggagggggctcattaaagctgaatgtgggagctattttattta

SEQ ID NO: 22474 - DNA, 6577 bp, Cannabis sativa
tttaagatgggtgacctcctgggatgtttttcaaagaagcgtacgagtgaggacaaagtatgctgaaaatactcgtgttggtgtgtagggccagttgttagtccaggaagcatccaaagtgatctactcgtgtataagagccataaatctgtgggggagtgcccaattgaggcttgaagcgaggatgttacatcttaattccacaattttattgttgtgaggtggataataaaacatgtaacccttcgaccttatagcatttatgatgaaatgcttatttatggtaattgggcctggttttgtcctttgacaattgtactcttaactgtacacgggtgtttttaaatgtgtacatgtcataagttcggtttccaaccttatcacaactcaaaatatgtttgagaaacaactttggttagaacacaattcgatatgcacattacattgacgagtatcaaacgacacaaatttaggaaagtatggagtttgctatgcaggctccaccctgtgtccaacaaagcttagtttcttaaacctgtcacacaccattatttgggtgtaccagatatatatattgggcaatgaacccgtgctttttaagaaactttacaaatagactggagtttatccatcctcacgaattttagtgtagtattctccatctatatttgatctcattatcttaatatgaaaattgcattatttctctacttaagatttaaatgtctttgaaacatataaaattttacttttgtaaagatataatttatgtgagtaatctttaataaatgagatgaatttttttgtgaaatatgagtccatatttacaaatgttaattgatttgtaatatgatttttaatatgacataataatgtaccattttagcttgttggtatacttacttttttttttttgaataataaagttgctttattaaccaataacttcagctactaaacaaggtagcaaatcagttggaacatcctccaaactgaaacgacgatcaaaaaataatatagcagccttagcaaagttatgggccactacattagcggatcgtttaacaaaagagaaagtaacattaccaatagagttaatcaaagatttacagtcatgaataactaaaccaaacaaaaaaaaaagcatttttaaggcactacgaatcgcctgaatcgcaccaaggcagtcagactccaagtgaacattttgctattgtattgctttaatccaactgagagcttccttgagtcctatgacttcggcaagagaaggatcaactgagctatgagagaaggaggttctaggctcaataagcattcatttataatctcgagccaccatgcctatgtcaaaactacgactgccatcgaacaaagccgcatccacattaatgcagtccacacaagctctaaataaagtcagtaaaattaagtgcaatgagtatctccaccatgtactaacatttattctatttatagagacatattccataatctttggtgccctaatatagataaattcttattaataacaccatttcttattgccaggttaaatatgcatatatttatgagtgacattattttttaaattaatgtagtaaagacctttaaatatttttataaatcaagtttctaaaggaacatggagaatgaaggtctttgataattttaagacaaaactactactatattgcttgttccttaaatttctaaatgtgagaactcatcttgtttgtggataagatttactcacagttactgatttctttaggtttatttgtaaaccttgcaagaagttatgaatgtggaataacaatctaaaataatccactatctgttaataatcacattaactatattagaatgaagtcatacaaaataaattaagaatttattagtggtaatgaagtgtgatttatttttcttaattgtatagtaaaaatttgtatcagaatcaatttttgaagtttctactagtattgtagaaatttatgaacagtgatgtatggtgaataaaattacatattcaataatgtaaagctttggaatttaactaaatcatatttttaccaatgtataaatatgcttaaatatgaaatatttaaacaaaaaaatacatgtgggctacatttttaatttaacaagattaattttacattatgataaattttactaaataatttatgaaaaacttaaagtttaatatttctatctcaataaaatatgtaaaatatttaattattttataaaggtttcaaaattttatactttatgataaaattattaaattaaatccacacaattttctgtggggtaaattaagaaaatttaatttaatatattattctaattaattatacaaatataataaaatcctgtgggataaaattattatgtccacataattaattacaattcatgttcattatgtgatcctgattcactttatatataattttatataattaaggatgttgtggctactctctaattatttaaacttatacgtttcactagacactaaatgttatccgcatttccaataaaggacacgtggaatccaggttagcatcaaaggcccactagtgggtctccaaagaagataaagtgggtcaagcccaatttatccaagaacatacctcagcttcataaccagaagaccttctgccagtgacagctcgtttctagaggaagacccagtaccgtgatgccggaagagtcaagcagcgtgttcctagaagaccagtccagtttttctttttattcctgcacacagataagaaaataactgcttctcaaatctcgaaagaagatcgtatcaagctaaaaggaaaaatttcctaaaatagagatcaagcaattaattcgcgattaattgtccacaattataggacacagttttgactaattcagttgtatctcttttgcctagtcagcaaatcatcctctcgtgggctggatttcacgagacaacccaaattaagtaattcagtgtaaactcaccaatagagggaaaatagaaactaaatgtaattctctaaatactgtaaatacccgataaatcctacggatcaagggttgaattctctttcaacactagctcagaaaaagttgagaacttatggtcattgtatttccaaaagcttttctagctcaaacttacatgataatattgactcgtggattaaggctagttaacgccccaaccacataaaaacttttttgtatctttcttactctttctcttttaattatttatttcttcagttctgattatttataattagttttctaaaaatttcggtaaatattttggtactttcattgagaactgaaagaagcagtgataccgtctagtgattacgttcaagtaatcatgatactcacccgaacaaaatttggtctttacattactagtcctagcaccaaagcaagaaaccttggtgatccacatgaggtgaccagtcgctataaagatcaccatgatgaagatcggaatcgagatgatcccttaactgaagatgcgaaatcttgagagagtagttatgacgacactgaagataattctcaggatacactcaaagatacacctgaagacaatccttaaaacaaaattgttggtgacgatgttagagagaagaatcaaaccctgtgatcattatggctaaacaacttcaattagcagaaaacagattgactcgtcaagattaatttaacgagatactgctcacaaagatgactagaatggaagatatgatgaccgccctaatcaaagggactcttggcgttcaaactcctccaacaactgatgctcctgaaagggtagattcaaaagatcttgaaacctcaggtcttcgcaaagataaagggaaagggataattgttgaaacttcaaagaaaactccttcaaccaagcagcaaaagaagtccaaaactgttgacgaaccttaatagaagaagaaagcaaaccatgcttaactagactaattctagaggcatagtcgcatataaaaataaggctgataccggagttcggaagctagagtcccgaaagggcaaaaatcatccaagtgattccagtaatcaagatgatcatgttgatgaggtgtagccagtatcagatggcaatagtggaagtctctccacaaatgatcttaaaagaagattgaacgagaaaaaaaaagccaaagcagaaaaagttagatcccataagaacgatctgagaaatcatatcaatgatcgcgttcgtagaagagaatcttcaagtgacaagactcaacgcttggaatgcaaagtcgaggagttgatgaaaatcacagagaagatctctagaaagcaaaacgacactttttcagactctaaagaagaagatacagagccgtgcgtgaaaagaatcattgatgcgccatttttggagcacttcaaatgccatagatggaactatacaagggaaggacagacctcaaggaccacctatccaagtacaaccgcactatgcaagtcgccaaggacagtgacgatgcaaagtgtttatgttttcattaacattaagcaagtccgcagaaggctggtggaagaggttgtctccgagattgatccaaaattgtagagatctacaggagatgtttaaaaagaaatttgtagtagtaaaggcctttcacctagaagccagttacctgaccaatgtcaagcaacaaccaggagaaagcctgaagaaatacatccaacacatgatggatgttgctactaaaactaaggttactgatgacatgaaaatggcagccttaacattgggactagctactggatctttgttgtggggatatctccagtgcaagagagcagacactttaactgatttcttgacaagagctcagggattcataaatttagaagaagattatactcaagcatacaaagtacttccatcaccttctaccgatgtaacaaatgcccaaacttcgcagatgacggctccatccatttaccctatagcaactacctttataactcttatggtttacagaccaagtgtttctgtgcagccagctgcacaactagttttttgggtttagagctggacaaactggatatagtgccgttcccagacaaatgaaccaaaaagcggaagctccagagtctaacataaccctgccatagagtaaaaggagtttaaagggtccaaaccggagtgattctacaaagaaggaaaagacccaaaagtcaagatacattgaatatacaagtcttgtagatactcgagagaatgtgtataaggcaacatgtaacatggtccattacaagaagccttcgccaatgtacaagggcagaagagagaaaagatccaaacaagagatgtgaataccacggtgatattggacacaccacaaattaatgtaactatttgaaggatgaaatcgaaggactagtatgaaatggacttctatctaattgggtaagaattccagtcatttattctggatagggggttgcacatggataacttttcatttcaggacaacatggagccataaatcctcctcagcgagtaggtcatccacaagctcttggaatccaagctccaaatgcacaagcctttcagggggcacaaattgcgcctctatcaacaagaattgttatagctcatcatgctctgacaaagtcacatcaaggacctcaaatcgcttctttcatggttctagcttggggtcctcatcaatctttagtcgcatgatctcatcctggtaaatggagagactgagaatcaacgacttggattggtcttattttgggttttggtgattttcctttggaaggagcttagctgtgagctcaccattgaccgcggtgacatcatgggcaatgggggcgcatgaaccagggctaagacgtcgggctcaattacaggatggggtctgattgtagttcttgaattcttccttcttccatgagagaaccaagctcatattttaccacaccgagagagacaagagaggttctagagcgagatagaaagggggtcagaattggggtgtcctggttctagggacttttgagggtggagatcttgtttctccgatgttcttcaatgggaacgaccaacagtggccgaataaaatggtagtgccttcgcacataaaggtagaggggttaagggaacaagaaaaaaatgaacagggaaagagaatgggagagcgactgagagaattgggaattagggtttttaaattgtagggctcctaaaataaggttttttcttttttaaaattttaatttaattttatttattaattaaaattttaatgtttaacaaatttatatattttttttattttatttttaaatatttatctaagtgggtcaattaaattgtgtcacgtgtacattgtgtccatgtggacaataatatatactcatggatagccaacttggcacttagctgccatagatagatgaaaattgctaaatgcgaaaattgctaaatgctaatagaatatgagttttggaagttttgccgctaaaatttgaatttttagagttaattactaacgaaatgaaagtattaggagtttag

SEQ ID NO: 22475 - DNA, 3455 bp, Cannabis sativa
acatgaaccaaatgacatactaaataagtgatgaaaatacttctatattttttattgataattgaatggtaaagattacattgaaatagagttttatttagggcacaaagctcaacatttccttctaaaacaaaagccccttaaatagaaattagggttgctacctctaaatggcgaaagtccaaaactgccaaaaattctcgtgtttagcccatagtctcgactacataaagcctagtcgcgaccataggcaaaacacaaaaatcatgctttctgcctactccatagtcgcgaccatgaaaaagggtcgtgaccatagaaaatggtggtcgcgacaattgaagcaaattgccaacttcagcatctatcagtaaaatatggataactttcatatacaaactccaaatgagttgattctagatgcgttggaaagctaaaaaagagatttaaaacttctatgctttgacttttcccaaaatctaaacataacatagttgaattaaggcttgaagtttcagctttattttttggcagaattttctctattctatagattgttgttttttgaaatttgatcaatttgtacaatccaagtgtcaaaacctggaaccaaagaaaacgagcataattctattccaaaaataataacaaagaaaaacaactataaaaagtgacccaaaatgtaggctaaaagtaacctaacaacatgaccctattagaaagggtaagatgcatgatcatcagctctgggttgcccaagaatttcgtgtggttactgcttgctacttgatcaacagatgcccctcatctgctatcaagtttaaaaccccccatggaagcttggataggacacaatgcaacctatggtcacttgagggtatttggatgtgtggcctatgctcatgttaagcaagataaacttgaagctagagctagaaagtgcatcttcattggatatccaaatggtgtaaaggggtacaaactttagatcattgaacttgggaatcaccagaagtattttgtcaccagagatgtagtgtttgaagataacagaatgtacaaggatacactgcaatctactactagttcaataagagaaagaactaaggatgttcagttttaggtggagtcaccagtaagaacacaccatatcacacttgctacaacagaagaacaagaagcaatagatagtgcatctgaccctgatgaagatagcaacatggattatgaattggtgagagatcgtaagaggagagccataaaaccaccattgagatatggcattgcagatgtagtacactatgcgctgaacattgcagaagttggtgattttgaacctaagacctatgaaggggccacaagatgcagtgatggcccaaggtctagaattctgctatggatgatgagatcgattcccttaaaagaaacaaggcctggatcttggctaaagctcttgttggcagaaaggttgtgagttgtaaatggattcttaaataaaaaaaggtataccagggataaaaatggcaaggtacaaagccagactagttgctagaggtttcacagaaagagagggtattgattacaatgaaatatcctctcttgtggtgaaacacacttcaataagaatattgactcttgttgcagtggaggatctagaactagaacaacttgatgtaaagacaacatttctacatggttatcttgaggaacaaatcttgatgaaacaaccactaggttatgaagaaaaagggaaagaagatcatgtctgtctactaagaaggtccctttatggtttataacagtctccctgataatggtacaaacgatttgatgactatgtgatcaaagctggcttcaaaatgagtgcttttgacagctgtgtgtatgtaaaaaatgagaagtgccctgtatttctacttctctatgtagatgacatgcttatagctagcaaaagcatgaatgaaatagacaaagtaaagaggttgatgcacaaggaatttgagatgaaagacattgaaattgaaagagagaggaagaaaagaactctgaaactatctcaaagcagctacactgccaaaattctagaaaaatttgggtttgatgatgtgaaaccagttagcacacccttatcccaacaattcagattgtcatgctcacaaacatcaaccacagatgaagaatgcaactacatagaaactattccatacacaggtgtacttggcagcatcgtgtacatcatggtttgcactagacctgatatttgtcatggagttagtgtggtgagcagatttatgagcaaaccagaacaagaacattggagggttgtcaagtggattatgagatacctaaaaggaactatcaacactggattagtatatggcttgaattcaaacagaggagaaggtgttttaggctatgtcgattcagattatgctggggacctggacacaaagatatcccaaacaggctatgtattcatgttaaatggctgcaccatcagctggaaggccaacttgctaacaattgttgccctatccacaactgaggcagactatattgcctgtacagaagcaattaaagaaaatttctggctaaagggaatcacaagagaattaggcattgaccagcaaaatatcaacattctctatgatagtcagagtgcattacatcccagtaggaaccaagtgttccgtgaaaggaccaagcacatagatgttaggttacattttatccaagatgtaataaatgatgaaaaggtcaagctttgcaaggtttcaactgaggaaaatgcagttgatatgttaaccaaaaatcttgcaacattcaagttccaacttttctaaaattgctcaatgtcactgatacctgaagttagtgatggttttttgtttttgcacagttgtaattcttgtaacaatgtattaatagtcaaagtggaaatttgttagttttgtatgcctactaatacttatatacacgcactcggacattaactgtcataactgtttttgacagttatgttagttagttcattctagttgcctaagtgtataaatagtctctatgcctacttgtaatcgattcactttgtaataaacactcaatagtaatatagctatattttttctctctagtattttgtcttatacaattcgagttcttggtaagaaggttcaatttgtgaacttggtttgttcgggcttaaaagaaggtggtttctgctggtatgattgaatgtttggctcaacaattactctgctttcttataaagttaaccaactggcaactgcttttatcatggagtattataaataggtaaggagtctttttgtatctggtttttcattattgaaaagtgtactacgttgtaactagaaaactaaagaagaaaaggcttcgaatgctgagagaaaggggaaactaaaagatggtgtacccgagtagtgtatgcgtga

SEQ ID NO: 22476 - DNA, 3221 bp, Cannabis sativa
tggcaatgggaaaagagttgctgctggagataactcacaacatgctccacaagaatcctcaaaccagacacaaagtcttcaacgtactcgaaggaaggatcctgatgattcgactccaatttatttcaatcacaaccttttgatcaagttgaatgatcataacttcttactttggaaacaagaaagttttagctacaatacgagggaattgacttcaacacttcatcacaaactccaatcctccattgaagtacctcactgatgaagatcggatcaggcgaatccacaatccagcttatcttgattgggaagctcaagatcagctattggtgtcatggcttctgtcatcaatgagtccaagtcttttaactcgcatggttggatgcaaatctgctagtcaaatttggtctactttggaaaagtacttcactctataggtctctgccaagattcttgagtttcaaacgaagctgcaaaatctcaagaaaggttctttatctcttaatgactatctgctcaaagttaaagaaactatcgatcttcttgcttcggttggtgatactctttctccaagggatcgtgttcgtgcgatcttcaaaggtttgccaagtgaatatgacacctttgtcatatccactaacaccagacttgagcaatactctgtagcagagattgaagcacttctattggcctccgaatccagaattgagaagacggatcatgaagttgatttgagtgctaatgtcgcttccatggaacctgatcatgctcttgaagccaatcttacaaactatggtcgagaaggatacaaacaacaaccacaattcagccgattccacaacaacacaggtcctggcgttccttcctttggcagaggtcactcacctatcaatttcaatgatttcaatgcttatggttatccttattttgctcctgttcgaggcaatttcatttttggaagaggagttcaactgcctactgctaatagtaaactccagtgtcagttgtatctcaaacttcgacatactgtccaaagttgtttttataggtttgacaagaattttccaggcccctcaggtactcgaagtaccactgttgtttctaaccctacaactccctaggctaatgttgttaccactacaaatgaatgggacatgacttggaattcgaattcaggggctactagcaccccagatcctgcaaatcttgctcaaagctcagactacaatggacaagagcaactgtttgttggtgatggatctggtttgtctattcaacacataggtcagaccttacttgcttctaacttgtctactcagacccttgttcttaataatttgatacatgtccttgctatcactaagaatttactaagtgtatctaagtttgctgaagatagcaaggttttctttgagtttcatcgtgatacatgttgtgtaaaggaccaggataccaagcgaattctgctgcaagggagacacaggaatggcctctatacttttgaaggtctcaacatacttccaacatcatctgtcacctcaaaatctacacacataacaacacaggacacaataaattccccttatactcatactgcttccttagaaccttgtacacactataataatactaggaaattctctgaatttgatgtgtggcacaacaggttggggcatcactccaaaaccattgtgcattctgtacttagaacttgtaatctctctggtgataataaaacttccaattttgtttgtccttcttgttgtttaagcaagatacacaagttgccttttcctaaagttagcaccagtgtttacaccgctcctttgcagttggttgtttctaatctatgaggaccctcttatactctttttaacagtggttatagatattacatccattttatggatgtctattccaggttcatctagatctacttcctcaaagacaaatctgaaacattaaaagtgtttcaaatgttcaaagctgaagtagagttgcaattaggaactcagattaaaatggttcaaatagattgggggtggggagtttagaacctttcataagttccttcaacagtttgggatccaacatagacacccttgcccaactacccatgagaaaaatggcctagctgaaagaaagcataggcatatagttgaaaatggcttaactttgttagctcaagcatccatgcctctgaagttttgggatgaggcatttaggacagctgtgttcattcacaataggatccctacaccaatcctcaataacgaaactcccttagagacacgatttaacaaacaaccagactacacatggttcaaaacctttaggtgtcaatgcttccctaacatcagaccctataacaaacacaaaatgtagtttaggtctgaaccacgcacatttctggggtatagcctcaatcacaaaggctacaaatgccttgcctcaaatggtaggatgtacattttaagagatgtcatctttgatgaacatcaatttccatactctaaggccaataatgaaactgaacctattatacctcaaaattggcacatccctgttaaaattcccactgttagacaacatgttcactgtctaattgacatgtccaacaccaatgagtcctcatctcaaactgtctcatcctctagtgcttcacctgtgtcaccacgttccaccacagtctctccatctgtctccgtttctcccaaaaatctgtcatctacaccttctatacccctggttttgagcatgtaattcctttcaatgttcctcaaatttccactaatttccctgctcccacatccattgaatctaccccacaggagcaagtgatccatgctcctcaagtttcaagagttcagaacaaccataaaatgactacaagagccaaagctggtgttcacaaacccaaggttttcagtgtgtcctctgtccccgctacagttggtcaagcactccaaatgccacagtggaaaggtgctatggatgatgaaattttggcccttgtaagaaataaaagctttagtattgttcccttacctcctggtagacaagcaataggctgcaaatgggtttacaaagaaaaagaaaacacagatggcactctcaacacgtgtaaatccaggttggttgctaaaggatttcatcaacaacctggattcgactttactgaaacatttagtgtaacaccctaagatttaggcacgctaccc

SEQ ID NO: 22477 - DNA, 6815 bp, Cannabis sativa
  modified_base (6764)..(6768): a, c, t, g, unknown or other
aaaatgcattaattttgttcatggagtggggattttgtcaaagcatgcattaggccaatcgatttgaggggctccactcctttaattttttggtcctaagaatcataaaaattaaacaacagagacaaaactatttcaagagttaaattttttaaaaattaatttcacatatggaataatatcaacatgtggggtgtgttggatgtaaaccgcatagaatatcttttcatggaaatgatatatagaaactgagggtagaatacgcatagaaaatagaggttgaaaagatgtacacaaatctgaaatcaatatcatatgagtaacagaaaagaggttgaaaaaatgtattgaagagataatctaacgaacaaacaaaaagttctaaaagatctgattcttcatactcaagtcaacaattcaataataaataaatcattaaaacaacacatgctttttttcttattttttttaagaataagatctaaagtaagcatcaaaagaaaaaaaaaaaaaaaaaggaaatttacatatgttgaaccaatgttggttcccgaatttcataataaggaatagaaagagagagagaaaaaagaaagaatgttatgagagaaagggaggagataaaaaggagggacaactaaaaatgttacataaagtagtgcatcagtcacatcttcagagctactttataaattatcacacaatcacatattcaacctttgaaaattctaaaataatttattaacactgaactaatcacattttcaaaaatatgttcccagtaactaaattcaaattttcattttagaatctcaattttagtattttacaaggaataaattcaagagttagtcttttttaggattacttattaataataaaaagtagttgtagtaatagtattattggaaaattaatgttttttttttttaaattaacatcttcatttagggaggtgaaatatgtggcccgtccctttatgatgaacattaaatgagattatattttcttaaaactaatttttctcttacaatatatttcttgtcgtgtaaagaataatacaaaacatgtcactcacaatgaaaaatagtcaccaatagtgtttttgtagtagtaccatatgaagctaccaacagaaacatgaagaaaatagaatatgaaatgattggtatccatccattttaggcatactaaggggttttgatttaatagtcatattaatccaatatttcaggatactggacttcatgcaagacatataagcagtgtatcaacagtggatagtggtatgagatcttttatttttctatgtttgcatttcttgtctcctaaagctaaatcatatgtattaatgtgcttaattatcttcttttggatgaagaaatgaatgacgaattcggaaatccaatttggaagaacagagtagaaagttggaaggataaaaagagcaagaagaaaaagaatgcaaccaaggctgaaaaagaggagattcaagttccacctcacgagcaacagatggatgatcaacaacaattgtaagtaacaatgttacataaacattttagtaaatgataattctttctaagatattatacttgagcctttttggttgcttttgtaggcctctggaagctcctcaagcgttatcaactataattccagttgaatctagtaaacttacaccctacagggttgtgataatcatgcggttgatcatcttaattctctttttccattatcgagtaacacatcctgttgacagtgcctatgggctatggatgacatcagttatctgcgagatttggtttgctgtttcttgggttttggatcaatttcctaaatggtctccaattaaccgggagacctatattgatgtcctatctgcaaggttcatatctttatcttgaatgttgagttttggctagagctagacaaaatgttaaaattttgggtgtaacatgaagtcatattgtattcattttcatgttatgataggtatgaaagagagggtgaaccatctgggcttgctgctgtagattttttcgtgagtacagtcgatccactcaaagaaccgccactaatcacagccaacactgttctttccattttggctgttgactatcctgttgataaggtttcctgttatgtgtctgatgatggtgcagccatgctcacctttgaatctctagctgaaacagctgactttgcaagaaaatgggttcccttctgcaagaaattttcgatagaacctcgagctcccgagttttacttctctcaaaaaattgattacttgaaagataaagtgcaaccttcttttgtaaaagaacgtcgagcaatgaaagtaagattcccgaatcatgggctaattattattcattacttattttttctttataacatgttaatgatttctttatgattttgtagagagattatgaagagtacaaagtgagaattaatgccttagtagcaaaagctcaaaagacaccagatgatggctggactatgcaagacggaacgccatggcctgggaacaactcacgtgatcatcctggcatgattcaggttgaattgtctattcttttgtccaatttatcaatgaaccatatgcttaggcattgagctcgaatttgatcatacttgcacttttatcattttcttttaggtgtttcttggcaatacaggtgcccaagacatcgagggaaatgaactccctaggttagtttatgtctccagagaaaagagacccggttaccaacaccacaagaaagctggtgctgaaaatgctctggtaatatttgcacttgcattaagatacaatgaaatttcatgttttttcttaaaaaaaacagtttgactaagagattatttaatttttgactgataccaggttcgagtctcggcagttctaactaatgctccatatattcttaaccttgattgtgatcattatgttaacaatagtaaggctgttcgtgaagcaatgtgtttcatgatggaccctgaggttggaccaggtgtatgctttgtgcaattccctcaaaggtttgatggtattgatcgcagtgatcgatatgccaatagaaacaccgttttctttgacgtaagtttaacctttatattatatggactagaagccaagtctttttttaagcactcttgtcattaacttttgtatttatacaacacaaaattgtggacttgacattttgagttatgagagttctaattggtctgattacaggttaacatgaaaggtttagatggtattcaaggaccagtctatgtgggaacaggttgttgttttaatagacaagcactttatggatacagtccttcttctattccaaccctaccaaaaccttcttcatcatgctcatggtgtggatgttgctcatgttgttgtccaacaaagaagccctccaaaagtatttcagaggcttatagagatgcaaaacgtgaagagcttgatgcagccatttttaacctcaaggagatagatagtaagtctagtttttataaagttgaatttcaacatatcatcatgacatagttttcaatacataaaattcattttcggtttcctcctacagattatgatgagcaggagaggtcaatgctgatatcccagatgagctttgagaaaacttttggcttgtcatctgtctttattgaatctacactaatggagaatggaggagtgcccgattctgttaacccttcgacattaatcaaggaggcaattcatgtcattagttgtggctatgaggagaaaacagaatggggaagagaagtaagatgactattattctatacactttttatgagtataaatattaaattataatgtataacctatgatatttattttcttcttaattacaaaatcattgctttgtattcgcagattggttggatatatgggtcaattacagaggatatcctaacaggtttcaagatgcagtgtcgtggatggagatcaatctattgcatgcccataaggccagcattcaaggggtcagcaccaatcaacttgtctgatcgtttgcaccaagttcttcgttgggcccttggatcagtggagatattctttagtagacattgtccactttggtatggttttgcagggggtcgtcttaggttgctccaacgttttgcttatattaataccattgtctatcctttcacatccttccctctcgttgcttattgcttaatccccgccatttgccttctcactggaaaattcatcataccaacggtaactatttacttttactttatattcttcacacaaatctgacattcatatgcatatgtacacatctaaataaaatagagaaattactcacttggttagtatctatatatgttgtcatgtcaatgttcattttctctaaacactagaaataatgtcaaaattcacatattaacaaccttcatatataagatagattcacacatgtaatactaaaatctactaatattgtaaacatttgcatagtaacttttacatgagttgtagccttatgagccatgacaagccaaacgaacttactatatatatgcatgtactcattcttcacagctctcaaacttggcaagtcttctcttcctttgccttttcttctccatcatctcaactagtgtacttgaactccgatggagtggtgtaaccattgaagagttatggagaaacgagcagttttgggtcattggaggagtctcagctcatctttttgccgttttccaaggctttctcaaaatgttggctggtttggacaccaactttacagtcacaacaaaatctgctgacgattcagagtttggagaactctacatcatcaaatggacaacccttttgatccctccaacgacacttctcattgttaacttggttggtgttgttgcaggcttctctgatgccttgaacaaagggtatgaggcttggggaccacttttcggtaaggttttctttgccttttgggtgatccttcatctctatccattcctcaagggtctcatgggacgccaaaacaggacaccaaccattgttgtgctctggtctgtgcttttggcctctgttttctctcttgtctgggttaagattaacccctttgtcagcaaagtggatggtactacaattgcacaaagttgcatttctatagattgttaattggaactatagctacaagagtgttttcccatagtttttatcactcatcatttttttagtatagaataatttgtgatgattcaatctcttttgtattggttttggagctatgattaatttgtaaatgttgaaagagattttacatgtgagaattgttattgaaaaaatgatggggttgattctttattatatattgagtatgatgaaaaagaagaattatgacatatattgtagaatttttactattttatgttattatgtcacttcacgatgatcttttatattcttaatataaatgtttgagtattttgtattaaatatctttaaccattaaactagagaaatttaatgtagaaatgtggtgttcactacaagaaactatcaataatttgacacacttcatgaaataagaaaaaaatatttaaaataacatggagcttattatgtcttttcatttaagatacaataagcctacattatgttaaatctggcatgttgaggggatgcctcgtctcgaggggagaatagtcttttactattctctctgtgtctttttttccttcttttcctgcttgctttatttctgttattctttagccctggttctcacggtgtgttcccctcctttttgaccttttgaaatcttgccttttctttttgtccctggtccttgttttggtcatccgttttgcattcttgtcttttctttgtggggtctttttgactttgtggtggggggttgtgttctttatttcaagtggttggtagatagttgtattgtctttgtgtgtgagtttgttttggacggattgggtatttatgatcatggaagaggttgttgactctgttaatggtaagaagggtagatgcctctctttaaaggaggtatccatctctctagcccctagtgtattaactactaagattttctctaaggtgtgcctatttggcaaatttatcacatccagaacctttaatgccaaggatgtggagaatgcttgctccactatgtggaagacccggattagggtggaaccaatggataatactctggctggaactaacacttttagatttatctttaaaaatggggcggctagcaaaagggtcttggaccaaggcccgtggtgcgtcaaaggagatatgttggttctcctctcatggtcatcggggttcggggctaaggaattatcgtttaactcgatccatttttgggtccaaatacatttcctaccgcatgactacttctcaagagtgaatgctaatattctggggtctttggcggggaaagttgtgaacattgaacttgatgaaacgaagccggtctcttggaaaacttggattcaagttcaagtggacgttgatgataatagacccctgtgcagtggctgttttttcaaggccgttaatggtgctgacttgtggattcaactcaaatatgaaatgctaggcaccttttgttaccggtgtggcttgttgggacaccaacgaagagaatgcagcctagcttcgccggtgtggcttgtttttgctagtatcattatttcctgaatttaatatatttaaattaaattgaaaattaaatatnnnnnttgattttcataatgatacttaggtattattattttcatgatattta

SEQ ID NO: 22478 - DNA, 1581 bp, Cannabis sativa
  modified_base (37)..(41): a, c, t, g, unknown or other
  modified_base (1042)..(1048): a, c, t, g, unknown or other
tttaaaaaaaaaaactgaaaaaaaattaaaaaaaaannnnnaaaaaaaaaaaaaaaagagtgggaagtgatgtaaggtatgattgatagaagtcatcaatcaatgacgtgtacggctgcatggagtgtgtgtgcaagtggtaaaagtgtaataaaataaagttgataagtataaatgttggtttgaccgtgtgaagatatatatgtaataaaatgtgtattttgtattttcggtgtaaaaatttcaaaaaaaaaaatcaataaaaaacgaatatagtaaattaatttgatttggtttgagtatttgttttagtcaataatctagtttgttttgcttttaaaaatttacaaaaatcacttagttcaaaaaaaatatttgtaaaataaaaaaaatagaccagttaatttgtggacaattttactttcttctatgggtctgtttggcacgcaggattatattgaattggtattccttcgaaattgttgtgcctccctaagctcgtccagtttcatgtcttcaggtccattaacagtgggcatcccagatggatacggcttcgattctccgagttcgctcctcggttgggtgaaccttctttataaatcaacttggagggtcttctaatcgggcctaactttcatattaggcctagaaacgacctatttcttggttatcaaaaaacacgaataataagttctaataatttaaagaaaacataatgtagcactatacatgttaactcaaaattaatatcattttaaaattttaataacctatatatgataactcaaaaatatacattatcaccaattttgatagtttcatgtatgggaggagcctcagctggtaatgtgacagtcagtagtcccgtgatccgtaagggcaaataccgggtaagctgtgcaatcccacatcgcttgaggacagtcaagtgtgatgattctgaggctgtgtaggtatgtgactacgcagttgaagagaggttaatgaattgattgatactacctatatcaacaaagtgcatcttgtttttcggtagccnnnnnnnaaagaactccacagttaaacgtgcttaacctggagcaattttagtgtgatgattctgaggctgtgtaggtatgggactacgcagttgaagagatgttaaatagattgattggtacttacatcttgtttttcagtagctcatcatgaaagaactcctcagttaagcgtgcttgacctgagtgggaagttttctcaagaagcgtgtgagtgaggacaaaaaacgctgaaaacactcgtgtataagagtcataagtttgtgggtgtaaaagtccaataaagacttgaagcgggaacgttataagtaatcatcttaaaaaatttatataagttcaaattttcttttttgtgatctctgaaattgttgttaactcgaaaatggatgagcaacacctaacctcttttcaaaaaaatttaaaagtaatggattttttttttaaatagtaacttgggaagatgtggagaaaaacaaggaggggccggttggaattttctggtgtattgatgagtttgctcaattccaaaaaaaaaaaaaaa

SEQ ID NO: 22479 - DNA, 4386 bp, Cannabis sativa
ttataatatatttttaatatatagcggttcacacaggaatgcaaaatctaatttacttaatcagtatagacatatgtattatcgtactccctgaactttttatcccattaaaaatagttcccaaactattcatagtattgtaaattaattcttctgtcaagttttgtcacacgtgacaaataaaatgatgacatgattacttaaccaattgtcacgtcagtatcatatcaacatctcgtgtgtaattaattgaaaaaaataatttaattttttaatttagttttacgtaattttcctaattattaattgatttttaatttgatgatttattaaaagtacataatttttatttttataatgttaaattatacacgtagcactaatgtgataattgactaaatagtcatgtcatcattttatttaccacgtgtgacaaaaattaacagaagaaccaatttacaatattgtgaatagttcaagaatcatttataatagactgaaaaatttaagaagcacaataatagatacatcgtataatcttaaatagccttccacaaaattgagattacacattctaaacttttttttcatcccaaccaaatttaaccatataaccagccttaccaaattacaacagaatatatggaaacattcaagaagaaactgcgctacattccaatggcggcgagtttagggtagaggcataagtgagaaccaacccgttgctctattgggtttagaagatttttgaaaccagaggaagtccttttcttttcaagtcggttttaaataagcatatatccgctattctagtttaattagagtttttcttagttcgagttacttgccaatagtgaattttcgagtgatggttggagcgcaacggatcttaaatatagagaatttgctttgtgacgatgatggtgatttgtgttaatagagtgatatttactatggagccaagctctattcaagaactaataaaagaaataaatggggaaactcaaattcaagctctattcagcttagctaaaatccatgttttactttttaactttctccccaaattttcttccagaaaagctggaatgtttttggttcagtatgaaactaagtatgagaatgaaaacatgagtaaatttccaccaaaaacacaagccattgacataatcaaagtttatatcattatttggcctagtttacctccaaagaggaggatatcaggatgatcccattatttggcagtattaataacgagcgcttactgcttttaatcttccagttgggcgataatgctggcgaatacacggaagccttgggccatatcagagaacaggcagtactcatttttggcatggtatactttcattaagcctgcatatgcacatagaaatgaatcaaaaacttgtcatcaaatattgctgtacaccaaaatggagaagatattggtataaaaatgagtggtttcgtagctactagagcatgtaatattataaccaaaattgcagaaattcagactggattaatgaagacttctttggtttccttcttcagatttttaatccttatgttctacaatcttttaagacagaaaaaagtagttttttctctaggaaaatggcaaatatatgcgtcggtgatatggaaggcaaattggaatagaatgactaatatagctctattataattaatccagtttcaagttattaaaaattatggtatgtacacaatctttagtaacatataaataggtataagctgaaattatcttgtttcagatgtataaattaataaagaaagaagggagtaagagtatcaaaccatagccagcagtctgaacatcaaagccttcttcctgccagaaattgacaaagcaaagtttaatgattttgattactcacagatgaaaacagtcaccgttttagaaaactaggagctaacctgcaattctcgaattagtggtagacttccagttatagagtaaggctttacatggccaactatctcttcagttgctttacaaagcacatgaaatccgcgagagttgagatcacaagcaactccagacattgcctcgtcgaaacttattgtaaggctggaaaaaaaaatacaggcacaggattaagcctcttcaagataatctggtaaacgatataaaagtgaaagaaccaaactcaaacataactatatatgactatgtatcagctaacaggtactatcctggccagttgttctgtatgtgtttagttcttgcaatcagcttgtgtgcaacaatattaataccacccttttgataatatttcatgaaattttttatggaaccaaatgtttcccagaaattaacaagtgtagaatgaaccaaagaataaataaacacttgggattaatatccttagaaggtattaattgaaaactcttccatgattaagccaatcacagttttctagattactctacatggttataatgagaaccgagaatgcaccggaacaaagtaatggcaagagagatagagagcggaccttcccctcaggttttcatctggtaggacatattttgaaactggacccctgcactccagcttttctatattttcattaatgtcatccacatattcttgtaacttctccattacatccttaacactataacagggtagtcagaatgaaaatcataagcaagcaagaaaaaaagtcatggaggattttttttgaaaaagaataagaaaaatcagattgcttacttgtaaaagggagttaacctgtgaaagaccaaaagaagaaaattagaattgaattataaaagaaaaaaaaaattcaagaataaggagtcattgaacctaacgtctcctgaaacagtacactcagctggaatttgattgattccacctccaggatctgcaaaataaaaggccatgagaaagagcacatctcatttatctccaaagaaactcacaggtaaaagtaactcacaactccattgtgttggtttcatggttgaaggtgttgcaaacccatagacctgctcttttgtatggggagggaaatctctataaaaccgtgtttgtatttcttttagagcatccatggctaattccaaagggtttatagcctgcagatatgttcagcaagacaacaacacttggttttagtttttttaagatgggatttttttttcattttaagtttccatttttcaaaaaaatggaagactgacacaaactacttaaaaaactatagcaggcaatagtacaaaccttgtgtgctaaaccactgtgaaaaagcttcccggtcacatgaagcttccaaggtatcataccgccagtaccaatacaaggttgtttatcagctgtgtcaatccaaaacctgcattggcaatctatgagtgctgaagatgagttggaaggacattacaattaatttaccaatgggtatgtagaacagcatataagttattatatttgcatattaaaacgaaaaaaataagacttacagaggaccatctttcagcttattgagtaggccatctttcactagtgcatccacaccaacccctgtaatggcagaattctcttcatttgctattagtactacaactacagttgacttcaattttggctttgtttccccaagcttcttcatcagctcagttacaagagcaacatgccctaaacaatcagtagttccacgcccacggagttcatccccacaaatgcccaatgagaaaggatcaaattcctgcaaaggaagtgatcaatatattacatactgaccaacttaccaattaccaaccaaagataacgtctaactatgataaaaaaaaaaaattaatgtttaacatatcatttaatgttaaaatcatttggaaaatggtttcaaccataaatttaaatgatattcagaaatagggaacttcttcttttaagcaaaatcatttcaacccctaagcattgagacaagtcatagataaagaaatgtcaaatgttaacccaaaactaacccgtaaggtactttcaacaaaattcttagtgatgggaacaagcagtcaagcacacaagaagtttacgtttgcaaagcctagcagggacaagaggcaaagttactcttaattcgataagttaaaaacggaataattgcgtcttaagtacccccaaactacgaattagtaactggcacaaatctaaatttttttttagtagcataagcacccaatgtcagaaaacgcagtacagaatctattagtgccttaaacaaacagttctaaatcattggataaaatcatttacttccaaattttctctcaataaattcaaaaaaattaaggctagttataaattataattttccttgaatacttttgccgcttataaaatcacattgggtgtct

SEQ ID NO: 22480 - DNA, 4715 bp, Cannabis sativa
tctactaacaataacttttttaaaaaaaatttatgtaacaactcacaagaataggaaaggtacttggctaagcgtcctcctctagccagatattctccattgacctgacaaaccacaaattgcgaatcgctaaatgcctcaaggtattcgaccttcattttaagagcaagctttagtctcatgattaatgcttcgtactcggcttcattattcgaggcaaggaattcgaatcttaagacaacatgcactttgaatttgttagggcttattagtattattccaccacctgatccttcattgttggatgccccatcaacatacaaagtcctctcttcccccgttggcacttcagggtcgactcgctcttctataataattgctactttatcgtttggaaattcgagaatgaaattagcgagggtctgtcccttgattgccgatcgtggcttatatttaatgtcaaattggcttagctctactgaccattcaagtaaccttcctgatgcttctagttttgctaacacttgtcgcaaaggatagtttgttagtactttaatactgtgtgattgaaaatatggtcgcaactttcgagaagcaaccacaagtgcaaatgctagtcattccttttatggataacgagtttcagcgtccaataggcgtttactcacatagtacaccggatgctgcctactttggtcttcacatattaacactgagctaatcgcgtattcggacactactaggtagatcgataaaacttctccaggcatcggcttggatagtgtcgggggttgccccaagtgcattttcagtgcctgaaaagctttttcgcattcatcagtccattaaaactttttgttaccttttaaaatctgaaaaaattctttacatttgtcagaggaacgcaatataaagcgatttagtgcggcaactttaccttctaggctttggacctctttcagtttggtgggagatcgcatctcgaccaatgcctttatctttgctggattagcctcgattcctcgtttattcaccataaaactgaggaattttcttaagcccactccaaaattgcacttcaagggattaagtcgcattttataaagtcgtaggattccgaacatggaatctaggtgagtgacatagtcttctgtacgttgagattttacgagcatattgtcaacttgggccagttccaagtattttttctaaaaagtgttttggatttttttttgttttcagaaataatgaagatacatgtgttctcgagaaataaatgagatcatctaagggctaaaatagggccccaacgctcaggttgacatgggtgctgagccctacacccaggttaacttacaacctagttcgcatgtttccgctccacaaacataattttttctccatgaattcttattttggtcaaaaagaggtaagagatctcacttgtaatcttgaatgccatataaatatcaaaacaagcctcgagaagctcctcgaagagcactcagggcctaagttgaatcaacaaattagccgcaaattgaaaagtttcaagtctacccaattttgtgaaaaagtgatatcttgagaactggtaaacaacttcaccaggactaagaaattgactaagtaatctcaatatatcactaaaatatcaaaaaattacaagttcaacacattttcccactcataaagcgtttaggttgacgtcagaatgtcaacccaggcgttagatgtcaacttgggcgctagttgctgaatttcctttagtaaacaatcataactcactcaatatttatctaattaatgccattccaattgagtttgaaagctttttcaagaaatgcctcgtactcatatcacaatgtcaaagatttaaggtcaaaattttatccctaagtcaagtgtgataatttttatagattacccaaaaatgatccaatggacccgattcaagctccaaaaattaaagattattatcttaagtcacttttagccattagatcatcataaacggtcatgatttgctcataattatttttttcatattttttgtattattttaatgtatctcattgcgcataaaataagagctccactagctcctttttagacattcaaaaaagcccctacaaggtcagagcatatctctctactttctctctctagaaatctaagctcttactttagccaattctcttgtaattgttgtaagaaataaaaactcaaagtagatgtagctccattaccatcaagacatagggagtgagctactataaattatgtgtgtctctctataatatttacttaattcattattcatctcgccaatctagcaagttgatgttggccactttttagtgtcaataatttttatttagttgtttacaccaagattagccctaacgacatagacatcaatgtttgacacgtggcatgaaggatgacaggacggagttgagtagactcgagtcatagcagtcaacctaggaggggaccctagcctcacgcccaggttaactctaggatctctaggatggaagttcagactttaataacttgaatccaactcactatgttttagtatttagtaccatttagacatgtaataacctaatccagggccagggagctaaaattacacaaacctactactcggaagccaacctgggcaactagggtttcacctgacgcccaagttgacattcctcaactaggatttcagtttctaggatcgtctttttgaaaagtggccaaaactttcattgagacatcaactagacataccacgacatatttgaggcattattagaatcaaattcagagcaacaagttaaattttttagcacttgaggccccagggccccgaacacccaatgcccaagttgacaatctgtcaatctgggtgccttccaagtgtctgatcaaagatccaactttttcattgaatcattcttcacaaaaaatgaggaaataggtccttctgaaggaaaaataacaattcatgggcataaaaaatagggcccattgcccaggttgacaatttgccaacttaggccacaaaaatggagttttttaagaattctttcgagcatcatctccgtcttcagaaaatattgaaaatgaactatttttgaggaccaaaaggaacttttgaaggggcaaaactaggtcctaatgcccaggttgacacttggggtcgggcctaatgcccaagttgacattttgccaacctgggttgtttccaattcagatcagcaaaaagtgctccaagaattttcaccatcatcataaataataaagattctagtaaactcagggagaaaaccaccaacccgagtccctaagaacagggctcagcgcccaggttgacaatcaacttgggacgccaccttcaattactcaaataccaaatctgatatgaccattaaatctggcatggtcaaaaatgagggaggagacccatcctcaagtttagaagccttggaagtttcaaaaatagaatcccaatagctcggtttaaagggcccagcgcccaggtcaataaatgacctagttccttaggtactgcctatccaaatctgatgttgttttgatcgcctgtcaagtttttcacaagtgtaatgatccatgaagtcagatcaatcaaattcataacttcaattttcgacaaattgactcactcggaaattgaaagttttgagttttttgttttcataaaataataacatctccgagaacatgtgaccagcatcaccaaaatatataaatggactaggtgatgtcaaattatcacttaggcatctcaaaagataccccttggacgtttttacacttatacaccatcataattttagtttaaaataatttaaaattaataaatgaatgaataaataatattcaaaactaattaattaattttatcattttttttatcttttctatattttttttctttctttcttcttcttcttcttcttcttcaatcccagcctaacctgaccatccctaatttgctctaaccaaacttttcgatttccattagcaagaggggccgctctaaagagaaaaaaatttgttaagtaaactttgaactagaaaagtcgaggtcaaataatcgaccaccaaaacccaccacccaccactacattctctttctctactacatactccatccatatctctcagttccctaaaaatatatagaaaaaaaaataaaaagcttcctttttctccaagatcacgatcctgatcccaatccttatcctaatcctaatcccgattccgatcacatctcttttttttttttttaattaattgattttctaagatagtgggatgtgacgagtaagaatgtggagatgaagggatgatactggtcagccgtaaacctctactaccaagaaaggtgggtggcaaaccataaaagtttgttgattatttttttttatatatatatatatatgtaatattttttaatctttaataaaagaaaataaaaaaatttattaaaatttttaataattttctttattatttaaataatttattttatgatgtggacaaataaaattttgacacttcgctattttaagaactacaaacgaaattgttaaattgggtacctacagatagggtcggcccaagcattgggcaacttgggccattgcacaaggcccctatttttttaaggcccaattttttttttttaaaaa

SEQ ID NO: 22481 - DNA, 1685 bp, Cannabis sativa
gtgtgtgaaaagaataatgagttgtgaaaagagatgtgagtgtgagtttgttgtattgtgtggcaagaattagagtgaggaagaagtaaatagtatattgagacttgggttgagatattgatataatgaatatatgtaatttaaaattataagtggaatatatttttttttttttttgagtttagtaatgttactaaatagaaccaagttatttgctgcatttttttattattattttattgcatttaaagtttatcattttttgctaacagccaacagcaacatccaatctaacatgtataggaaaaaatttaggggcattattttttcctttactgtaggcacattttttgtttatactatggagtatatattgcccttttgtcgtgtaattaatggattatatagagtattaagagaaattatattagccatcctctctggttttttttttttttttcaaattttttaaataattaatagatattagttgcatgctacatgattgttttattttatacatgtctaactcactattttgaactatattttttaatgttgtaaagaaattattattataaaaaaatgtgcatgatacctatagtgtataccttcatataaaataatagaatataattttttaggtgtggaaaacaatacctcctaaaaagctccatttatattaactttgtttatagactggtttgtacatttaactaagtagacaaaattattttgtctttgtacattttttgcttccatatttaaattataatacttgttaaaataatattaaatttggtcaaatatggaataaaataaaattaagcaccacacgatgtatcatgatgacaatatgcatatttttttgaaagtacacgatgacaatattcttagatataatatatagttcaaaacaaattaaaaagaattagtcaaccctagaaaaatattgaatttctacgtggagcaatgaaagatttgattgttaatttggagaacttatctacatatgtggatgaagcaacatgttgggtttcatccgtgttcaaatcgatgacataaaaatgtagtcaaacttccaatattatgtctctcaaaaacgattacgacttctatttttaactaatcttttcattttccctaatctccaactaaaggtcaccttttaaaattgattttgtttaccaaataaaatcacatctggaaagaatttgatcctttgttaggagtactttaggaatatgatttatttgtccgcctaaagtatgcccaaatttggtaaacaaaattaattgatttttatttgtaatagagatttatttgtgaagttattgtaaattttttagttttcatgcgtactttgttataggaatatgcagtgcatgtatgtactgctgaaaaccgatgaaattggggtgtttaagaattttcaattttaaattttttaaagtaaaccaaatcaattaaatgatcaaactaaactaaaccaattcactcaaaaatgaattggtttagttcaaaaaaataatttgtatttcgtagttattctaaatttttgtacaattattgttcattttttggtattttttggaataattacatagaaaatataaattgacattttatttacaaaaatacctccataaggtaaagtcaacatttatacattttatgtaatttta

SEQ ID NO: 22482 - DNA, 3473 bp, Cannabis sativa
atacgttgctagctagccgccaatggagtaatgttacacatgtgaccccggcctcttcgtgtgtttaattattttttttattatatttataaacaaattgtgtgtttatattaatttgggaagaaaagctgtacatattattacattactagataagtacccaaatatatatatatagaaacatttgaaagaaatattttattggtttggttaataattcaaatggagattaattagttgtatatgatcagataattaattaattacttttgacttgatatgacactttgtttggattgaattcaaaattgggtcttactactgacctatcaatcataaataattaccaaattcttctaatttagccgtatatatctgttttaagctctatataaatctgtttttttttggggggtttacacattttattggtttaaagagaagcgaagctatacatgaacttatacaagtactactgacctaaaaaaaaaaaaaaaaacttgaaagttgtacacattttacttacaagctacatataaacttatacaatataatatttgtatacttataaatttaattaattctgagctttttaattttaaagagaaggaataaattctgacggagccttttctagctaaataaagatggaatatcattacacttttctacagagaataacagcatgattttttaaaagaaaaaatcctttgagtgtaatctttttattccttttcttttttggaaaaaaaataaaacaaaatatgtactttcgagtattattccttttatgggctatgtagtatgtatgactgtttttttttaaaatatattatttcttcataatcagattctcttcatatacaggacccaattgagttattgttggggctatatccccactaataaaaatattatcttttaaaaaataaaatttattttttttagtttaataattatagattaaaataataaaaaaatccctaacaaaattaaataaatctaataagaataattataatatatgtataaatattttttaataataaataaactcctataaagtaaaatttcaagtccgtcactattagacgatagatctaaattccccgattgtatattattatctgaatatgtataataattaatataatttagattttacatagaatttagcaaattaatagtagtttctcttataattattaatttggtgaaagaaatgtcttttaattatttgtctatctgtgggctaaaaatatatgtatatatattaatatattaattctagcttcgataagaactttcctaattaattccgaacaatgaaaaaatctattatacatatttacacatgcatatgtaaactacaaatcttaaaaaatttatacagtaactatattcgtttatatattcatatatttctttcaataaagtatgattattataacccggccgcaggggtttacgtatacatatataatttttttatttattaatatatattaatttatacacacatatataatatttggacaccaccccatttgcatgtgcgtatacgtgattccagtctgtatataatttactatatatatttgattaatatgtatataagccaaaaactaatttcgtcttcatcgatctccttcttctcttctaaaaatgtatattttgatgttgggtaatctggactctttcatgtgcttgttgaatctgaattctcaaacatcttcatagctaattaattattaatattcttcttatctccaacgaaatctttattggattgtatcgacattttttaaaataattgtttttccaaattgttgatggatcaagttaattttaattaattaaaagaaagaactccaacttgcaatttattacactacaataaatatatgcagtactaaaatctagcattacttagtatatatatgagtagtactttcatatatatatgagtagtgaatcagaaattattaatcaaagaattaggattttgattgatcggacatcacactttggcattaagcataaggtcacatgtctcacaactacttaaattttgcatgcatctacaacggtcgggtcatatggacaatcatatataatataaaaatgattaattaacagaaatattggacagtgtttttcaataatgatatataaattatttgatttgctgcaacagtgcttttatatatataattatgatatagacctattatcatttaaaacattttttaggattactttaatttttcgtttggtaagaatgggaacaaacagaagctattcaaagaaagcattagtcgactttgatcaactaaatttcaaattacagcaattgaaacttctacgaatcccacttaatttaatatattacaagtgtagatcttgtttggctctgatcagacactttttttaaagaagactcaatcagtcattgttattatttaatttaataacatgtatataataaattatatataaataatattggtttattttttaccagagcagaagtattatatatataaccgagttatagtgataatgaactgaactaggtaattatttactgctttcatgatctcatttggagaaataatttaacaatctatcatggctagatgctataaatacgtacaaaaattaatacaagaccaataaaatataagatcattaatatatttattttatagtgtgggcacatttctactaattcattaaaatattatatgttggttttatttttcttttattatttcttggctaaatatataaagaaaaagacgtgtaatattgtccgctctgatcagctcattaattaaatagcattattttaattagttggtataacattacaatcatacacttaattttgacaccctaatgcatgcaagctgtagcatatgatatagtttatatatatatatatgaatacatatataattttttgaaaaattattaacttaactagaattatacattctgccgacgtttttataatatgctaaaatccagtcatctatatatagtctttgcttttagttagaccatcaattttatacatgattacattcaattttaagcaataaaaataaaaattagtctttcatttaatatcaattttctcattaattccacctagtgcgagtcatgtatattgcttagctaacacatcatgaattgagttgactcataattattaatggtaaatacaatgggaccatatagctagattaagtttgccttgtaatatatacttagatttgactagaattataaaaaaattaataaaataaagaaagcatactaattgtatacaaaacaaaagggcaaaaatcggccacggctactttcgaattagagcaattagtaaatttgcccatttaacgtttaatatatataaaaaggaatattatatatatgtgaaaaattaagaggtaaaatttaaactaata

SEQ ID NO: 22483 - DNA, 2115 bp, Cannabis sativa
actaacaaccacttcagtcgcaaagtttttattagttccaaccactaacagcgatttgatggtgagtcatcgaaaaacaaagaagaactaataatgaaacaaaacaaaataaaattatgtcacataaacaagactaaaatacttaaaactatatcatagagacaaaactaatcgtaatagtaaaattcgaattgcaatagtaaaatgcacccctgaccaagccgcacctatacccaaaaaaagttgacgggcatggccaacctcatccaatagaattaaaatcttattacttgggatttggcttattactacatgtgaaatatgaaaataggaatttccccagcaaagatgcgatatattgcctgactcctttaagaacttttaattagtcgtattggcgatatgtcattataaactaaacaagatgtcatatcatagggcatgttcataatgtgttctatgtgtctatgttaagaaagtatacatcagatccgtcatatatcattgagtatgaagctatccctcttcagaaaaatgtgacttatgaagaacaacctatcagaatcttagcgagagagctaaaagtattaaggaacagagagattctagtaattaaagttctatggaagaaccacaaagaaggtgaggctacttagtttttagactccgagatgtatatgaagtatattcacttgtttaatttttaacttgaggttgtattttgaaattttgggacgaaatttctttaaggaagaaagaatattgagactcggtttgacggagtaaacaataaaaaagaaaagaaaaaaattgtataaatgtggtgggacccacattttattaaataaatcccttttcccattttcctcccgcccataaccccctctcttcttcttcctttctttcacgaataacaatccacaaacataaatgccagcgtaactctagtgagcatttttttggccatcgcctgacccacagtattggttcccatctgccggtgatctcaaccctcaagtggcgcctcctcattcgccaacattagcgagagatctcgagttaaagttttgaggttcaaactttgaatgtgttttttgatcacctccggtgtccgtttgacaatcggtcttcactagtaaaatcatctcgtcgaggaagaacaatctgcaactaaattttatccaactccatactatttttggtgacatttttataactttgccctttccaacgactttttagtgatatcatataccattttgacaaatggttagcatgggtgtgatatactcgtcgaggtggtcgttttgatatatactactcttattttcagcaaaatttatggtacaccaatttctaccactactgatagttaatgtgcaccacttaggtgaagtttcaaaaattgaaacttctaatatagtcatgttatatgtcgttgggttcggttttgaatatagtatataatgataataattatttagccatttgaatatatatgtaaaagtaatatctaagattgaacaaaataattggagctcaggatttgagagcttaggatcgtctttttggacaaagtttaatgacttgagagaagtagagactcaacttgattattggatttgattttattgtcatgaatattatttgacatattataattttagtgatttatgacatatttaaaaaattgaaaacttaatctgcatattttcttggactgtcttggaggcactgagtgccaaatatatatttgtacaattacctatataggttatgattttttagattttatcaaattacaaccgttacactgtcaaattttctaaaataagggaatatgtacttttgccattcttggtgatgtatttgattttattgaggagagtcatatttatccagtcttgtgcatattgttattcacgatctagtctctgtatcatcataagtagttcaggtgtacatgcactcacctgttggtgtaagaccttgatctgcacatgaagtgaattgaatgtgagccccattattttggtggttcaccactacccaattgaggatgtcatttctatgattggtattaagagctaggggtctagtggacaatgtgatatg

SEQ ID NO: 22484 - DNA, 3999 bp, Cannabis sativa
ctctctctctctctctcatgccactttcaggttattaaatactaagtctatttctaatctcacttattcagaatttttcatgcatcattctcaccattgtaacattaatagagagccatattagaaattacagggtaagagcctagaatctgtgtggtgttatctatcaaattagtacaactaaaaagggagtaggtcattcctcgctaaacaagggggtcgaacctctataaatcgttgtgttattttcttatttatttttattattttcacgtggtgattgttgatcataaataaggcgccattgtcggttgactaatttttaggtcaacatgttttatggttgaaattaggctgttcttgagatttttgttgaatttggttgggtttggataggtttgagaagtgttaatctcaaagttttggtttcctgcaaaaaaaatggcagatcgttttctcaaaaatgatctaccatttttcttggcagtgttctagaaaaacatcttactatttttagtgaaaataatctaccattttttagaaactttttcccaaagtcttggttttaggtgttttcttgatatttagggtattgttacgctattgagaaactttcgattttgagtttaagacctagaatgagttaggtcatactactaactggtttatcgttgttgtgacatagggtctgagattgtcgttcgttctttgtaaggttggctggtacacctgaacaggaatttaaagtaagagaagtatactcgtaccacttagcatgtcaagataagttacgattattattattatttgtgatttgattattattgattataaagatacaataattaccattttgcaagaaagagtccttactctaaattgagactgttgttaggtttcttattagttacctcattaggaaacgataatgacattggatgcatggatagatttatcaaaattgtctcattaggcaacaacggatagtacttattgaagtaacagttacaacttatcttattagacagataattttgtaattttaaattgttatatatatgtgattattcatactgcttgtatgtgattgaccgaattatttgtatgttggcatgcgattattgttcttacatttcttattgagtctttgtcactcatatgtgctttgtggtgtaagtaaaggtaagggtaaattgggtcagtcatgagtcagcagtctttttcgacaaatgtacatatcgatctatctggtgtgcagagccgagttgtcaagaaatgttttgatgttgtatctgcgtagtattttgtttacaaacttagtactaaagtttttgtaacaggggattcctgaagcaaaatagtattttattaaagttttttttaaattattaatttattattataaactaattttaaaaaaaaaaaaaacaataccttttgcattcttaaaagttaaggtgttataatttattttaaaaatatgataaaaaagtaaataagaaataatatttaatgtactctatatatgttaactatcactatacatctatttatttaccattagaaattgtgaaaactttcttatatagggacaaaaccaacaaaatcaatgtcggtatactatagacttattatgtatatatatgtaaaaaaaattaagtagatcaagacttttgatttttttttaatgacaacatgtattataattatattaattatacatgcattttgtttgttttcagtaaatttttaataatttacaacacggaaatataagatttaaatagtcaattgtatttatttatattcttttaatagtgtataattaattgttttgaattttatttttaatgttgtaaataatttatttttttcctgaaacatatgaaatatctattataactacaatatataataggaaaatttgaatttttatgtattttataagagataattggttaggagaaccaataattaaggtaattttaaaaatatgacacttttacaaaaacccctaaaataccctcctcataatttctaaccctttctctctccttctcaaccaaatttctctgcccacttcgcccgaaccgaacggcgacccccacctcccaccacgagacgacccccacctcccaccgagacgagtctgacagagacccacagcagcaccactccgaccgagacgccgacggagacccaaagcaccatccacgaaccgaacccacaatgtccaaggtatgttttaatttttgttggatctaagaaatgggtattattttgcttggggaagacgaagactcgatgggtccgatggtcgatgttgctttcaaatagcaaggggcccgtgggtccgatgctcggaccgataggggtccgatggtccctgttgccttcaaatagcaagggcccgatgggtccgatgctcgactcgatatgggtccgataggtgtctggtccgatgagatttggggggtccgatgggcccgattgcaggtaatgtaaatggggggtaaaattgggttttagaaaaagttatctcattttacaaattatgcatagtattagtttaggggaccaatttttaggtttattgagcgtggaatttcaaattttccatataataacatataaaaaaaataggttaattagattttttatctccaaactttaacatgtacaaaattatactttttgttcggagagcctgatttgacacgtgtcaaaattcgagagatatgatttgataaatatcaaagtctgagcataacataatatatatggaccatcactgcaatagtaaaattgaatgaaattagacaaaatttcttaaatctacagcttcaaaaattttgaactgctaaaaaatttagaaagtataatttgtacatgtaaaaatcctaattaaaattaaaataaacttttataggcacctgaaatagacaacgtaggtacctgaaatagaaaacgcagggacaaaaataactaatacacttttatatattttgaaggaatatatagctatttttcaacaaaggggcacataaaaataaaaagagatacagatcgaagatcagatctcgtgttcgatggactttcttaaggaggataataaatatataaatatattcattataaaacaccattaaaattatttattgtttctaaaatcaactattatatataaattcattcaaagaaaataaaaaatattatatataaatctttttgtgtgtgtgcgcgtgcctttatacttatttatatatttacaaacatacatgattgattgttgccttgttccaatttaattagtaattagattgaattgaaatagattggatttttaagtttaattagatatggattgaataatattttttaaaatttaattactaattaaattaaatcagatgagaaaaaaaatattattacatcaagcaatcatagtacaaaaaaacttattagtgactcatattccacaagtgcttatccatatatcatttctttttataagagacaggtcgcatctagcctagctagtccaaacgaattgatctttaaatgtggtcatagatgattataaattaacaaactatattaagtagtaccattaatttgaacatcatcatcaaacaagactactctttctctttttaattttttttagtgaaaaaggaagaatcaaatcatataatagtttctgtaaaagcaacatcttttttctaaataatttatttatttcttttatttttctaaaaaaaaaaaatcctttcattcaaatgacacatattcattgtcactttaattagttttaaactttatttgttcatttcatttttatattgatgatggagtagatgttgatttttatatgcatcatcaataatgctttttaagtcaatgtcaactgttaaggttctttttaacaaatataataattaaaaaaatactaattaagtcacgtgtataatttgtgtaggatattattaattattattc

SEQ ID NO: 22485 - DNA, 4737 bp, Cannabis sativa
ccatccgatgactacaatctcattggaaacaagtgggtgtacaggcacaaattcaattctgatggttctcaccaaaggtgcaaagcccgacttgttgcgaaaggctttcatcaaagacccggggttgattacaaagaaactttcagccccgttattaaagcttcgaccatcagagtagtattgacaattgcagcctctagaggttgggaaataaggcaactcgacatcaacaatgccttcttaaatgggattcttgaagaagacgtctatatgacccaacctcaaggctttgaagagaaaggcaaagaacattttgtttgcaaacttaacaagtcgttgtacggtctcaaacaagccccaagggcatggtttgaacagctgagaaacacaatgttaaattgggggttcaagcattcaaaagcagattcatcactgtttttcctcaagacagccaaggagatcattcttgtactaatatacgttgatgatattatcatcacaggaaataactcaggtacattaaatgccttcatcactcaactcaacaagaagttctctcttaaagacatgggctctctgcattttttccttggaatagaggtatttagagatcaaactggtctctatttgactcagaccagatatatccaagacttgttgacaagatttgagatgagcaatttgaaaccgtgcccgactccaatagcagcaggaaaaccagtttctgcaactgatggtgaacctttgtatgatcaaaccaaatacagaagcttaattggagctttgcaatacctttgtcatacacggccagacatagcttatgctgtaaataaactaagccaattcctcaaatcaccaacaacagttcactggagttgtgcaaaaagaatcctcagatatctcaaaggcaccttgaactttggccttcatatcagctgctgcagtagactcaatattactggtttttctgatgcagattgggcatgttgccctgatgacagaagatctgtagcagggtactgcgtttttcttggagaaacactcgtatcctggtcctcaaagaaacaagcagtggtgtcgagatcaagcacggaatcagaatatcgcgcccttgctcacctggctgctgaaatatcgtggatcgaatcgttactcaaagaactcaacttcccactgtgtgttacctctgtagcatggtgtgataatgctggtgcaggagctttagcagcaaatccaatatttcatgcccgaacaaaacacatcgagatagatgtgcattatgttcgtgacaaagtactgcagaaggaattagaggtcaactacattccttcacatgaccaaatagcagattgtcttaccaaaggtctatcccactcacgatttcaatttcttacaagcaaactcggggttagaccatccccctttcgtttgagaggggctgttgagaaatagaaattctgcaccaggtgtcacggacctattcgttatcagcctaacaaacttctggtacagcagcaatccccaggatgatttcagcaatcattagtgtccttttattgttagaatattccccttttcctttgtaattctctgacagctgtacatgggctaacggccctattttcatcacatgtaatattttggctataaatacaatatgcagcagctctgaattcttgagctgaaaataccatttcatagttttatctgttagcttaattttatcttggtatcagagcagcttttcaggcctacgcctatggctactcaagctcctgggaatggtgatcaaacccctgctgcacacccaacagcaagctctgctaatagctctgctgtcatgggaaatgcagccaacagatctgaaaataacccctatccaaacacttacccacaacatttcagcacattaaaccaaccattctcccttaagttggacagaaacaactatactctttggaaaacaatggtctctaccattgttagaggtcatagactagaaggtttcctaaaaggaacacgcatatgccctaacgagttcattacagctggccctgcagatggagaaacgggaccagagacagggattcaagtcaatcctgagttcgagcagtggataatcaatgaccaactactgatgggttggttatacagttctatgacagaatcaatagctactgaagttatgggagcaactacagcagctggactttggcaagccttggaaagcctctatggagcttattcaagagctaggatggatgaaatcagaactcttatacaaacaaccagaaagggctcaacaaccatggctgaatatctcagacaaaagaagaactggtctgatattttggctcttgcaggagacccttatccagaagcacaccttgttgcaaatgtgctatctggtcttgatgccgaatacatatcaatcgttgtccaaatcgaagcaagagtgaaaacaacatggcaagaactccaagacacccttctcagctttgacagcaagattgagaggcttcaaactctcaccaacaacaacaagatactcggttcagtttcgaatcctcaagccaacatggcagcaaaaccatcaacttatagcagaggtcgtggatcctactctaatcaaaacagtggtggtcggttttcgaatggccgaggtaacaatggaggaagatcaagaggaagaggaaggtttagcaacagtggaaccaaaccaagttgccaaatctgtggaaaatatggccattctgctgcaatatgttacagtcggtatgatgagaatgtcacaggacctgaacaggggcaaaaccagatgaaacaacctccaaatgccttcattgcaactcctgaagtggtggacagcgatgcttggtttgcggacagtggtgcgagcaaccacattacttcggatgccaccaccatgaacaacaaacaggagtatgggggtaaggaatcagtgacagtaggtaatggaaacaagcttcttatttctcatattggtagtggttttcttaaaacaaactgtgataaaactttgtgcttaaaagaagttttacatgtgcctgacattgctaaaaacctcatcagtgtttcaaaacttactgctgataatcccatattaattgaattttatcccaatgtttgtttgattaaggacaaggaaacaaagaaggtgctgctacaaggggtgcttaaagatggtctttatcaactcctcacaccaaaaccatctcagtccaaatctactccttcttttcaatcaagagttcgcaaaccagatctgtttgctggtgttgctgatactcaaaatgttagtgtagatcagtcgcaagttaagcatgtttctgtttcccaaaatgatgtttggcataggagattaggccatccctcttctagaatattgagtcatgttttaaattctaccaatgtaagatttgcttcaaatgaaatgaaaactttctgtgacgcttgtcagtatgggaagtctcactcactgccatttaaactctctcaaaaccgtgccaaaaatattcttgatctggtgcatacagacctatgggggccagcaccaattgcatcaaatatcaactataggtattatatccacttcgtggatgatcacagtcgatatacatggatttatcccttaaaatttaaaaatgatgctcttgatgcttttctaaaattcaaagccttagctgaaaacaaattcgaaaggaaaataaaatgtttgcgaacagattggggaggagaatttcgctcttttactgatcttgttcaagctcatggcattgaattcacacatccatgtccccatacctcggctcaaaatggtcgagccgagagaaaacatcgacatatagtcgaaatgggactcactcttcttgcacaagctagtatgcctcttaagttctggtgtgatgcttttcacactgctgtttatttaataaacagactgcctacaccagtcctatctctaaaatcaccacatgaagttctctttggagaaaaaccagattacaactccattaaaacctttggagccgcatgcttcccttgcctaagaccttaccacactcataaatttcaattccattctgtcaagtgtgttaatcttggctttagtaatgtgcacaaaggttataaatgtttgagtccaactggtcgagtgtacatatcaaggcatgtagtttttaatgaacttgagtttccttttcagcaaggtttcttgaacaactaccaacctgaaactccagtcattattcaaaactcaacctggtccttgttaccaacaccatctctttcacattcgcaacccaacttcatgcattcatcagatggcactacccctggagcagcatcatctctgttgcctgacagtcctcaatcgccacacacttcaactactcctgcttcagtgacaacaccagaacctcctcaacactcatttgaccacaccagtagcccatacttccatacctcaccgatgcccttgaataattttgacactcttattgatcctgctgtttcggctgatccttcttctgagcctgttgcagctcccttggcaccaactcacagcatgatcacccgggggaaagcaggtatattcaagcctaaaacgtacctaacccaagctgctgctcaatcctatttttctgaacctacaagtgtcgaagaggctctgcaggatcctgtgtggaacaacgccatggatacagaaatagctgc

SEQ ID NO: 22486 - DNA, 4147 bp, Cannabis sativa
  modified_base (99)..(129): a, c, t, g, unknown or other
gggaggagacatattattatgctgccaccaatgtaaggtttcttatactttatatgtgtttaattctattgttatagagaattcatatttagggtgttnnnnnnnnnnnnnnnnnnnnnnnnnnnnnnntggtaaaatatattccaacaaattgtagataatgtattccatatttcaatgttgagaaaatatgtcacacttgacaaatatcttgagtgacgaagccttagagctgcagtcatatttgtcttatgaggaatagccagttcagatcctcgatacataagaaaaggtttctcggaacaagaccataacattggtcaaagtactctggaggaacagtaaggtggaggaagccacctgggaatcggattcccgcatgagggctcaatatctagaaattcaggttagatttcagggacacaatctttttaacgaggggatgattgtaatgaccgcatgattagaatatggattagtagggcaattagagttaattacttttattttattattatatttgaatatgtatgttgtgggctccattttcagaaaataggcattagagttataatttctcaatttcgaagattttattgaactctaagtgtattaattatgtcatatgtgaaatttaaattttttataatttttgctccttatacgatggaaaatacaacgaatggccaattgattcacatgggtaagatttagaatccttttttagtagggcaatcattagtgacattagaatatcaagattaggcagaattatggtattggaccattttacccctaagccatttaattacttaagcttgaggtaaggttaacttagtcattttgttttaagtgataagtggattattccactaaatctaccggttggccattgtggacgaagtgataagattagtgttatcttttatttatcaaattaagttaagtagatataacctaaactaagatcaagtcacctcttcatctttttctccttctccttcggcctcaaggaaaaaccagcaaaaactaaaagtttctttaccaatttttgaggatttctagaagaattcaagaggtgtaacccaaggtataaccctagcctctttctcttaagctttttgggagtttttggtgaaattcaagcatgcaatttggtagtttggctctgcctgaaccttaggtttaagggtttgttttctaggttattttttagttgactaagggttatttttgagttgatttttcttattagttttattgttgagcaagtttttgtttaataactcaaacttggctccacaatggtggtttctaaatttctacatattttgaggttttatcacttataattggtctattgtgatgttattaggtgttctcaagcttagttttaagtttggggttgaactgggattgtttggagactcttttcttttctgaagcaaaaaacggcaggacttttctgtagaaatggtctaccatttttattggcagggacccagaaaaacaacatgttgtttttcaggtagttttatcgtaatgttgtttttttctcgtatttcctcgatatatagggcattgccatgctatttattaatagggaaacttctagttttgagtttaggttcccaaaaaggttctagcaagttgtttacctgatttacatgattgtgacataggacctccgttcagcgtgtgaaattccattcaggttgaccggtacagttgaatcataaaatgaggtaagattagtataagaatatatatatgtatatgtgtatgtatgtaaattacaagttgtttatgtgattcatatactaccaacactagtatggtagcggcacaaagtgcattggcacaatatatgatgttcaaagggtatgatatggtgttaccatactagtatggtcaagtacgtagtgcatgtggtacaacagtcagtggtactcaaagtactatttgtccctaccaacactagtacgggacaagtactaagtgcatgtggtacagaggtcgtatttttattaagaacgttcttgatcatctgttaagccttgtagataggtgtatgggtgcctaaatacaaggcggtaatatgttatgtgttatatgctttttttacagagtttgtcgattcacatattttatttacatgtgtaggtaaatgaaaggctaaggctgagtaccagtgagtctagagcttggggatgattgtacatgtcaagatggttagccctagagtgttcggtcttaggacaacttgggttttattttgtagtcgcagtgcaatatgtttataaaatatattttgaatatgaatataattttaaaaatgggatctcagctttccgtagggatatatatatatttatgtttacaaaagtttaaagtttaattaaaaagttcaaatttgacacgattttagagaagtcctttgattagtaaaggtttgcacagtaattagaaagttactgtagcgtgcctaagcaatatggtgatatagatttgttaacatcagcattattaaatggacgaaccaacttaacttgctgaagtaaattcagcttacagccattctccgaacatgcaatcttaatcctcctagttgttgtacttttctttcccataaagtttctaaaatggaggaaaaaatgctcaacaactttaggataatcatcaactattacatcattcacatagtaggaaacaatcctactctcagtcttttcttcataacagcatggaagtagctagtattttcatctccaaatctcaaccacgtaatcttagaattctgatggagatagctagcatactaattttgggctgaaaaatacctctactgaagacttttttcaatttgaatcaacactgaacaagaagggttggtagcaagattatcttgagctatattataggtttccttaaattctctatacatggttgtaacatcacctttctctttagcaaagaacgttttcaagacatgtttaactctaaaaagattttgagaaattcctttaagatcaacatgccttgaaattccatgccaacctttaagaatagcctctttgtagccatctttctgcatccagtaattacaaaatataaaaggtcaagtaccataattacccacctcaaaattcttaatgaggcagtagctataattcgagatagctccccatctaaagctggaatcaatattaggggaattatctgaccaactctcattggtaaaaactctatcaagctcaaagtatattctcactcccccatcatgcttattagaccaagtataatgagcacctgaacaattgagctcatcaacttaacccgtagcaaaccaatcttgtgcatcttgaatttctttagccgtgactttcctaccaccacatatgtccttataattgaacatagcattgaagtccccaaggatgatccaaggtttattcaagtgacctaaaccagccagcttggtccaaagatcttttccctcattcaaagaattactctcataaatagttgttaagaaaaagttttcttatacccaaccatgtttatcttacagtggataaatttcacatcttctaataaaatctccaccttgaccaacttgtctagccaaatcaacattattttataagaaacgacctgactagaataaaaattatagttaagaaaattattcataatcacactatgagttttatcatggttaattttggtctcaaaaagagcacaaaatccaacttttttatccttgcaaatttttagcaactctaattgcttctcctttctatccagacctctcacattccaccctaacaagttgcacttatccatgattagaataattcaaataagaacctacaaccccatccttaacatcattaagaacctcatgaccattgctagtagtagcttttggtcgagtatccataacaactttagaaccctttcttcgctcaataatccacttccctatttcagcactaatgaacatagatatgttgcttgactacacctccacgctaggcacattcttatcagcaccccttccctgatcttgaacaacatcctctagaattctacaaatccttagtttgcaaacctaatggaagaacaacagcctcctgtatctgca

SEQ ID NO: 22487 - DNA, 1506 bp, Cannabis sativa
aactaaaaggacattttgttaattttttttaaaaagaaacatttattaacttaattgttagatttatggtcattttgcatctttgcccttagaaaaataagttaaaacaattatgcttcgatataagttatctctaatgtaattatatgtaactatataatgaataaataatctattactttacatcattgctataacacacattaaagccttttcttagaggaaaagaaactaagaaacattttaattttatataacaatcaattacaataataattcaataactaacatatacataatgtatgtcttatttatatgcactacaaaaaagaattatgattcttcgtgacaaatttttaattacaacataaattttttatgattaaatatgatttgtcacattatttatgaccaaaatataattttttgatattactaatttacttttagtcacaataagtattgtaataaaagtacatttagtcataataaattgcaatttttagaacaaatcttttagtcataacacaaaaataattaaactcgctacttcttcaatgtgtctttatttttttttcttcttatacccctttaacattttggtgattgcaaaatatacaatacattatatacaaaattatagatagtaataagattgaaatggaaaatagaaaggatagaaaaatcattatctcattgctactaacttcaaaacaaatagagtagcaagacccagttaaagatatctccatatcaaaataaatagaaataaagatgagatatcaaacactgcaatatactctatatatgtttacaaattacattgtcattttttatcatatttctgaaaaaactttcctcaaacccaaaaactagttttacattgtaactaaaatcaaccccataaacaaaattatgaatgaaaagtaaataggctaaactcagtgaagcaataaacaagcaacatcatcttaggaaaaataaaactaaattcagagaaattggttataatttttgaaaaattatttgagcatataaaacacatagttcctaaaatctcacaaatcaacaaatttggagttgagtgaacattcgaggtggaataacagttcgcgatgaagcttggtgtgtgtgagtaaaaagctaataaaagcatccaactcaaacaaaattcattaatagaatttcaaaatctgatgaaaattcaaattaattttacaatatagaaatcaaatatgtaactacatcagtacatagagcccacttgtaaattggggattttggtattggatgagaaaaaaaaatactttgcataccatccaatgctttacaactgtaacccttaacatttttggttaatgaatgtttagctcaactatcattatatttctcattcaaaaaactttagatacagtgtatatctagtctagatagagaaaatacgaaacaataattgacgagaaatgagaatctgtagcttgaatttgaaaattatatattatggga

SEQ ID NO: 22488 - DNA, 2550 bp, Cannabis sativa
aaaaagcttgattatttgccatttttctagactttttcatgtttattgtcgtttttaatgtttaatgtcgttttttgtcaatttaatctcgttatcctgattttggcgtttacgactttgctgtcgttttccgaaataattatcgtcttcaatttgattgtctctttccaaaattattgtcgttaaaattaacgtgtattctcaatttttgtcgctttaaaggctttgccgttttattaaatccttgtcgttttcataaaaaaatatcgctagctgtttttgtttctggagattatgtcgttttcattaattttgtattttttaaaccagaatgtgagatatgtttaaatttagaaataattaatagttcaatcatcacggtagaaatttcagcaagaacacaaactttttgtatgtgacttttctcccttaaggcttttgagtttttctagtcatcacaacaataaaattgcaagaatatttgtgtattatatttgttttctgtaatggactttttaaatttatttatttgtgtgtactatgtttgaaaattcatgggccaatttgatcatttttcttcttcttgatcatttcttgtatttcttatattcttttcgcttggttttaagtatcaactaattcaccctaaaattatttaaaaataaaataaaggtttattcataattaatacagtatatatgttggcaatgaatggtttagacatagtttaattgagattccactccattaattcatttgatgaatccaatgaatgattatataatatatgtggtcttttgaaaaagagaaaaaaaaaagtcaaatattaggcattaatggatttatcacctctctttatcaagtgctttggtttggaccactttatcattcattattattattcaaattacagattttcgatttaaaaacatagtcattggtgtaataattttctcagtaaaacagtcaattccttacaaagtaatttaattaaaatttatttatttagacaaaaacgtaaaaaattggaaaaggaaaacgagttgacgttgtattttttttttctttcaaaaattatatggtacaatttcttggaatatataatattatatcatatatagaatagtaaattcttccaaataaatatatatatataaatacatatcgattatcatgagctctagcaataattttctaaattacaatgtatatagctttttattctttcaatttttttaatagtacgtgtgaggttgagctttttatccaaaaaccctacttaattattagttaatagtcaaaaaaagtcaaaacattcatattatatttggtattttaaagtggcgaatatttataattagttaaataacagtttctcgaataatttattaaattaaaatgtgtgagtctcgatattatatgtcacttcttgtggtgcttgtaatttttagggacagctctaaaagtaggcaagctcggcatgccccttaggcccttgaatactcaagccccaaaattatttagtgtagtagtaaagtgtcttatttgaagctaggtcaaagatcaattcccaacttttatttttttattttttttttaaaaaaatatttaatgcatgtgtagctaataaggccttaaaatttaaaaccttagacccaatatactttaagacgatccaaaatactcattagtactacaagtctacaatacatgtgtaaataaaacataaaataatagataattagtgaaatagtttattttttaaatcattaatttgtgtttttaatttttacattttttttacgaaatggtctcagtctaataatttactaactaataactatttaagcgtttcgatcactacttgtcggaaattttcaaccagttatatatatctagagtgtcaaagtctattttgccaaaataaaatattaaaatgagaaaaaaaaaattataaaaataaaggataggttcaccttagcatttaagttatgtagtatatatgtgtatcccatctgaacttttatttttatttatatattttttaaataaataaataaataaaatgaaaaactaattttgtaaagcaatattaaagtaaaagtaaaagtaacttttggaaaagaatgagcaatggatatgtatttccaaaattagacaagaacaaacagtgagtcatatatttgtattttgtaaggattgtggtcagatatatataattctctgtaaatattattcttagtgaaatccaacaacaaggaaaggactactattgtatatattgttcagtctcatacaaacattttctcaactttgttttttttttctttaatttacctgaatatagagtctaggaccactcagacttaacttccaagattgccaaaaaaaccctaataacatatgaatatttatgaaatgcattactattagtttttttctttattaataatgaatgaatcctatgatttggctttatatatatatatatatatatatatatatataccagtttttaatgtgtaatgttactaaataaatttatttata

SEQ ID NO: 22489 - DNA, 6559 bp, Cannabis sativa
  modified_base (1815)..(1827): a, c, t, g, unknown or other
ttacactccacctttaagggggagtattaagattaattagtcgtaaggtgtagtgtttgttaggagttagttgaggttgttatgaccggtaacactgttaccttgtattctaagctctatattaacacctctgtaaactctttcacaagttaatgagaatttcttacttttcattctctctgtcctaaatctgaaagtaagctcttatttcagtatagacttaaatggttaggtttgcattggtcacttaggtacttgattcttgctgagatcaggattttgttctatcccatacttggcttctcaatgattgaagttggaaggcctgtaatcattagtgaactgatgtagatctagctgttttcaatgttcatctgtgagacctggaatcttgtatcgggagtatgatgagatatattagtatttttgtgtccggagtataatgcagacctggaatctgcatgcaagctagtttatgctgttaaaatttcatattagtattcttaaaattaatctgtcttgtgttgtcctatagggagtcctgtatctcgttgggcatctgtagcttttggtgctgggattggcataggatctgcatacacagaatgttcccaattatttggtggatcgcctgcaaagttggccgcttccaagtttgctgagactccagcttctcaggtacaagtagttttctaataattaatgaatatacttaaatttgattattttttcaattggacagttttatttgttcctgaaattaaaaaacagtaaacgttttttaaccccttttagtttaactatagtttgatttttatttgatggcactcaccattgctgaatcatcatacctggggtccgggattggacattattacatgattttttctgggctgtttcccgaaagtttgaaacaaaccaaaccattttctcgtattgtgctaaaagttttagtaaaatgagattgggataactaagaaaataaatgaatataatttaatttgatgaattagcagtagtttaaactttaatgtgataactcacctcttagtcaattgtcttccagatgcagttagtggttaacatagtgttaactttgagtctttatgttaagaacataatttaatgtattagtaatcgattatttttcccttcaggaaggacaagactaaaggagtacatgctattgaagttgtactaaatcttgggtaaacataaattatcgtaattttgatgttggctactattcctagtatgactgaatatgtacttgaaaaattgtgtcgatggattaactgtttaccatggactagatagagttcattcacctctttgctcggtaagatcataaagagcattatgtgaaagaaaattaagtcttgtcatttctatatgctgtctgcgttactacaaggaaaaagatacagagaaataaaaaatagaataaattggtcttcataagacttgtttctatattcctaacctactattcattacagagcacttacatgacttaaaataattttttttttttttttaaatatttgaagaactaaattaaaaatatgctttatcatactcaattttttttcattttaaattttttttaaagtttactattcatattttatatttatagaatattattgttctaaatatattttattaattattttaaattttactaatttatttttatattcggttgtgtaaatattaatattttatatttgaaattaataaaataattaaaaattgatggaagtgaaatttgggtgatgtattttaaagaaattgatgtatgatgtaatatannnnnnnnnnnnntaaaaaaaaaaattgagatttttataatgtattttaaaagatagattagagaaactgatgagagtgctcttatccttttattttaatgaataatgatataatatcaaaatgatgtactttgttacgttgcaacgttgatcctaaaatatagtttgtgcattttattttcctacaaaaatcaagttctcatgaaccctcatcacaacattataggtgtattgttttgacgttgaaaattaagtttttatggtagcaatgttatgtggctccaaaattatggtttggaaagatccgtcttttgttaaaattacaaaaaatcttgcagtattccaaatttataaatgatttgttttggattggaattttaattaataaaaatataaaattattggtgcttcaattatgatggaagaattatatttgctttgaaattgtgaggatggtgaggaataatatatgttttgttgcgatgatgatcacaaaatatggtttgagcatattttttttcctacaaaaatcaaattatcatagaattatcatcgtaatatcataacatcgtaggtgtattgttttgacgttgaaaattaagttgaaaagatcattcttgaaaagatcatgcttgttggtacttcattgttattaatcaattgcagctcacaaacctgacgacgctctctagtgctgaacaaagcttgtagagttggtcttgatgaaactatggttatttctttagtgagttaaacactgtcaactcacgaatctttggataagtggatgagtgctcacacatgtaacaactccctaagactcatgatcaagaaagcccaacgggatttagtatggaaagtgaccaacgaaggcatttattcgatcactcggggggcaaataagacatagtatacgggaactatgctcgttacatgagcattcacaaaaatcatggtacacgagagccatgtatatcacacacacctaggtatacgagagtcaggggttgcagtggtatttcgcacacttgagttagtatttcaatggtttaataaaatattgatgttatccctagtaactgagtttcttaatcctgaagtgctagtgtgagtactggtaagttcattaagttgaacaagcgcacgtatagactatttacacaccagagttaagcactattatgatataaacgcttgaggtcttacaagaatataaagatcgagtttataaatctaaagtgctagtgcaagtgttcctccttaaatcacaaaagtaaaaaagaaaacaaaagcatcatcaattacaaaaagctctctggaagtaggacgctgcatccagaaaagattgtctgattgattgaagaaaatcctcttggagtggggtgttttcccagttgtggtattcttctggtggctaagttcctcttcagtatgggacgctgtacttagcacgagtttaatccaatctttcttttatctttttcctcccttggagttttttctataacaaggttctatgagtcgaaatcatcaaactaggttcttcaaaaacctgtgatttcgcccctatacagaagatctggcgggtttttctgcactactcatcggcagtgatgcatctcacttatgatcataaagtgagctcatgcttgagcaccaagcacacaagcaataacccactacaccttaacagtggtccatctcactcacagtagatagcttcaacatacaaacttcaaagtttttcaccccaaccacaaagagatcaacattgggggcaagagcagtcaagctcaacaaaatttcaaacatcatcgcgataaaggtgatggttaataatcaagcatcacgaaatgttctaatcaagcatcacgaaatgtattaaagaagaaagcgaatgtaactggattggaagaaacttcaatctcttacaatatgtgaaatttggatagagataaagatagacaaagctctattaacgatgtcataaagatagagcctaatgcaatctatttatctcaattttcttagtcttaaaaattgtcaattccaatgatactttgtattaaatataataattagaagaatacaactaaaccaatttggtcttaattctttttaacttcacttctaaattttgaagtttgaactgaccaaacaaataagcgataaaaatgtgttttcatgacagattatgtctagtcgcatctagcttattagactatcataagtagaaagttttttttattaatttgtccacgtcagatattattaggttttttctgtcacaactgtcttggttatttcaatttatatttagttagttttcaatatataagctactattatttattgtggtaactaactttgatatatctttattctttagatcaagcttcgagggtttttccttttccattttgtctctcgattttgcaggtctgatcgaagaacttcgtagatgttgattcagaattgcagatcaagatgatgaattcgaactaaagggattttagttgcttcctcaccattatatttgaagtgaatttaaagggagttcaatgatttgaagtaagggaatcttgtttttgccgccaaagattatggctgtttagggtagttgatttctataaggattttgcaagattgtacaaaactcgaaattataaatttgcaaaacatgttagcggaatcattatcttagtttagggaatccaaacactagtcgcttaaaatgtgtttctaggcaggtgaaacttgtaaaattgttgtctcttttttcttgaagtctttcaattgattctttaattgatttaattaattgaaaattggattaacatcaataaacttggtaatctgatctagtaactaggcaaatttgttctttcaagtagcatagacaattacttttcttttctatctttccaatacatttttgcacaaaaatcatatacaaagaagcagaatttctagataagatgttcattcaagggcaatgagccaattcttgaaactatgatctactcattcttttaacaatgaatactgtaagcgattgcaacagcttccaaaacataaggagttaatacatatcctgttattttgttagcagcaatcgacaatggtaagcttttatattgttatccagctccattctgagtctcctgctaatacaacagaaaataacaacaatgatgtcactattttagtatagtaaacagcaagggaaaagaataagcaactcactcttggtgaaaccatatgcttcaaagcagcaataagctctaagagatactcaaatgcagtcttgtgaggttcctacaaggggaaaagtggaattttcagacctctagacccagtgataaggggtaaaaggagcaaccaaacagattgctttaccggcaaatatgatgatagaggcaggccttctaccacaacgcctgcaggtgcccttggaatttggacatctttgataacgccagcatcatccaccatatgaatggtccaggaaggaggattaggaatacccaaagcctcaaagtctactctagagctcatccaagctccaaagctagcttcagaagaagaggagccttcagcttttggctgctcatgtgtatcctaatagcaaatagacagcaattatgccaatttatacatccaaaattgttgtcaaagttctttacaaaaaaaataacaaagtacaagcaatagaaaacacataatattacaagcaatggaaatattagcctacttctcccatgctcctagacaatcatttctcatctcaacttctacctccagtccttacattttctaaaaatatattttcactcccttcagcatccctatctttagggatcacactctccactgtctctacatcaactccacccctaacctgcaatatcaatacatttgaagtgaaatcagcttaatggagtgaaaaaaaatgaaagaaggaaaaaaagaccaacattctgattaatcaccatactgattcacaatgccgagtagtcgcaattttaacttgtttagtcacaattgtcgacactattgctttcatttgtgacacagattctgtctgatctcgatccataccttcgccaggtatctttgtcagaatgctattgctattagcatccttgcaccaacccacctgctcaattctagtgccataagaaaaactgaaataatgctaactagttgccaataaaagtatattttctaaccatcttttcaatatcaaagaaaaaaagaaaaaataattgtaggctcacctctgtcacttaccctttcaactctgttatgaataattccttgtgctatttctttaatcatcatgagtgaatgagcttgttgctcatctaaatttatcaacgacattgcgtttatgttctccacaatcttcctagattcatttattagtctctctttccgagcctccatgactaaaagtaccaaacagtggaacccattaataaacaaaccaccaaaagcaaactcttcaagaaacccacgctcctcgctccattatgaatatcattcctattatgacttgtcaaacaaaacagttgattgaacacaaaaacgagttcaacaacatctaaattcacctgagaccagggtagtatatatagctgttgctaaaataatatgaatatttctaatcacttacaacttcatttcttaacaccgaaactgtttccctctcattttctattaaaccaaacaggtcccaattt

SEQ ID NO: 22490 - DNA, 5396 bp, Cannabis sativa
  modified_base (5336)..(5360): a, c, t, g, unknown or other
tggtaaaataaattccaacaaggagctagtgtcagtggttgttagttgtgtaactaactctctctcagttagttttctgttattacttaatgttgtatataaagttgtaaccaattcattctcattcaatgcaataacataatttctttccttctctctctcctctaagattcaacatagtatatatcagagctgtaatccttcacagccatggaacaccaattgaccgacaatggtggagcctcaagattgaactaggctcaaggtcaagctcaagcacaaactcttcctccaaaatcttattcagtgtcgtttactcattctctatcgctaaaacttgatgagcacaacttcttgtcatggaaacaccaagttcttgcctcgatcaagggaagtaggcttcaaaaattcttagattcaacttaagctcccatgcattttcctactgttgtagatgaagaacacaatagagtcaatcctgaattcgaagattaggaatagtaggacaatcttctcgtttcttggattttatcatccatgttcgagaaaataaccagtcatatgataagatgcaatagcataactcatatttggacacctttgaatgaatactacacaacactcaatgcatccaacgttagtctgtacaaggctcagttgagaaacaccaaaatgataggttcttggaatgatcacctactgaagatcaagggcattgccaatcttcttgccacgattggtcataaacaatcacatcaagatcatatagaagccattttctcttcctattgaatgtgatgtatttgtgacctctgttacaaccaaaaaggatgcctacactataccaaaaatgaaagttttactaatgactcaatctgttcgtatagataagaatgctaaattactggatatcagaaagagtgaggctaatcttgctcatattagaccatcttagtctggttttccccttcaaaatcaacactttggagctcgaatgccttacgaattcaatcaaggtcctcatttttgtccttatgatcttttgattcaatttgtggctagttgaggtacattcaacacaggacgtggtaacaacaatgtcaatgaaggccgaggtgaacgctgccacaaattgagtcacacaattaaacagtgtttctataggttcgataaaactttcacaggacttaaatctttccattagatgcctgctacatctaatcttactgaaatgcaagcttgtcttgatacaccagatactgtcactgatgatacttggtatctcgacattggagccactcatcatctaacaccagatgggtccaatcttgtaacaaaaactcttacactagtcaagaataggccttcatgggcaatgactctgacctcaacattaatagcattggtaactcttctctaatctctcccttaacctctcaaaccttgtcaattaacaatttacttcatattccttttgatcactaaaaacttacgtagtgtctctcaatttgcattagacaacaatgtctttttttttagttttatccattaacagtttgattaaagaacatggtactaagaagatcttattagctgggaggcttgaccatgggttatacaaattctctcccacagatctctcttctctcccccaatatctcttccaagttgaacaatttcactggttctcactatctcaatcatcaggtgttttcatccaattcaactttttttttgtggcacagcaggcttggccaccctatttccagaattgtaaaattagctcttacttcttgtaatataccaatttaaaataaaactaattcagatttttattcagcttgttagcaaatatcacaagttctttttttttttttttacaacaacttatcatgagccagtttaacttttacattttgatctatggggacctgcacccattaactgtacaaatggctatggatattatatattttgtggatgcatactctaggtatacttagatttacatgttaagagccagagatgaagcattgccagcttttacaaatttcaaaactcaaattgagctgcaattatgtttcaaaatcaaaaccttacaatttgattggggagggaaatttagagcctttaccaacttactagagcaatatggtattgttcacagattagcgtgtcctcacacacatgagcaaaatagggtggttgaaaggaaacataggcatatagttgaaataggccttaccttcttagcccaagcatccctacccttgtccttttaggataaaacctatagaactgtagtgtatcttatcaatagaatgcctacaacaacactacaaaacatttctcctctggagaagttgtttgacaccacaacagattacaccactcttaaagttttttggctacctatgctaccctaatctaacaacctacaatagaaataaacttcaatacgagtctactctctgtgtttttcttgctatagtatgtgtcataagggtttcaaaatgcatgtctaaggataaaaaggttgtatatttctagggatgttgtgtttcatgaactcaatattccatatgccgagtctcttcatcataaattctctactactttttcttttccctcttcaggtgtgccacctttttcttctatgctttcagttaactgcaccccacttgtgcctcaacctcctacacccattttcctccaactgaccctactgctcttgagtcacaatccctatcaaacaactcttccaactctagtggtagtctctctccaccatctaatttggtcaacattccccttgagtacataaccaatttaccaaatcatacaaaaaaaatcctctgttcctataattgttgctctagttactactaatgttgttacaggtgattctattgctgcatcataactaccagcaacttccactagtcatgacatctctactcatcaaatgactacaagacttaaagttagaattagaaaatcaaaggctttcttagtttcctgtgagccaagaacagttcagtctactcttaaaatttctcaatggaatgctattatgaatcacgagtttcatgctctaattagaaacaacacctagattttggttaaactttcacctaatagaaaacctattggctgcaaatgggttctcagagtgaagcataatggtgatggctctgttgacatgttcaaagcaatgcttgctgctaatgatttcatcaacaagttggttttgattacgtcgaaacatttagtccagtagtcaaccctatcacaatttgtgtttttcttaccattgccatcactaaaggttggcttattagacaattggatgtcaaaaatgtgtttcttaatggagatctcaaagaagagatttatttgcagaagcctcctggttttgttaatgaaacacacccagattatgtgtgtaaatcaactaggccatctatggattgaagcaggctcctcgagcatggtttgataaactctccacattgttaatcagtctaggctttcaatcttctcatcctgatacctctatgtttatcaagctcacttctactgcttgcatatatgttcttgtctatgtagacaacattcttgtcctgggaagtaatgacaccatggtgtccaatcttattgctaatctaagcaaaacttttgctctcaaagatcttggagtgcttaattactttcttgggattcaagctacccagacatctaaaggagttctgctcagtcaaacaaaatatcttcaagatttactctacaaagttgaaatgtagaatgtcaacactcaatgtaatcccttgaacagtggcctcaagttattgagctatggaagtgaacctataaaggatcccattttatagaagtatatagttggaggacttctatatgcaacaataacttgacctgagctagcattctgtgttaataaagtttgtcaatcaattcatgcatgcaaactcctcttcaatagtattggatagtattaaaagaattcttcgatacattgtaggaactttagaccatggattacttaaacatgtccaagatttcaccataaaggcattttgtgatgctgattgggcctttaacttggatgatagaaggtccattagaaggtattgtatctatcttgggggtaacttagtagcttagaaatctcaaaaataggtttactctattcagatcatcaactaaagctgagtccaaaagcttggctaccacagtttcagaggtgtcctggaatcaatctctactgaatgaacttcacattcctcagccaagaattccctctatctggtgtgataatcacagtatagtgctaactttgttctcgaagaaccaaacacattaagattgatttgtattttgttcgtgacaaagttcttcaacaacaaattcgagtcaatcatgttcctgcaagtgctcaaattatagattgtctcgccaaaccaatttctagctcttgatttcctgatcttagaaccatgcaaactcaatattgtttctcaaactacgtacattagtttgaagggggttgtcaatgttgttaggagctagtgttagtggttgttagttctgtaactaactctttccattagttttctactattactttacttttatatataaagttgtaactaattcattctcattcaatgcaataatagaattcattttcttctctctctcttctttaagatttaacggtaattaactaaattgtatatacatatctcacctcgcttttatgtgaatctactcatagttctactcttgtatttgtagtcgtctaattcacactttaaattttatttttttttccaattgacaaagaaagaaagtagatatatatatatatactaacaaatgacatattaaattaacgaacaaacaaattaaaatgaatttgaaataagaaatgtattaataatatataatttatatatataatgattatatatatgtacgctgtaaatattttagttttttttttttttttttaattgcatttcacttaaccacaacccaataacaatatataggatgctagaaataaaattaaacgtaaccacacaagaataaaattaactacattacatatatatggtgcagaataagtttcgcagttaagcagatattctgctcatcctaattatagataatcttataataattacttgatccaaattatgtaaatggtggatataataatggctatatataattatgtaaagagacattttttttttgaaagcttgtaaagggacattatgtatgccctagatgtatataataataataataannnnnnnnnnnnnnnnnnnnnnnnnaataataataataataggaaaattctacaatgcacc

SEQ ID NO: 22491 - DNA, 1659 bp, Cannabis sativa
aaacatattcaccatgcatatatatatataataagctctttaattaattatatatagttactattatatatataagacctgaaattcttctttatatattaataatccttcttcaatgtttttgtttcttctcagctaataatatatataaacacacataagtgtagcttggggtatatctatatatatacacgtaagtatatatatagattaattatttagttaaattaccaaatttttggttgtgagttatgttatatataagtaagactcgctttcattaattttgagtacatatcgaataataatgacattttcctatttattaattttctttaacataacaatattattaattaattaatttttatatcatacatgaaaaaatgagagtatatattatattattatagagggaacatgagaatatattaatgttacaagttgaaatatattgggttgtcatacgagatcgaatttatcctcctttggattctttttggataaaatctaattaattatatttacatatatatagtaataacatatacaaaaaatagttttatgttttttttttaatttatttattttgattgttgtagttaagaaatataaactatatataatatataggtacaatattacagggcagaaaatgcatatattctttattcttatataatatataaatttaaatgaataaatagtattctcatgagaaaatgacttattccataatgaactagacatatgcatgctttattattcaagccacttatcttcaatatatctatattttcagcacattatattatctacttttttccaaaacaataatgtggaattgtttgctataaaattaaggtaaatactattttaaatttgttttataaaagtgatggatttgattatctattttgttaaaaaataattactctgtgtttttaaaataatactaaatagtcgttcaccttgaactgattttttttacaacataaaatataataataacctgaaatagaggtatgatgacaaaattagttacgtttttctatatcattttgtgctaaaaattgttaaaaattgtactattttagaaaatataaggtctattttatagcttaacaaaacagaacgtccaatcaataacttttacaaaatacaagatctaaatggtattgtctaataataaaactataatggatataaccatatacaataaaatttaagttataatttttctaaatacatactaaaaataaaaacaaaatatgaatgttcctaccaataaagataaaaatagtgtcctaaaattttcatatataatatacactataaaaaaaattatttttaatcacgataaaatttataattaaaagtaaaaaatatgtgactaattataaattatcatttctatgttgtgattaatatgtccgtagctaaatgtattaatcacaaaaattataatttattatgactaaatatgtttttagttacaatattttttgtgactaaaactaaattagtgataacttgtatctaaataccatgttttagtcacagggaattttttattaaactaataggaattgaatcattatggcaagaaaaagtttaatttagagggagaaaaaaaggcaaaaattggaacaaaaatat

SEQ ID NO: 22492 - DNA, 1496 bp, Cannabis sativa
  modified_base (496)..(510): a, c, t, g, unknown or other
agggcccaaaattttttttttcccctatggcccactttgtttcagggccggccctgcacccaactcctctattccacaaccaccatcactattacagcataccggaaccaccaccataacactattccactgaaactacaatgcaaccatcaccaccaacaccattatatttcttagattaatctaaaagtataaaaaaaaaattaaaaacaaatttagaaaacccatcccccaagttatgatataaaaaataaatccagggaggacgattgagatctctacggagaatgattgagatttcgattttttgggtcagtctaccattggagccgagaagaagtgcaagggaacccagcccaaattcgacttgtcccagtccagatctgaccagactcaagccagagctgactgtatctacgagaatctacaacaacttataagaagaagataagatgggagacaatctgagcgagaagaagaaaagagagagagagannnnnnnnnnnnnnnagagagagagagagagagaagctgatcagggatagcatgaggtgtatccagtggggctccatcggcagcgacatctagttgcagagctcgtcgaggcaaaaagagagatgaaatcattttagggttttttaggaagaaagagaaggtattttttatggaaaatttcagccattgttgcggttaaagtttcttcttttttcaactttcttcccacagaaagaaagagagaagagagagagtgagatttgcataagagagagaagggattaaatttattatttttagtttttatttatttattaaaattgtaattttttaaaaataaatttataatatttaaataattaaattgtaaattttatgtggactgataaaattgtgccacatgtacactatgtatacgtggacaatccaacatgacatttaacagataaaattggatgaaagtggtaaatcactaacagaatatatgagtattgagggttttaccgccaaaatttgagttttgaagtttaagtacaaataaagtgaaagtattttgagttttgccacaattaaccatatatatatatgtttctttcttttaaaaaaaaaaatcttaatctcgctcgttaatttacttaagtacttcatttctcatttgatctgtattagtctcagatttaagacttaaattagatcttaatttaaaataataataacaaaaaaaaatctatttttgcttttgaaatttgaaacaattgacttaataatataaatcgtaagtggttatatcatggcaaatgctataccattgtcatgttaagcttcatacgagcctagtcttggtgaatggtcataatatatagtattttgaccaacaaatgtttgactactattttcaacctacaagaaaatgccatctctatttacagtattttgtcaggaaaaaaattctcgaaattataaagcaagtaggttgaatgtttgatgaaaaataatatctt

SEQ ID NO: 22493 - DNA, 5148 bp, Cannabis sativa
aaaaaaaaaaaaaaaagaggggagagaaatcaaattagctaagctcattacattgcttaacaaagttgaagtcaagaaacaaaatcacccatattattttataaaaatgctgattaaaatttatttctttaatatttgggcagaaaaggataatatcaaatgaactttgacaaagttggatggttataggctgaaattctaaagttgcagcctaaataggaagcaaagcttttttaagcttcactattgcaaaatttggggtaagacacaaatctggtgaaaaaaaagaaaaacagggtgactctaactacaaataatactaatactgatggcataagtcctaatacacgactttcaattcattgcttcccaatacttaatatcatcaggtatgaaacaagaacattccttacacaagttttgaagtactgtgctacactcaatgttttttaacattcaagcctgtggcggaaacacttataaaccactatgcagtgcgcatagattcttttatttttttccaagcaaactataaaaataggtattcttgatgaaattctaattagttcagaattgggtggcaataatttacattagtacttctctttttcattctcctttggttttgatggatgctacaagaatatgagaaagaaagttcactacattctattttagttatttttctggtgtttcactcagtcacaccatgcttaccacaattaattacttcaattcatgtaattgacattaaaatcctaaatcagtgtgctatggtgttagcagccaaaaaaggcatgctcctatgtctaacatgaatagagatgcagacatcatgctatgtaacataaatctaacttactagaaacaatatgtaaacaagagtacaaacatagatcatctaattatgttaaaataaggtgcgaagacttaccagacatcgtcagcatcatttactttacaaatattgtcggactttctttggcaggatttcacattttcctttttcttccagatagccatatctcccttctcatactttttctcccaacaaagagattcagcaatttcttcaatccttttttgctctgcttgagtttcctcctttgacctcttccaagttttgtagtaggtcttccagttaattggaggaccagacaagatccagtatccaccaggtctaagaactcgatcaacctccattaggtacataccacctgaaaaagatgaagaatagtgctaaacaatgaaattttatacgagtatatataggtcatgagtgcaaaaggatatggtgaattaacaaattgcaaacaatgcagaaccactgatcaccttttccttgtaattgttaatttgatcttcaatttttcaagtatttaacagcctaaatgcaagaatgaacagtggaattaaagtttagagagtaggaggagaacataatattaaatagtatagaatggaacatggggttctatctcaaaattaattgtcaattagtggagtaaccccatgttctttctaagtggttattcctcatatctattcgatgttggacactcctatacttaatgtataaatgtccaaaatctagttggtgctcttgcaatttttacgaaaacaagaaatctaactcctaggcaattcaagtgaaaatttatgtgatttcatgattaatgcgagaaatacatattacttttgtatattgatggatgttgcatttgatagactttaatgactaaattatatttcaaagaattaatcatgatagtccatggaattagttatcaaaaaaatcatgatagtcaattttttaagatgtaaaaccaacttactgttcgcagtccatggaattaggcatcgggagcactgagccatatcaaaggatcttgatgggtatggtagatggattgttccaaaaacaccaattacagcaggaacacctcgctccaaagcaaattgtacttgtgcttcatgattgtcccttggtgcaaaagacatagccaaaacattcctctttagcaagtatgcaccccaacttgcaacctacattatgttctgttttattagtccagactccagagaaccatgaactaataatgaaagaaatttctacaatggaattacagataaaagaaaatatgagatcaattcttgtaaacattcaggcctaaattaatttttttatgacatatacagcttgagtatagcaaaaaagagaaccaaaatcatgagcaatctacataccccacaaccagtatccaatgctgtcctaactgatccgtctgcaatcggaataactgatgcaagttcatcaatataagcatctgcaccttgaggaaacatggttcctccacctggaaatttgaacacatctccctggtactgaacccagttttgaaccgccttttcaactgttaggcttttaaatggtacattagcatagtaaacatagtcacgacttttaggccagggaaatggagtcctatatccttcaggtgcaggaactaggcaatgcagtttttcttcttgtggaggacaatgcctttccctgtataccatattttcccttgggaatttcattgctcggtcttgttcttggcaaggcgtgtagtctttcaatttaacatcacagggcttgaagactttggttttaggtattgaaggttcaataatcccaagatccttgtgttgtggttcaaagttcaaatcttcaaagactttgcagtctgtctgcttggttatctcaaatgctatgctatctccttttccaaatccactcttttgccatgctccaagaaggtaaaagaaacagcatagacccagaaccataaatatagacaatggtcctcgtctgcttcctggcggagcattcttagaacccatgatcttgtttgatagctccctcaaacctataagagaaaattaaccttaaaacaatcagccagatggttttaaatcgaatcttgattagcaagaaatcattttttattttgaaaactaaaataacatgttttttttaagaaagagaaagagtccacttgcaattcattcattatgaccaaaacaaatagttactaataatgtcctaggtaattaataaaactactgtaacataaattacagaagattttaactgaaaaaccttgcacaaagagaactaagagcacagaataataaacattaagaacgatagaagtagtcagcaaggaaatgtttattctttatttacacacagaaacccccaaactcagcttagtagacccaagttcaaaatcgagctccagctcaattcttcaatatttgaagtgcacagaactacaacacctccaacataaatacctaggaagacttaaacctcaagctttgcaaaagaaacaaaggcatgaacatttgagttaagctactctcttggcagcttgaaatgtctattcataactttcacaagtaaaataaagcaaatctagatatgaaattcatggatctcgagtgctatatcagagagatcgcagaggaccaattctaaagaaagaacagatctctcagacagtttgaactagatatgtagtagatgcagttcatctttttcagcaaaatcatactataaaaattaaagattttgttaaaaaactactgatctaatgaaaattacacacacacataacttcaaatcagctaatggaaagcccactttgttctccaagaaaaaatcacatcaacactcaagaataaacaaatcaaatcacacgttgatttttgaagttccaaaaatagtatcatttcattttcacctaaaaaaggaaacaaatttaaacaaattgaacccaaagcaaaatcaagaagaatttttccatttctcaaaaattcaaacaaacaaaataccccgattccatcgtacacatccaaaaatgaagagaaacagagaacaagaacaatgcaaattacataaacaacgaaaaagagaataagatcgaaaagcaaacctggaaaagaaggaaaaaagcgatggagggagagagatctgaagaagaggtggaatccagatcggccacaccactcacagtaagtgagactgacaagagagtgaatgagagtgtgtgagtgggtgtggatgtgggtgaagaagaaaactagagagagaaaaaggaagagagagaaagtataggcagcaatggcaatgggaatggcatacagctatatatgtttttataatgatttacatttaaaacggtaaaaaccgagtgaaaagaaaatgagagaaacccaacccaacccaacacctaattagttaataataataataatgagttgagagtggagagttgagttgggtttatgttgtgggattatccgccgacactctcatttttgctttaaatttcattttctttttaattaattaattttttaataatcattaattaatttattattatatataatgtatcatggaaacttaatttttttttcttaaaggaatttattcattcattcaattaaaattattagaaagaaatggcaagctactggttagtacgggatgaatataagggggactaagtctaatttatatagcattagtattaattaacaaagtataattggttaaacaatgtgacacttaattcgttgttttacgaacaaaaactaaactagtgactccctgactttacaacagcaaacgaatttcttgcagtagtctgtccacatctcaataactttcatccatgttatagactagatgaatagcctctgaataatttgtttcaactttgaagtttctcaactaccgttgaatgctgactacaaggccatctttgatcgcttcaagcttcgttgctagagtagaaagagctcccaatctgaacttaggaatcgcagagattgtattaccatcataatctcgtaccactattccttcagcagaatgttgttgttatgaaaatttcaacacacaagtatacgtatcgtttacaagtgagatacatacaagagtgaggtcgatcccacaagaacgttaattaattaccaaacaactaaattcctcattctatttagtgacaataaaaataaaaaaatatattcaatttttactaaagaaataaagaaaataaataattaaagtgaaattaataatgattaaagctt

SEQ ID NO: 22494 - DNA, 4405 bp, Cannabis sativa
aactaactgtccagctgtgaagagtaacaaactcttatcttatacgcacagctggaacaactaactataactaactgtgtacactaatacccccctcaaactatatttggagtattcaaggtacaatttgttacataagaattgaaacctaggatatgacaggagttttgtaaagagatcagatgtttgatcttctgttggaatgtagcagacttgaagtttcttttctgcaatttgagatcagatgtagtgaacatccaactctatgtgtttggttctagtgtgaaatactgaatttagagcaagtgcttgagcactttgattgtcgcaccaaagagtaggaggctgtttatgcaatgttattcctatttcagcaagcaaagatgtgatccatactagttcagtagctgctgaagctaaggcatgatattctgattctatgctcgatcgagagacagcttgttgttttctagaactccaattgacaagatttccacctaaaaatagaaagaaacttgatgtcgattttctgtcatccaaactggaggcccagtcagcatcagagtatgcttctaagtgaagcatgttggaaggcctgaaaagtaaaccgagatgtgtggtgcccttgatatatctgagtactcgtttacaagcattccaagattggttgttggtgcctttaaaaattgactaagcttgtttacactatatgcaaggtctggcctggctaaggtaagatattgaagtgctccaatggtgcttctatataggcagggttgtcaaaagctaaattgtcttgaagggccagtttgttggcctgtatcattggggttgagcaggcttttgcatcatcaaattgagttttatcaaggagatcaacatcgtatttggactgagtaagatataaccctgaagagtttctgtatactttgaaaccaagaaagtagcttactgaaccaagagattttagcgcaaatagagtgtgtagatctgagataagtttggatacagcagtggaatcacctccagtaattaatagatcatcgacatacactagaaccagtaataagttgccttgtatgttcatatagaacaaggacgtgtcagatacagattcagtaaagccacattgaattaatgatgttttaagcttgtcaaaccaagcatgtggagcttgtcttaaaccatacagagatttttggagcaaacaaacatggtctggtttttctggatcttcaaaacctattggttgcttcatgtaaactttctcttgaagtttcccattgaaaagttacagctaaactaaaattgaatcgtattgtggaggcttttatcacaggattgaatgtatctgtaaattcaagaccaggagtttgttgaaaaccccttgcaactaacctggccttgaatttatcaaggttgccatctttgtgatatttgactctgaaaatccatttattagttactaaattcatgtcaggagaataaggcaccaatatccaagtctttttcttttttagtgcaatattttcacgatccattgcattcttccattgagacaaacttagagcctgtttgactgttcttggtatgtcataggcctggtgttgagtggatgttaccatgtagacttttggtttgtaaatttcagattttgaccttgtttgcatatgatgtcttgaaggcaatgggggtggtgaatggggaatatggacagcaggtatgagtgattcattaggcacttcatttgagtgagaactgttttgattggtgtgggctgatgcgatggaactagtgtgaacaagaggttggggtggagggctgtgagaatcattttgctcataatttgtgtcatcagtttgtatagggagagaaccaaattggataggtgggattgatggggaatcattgtgcaagactggaattacaaaagctggtgctaagagatttgtgtgcatgtgaacagaggactgttgtttgacaggaacatggaggagaatggaaattcagattcattgaaattgacacttcttgctttatatattcgacctattgagtgaaggcatctataacctttgtgaaatgggttgtaaccaagaaacacacattttgaggttttaaactcaaatttatgtgtgttgtagggtctaaggtaaggaaagtaagcacatccaaatgttttaagaaattagtaatcatgtatgattttatacatgctttcatatggggatttgtacttgttaactatagtaagaagtctattgataagaaagacagctgaaacaaaagcatcccaccagaatttaagtggcatgttggcttttgctaacatagttagacccatttctgtgacatgacgatgttttctctctactcttccttgttgaggatgagtatgggggcatggatgtctgaatagaatgcctaaattttgaagaataggttgtaacttcctatactctccttcccaatcggtttgcataccttttattttaatgtcaaattggttctcaacaaatgctttgaatgtgagaaagattgggacaacttctgttttgtttttcatagggtatatccagctatacttagtaaagtcatctacaaacacgatgtagtatttatagccttctggtgtgggatatggtgatggtccccatacatccgaatggatgagttgaaggcaggatgttatttttaaaggcacactaaaaaaaatgctttaaatggtttttaccatattgacatgcatcacaaaatggtaaatctgatttagaacaagttttattcatagaatgtaaaactttgtttaagatgatatgagatggatgcccaagtcgattgtgccaaagtgcagcaattcgactggactccttacacagggcagagttgatattactctttgaaacattgcaagactggtctgaatgagaaagtacatcattattatttgtagctaaaagcacagaaggaggaaacaaagtgcaagaattaaaagatggtaatggcagctgataaaggctgtggctaagtgttccttgaagaagaaccttcctcgtgaccttatccaagacaaaacaattattagagtcaaacaagatatggatatcattatcaagagtgaattatgagacactaatgagatttttatctatggaaggaacatgtaacactttgtgtagacgtaatggtttagatgtgggtataaaacaagaaccaatagcaagaatgggaagggaagcaccattacctaataccaattttcctttgcctttgtaatcaactgtcttatttagtttagttgcatcaaccacaacatggtgcaatgctccactatccagttaccattgaggatcaggaacagttgttgcagatgcaagaagtgcttgaggatcatctgaagtaggttcggttgggtttgaattgccttctccttgataactcaaatcaaatatgtgataacatttgattacagtgtgaccagatctgccacaaacttgatagattggtcgatttcctcctcgattattattgtttggtgtcctaccacctctgccacgatgagcagctcgacctcgagtattgttgccaggattgacagatgcagatgtgtttttcttagaggcatagttggttgatggattgtgaagatccaaggcagtaggggactgttgttgctcaagtcaaagttcttgagtttgaagcaagaattgaacatcctacaaggtaatgacatcttttgaagttagagtgacaataacagagtcatattcattacctaatcctccaagaatatagaggataagctcatcattagaaatttgttgtcctgctgccattaaagcatctacaaggcatctcatcttgagaatgtattcgtcgacaggtgtagttcctttctttgtggattgaagcatgcctctgagttggagaattcttgctcgagatgtattagagaatagttggctcagaacagtccaaagttcagcagacgagttacatcgaataacatgtcctagcatttgttcagaaatcgaattgaagagccaactcatgagaaaatggtccaaacgcatccaatctttgaaggcagggtttggcaccattcttgtggcatcaagagtatctggaattgtagctggaggtcgaggacgagatcctgtaagaaaactttcaagttgatgtgcacgagctgtagaaagaacttgagatctccaaaacacatagttggtgcgatcgaggcgtaaattcagaggaataagatgatgtggaatcacatgctctgctgcaactggaggaatacgagtagtagcggaagtagagccttcggatcgaggagcagctgatgaggacgccattgatgaaagcttcaagaattcttcgaagaacaaagaaaggaaaaaaaaaa

SEQ ID NO: 22495 - DNA, 2263 bp, Cannabis sativa
ctttctctcttcatcttctttttctttctttttatctactttatattattttataacaaaaataacattaaaacaataatttctagtaaatagtatattttatatataaaaatatgtgaatgtgtattgattaatttgcttatgctagagttagtaattatttgtaaggatgtgtctagtctgtttattcttattcattttatttgaaaacattgttccacatgaattaaatataaaagtttgagcaaaatatattcatcaccaattaattttgaaatagaactctacaattttcaacacattttatatatgtcatgaaaaattaatttttgcatggttacaaaaaatatagtgttggattacaaacaaactttagacatatttaagcattaatattgaattatttgacttatgttagataatttaataattggtaaacaatttgcgtacaagggatattttaaaaaatataaattatttagttgaaataaattttattttttatttaatgataattaagtcttaaaattgtataaaatttttaacattactaattttttataaaacccatagaaggggtcacatcatcactctatgtttcatcctttatataggtatatagatatggattactaaaattaacaccatttgatattgatggtaatttttttattagttatatgttttgtggttttttagttttatataaaatgttgagttttagtataaaaatctagttaaatgataaaaattgagcaaaataattataacaaaagtactcacataaattgtgttttgctttatagatgtatagacatttgtaaattattgttcgtatttatatttttaattattttaaacattatcaagaattttagatatttattaaataaaaaaaagttttatttgcaccccataaaataataagtacgcatattattaaaaaaaataaacttaaataattttaaaaaataaaaattactcctaatattttttttttttttaaaaaatttcctcacattattttatgttaatatcatgtaatggctgcatgattataatttagattagtaaaggcatttaacattaattattgatattttatgcttatgtatgattttatttgttgttggacccatttttagaaaatgggcattagagtttttcaattccggagattatattaaactctaagggtattatttatgttatatgtaaaatttatattttttatgatttttactctgtaacagtggaaaatacgccagataaccggtagagttacatgggtaagtttagaaccttttatttagtaaggtattcatatgttgatatttggagtatcaaggttaggctgggttatagttttggaccactttacccttatacctatatgttgcttaagtttaaagcaagaggtaaaattagaatttgcccttttattaagattttgtcttgcagtggagttagtggaaactcccaagttttattttatgctggtggtatgatctagtttattaagaaaatagaaaaagagaaagtaggagaaaaaccaaaaagttatctcattctctctcgctctctttcactttcattgatccctagaagaaccaagaaaaatcaaggttaggcttccatattcaagtcattttcaataaggatttgaggagaaaccttaagctaagattaaaggtaacctttagatactttaatattccttgttatttttgaagttttaagcttggttctcttttgtaattttaagaatttgggggtttagtttatttgaggttgtattgtgttagagacgattttaaagcttgattttcgttgtttatatatagcttatttttggaagtagtagaagctgtagcagatttgaagtttggattttgagaacttaatctttgcttaaccatggtgaatttcattgcatattgttttagatgcttttgagttgtgggttatgtttagattactccgaattgctattctggaaagtttgatagcatttgattagattgggaggtagtttttgaggattaaaagttgagaatttttgaacccttactgtccaggaaaaagcttccacaattggaggagcttccatgatcgaaaagcttccaagattgggcacgattggaaagtttccaagattcgagagcttcacgattagagagcttctaggattggagagcttcttggattggagagcttccatgatcggaggagcttccatgagcggagagcttccatgatcaga

SEQ ID NO: 22496 - DNA, 1615 bp, Cannabis sativa
cttagagaagtcaaggtgccgcacgggggttccgctgcctgaaaaggtgagcccgtgacactgtgccagagcatgtcccaaaaccctaccaaaattatacaaacattcactgccttttctcttcgttacaccctaaaaccacacaaaatatttctcaaccctccgatcacattgcctctactcatccaacgcctcatcatatcgtagccttttttacattcttctcctatatatatcccaattcccaacccaaatccatttcgaaaaaacagcacgtgtcccttttccgttacattgtggtcccttccacgaaccaatcatcttactaatctccatttgctacgtgtactcaccccctaacgccgactctagtgtgtgtatatatatatatatatatgatttcattatatctcattgaggtttaagtggaaaacatggagagggattctcagtatcagggttttctggctaatggtgaaagttcagctgctgaaacgtttgaagaggctaacgccttcaactctatgttctccggtgttagtctactctcgcttctcggagctgaccatcaatctatgctcactaattcaatgcctctattcggagaggtcgccgttccgcctcttgaatctttgctacctccggcgatgattaatttgccggccactttcggcttcttccacgaccattctggaagttgtttctacatacccgagccactgggcctccaagattcaggctccgcgggaatcgtcgattgtggttctctgccttttaacttcatgttcggcgatcacgattcctctttagccgcacgcatagacccccacgtgctaaaccctcaccacttgcctgatcttctctcgctcgagcgagtcaccggcgactcgtcttcgtcttcttcctttggcttactgagccaaaaacgtgcccgagtcgactcagcgactcacttcagcaatcatcacgctcatggaagccaatactacaatcctcctccttcgagaccgtcgccggggccggcttgttcctcttcgtcgctgaagaagatgatacccccttccagccttctggccaggaagcggcgccagaagattagcgataagactcggtgcttacagaagctattgccatgggacaagaagatggacatggccaccatgctcgaagaaacgttcaagtacgtgaagttcctccaggctcaggtgactgctctcaaagccatgcctgcattttcctgtgcgatgccaatgatgagtagtaatggctccgatggcggtgaccttgatgatgacgatgagttcgctgggttggagaagctgacgaggaaccagcttttgcaggtcctggtcaactcgtccgcggtccaaaccattctctactctcagggaagctgtattgtctcggtggagcaattgggtctgttggagaaggccaccgccagaaaaagaaggggtggtaatcctctgtacccagcttttcttttttcttcctaaactcaaactaagaaatattatataatatgattagagggaaatcacacttttgaaatcaaatacgaatatgatatcatcaaattaatgacatttggctgaaatattagagtgtagctata

SEQ ID NO: 22497 - DNA, 2846 bp, Cannabis sativa
atgtattaaagttgtttggatgttgtgtatattttttaaaaattgtcgacaatattttttaatgtccactattatatttaattagtgttgttttgtaattgcatttgtattgcatatttaatcgatttttttggcaaaatagtagtaaactaataaaataactacataattcaaatgatatatataactacattataaatatgcaacaacacatgtacaactatacatctagttaaaaaaactctactcactattggaaatcaagtatgacggaagcctcgtgttttacatggaatcaaaaactaatattttttagtaacattgtttgttgctttacagttgttttaaagttgtaaacacgttgtttgatttcgttgcttttttaaacatgttttcatgttgtttgtatgttgaactttagtggttaaaatttgtggattctctaaattttatatacaactattttcatatgtttttatgttgttgttaaatatttattaacagttaatattattttgttgttactgttgactgaaatttttggcaaccagtaattagagcggtatgaagtaattaataaatgttagaagaaataatttttacatagttcgggcattaacgagccttagtccacgagtcgttgtattaatgagagtgttattacaaagaattttctgatagatgcccattctgtttatcattggtgtatttatagacatatgatggtgataaaaaagctactattgtcgtgtttgttcacaccatacttggcacacttttccaaccctgatgtagggcataatttcctattttatgatggattttagtttgtctgtaggtgttattaggatttgacttatctcttatttatgacttgatggctcaatatgcagtagtcaaattgatgtacgggagtttgtgaaattagggaataataggcttaaacccttaaacacgcttgtaagagtaaggtgtctgatgctctttcccatgccgcattaaatgcatgtatagtgtcttaatccttgagggacatgtcatcttttattagttctcttgtaccatcctccgaatatgcttcactcgtgaagaggagcaaacgagagatgctcgtggtccagttggatcctcccagagatgactaatctgttattactcttttgaaataatagactttgggaataattaaggtgacatgtcttgtaacgcgggtcccatttccacctagattcttcctgaactgccacgtattttgggagaaatcctaggaaacatttacccccatgtcctttttttacaattttgtaagatgggacttacgatgtgcctcttagagtgctgacgtcacgcttcgagtgatcatttcaaatactactcggtactttccctaattttttgataaagtaatttgattttttaatcatttctaatgtcattaattgcaggatgtcagaaggatacttaagtagtgtaaccgtcctttcatgcttgtccatatgccagctaccaccccatctgtttgatcatgagacttttaatctcttaaattatgatcgttagatgatcgaaaatccgtgtcaccttggttgatgtatgaaaaccccttgtttttcttctttaaggcttttacttttcatgtttctcaaaaccttcaatctaaccgaaattccaaggagcccacatttccttttgcttttcctctaccgttgttaagctcgattctaccgatgtttcgtactagtgaccgctctcgttcatacttctgctattggtaagttactagaattactaacttctctctagtttatctctacaactttaatttaaaatttacttatacaaatgtgttaagggtactacattggtgattatgcaccattttttcagtttatcctttatttttcctcttaaggcaagatattcttgcattagggctagtggcatttttccctttttccttttctgtcctttgcaccatttttcttcatggtgtagtcacccgatgcatagcacatgaaattttcatttttgggttcgcttgcattcggagggggcctcgtctcagcgattaggggaccccgattcccttttttatttagggtttaatgtgggggctaactactaggtcaattctttcctttcagatgagtgacatcttgaaggatcttcacaagcacaatttcaacgcttttgacaaagaaattctagaacttcactcccaagccaggatgtcaaaccctaaagcccctgcccaaatttttgctcaagacgcggtatcacaacaacaggtggtgccactagatgtggtgatgcagggtcctgtcccgatcacaccttatgtacacagagctaccgactaggaagttgaggagttacactgtccatgcttgtgtccatcacttaaggaccattgtggacgagaatggaatcaggccccaggaccaaggcatttccactgcttggctcgggaaacaaaaacccctaaccacaactatggagggtccggtgcatggagccaaacacatctcatgtctggcgcgatgctcccgcttcaggattactttgtaaatttcttagtttttgtaggactagctttgtaacagttgaaaccatgaggttggcctgctcccagccctatcgaaatattatttttttatgaactcttttttgtcccaaaaaagggagacagacacaaggatggtttttactgcttccaagctcatccaagcaataagaaagtgatgtgtgtcgtaagccacaacaaatttactatttttttaattccaatacttccaattattttagtataatcgtaagtaagggtcgattccacgaggactatgttt

SEQ ID NO: 22498 - DNA, 1017 bp, Cannabis sativa
cagaggcatattaatatccatctccactaagatttttagaaatgtgcttcaattggctggcttatcttcccaaagatcaacttgaataactttaccagcctgtccaccaaatagatagccattagcaatcaagaaatattcatgaggaagattgtggacttgaacccacagcctcatacagtcaagttttgccggtccgagtccaagcttgtagaatgaaagtgtaaccgcaaatgcaccatggaccattatccaaggcccattttctatcttcaacaagagcatatccaaactcaaaacagtttttgtttttagaaacctcagacaaagccacaatggaaactggaaatttccacgatttggctgcaaaattcctaatagtagctttgtccactatcataggggccaccacttttccaaccaagcaaaaagtagaaagagccttaagagaagtatcacatggaaccaaagaaacagtagcatcaatacaagacaagcatttgcctttaaggggggagttggtagagctaattaactccataaaggcagacaacaaaagacaaacccaccaaccaacaaataaatgaaaatatcgagggaagacccacccacactcacacgacaaaagcaacacaacagaacacacccaaagaacctcacgcaccagacaaaggaaaagaaacccttaagtccaagggaaagacaaagcacgaattataaagagaaattaaagagaaaataaaaagaaggcagggaaagaaagcaaactagagcaataaaaggaagtagataacacacaacacacaaacacagaacaaagggaataaacacacactctaacacacggacaaagaaggaggacaatcaatacaaaccggagttacagggaagagaagtatagtggaaaaccatacttccttgcattatttatttatgactcataaaaataaggctaattaggaattttttcccccaaactttgacatgtaccaaatcatgccccctaaacttttttgg

SEQ ID NO: 22499 - DNA, 2642 bp, Cannabis sativa
aactagaactataatcctcaaaggatcgctgtcagttgctgcatcaggatctacaattaatttctagagccagccatggatcccttagttagactattcagaatttggaagactaatggaaagtttgagaggtaaaggctatacaattcaaactttgagggatgtttccctgggaaatgaatggaattcagagattatttttcaaatgtttggggaggaattaggaactcgtatcacaaatattcctagaattcctttcccccacaaggatcaagtcttttggaaacaaaatcaagcaggaaagttttctgtgcgtgctgcctatattactgcaattctggacagaattgaaccagaggaggatgtttggaaatggatttggaaggcgggcattcatcccaggatctcagtttttttatggagagctctgtccgaggctattcctacaaagaaccggcttcattttttacaggataaaatttgcaatttatgtggagtggaggatgaaagtgcctgccatattctttggaagtgtagtttttttaaaagctatttggttcggatgccgtttggccctgaaattggaagatcttccagctgataatgtgctcatcatgtttaagaccttgatagatacaatggggggtgctgataggaaggaattgatcacctatttaggatgcatcatgactgaaatttggcaccaaagaaataccttctgcataaagagccaagatattaatgtgcagatggctttggcaaaaatcgaaaagaaggcagaggagttgatgccttcaatgtctgcaactcccagccacaacgatggaatcatagatgaaatgggaaggcatgtaatggaagagcccagtggcacaatggctatcaacatctcttctgtttcttgtaattatgtattcactgatgcatcttgggtgaaggatactgctggtgtagctgcaatttctgtggatgtgtcatcaggacgctggttcgttaatgcgcacaagatacggcggagtcggctctggaagctgaattttcagcgattattcttgctctgaacagggctcgtgatgcagggtggaaggaagtgtgtgttatgtcggattctaaaattgcagtacaggctttgacaactaattctcttcctgactggaaagtagctagtgtgttttatttatcgttaaacttggtaaaaaagtttcggttatgttgtttttcttttattaagcgtagttgtaatgttttggctgatagtgtagctaagaatgctaggatctctagtgatttggcaattttatatcaaggggagggcaatctcccggtgattcccatcaattttcttaattaatgaactcatggttctttcaaaaaaaaatatatgcaaaaaaaaaaaaaaaaaaaatcaattagaatatgacataattattaaatgtgtcactcaaacctatatatttcgtgtcattttttgaattccctaaatacaattacaagtacggtttgaaagagggtaatcattattagtaagcctttcatcaatctcaaaatgtttttcagcaattattttcctcaagtcgattaacaaattttctcataattttcacatttatgaaaactaaaaacaaaagttaaaaatagccaaacttacaaaatttccacgtatatattttttttttaaatggactgaaaacaagcctgaaatttattaaagaaaatttcatttcacaatagtatagtcctaaaaaaaaaagtgaaaatactcttagaagcccggtggtgataaagctgagtatgatcttgctgacttcttttgtagcggtggtggcggtggcggtgtcggtgtcagtgtcggtgtcggttttggcttggggtgtttgatcggacttctatttggtggaggtgggggtggtggaaatttgtgacgtgcatgtgcataagggagcaaagtgatcatagcaagattaagtagtactaacattgagagcatattaataatgacataggattttcccatattcatattaacacaacacaaccctaataataataataataatattctttagatcaatctcaaatctcaatctatatataatatgtgagcattattctcagtcaactttaaattattgtgagtatttctagtcaaatatagacggaggaaattgtctaacgtaattaatgagcatcaacatgggttttgtacgtagttctagtcaaatatttagttatgttgaattttgtactaaatttattagattatgtattttataaaagttattgattagattagattatttatgtttaagtttggtaatttaattttttaatataattaacctaaaaccaatatttagtaccaacaattagtctcctaataatacttccagttcaagtgattgttaagttaaaatttgataaaaattaagtttagggttggtctattttgtacttttttgaaaattatcatttaacaaaataaattattttcgatccaaaatggtttttgttgaattctgctacaagaagatttatggagaaaattcccctgaggttaacctttaacctttaataattcaatgatgaacatggtataggtaaattctcttttgaatgtagtaaactattctgttttgggtttt

SEQ ID NO: 22500 - DNA, 2891 bp, Cannabis sativa
ttgtattctattattatattaaatcgtatattgtattgtataattatattaaattgtattatatattacatttatttttgtataatattatatttgatattgactttcaaatacatctaaatatataatattttaatataaattaacaattagcatataggtattatataaaaatatgaaaatttttaatataatattgtataatacaattatataatacgatgaaagatacccatattatgcaatttaatggtcaaacaaaatgtaattaccttacaagttttcaatcagatcaagttaacgcaaattattggatttctttttttttttttgttaatagactttaatattttaaatggcatgctaatcaattaatgaccaattcatttttacactcccagcataaccaaattgtttaattcttcaacatgatgaaaccaactttggttaatattatttataaaaatgcctatcttatcaaataaaatgattatatttatcatcaaatttgataaaattaaatgtagagtgttgcatcaatttgattacattacgtatataattactgttatatattgtacatcataatcatacatgtttatcttattttgattaataatttatttttacattataataaattataaataattaataaattattgcaatattcttataatcacaggttgtgcgtcttcttgaaggggaaaacgagcatttccatcgctttggtgatcaattcataccaccttatacaaagtgaagcaagcaattatatatactccactcgttcatttattaattaatttatatggttgttattaaaacaagattacaaatatatttttgatcaatgtccaaatggcgatcactaaactaaattatcaaaacaatatatgacgtatagtaagcttgtcttcttgatgccctatatttcaggcaaaataataaaattttctatttaaaatttacaatttgatgttgacatattgtttattttttttcttctaagaaagtccatttattaaaaaaaaaaaaaaaaacaaaacaaaggctaaaagccagctaggggcagctcccctacagagaaaactcaagtggtcacagaagacctagagcacttaggcaattctcattcctaggccaaaataaaaccttacaaaaagaaatgttcttcattaagagcatgatggaagcaaaaaaataagcatatcgacaatgatcaagctaaaatgtcttgagttctagactttgatcagagtagacagatcgagaagataaccaaataaaaccaaccctagacacaattgttttcaaagctaataaaaaggcattcaatttagtcttgagagcatagttggctttgaaagccttaaactccacacatatgatttggtgatgcaagggaaaaatcataccagccccaacgtcatcttttttgaaagagccatcaataagagccaccatgacatcagccaaattagggatctccattgcctagattttcttgagcgaagcaccttgatacaaacttgatcagacccatctagaggagggaaagaggcattggagttcttcaggaaagccttacccattttcagtagaagatcatggtggggagagaatcttcgaagagcagagccattcagaaaaatcaagaaggagacagaggacacaccaaacgtcaccaactctataaataatcctaaaaaccattggctgaatcaacaactcttaggatgctctattcgatacgatcatacgccttgctcaaatcaattttgatagccatcacacaacccctccctatctttttcttcattacaataacaacctcctgactaagcatccatcattccacaatctacttgcctggaacaaaggtagttggaatagactgattaatctttacatgatactataaagtcgagtaacattgatcttagccaacaccttgtataaaaaatttgcagaggctaatcggcctaaagtggtcaaaacaagaagcactagatcttttgggaattaggaaaatgaaagtggtttaaagagcgaaaaaactttctcataggaaaggtctcctagacaaaactaaccacactttgcccaacaatctgtcaattctttcggtaaaagaggccattcataccatccagacctagaaagctcaaaggatttaaagcctaagcagtacgtctaatctcttctccaaaatggatttgcatcgagcattaataactcttaggatgctgtattcaatacgataacacgccttgctcaaattagttttgatagccataacactaccctccctttctttctcttcattacaataacaacctccagaccaagtatcgagcattccacaatccacttgcctggaacaaaggtagattggaatagaataataaatctttccataatactatgaagtcgagtagcattgatcttagccaacaccttgtataaaaaatttcaaaggctaatcggcctgaagtggttaaaacaagaagcactagatcttttgggaattaggaaaatgaaagtgtggtttaaagagaaaaaaaaaatttctccaaagaaaggtctcctggacaaaactaaccacactttgcccaacaatctactaattctttcggtaaaagaggcgattcataccatccagacctggaaagctcaaaggatttaaagcataaacagtacgtctaatctctgcccccaaatggatttgcataaaagacatgttctcctcattagaatatttttcctggaaaaggtcatgaaattaactagggagagccagattcaaagaggagaaaagctcaaagaagttagaaataaagtaatccctaaattcctttctacaccgaagcgacacatcgcttgaaatg

SEQ ID NO: 22501 - DNA, 3830 bp, Cannabis sativa
cataacttttgaatctcttttattaaccagctaaattttctttgtaccctacgaattgtacttattacaaattttgtatttcaatttatatcacctaacatacatatataatatcaaatataacgtggcacaacatttctttttaattttcctttttctcttgtcttcagtgatagttcgttggatgaggtgaggactgaggagccgttggtgtcatttagcacggacttgtgtgacttttgatggtggtggtgttgatgtctttggcctagtgtcgcgctgctccttcggttactatcttgttttctgatactgctgtatgtttgttgagagttggaatgtaattaccataaagactgcatatcgatttcgtttttctgattgcccaatcctcttttgatgttggtgtctgtctttgagttatctgttctgtatttcaagtgtaaaagttgaatactatttgtagtttttttttttggtttctggtttgtttgtggatttcctttgtttttgttatgtgggatttgttacaagtgaagttattgaataaattcgggaagaggtcagagttgaagaataggattagttatgtctgttatgatcagtttttctgttacagttgttagtttgctttctgttatttcttaactaattctgtaactaattcctttactgttttcagttgtatatatatgtacatactcagtaatgtttcaattcaatgagaaggactcttctccattcaagtcatctttgttttcttctcatttctctctgttctttactttcaaacactctcacactcatggacatgtgatcatcttctcttcttctttgactgtacttgagttgttcttaattataatatgatcttcttctatacttggtagtctacttactctgctcacttacaaattttagtttagagtaatgttttgagtaatctgttatgttttgagtgatctattatgtacatctgcttaacttgttctaaggtatgtttgtgtagaattaagaaagcttaaaaaggcaatgtggatgttttagactgactaagctatgctatcttcgatgagatggttgttgaggtaaaacatgtgcatttggtttagtgaaggtggaatcgatgtcgtttcgtgttcaactgaatgagaagcatgtttttctatgcagaatttgatgaaaccagagacaaactagagtctgatgttgatgcaaattgcaattcatcctcaactgaattccttgtgttttgtttgtataatcatgttcacaaacaatatatcttattagtaaatagggtagtattattgttgttgttgtgactgagaaatctttaattatgatatgatttcatttgttgtttgtaccttaaaacttacaacttacatatattaattaactatatagaatattagaaatttaattcttaaaatatgaagcataacctgtcatcttatatcatcaactaatattgggatacaaataaaatgagttactcaggccaacttcaacaaaacactaaatttattccaactacactttaaaacttatcttatatataacactatttatagtgtctccctaatattagtgtgacaccatagactatactaaatactttttgtatatatacatatattatttgtgtttatttataatttaataaaataatataataataaaaagattgctttaatttaatttttagtgttgtaattaatgaaactaagtgattcaatatactaattaatttatgtaagcttgattattagttagtgttgtacttttttgatacgaaatgaaacttaattataaactaataatagcttaaaagacattagatttgtgcgtgtgtatacactacaaaaaaatttacttttaataacaacaaaatttatgactaaaagtaaaaaatttgcaacatgaaaaatcttcaaaaattaagtgattttgttttgtgtaaaaatgatgggtctaggatcacagagttgagtaagttggataatctccatggacgtttgtgtatttcagggcttgagcatgtcaaagaagtgagtgatattgtagaagtcaacttaaagaacaaagagtatctcacagagcttattttgaaatgggatggtgaggcaaatgattctattagagaaagagaagtacttactgcactccaaccacatgcaaatttgaaggcactcagaatttttggttataaaggtacaaaattgcctgagtgggtagtagatccattgtactctaatttggaagtagtttctttacacagtaaaaattgttgtttgtctttattgtcaattcaacacctgagttcatttaaagtgctttatatttacgatatggcaatcgatatacctaatgaattttgtaataattctatgcataattcatttcgagttttagaagagatacatctcacaaagataactacatcaaattggtcgtttatcaatacaaattatcaaaagggtgacattttcccttgtttgaagaaatttgttttagttggatgtgggaagctaaatgtggcattacctatgggtaattttccatctttggaaaagatatttgtttgttattgtgatgaattggtgactgtatttccatctagtactgatattgatgttgcatatccctccctgaggacaatgtacataagtggttgttcaaggttggagtcagtttcagaaatgggattattgcccttttctttggaaagtctacatattgaatcatgcaatacagtgatcgaaagtcgtatgcaatggaatttacagagactctcaaagttgactgaattaagacttgacgattatagaggaatggtggattcatttcctgaggaagggctgctcccatctagtttgacacatattaccatcaagaactttgataagcttatagctctaaatgccaatggttttcaccacctcacctcacttcaacaattgaatctttataagttggaaaagttcgagtgcttgccagtaggacttccccatactcttactagtttgcgtatagtagattgtcctctgttaattcctcggtgcaagagagaaataggagaagattggcccaacattcaacacataccttacataatcatagataatcaggtaagtagtaatgaatataactcataacttcaaagatactctgcaatgaaactatagaattggtataatgtgagacaatgtttctttttaattttcctttctctcttgtctttagagagttcgttgaatgaggtgaggactgaggagtcgttggtgttgatgacttcactattcaatcttatgagttatgatgtctttggcctagtgtcgcgctgctgcttcggttactatcttgttttctgatactgttggatgtttgttgacagttggaatgtaattaccatgaagactgcatatggatttagtttctttggttgtccaatcctctattgatgttgatgtggtctatgagtcatctgttttgtatttgtagtttttttttcggtttctggtttgtgtgtggatttcctttgtcttgtttgtgtgggatttgttaccacggtattcttctgccacaagtgaagttattcaataattcgggaagatcaggtcactcatggacatgtgatcctattcccttcttaaaaagaataacacaaattgttgtttaataagaatgaaagtgtagtgaatttcagtgtctcttcttcatttactgtacttgagttgttcttaattatactatgatctgctcaattatgtgcttttacttttagagtgagtaatgctttgagtgatctgttatgtacatctgtt

SEQ ID NO: 22502 - DNA, 4511 bp, Cannabis sativa
  modified_base (3987)..(3991): a, c, t, g, unknown or other
  modified_base (4019)..(4023): a, c, t, g, unknown or other
  modified_base (4049)..(4053): a, c, t, g, unknown or other
  modified_base (4081)..(4085): a, c, t, g, unknown or other
acgaacaccgccatgaaaaaaaattgaaaaaaaaaaaataacccaacatgtgtttttcagatacggagattgactaagagattgttataggaggttaacggtagcattcctcccaaaataataccttcataagtctcaaagtactaccaataatttgaatcgtatacctatattcatattgtaaatacatgtgtattgtgtcggcccgatccataatttaaaaagtcgtaataatatgaattatgtcgtgtcgtgtcaatattttaaaagttaagtctgtcatgacccttaagcccacattttcgtgccaatataatcactaaattatatgtattttttatagtttcaattgtatttatataatttttcaaatatactttacacataatcatataaaatacatatgtattattattagagtgattatggtcaaactccctgaactacggagtttggcacaatcaactccccttattgaaattttggaggcagaactcctcaaactacaaaatcgttttgctctccacttttctattaatatttgattgttaaatgccaaataggtctgccacgttgtacacatggcataatttcattagtcaacatcattttatttatttaaatattataaaaataattaaaataataaaattagaaaaaaaaattgaaaaataattattttttatcttttgttttttcctttttttcgttcttctttctttgtgctagcagatgagaagatgaagaagacctcctccgttgtgttagcagttaaggagatgaagaagacctccttcactgtgctaacagtcgaggggatgaggaagacctactctgatgtcaaaatagttgagggaatgaagaaggcatcttccgttgtgaatagagccgaagggatcactaagacatctatggttaagactaagaaaaaaatggagaccgcacctacaatcactctaaggtgcgcccaagctggggatgacatcacccccatcttggatatattatttcagtagttaatcacatccttaattgatcaaagaatggccagcgattgctacaatattttgttggcggtttctaagaagacctcctccattgtaaagccgaggagatgacgaatgcctcctccactgtcaagctgaggagatgatgaaggcctcctccactgtcaagctgaggagatgatgaaggcctcctccactgtcaagtcgaggagatgacaaaggcctcctctgctatcaagcctatgaaatggtgaaggcctcctctactgtgaagctgaggagatgacaatgcctcctccattgtgaagccaaggagatgacaaaggcctccttcattgtgaagttgaggagatgaagaatgccccctctactgtaaaattgaggagatgaacaagaccacctttgctgtaaacacaactgagggaaactaaagaactccaagtttgcaacctaggagagaacaaagactacatttatatctatttatacatatagtgtgacaagagagccaatgctaaaaagatatatagctgaagatcaaaattggtaatgaaatttttgtgtaagcatatttcagaagtctcccaaatcaaaggaaattactcaagaaaattagcaaataatttctaagattgtcaaaattgatgcccaccttagtagtttcacatgaaacgggcttagtctgcgtcatgaagtcaggctcacagacgtgcaaagctaacttgggggaaaatgtttacaccaaaactagccctgatgacatgaaaatcaatgtttggcacgtggtgagaaagaaaacatcccagggttgggtagtccgagtcatagcagtcgacttgggaagggtccttagccctgcgcccaggttgactctaggagctctagaatgggtgtttggatcccactaagttgtttccaactcaccatatttaaatattttgaaccaagaagacaagaagaatccaagtacaaggcctagaaattgaaaagagaggaaacaacaccttggaagtcaacccgagcgcttagggttttcacctaacacccaggttgacattccaactaaggttttagtttatgggtccttcttagtgaaagtggctcaaaatttgtactttgacatgaataagacctgtcatgaacatattttaggaaccagaatcagaattagaacactctcaattttgagcacccaaggcactaggtgcctagggcacccagcgcccaggttgacatattctcaacatggggcatttccaaccgtaatattgaagaagcataccaatcattttattcatctccatccaaaataaagaatcaagtgctttcgggaaagaaagagattgattggggggccaaaattgagacccaatgcctaggttgacctaggtgatccacccaagttgacacttggtcaacctgagccatttccattcacttttttgagaagtcctctaggcatattttcctttttcataaatacctgagatacaattattttttagaatcaagcggagccatctggtggcaaaaagttcccaggttgacattttatcagcctgggttacttccagtcatttttcccaaaaagtgttccggacatctttttcgtgttaaaaaataacgaagatacaagtgatcttaaagagcaaacaagattttataagggtcaaaatagggacccaacgcccatgctgataagcaaccttgtttgcatattttcgctcctcaaacacaaattcccagcacccacattgatgtgtgacctagtgcgcagggttttgcttatcagaattcgattccatctcgagcatctgactattttttcgtagtaaacgagagctacgacttgtgacaggtcaaatacacattttgatatttctgttggtacttattttactagaatctaaattaactaatcacttatgttgattacatggcataatctaacatcccaaatatgacaaacattaaataaacacatagaaggtatagaaaacctcacattggttgcagtaaaataataaatcttcttctcttcagttctctaactcttgttcatttttgtcgtagagtagtaacaagaactgaacctggtttctctcttgaattgataaacgacactacatagtcttctgagtattgccttgaattgtatgagcaattctcaatcattaagggacacgaattgagattgagagagagagagagagattcaaaaatctaaaagaaggaaaaaggcttttctttgattccattttctaagtttgagagtctctatcaaatcaaagctctttatgttccttttatagggtctctataggtttatgtttagaatagaatgtgctttaggaaaaagacattgacctttaatggcccatagtgtaggccgaaatccatataagcttatggggtttgaattttgccacttaattcccttaaataagattttctaatctttccaaagataccatttttctctttctatttatttaaatgctaattttatctagttaataattatatataattatcaaataaacttattatttaaatatatttattaattagtcgcataaaatgtactaattacaaataaactatctctttacttttcttctcaaataagctcttttttttttagtgaaattcataaataagataaaagtcttgtttagaattctaattggttacagaaaccaattaattgagactgcaagataatattatcccagatagtgtggggaccatggatctatgtaaccaagctcccaataagcagttctcgaaatttatatataaatttccttgcttatcaattcttcttgactccactatagattcggaattacactcttgattacatagaatgctctatataccaaatatagttacgttatgaattattcattgtttcaatctatacaatcaatgatcttctatagatgatttacattgaatagggataaatttactgttnnnnngaatagggataaatttactgttttaccnnnnntagggataaatttactgttttacccnnnnnggataaatttactgttttacccttcaannnnntttatccttaaaacacatagctacctataaatgacatttcagtaaactaatataattaccgaaataagagctcttccatttatgtcattaagccagactctaaggaaactatcgtttagattttatatctatgattaatgctcactcaattgcactatcgaattctcaagatgtaagtatgggctagtcttacgggtaagcgggtaacaaacaagtcaaagaatccatatagtatacaattaagcaagaacttaaccatctcatgattaagattaatcgatctaagatcaactaagtgacattgacttagaaaagatattacagcaagcttattgtaaaaccctggaattaagaaatggattagaaaaactctaattagataattgtgaataattgaggaattatattattatatagttcaattta

SEQ ID NO: 22503 - DNA, 3797 bp, Cannabis sativa
tgtcatccgcaaacattaaatgggtaatagctgggccgtttcttgaaatcttgaagcctgcaatctcaccagcagtattttttgacataagcattctcgatagaacatcggctgccattataaataaagctggggacaatggatctccttgtcgcaacccacacgaaggggagataaatccttgtaaagaaccattcagcaacagccccattttctcaacttcgatgcacttcttcacccatttaggaaagttaccattgaaacccaggttatgcagaacctctaaaataaaaccccagctcatcttatcatacgccttctccatgtccagcttgatcatcatatagcccttcttccctttctttttttccatagaatggacaatttccttagccactgccgtgttttcagcaatcaaccttccttgaacaaaagccgattgagcaggcgaaataagaataggcaagagacttttcagccggatagctagtacctttgatatgcacttgtaagcgacattgcataacgctattggtctatagtcatcaaccccagaaggacactctttttttggaataagaaccaaatttgtgttgttgataaactgtgggagttcgaacatggtgaagaagtgagagatcatactatagagatcatccttcactgttatccagtgttgacggtagaacccagttgacatcccgtctggccccggggccttctcttgccccatagacttcatacaagcttcaatttcttcaaatgacggaatagtattcaatttagcattctcctccctggtaattaccggactttcctgaccaaacgcaagaggtaaagaagactttcttttgtccacaaagataccttggaacttttcaataaataattgcgcaattcttgactggtctctctcccaagtcccgtcagtagtcttgatttcttgaatgaagttccttcttcttctaaccaccgtggtagccatgaagaatttggtgcatctatctccctgcttaagccacgaaattcttgatttttgtctccagaagatctcctccctggccagcgcttcgtttagattgtctctggcctgtccaagctcattagattgaatattgcttgctttctccaccatttcaagctttgtcctggcctccttaacttgttgcccaatacttttgaaatgaactctattccattttgttagatgatctttcgttttcttcaactttcgataaaaattcaccataggattatgatgaagttgatctttccaagcatttttaactacccagacgcatttcggatctctaccccacattagttcgtatttgaactgcgattttctaacgttcgccccaccttccgtatctaggagaataggccgatggtctgatgtggcagcactgagaactcgaacaatagcattggggtgaagcatcctccagttcacagaagccagggctcgatccagtctagctcttttcagtgtacacccactcccggatgctgatgttttttggaaccaagtgaacttccctccatgggcccctaaatcgattaccccggttcttgaaaccattctccgaaggtcaaaagaatacttcgtagcatttcctctgtttgcgtaatgaagggtctcatgatccatcaacgtgccatttagatcaccaatgagcaatgtcggaatagaattgttgataatgagatcactaactctattccaaaaaacttctttcccggctaaaactggggggccatatatccctagcaggttccacgggttgccagggggatcagactctataacaacactaattaagttcttgtcaccttgagcatcctcacaacgcacccctcttttccaatagagaccaaatcctcccgctcttccaaccggaggcacatacacaccatcaacaaaatgaagtttcccacacaagctgtgaaatttctctaagcttagcctagtctcagagataataatcacctcgggatttgactgacggatcaacgccgtcaactgacgaactgccgctttgttcccgagtccacggcagttccaagcgataatcttcattgagcatttggagacttttgagggcaagtctccatagccccaaagcaaaaaacctgtgcatttgaatttcctttgataattgtaccctcctcagtggactgttgttgaggatcttcattctccagtatctctgaaatcacacagctggtagtggcatttgggtttttgtcaattatgacaaaatgattatccaaattaattgctagttccacagccgaagcattccaaggatcactatagtgcttcctatcctttttcgaaatcttcctttttccttctttttttaggactaccggtttcgcagacaaggacactgcctctttcaggggtcttcctcttcttcttgatggtttaacttcgattggatccgtgtcacatatctttctcggtcttcctcttttccggcctgaacttgttttctcaatcgagccaggagagaaactacatccagtaaccagaggagacttatttaaatttagtttcacttggtgaggagagcttgtggaatcgttgttcttcaaaggggtgtcaaaattgttgcaactatcttcggctggtaacataaaaaaaccatccacagctttgcgtttcctagggccatgctccgcttcataacaacggaagtcttcgatatccagaattggattgaacaaagtttgctcacggtggtacttgtctagagtagtcgcgcccaacagttgatcaaaagctaaattccaacactcttgtgagggccacttaagaggttgggcttgggtgccaaagaggccttggtaaacttgacttttatctaaaggggccttttttctctctgggccaggagcagatgggccttcgtgattatgggccacattcttagaagactctccacaaacccccccaacgactatattcttttctcctccactattggtatcgattctctgtctatcccccccattctgaatattgtttgcattaattggggaaaattggacagctaaccttgcttctcttccatcagatgtctcagacccaaggtttgtgctatcactgccttgtacccccttttgcttttgagaggtctttttcattccaggtggtaattctgggatgatcttttctactaccaggtcagctgtattctcgaaaggggaaacttcacctatccccggcaatagtaccatcggataccggttcaaaacgacttctccggcctccctcctggtttcaacaattgtttccacctgccttcttttcccaggatattgcctttggagctctcgacattccgcttgctcggcttgacgacttatatcttgcgttttgagaagatttctaactttatcatccttagccgcttttttattgataatccactcagtgaaccatctcggcaatggagagtgaaaaggcgatttttccatagcaacctccgccatccaagtcccaatagtggatgaaaaaaaatataaccaccaccaccccacactaataacatcaaattcaatgtacatcaataataataataagatgaaaaaaaaaagaaaatgttattggtgcttattataacactctgatatagatctgtaaccgcttgtgaaaatgatgtctcaaatttttttgtaatttaatttcttaattgatttcaattaaataatatatattatatatggatgatttcttaaagggtaatacccattaatgggtactaaaaaaattgatgaggtggcaattt

SEQ ID NO: 22504 - DNA, 2183 bp, Cannabis sativa
atatatatttttgggtgtcagcaagaagcgggccattaaatattagacaagaaaatcagcactagacaagaaatattttgtgacagggaaaaatatattttttttttgaaatataaagaaaaccatgcattgtgcagctatataatagatatatattttgaattgaatttatatatatatttatattatattgtttgattttgataaatgggaatgtacatacatatgaataggataagcagtaggggccaaatttagtaggagttcaataaggaagagtgagtagagaaagtgactaaacaatgttagtaagaatatgtggtatctctttcttatattatatattgtctcgaaaagatcatcacttagctagtttctctcttatatatgactagtttgagctttttaattagttcatgatttttacactataaatatttatttatatatattaatttatgggttcttcaaagaaataatcattaatcattcactcgggtattttcaggaatatagtccacatgatcttctggaaaaattacaagccaatcttatcagatgatggaatcatctctctctatatatatatatttatatttatatatgtatgtatgtgaatagtaagtaaaaaggtgtggcccatcaagtggccggtgttaataacttttagtactactttttaacaaattttcatcatctaaaacaattgtgaattatgacacataattttgttaaagctaattagctatagatagagaagcctaatatacatatattatatatgtgtgtatgcgttgttgagttgtttgatgggatcgaaatttggcaaaatgaattcatctccaaagatcaaaaagatcatttggaaaatatatcatgatcatctcaaaaaagtaatttttgaatatttatatatatatagaaaacaaacatatataatcgatttgcccttgaaattaattttgaagataatgcctctctctctccctttgcattatcctcaaaagcatcttttcgtgatcatcagcttattcccctaacagtcaacttattgacaagatataaaataaacttttttattttctttgttttattactttcaattacataatcactctcattattatctttatatatatatgtgtgtgtaaatattcacgtagggctctatatatcttttacatactatattagaactaatgtcccatctattataagtattagtcacgaatttctaaatggagtaattctattaatttccatatactaattaaagagagaatataataaatatataatctatgcatatcacagctccaagtaaatttggtcatgatctcagatcaaggagaaaataacgtgagttctagttaaggcttaatgtcattattagaaggacttggtttttcaaaaagggttgagtcaagtacacctattcctttttttttttttttttggaagattaatagctattgatcattaacatgcttctaataatcaaatggtatgcagctccctttggtaacttatttggtagtcgacttaatatatataattagataacttctttttcttttcgataaataagttctttgtgttgcatcaaaagaacaattacaaactgctgcaatagactcacgaatgaggcagaaattaacattaaggggaccaaaacataaaataaataaataaaaattaaggggggcaaataaataagattttggaaaaataaaatttttaacataaaattgttttataatttttttttttgtccaaaattttggcaggcgtcatggccgcctttggagctaaagtagctccatccatgaacagacttaacagtcaaaatctatacaaatttgaaggccaaacttggtcttttttacttctatctttttcttgtaagtttctcttaatctatttacattaatcaaatattttgcaagtaaaagaagcactttaataaatctcacctcatgtgaccaaatggctctatttttttcagcccaaatgaaatatacacagttaattaaagacaagaataagtttccttttttacttactcactttgcttcttcttatataattcaagataccttgaaaattgtaattgtgagaatcaattccaatctaaattcacattaattaagtgtccatgagtttcccatctcaatcacacacaa

SEQ ID NO: 22505 - DNA, 3518 bp, Cannabis sativa
gttgaagacgatgatcatcaagattaatatttttaaacttaaaaataatattttcttccattaatatcataaatatgatcaaaatagttgagaaaaatagaaagtttgaatctttttgagaagaaatgagaaaagtttgaatcttttttgtggtttaagaagagacagagatatagttatatcatatgtgtatatatatagagagagagagggaatttgataatggggagaatgtattggatttttgtttggagaatttggtttatatataaataaatccaaaagaaaatgattttatttatttgaattgtaatatttatttgtggggagaattgaggtgtgattgtattttcttttgttgttgtttgtcgatggcttctagaaatgaagagagtgatataagaaaagggtatctatctattaataataattctagaagaacaaacacaaagagagatctacacataaactaaatacttaatacttttttagtgattactacaatacaatacattttgtttgcttaattttttaaagggtgccttggtaatatagtattttttttttttttaattagaattgtgaaaatagttttcagtttttattttttcatttataattatgaatcaatatttttttttaaaaaaaaaattactttcaaaatttttttaaataattttttttttcttaatcaatattttagactctgactctaacgtaaatcttgggagttgcgacccaaacgttggccctagcctcagtcccagactcagatcaacgtcccatcccaaatccgggtttgcacccgacttaaataaaataaaaattatagaatatacttttactttctatttttaaaattaaaaaaataaaagtagttatagaacacgttttttattttagaaacacaaattttatttttatttttctaattaaaaaattttaaaaaaaaagtattaccaaatgcctcttaaatatataattttcaatattgagatttttttgactcatttaattttaatttatagatttattgatgtttacaacacatcacatgaaaccaaatgtattataattttattatataatttatttttacaacaactttcttgtaaaaataatgataatgatatctatgtttacttatttatataacgtgtttaattaagatcaaaaaataaattttgtgattagcataatagattttgtaatatctatcattgtttcttgggataaagtttatcatcctcaataatattaagatgttagttttaaagagaattctaatggaacaataggatgataagcaagtagatttgggatattaactctaaatttgatgtgctttgggtcaaatgtatggtcggccctaagcataggtgggctaggcctgcgcctagggctcacttattttaggagcccaaataataaaatacattttaaaaaatatacagatcttttataataatttttaaaaatatcatttatctttatagtaagggaccaattttttttccctatgacccattttaactcagggccgaccttggtcatgtggactcaaaagttgagagaaactatttttagagttattctctactcaaactctgatgtatgtaatgggaagttgaaggttgggctgaacatattgaccagatttgactcggacccggccaacctgcccggaccctaaacagtcaactagaaaaattaaaaaaaatcatttagtttgggcgggtcgggttcaacccgatacactttcgggcgggtttgcgggttagttttttatggtcactgagttttgggttgaacccgaacccacccgccaacccggtcactttttattttttatttttattacatatataatatattaaaaaaaaacccaaaatctaatcattttatttatagtttggaacttgacttttgtattttagatttgaaattaatgcatttttattttattttaatctaatgaatatagattatggtgttataagttcataacttatatgcttaatttaatatatagaaaaaaccacataaaatttgattttttttaaaaaaaaaataatgagttgatcgggtcaatccgttgacccggccaacccgaactcgcaaactgtaaactcgcgagtctgaaatccgtgaactcgaaccatttcacaagtcaagtccgggtacaaatttttgaatccaaaatccgcaaactcgaaacccaatcaacccgcccgatgttgagccctaattgaaggttagtaaattatataacttttagtgagtatgataaagttgattatgctagagttaagatgaaaatattccaaacttttattaagttaccccattaattaatgtttcttacataatatattctaaaaaatatatataaataaaatacattttaaattattaatgaaaaaattaaaaaaaaatataaaagaaaacttgttaaagtaatattttatataaaattaaaattatttttaaaatatttattacattaaatttttttcaaaatacaagataaaatagttattgaaattaacaacaaatattaaatatatataaagaaataaataaaatgcgtgatttaacttaatttcttaaaaataatgaagtgcttttatatatattgaggagtgctaccgtcaatttcttattataatttctcagtcaacttttgtgctcaaaaacacatgctgaaatatttttatttttatttttatttttttttaagatggtgttcgttatagtttcaacatcatcctgtaattttattaaaaaattcgaataatttacaatgcctaaaatgggtttgaagtttttgaacacatgtggcaaactgaaatattaggaactctgttttcagtactgtaaactattcaaaaaatttcaaaatttacagggataatattgtaactataatgaacaccactataaaaaaatttgaaaaaaaatattttggatatgtgatttcgagtgttgagattgactaaaaaattataatagctaggaagttataattagcacttatcgagagtgtaattatagttacctaagtaaaaaataaggcatttattaaacttaaaaaacatagataattagtttatttagataactaaaactagtttcttagtgatttttccgactatgccaatttcaataattttttcagcgcagacagtaatttcgacgactttcccagcgccgacaacaaactctggcaccttttccgacaccagtgacaattccgacaatcactgtagtttcatttattttatttttttaaaatatatatataaaaaaaaattaatatttttttatggtaatttaatcccatatatatattaagtttttattttaaataacatattttttttattaaatttctttaccatattttttttcatatatttatggaaataccccattgagatttccatatattgattctgcaaagcccattcattctgcatattttatctaaatcgagttatcttgctttcctttaaggc

SEQ ID NO: 22506 - DNA, 3473 bp, Cannabis sativa
aattaaaatagaacaggttctatagcagtgttataatgaataaaaataaatatcacgaaataactcaaactgattataactaaaatagaaccagttatataatataacgctactacaaaaatggtttttctcgatattttcaaacagtcgtttaaagtattctcgtcggtttctataactgtcgcctatacgaccgtcgcaaaataggcagaatatgcgatggttcaaaaccgctgcgaatgtggaattctcgacggtttaaaactgtcgccgataacaggtcgtctctcagtgtcagtgtcgtcctagcagagtgcttttcccgtcggtgctctttccgatctctaggcatttcaccactccaccggaaattacttctgccccttccgtactccagcttgttagtttccactgcctgtctagggttgagccctgcgatttgacggcggacttaaaaagccacctgtagacgctttaaaattgtgccttataatactggttacagtttttagttctttttagcgacaattttttttccgtcgttacattagaaaaatagaaaaaaagataaattttctgcaattttttctcaacattaattttaaatttttttacaaacatgtatagtcacaataattgaaaattggttataaaaataaatctaaattaaatattttttttttgggaaaagaaaagttcctttaaataaaaattgaaaattagaagaaattcaggattcctttttaataaggcagtttcaatttcaatttctcgaattctaggccctcttttcgggatcttatcactctttctctctcttccttggttagttttccctttttacccttttaattttcgaagcaaattttcttttctgtgtcttttatggtaattttgttattcttcatataaatgtcgaagcattgatgataccgaaacctaaaccctgattctttcttccttttgttcttcgttttctaattccttcctcgattgcagaagctttgccatggccaaaagttcgtttaagatggagcatcctcttggttcgtactctctctttttcattttgaattttgaaacgtgatttacctttcaattttagtaattaagaaacggtttcatccagaagatgatccttacttgggtgttcttttggatttgatttgtgggtatagatgcttttagggcgtgaaatatgcatctttcccaaattttcattttgggtatttttcttgtgtttgttattctggtaattgtttaatattttttgctgcttagagctatatttgcatatgtatataaaatgtgtatttatatataaatttatatcaaatatgctaatgaacaaaattgttattgaaatgcttcaattttatgcaatataatgcttgtgaggtagaaaattgtaaaatatatctgcaatgtgtgtgatatgcaatgggttcaattttgattgttatcttctttaagcactgaatacactcttgtcatttctcttgatctgtttacttcagtgtataaaaatatatattgaaagttcaattttttttctttcttctaaaccagaaaggaggcaagctgaagctgctcggatcagagagaagtatccagacagaataccagtgcgttttcccttttttatttctgtgtcttttaaccaagaccgctaatttttgactctcctgtaatttcttgcgttgatgcaggtaattgtagaaagggctgaaaagagtgatgtgcccgaaattgataagaaaaagtatgaacaagtctatgcttttttttttgttgagttatatcttgtattccaaaatatttgttcaatcatttgtatggagaatcggattcattgtttggtcctttctggttacttgttggaaacaatatcaaaatggactctcttatgcaaaataattgggttttgcttttctttccttaatatgacttttgtacttgtaccatttataatttgtcagtcatgctatgcatttgtgaattctgtcttaaaaattgagtagccattagagatttcccctgcaactttcacagtttcagtcttctatcctttgttttcatcatatgaattctatgaatgagtaattgcataagttgatggttaaatcttttgtgttggattgtttgtgattctaggtatttggttcccgccgatctgaccgttggccagtttgtgtatgtggtccgcaagaggatcaaactcagtcctgagaaagccattttcatttttgtcaagaacattttgccacctactggtgagattgattgctttgtttagttgttaattctgttaatagttatattcttttgattcggtcatgagttaaactctgggatcttttggttgcagcggctatgatgtcttcaatttatgaagaaaataaggatgaagatggttttctttatatgagttacagtggtgagaacacattcgggctactgtgaaacatttggtgaaagccacatggtctttgtgaatataactggggaaagaagagagtaaaaaagtgtggtgtttataaattctcgttggtctatctgatgtttttagttgcgaaccacttgattgagttggctaccttatgtttatttcaataatttggtaacttctattatgttggtaaccttttcagtatatatacttgacttttcagcttcttactgaatgcttatgcttgaatgttctataatccattccatctgtgtttcggaagcactaactttctttctctcactcaacttatccgtctttttatatatacctaacttgtgtgtgaagacctcaattcattcttactattcaaaacttacactttaatataacaagggtggacttataaatatggaatcatctccaattggattaaggtagcgtttagttggaagtaatgaaattggatagaatagaaaagaaataatttttatttcattcttttatttggttgcatctaaaactattgtaatatcattttgatggaatgaacttttcatcattttggtggattgactattctattttaaaagggaaagaaagatcattctttctttatgcattttaaattttatcgtgttcttattccaattcccatttcatttctattcctatgttttcattcttcccaaccaaatgccaacttaaatttttttcacttaaaaaatgttccaaatattacactaaataaagtaccttattttaaaaaaaataaaaatagaaaaatacttaggattatttcaaaaatacactaaaacaacaaaacaaattataaaaatacggttttgcgaaattttaaatatttttacgatttttttattttatttacagaaaatacgatctttttatattgtactcatagtaatttgttgttatctgtatgttattttttgttgttgtttaaatgttatttagatattattttcatgttacttttatgtagttttctttttgttttcgtgtt

SEQ ID NO: 22507 - DNA, 2804 bp, Cannabis sativa
ggccgagtaaaaatcataacatacataatactacctacccaacttgtgtttggtaccttctccatgtactgggattcatcttttgttaagggtgattgcatgttggacaatttgaaatgttgaactaatggtgtgcttataggtttggcatcttgaaaaccaaatatgtttagcaactttgagatgtaccctgcctgagacagaactagctctttagactttctgtctctgtagatcttaatttcaagaattttcttggttggtctaagatttttcatttcaaattctgtgtaaagcttctatttcactttgttgatatcttccatgtactttcttgcaatcaacatatcattaacatagagtaataagtaaaatgttaactttaccttagaactcttgatgtagacacaactatcacagtcccaccttttgaaacctgatttgataatatactcataaaaccttatgtaccattgccttggtgattgctttagtccagatagagacttcttaaccaagcacacatgatcctcttttccctcaacctcaaatccctctagttgcttcattagaatctcctcatcaaattctccatgtaaaaaagcagtcttaacatccatttgttcaagtttaagatccttgattgctaccattgccaagatcattcttattgatcctgggtcaactgatattgtaggatgcttggatcctcatcctcttccaattatagttcttcttgaccaatgttttcttcaccatcttcttccacttcaaactctattttagtagctgtttctgttgacatttctcggttgcctggtgtcaagctcttctcaagttccacctcaaactgtatactgtcatttttcttaggtccaatgtttgaactcaattctagtgtatctttgtacacttcatcttcttcaaacacaacatccctactaatgaagaactttttatgattaccactttctatgctccacagtttgtagctttttacaccttctggatatccaagaaagacacaatttatgcctcttggttctagtttatcttgctcaatgtgagcataggcaatgcatccaaaagttctcaaccttccatagtcttcaaggtgacctgttcttgcctcaacaaatgtcttaaagccaatagcagatgagggacatttttgttggttaaataaaaagttgttacaactgcttctgtccaaaaattccttggcaatcctgagtatattagcatatatctaaccctttccattatggtcatgttcatcctttcagcaaggccattatgttgagggttcttggggacagtaaggtgcttagctatcccatgctttttgcaatattctttaaagaaatctaagcaaaattccaagtcattattagttctcaacttgttcaacttcctaccagtttgattttcaagcaacactctccactctttgaactttgaaatcacttcatgcttgtgtttcagtatatgaatccatacatatctagagtgatcatcaattagagccagaaagtaccttgctcctcctgtagaggtgactctagaaggcccccaaagatctgaatggacatagtccaatatatccttggaatagtgcaaacaagttctaaatttctgttttgtagacttgcctaggacatattgctcacagaattgtaggttttttacaaaattcttgcctagcaatcccttttttattaaaatctccaaaaccctttaggctaacatggcctaaccttctgtgccatagcattaatgatttttccatttcctttgaagaaatatacacaatgtttttggatgttcttttttgtagaacatacacaccattaattacagacccttttatgattacctttgttcccttggaaaccttaaggactccaccttcaacttgtactgcgcatcctccatcatctagcatagctattgaaattagattccttttgatctctggaacatgtctcacctattgtagttctctctaatggatccttttgcaagttagagtttcacacatccaactcccttgattgtacatgatctgttgtcccttaacataatagttccaccttcaatttcattgtattcagagaactgtattttttcagggtacacatgaaatgaacaccttgaatcaatgacccaatcaaggctagagtatcctgtagaagctaccatagcccttgcactttcataaccatcatcactgatattttctcctaatacaagattaggatttccatatttcttgaagccactacctggtttcttgctaagttcaggacaaatctcgtttgagatgtgatgttttgtgacacatgaaacatcttttcttgaagttggaaattggctttccttttgtggagttagcttgatgttgattcccattgtatgtgccttcaattcttccatgggcaattaacagagcctccgttgttctcttcttttttagactttcttttcaattcctttgacatcatagcactgtgtaattattccaatgtcagtgagtccctttcaaacatcattgtatccacagagtgttcatacttgtttgtaggtagagaattcaagactataatggctttgtccttgctttcaatcttgatatcacaattttaagatcaagaattatcttgttccaatcatccgtatgatcttcaatacttttccctagttgcattttgaacaagtaaagtttttgcttcaggaacaaacgatttgccagagattttgtcatgtagagagactccaatttcttccatagaccaactgtcgtg

SEQ ID NO: 22508 - DNA, 3345 bp, Cannabis sativa
  modified_base (2028)..(2036): a, c, t, g, unknown or other
ttcataatcaaatatcctaaacaaagacattaaaattcactctcaatatttttccgaaatcgaattcgaaacctctctatcaatctagtagaaacaactcttaattttgagtaaacttttccagcaaaataatgtcacaaatagattttcttgcatacttaatatttataaaagatcccaatatgtgaatcttagtatcagcaagaacaattctagtttttgtagcattctcagtaccaaacttggcttttttataagttatttttacaacgtgaaaataataattcttataaagaaataaaaaataaacaataaaatccgtaaaactgtatttttataaatttttttcatattatcaagtatttttaaaaatatcactttaaaaaaacattagcccataaaaaaacatgaacttggcaaaagcccaaatgagtcaaccacgttaactgacgtcatcacaccaaatgaacggtcagatctttctatctcagataacaaatcaacggccaaagatgacaagggtttagaatggtacctataaataaaggagtatagaagagatgtaagagagccgccattaatggagaacaaggagaggaatggattttcagaatcttacagagtgggtggttaggaaagataccatttttattcacttagtttgattaaaagtgaaaaaaagtttcaatctttatctttcctaacccacccattccataggtttcagattattccaccttctccttagttttcccaagttcttggagctgttctttcaactggggtttccttaaactttgtctgtattctgttttctgtttttgttttgtgcaggttggaagaagaacttcagatgttggtaaattacttagctttttattaatcagttgttttgaattaagattactaatcgtggttaaaaattgtttgttttgattattgttgttgagaaagatctttgtgtggagttttactactaattgttagttgtctttttttttttttggtttttgaagtgaaatagagagagttgtaaacactaaagagatgcctttgtttatgtaattctcatgtaatttgttgtggttgattaagaaagatgattaagtgttgtaatttttgattttgttcttgtggttagagtaatagcttgtaaaattgagataatttttttagtgataattatttattgaattaaatatatttaatattattttttttaatcttttatatgtttattatcaatttttttttgttatatatttgtaatattatattaatggataaatattaaagaacatttatgcccatattacttatttatataaaatgaataaaatgtatttaaaatataatatttaaataatgttcagaaaaaataagagctgtacaatttgtgttaaagttaaagctgtaaaatagagaaaagtaaagaagctcttggagtgttatatttggtcaaaataattaattatattgatgacatctattattttattaagaatataatataaaaaaagaaaatatttaaataataataatgatatggtaaataaataatatagaattgattaaaaagtaactaattataattataatattatagtaaataaaaaagtagtatttgttaaattttgtacaataatatattttgtataaaaattgttataacttttagtatttttcaaatttagaacactttttaaaatattacatagtaagttgtttgttataaattatttttttttattaagaaaaaaaatacttcattaatcgaacaaaaccaattacaagccgtaagctaataattacattgaaacttcctcaaaaaatcactttctttacaagaaccttttctattagttacattttgcaacctatactaacaagctattcttatattcgaaccattatgatcaatagagttagagcagccctcaaagaacattgctattaggcaccaatagtgcttaatacttttttaaattgtcgcgttgtgattggctagcgatactccctaaaagctannnnnnnnnattatatgagactcgataattaattggactaataacgatattaacacataggatggtgctaggcaccactggtaccctttagcatttctcgccctcaaagacacatttattgttgtttctccaaatattgtaaatggaggcaaccaagatagacacctgtctaaaatgcaatagccctttggttttcgaagctaacttgtcattctagcccttataattcctaagccaagccctatagcccaaccagtcaaaaatcttatccaacactcttcaggaaaactcacacataaagaataaatgctcatgtgattccaaggccaagccacaaatcagacagtctagaacttctaaaaaaattcaaaaccatatcattttatctctggtaagaagctgattatatattacttgccatagcataaaatgatatttaagaagaattaaagagttctagataactctgtgataggttacttgaatctgagtaagttcatagttgtagaactgcctagttttgaacttgtcggtgcttcctgttgctataatttcagcaagcaaaaatcttttcctcaagttgcaaattttaagctaataccaacgtactagtgtcttgtttgagctcataggaccgaaaggggacgttcttcaagtagattgcatttatccatttgatccaaagcaagtctctcttggtgttgatagcccatatgtactttgctatattagcatggttctatctaacactatccttaaaccggagccctccataagcctttaggagacaaattttctcccaagaagcgacatgaattttgctcttgttaccattcaatccccaaagaaagcccctgcatagtctttcaatctctttagtcacactttgggggagaatgaatatcatccaataattcttaagacaaagactctcccagcaaatgataggtgtctactagtccaagtttgaatccgttgcttgattttattgagtacaattccacaatcctcagccttccacttcgttggtctcaaagggatccccaggtaggttagaggatagttgcattcagttagctggatagtgttgcacaaatcaattttttttcagcatgatcaatactgccaaaataaatatgagatttggcagtatttatgttaagacccgaaacactgttgaattcttcaagaaccttttccagaacatgaatagattgttttgaccctttgctaaacaatatcaagtcgtcagcgaaatagaggttgataagctttaagcttttgcacataggatggaacctataattagtgttcctag

SEQ ID NO: 22509 - DNA, 5233 bp, Cannabis sativa
gccacggcttctacctccactcgccgataccgaccaaaacgcaaggaaagtgccaatgagattgagtttcggaaaatgctgaagcgaactcgtgaactggctcgttctcttgatgaaggatatatcgaagaggcgggtgcggcccagcgcacccgccgggtgccatgattgtcattagttggaatgctcgtggattagggagtaaacgagcattccattccctctcccgtttagttaggaaatttcgaccaacacttttgtttgtatcggagactaactaaactccaagttggttggctctttagatagatttaagatgcatgcatcttaattttcctaacggtttagaagtcgagtgggcttagggtcttttgttgctctggactcatgatattgatgtaaacttgctttcttataatataagtcacttcttttgttatatcaagcctactaatatgccttccttttattttactggattttacggagcacctaactcaattaacaagcctctttcatggcaagtccttcatcgaatcggctcaaatattccaaactccccttggctcataatgggtgatttcaacgactttcttaacttggaagataaaattgggggagatacttctaggagcccttcaactcaatttaggagcttcattgatactttcactcttcatgctctttcttctcagggtaacatttacacttggacaaataagcaacagcaaaatactcacactcagcaacgtcttgattgggctattactaattctgagtgggatgcactctttccaaatcacaacctacttcatggtgacttttttggatcggaccaccggcctctcattttaaacctccatcaccaagtgcactccacatctcccatcccgcgtttcatttttgacaaactttggatggctgaagatggctttgatgagtgtcttcgtaaagcttggacatcaagttctcatatgaacaactgtgatccaatcataaacataactaaaagacttgagcaatgctcatctcatcttcgccaatggaaaaagaccctgggtccatccttaaaatccaaaataagggacactcaatcgcatcttaaaacggtgcaaactcaatcgcgtcttaaaacggtgcaaaactgccctcagccgactgaggctcagcttatgcttgggcggaagctggagaatgaacttgatcaactcttatataaagaggaagaatattggaaacaaaggtctcgtgtgaattggctcaaacttggcgacaaaaatacaaaatatttccaccaattcgcttcctcacgaagagcaacaaataagatcatttctcttcttcaccctgacggttctatttccaaggacaataactcatttgcactcattattgaacaatatttctctcaactctccgctagttagaatcttggcgatgaactcatggaccgcatcttatcaggcctaaccgagcaaatctcggagtcagaagctgcttccctcaacagcatttatacggatgatgaaattaagagggctgcttttcaattggccagtgataaggctccgggtgtggatggctttactgacactttctttcaaaaaactggcatattcttggccaggaagttctccgtgctgcgaagggctttcttaatggggatgcagaccttggtgtcataaataacactgtcattgtgcttatcccgaagcattgtcatcctcaacaaatcactgactataggcccattagcctctgcacgaccctttataaaatcatatcatgagtgttagtgaatcgtcttaagcctattcttagccgcattatttcccccacccagagcgcttttcttcctggtagattaatatcggataatatcatcattgcgcaagagattacccataccttatcacaccgtaaaactggtcgaactggttggatggtcctcaagctagacatggcaaaagcctttgatagagtcgaatgggagaaagccatgtaaaagtttaaattccctattcgctttatcaatcttgtgatggcatgcatttccacagttaccttctctttttccatcaaccagcagattttagggtctgtcaagcctacctggggtatccgtcaaggggatccactctccccttatctttttcttctttgctcagagggtctgtctaatctcattgctcaaaataccttgaacacccgcactcgtaatcaaggacttggcctcaaaattgctcgtaatgctccggtcatatctcatattttctttgcagatgacagtcttcttttcagctcagcatcccctttggctgctgcaacaataaaagaggttttacatgattacaaccttgcctctggccaaatggtcaattttaacaagtcctctctctatttctcgcctaataccactgaggacattaagagtcaaatcacttcccttttgggcattcctattcgtgacactatcgagaaatacctgggccttccccaaacttttgggagatcgaagaaagaggctttcaattacctcaccgatcgagtctggtcacatctgaacaagtggaatgctcaacacttctcaaaaggaggaaaagaagtcctttttaaaaatctggtggtttgctattccttcttatgccatggcttgcttcaagatgccattctcttttctttcaaagatcaaatctatgatggcttgtttttggtggggaggaaccgaacatagtcagaaaattcattggaaaaaatggtccacccttagtctctccaaatttcatggaggccttggattccgctcaatgaaggctttcaaccaagccatgctggccaaacaagcttggcgtttacttcaggcacctacttccctttgtggcaaccattctaaaagccccttattttccccacaccactttccttgaggctagtaaaggtcgtcagccttcgcttgtctggatcagtatctcttggggtaaggagcttcttaagatggggattaggaaatcggtaggggatggcactacgacttctatctttaatgacacctggatcccaggtcatggtaagattaattatctcactcacttgtcggatgggatctcaaaagtttctgaccttattacctcttctcaccaatggaatacttctcgcattgacaccatctttcccactgacattagtcaagccattcaatccattcccctcatacgcattacctctcctgacacttattattggcctttcacatcccatggtaattacacagccaactctggctatcaccaagcacatagcttaaaccacaaacatgatccctcaccctcaagtaccctgaacaatcaaacctggtggaaaactttgtggacacaaccgatcccctcaaaaaccaagcatttcatttggagagcatattatgacatcttgccaactggctccaatttgcacaaaaggaagaccttatctacacctgcctgctgccgatgctacaaccaaacggaatccctagagcatgctctcttcaggtgtgaaactgtccagaaggtatggaagttaacaaatctttgtaatttcatttcacaacatattgcactaacttgcatggacattcttcacttggctggtactaaactcatggccaatgagttccaattttttctttgtttgctttggaagatttggcattgcaggaatgagttccttcattactggagggtcgtggcgccagcttctcaaattcatacagcaagagattttttagagcaataccaacaacacaacatacatcaaagctccttcaagacttctatggtggctgcaacgttgaacagtgaagctccctcaatttttcaactgaaactttcagttgacgcagcccagaacgtagcagctaacaaaaccagtcttggcttcgctctatacaacactcatggggacttgatgttgactgtagcgtcaccttggaatggaactcaatcagccctgttaatggagacgcatgcactctcttttgctctatcttggtgccaaagacacaacataaatctagattatattgtatctgactgtaaaacacttgtggattatatttgtaatgatactacacatcatctgcttttgaataggtatacaacaaatattagaagcttgctgtctttttccctaatgctactctcaggcacatcccaagacgggaaaatgaggatgctcatccccttgcaaagtatgcattaggcttagatcaggaagctatttggaaagttcaaaatttctatatgtaatttgtatcttgtactctaccttttaattctggaatggatacatctcttcttaaaaaaaaaaataaataaataaaaaaaataaatcgtgtattgttcaaataaaaaaaatagtatatatatatataaataaaaaaaaaagtctacatggtaatgatgtggttgatttagcagtttgaaggtgtgctgctgctgccgactgtgggtccgggccgtccgagatgtttacatcacgcgctgttttcgcacgttgttaaatactgaggagaactctcttcaaagatgaacgcgtggttgcggaggacaaacgagcaggaaaagagagtagccaaatatgaaatttcatatttaactttgccaaatgcaatgccaatctggtaccacacatgaaaaagtgacgctgagttctcaacatttgacacgtgtcttattcacttgatattatgtccacttcgttttttatagattccatgttgtatttttcttttaatattttttttttgactttttcttttaatattttaaagacaaatatttcacataattaaaaaaaatgcttcctgtgctgttttaaaattaaacttcttccccacgttttcatttaaaaaaattcctggaataagggaactaaaatattgtcagttgagttgatgatccatataacatcgtgcattcaatcttaatattcaaaaaacaaaacatcgtatctccaattttagaaggatataaaaatgaaaattagtatacataaattgaagtctcttaatatttcaaaaaaaaaaaaaaaaatgaagtctcttatgtatagtttaatataggttgtttgttgatcatgatctcttatgattaaaaaaattgcaatttggtaattattgtataggagtattatggccatgcatgtctatatgatttgatgctttattcatattgtaattgtgtatgtgcttgaagaa

SEQ ID NO: 22510 - DNA, 3106 bp, Cannabis sativa
  modified_base (1706)..(1719): a, c, t, g, unknown or other
cgaatctcatgattcatgctattcctcttcccaacctctaaaatagcctcatgcacccaatattgtactgtaggtgtgaagtcataagctatgtatttgcactcatgctgaacttccaaactcagcttcttctcgtagttggccttctatttcaacatatcattttgaagcaagtgcataagtctaacgaatgagtgcttcccccaaagaatatagaagaagaactcgagatctttgacgtacctaagtatgtcagtcgtaatcaaaacattactctcacgacctagtagcactacctcaacaatcagactggttgaaatatttgttgatcaatcggtctagccctgagcgaccaacctgcatagccttctcctcctatgttggccctaaggtaaagttcaagcttgtaatgagtgcaaactcaatcactctaaatttgagcccctttcgaccaatgtaaaaacgcatctcctccgccttctcaacatcaaccttcatcttgtgtaacattacttggtgaaataacattgaggaaaatgtgagaggtatggtattccaaaagttgctgaaactgcttgctttcgccgtgttattcaaattgtactccttaaactacatcttgacttttgcaaaagcactggtgcctctatatgtgacgtggccagtaaaatactcgaatgctggaactatgagtcgtggagccatctaaaaaaatatataacaaaagcgtacgttaagcacaccatcaaagatgccccacaaaaaattgtcgaaaaaagtcgacatcctgttgacattctgtcgatattatcacaattaaaaaaatgaaaacaataaaattgttgacaaaatgtcgacaacttgtcgatattattgttaacataataaatcagataatgcataaaattgtcgacaacatgtcgacaaatggtcgatattctatcaacatacataatatattctaacagagtatatcttaacaaaaattgttgacaaaccatacatatcttgtccacatcctatcgatatacagttaaaaaaattgaaaaatctagttatgctcaaataaagaactacgatcgacaacatattgacatttcatcgacaacatatcgatatattcaataaattccaaaaaatatatcctaatcaaaaatgtcgataaaccatagataagatgtcgataacctattgatatactgtaaaaaaaactaaaaatagttatgcttgaacaatcaactatccatttttatttttggtcaacatactatcgatatttcatcgataaaattgtaaccagttcatgcaaacaatcaactaccccatttcaattttcggtcgatattctatcgatatttcatcgataacactgtaaaaacgtatagataccaccgaaacatatccaaaatctacaaagaatcaactagtctgaagaatatacacaaattcgcatccaaatcaatgaaaatttaaattttttatttaaaaaaaattactttttcattgagcttagtggtggcgatagcaacggtttgaatctagattctctcggtggtggcctgctgtcattttgagctactagttcatgctcgcggtcatcatgaaaaactcttgttctacgtggtcatggtggtggtggtggtcgttgggttgcctgtgggaaatggagagagagagagatatagatagatagatagagagagagnnnnnnnnnnnnnnagagagagagagagagagatgctagaatgagaaagatggatgggactttaggcctttgggtgggtctgtagccgtttcgggggttcgtttgggctctcggtggtatgttcacacctgttgggttctcagtgtggtggagagagagcacgaggaagagagagaaagtcagagagggaaaattaaataaaaatggtattttgggtagtttagaaaaataatggcattattttgtacaaattagtaaaatgtataaattttgatataggagattttattatgtataaatagggaaatttctcaagttaaaaatagtggaatattaagttaaataaaggaatattttgttaaaatttaaccaaaaaaaaaaaaaatactatcgttaaataaaaaaattgtcgttagataactacttttaatatataaagaaataatatttttttagagaatttatgaattcctatatatatacatatttaaaaaaatatatatatatatgaaattatatatttaaaaaaaaaaaatcaagtgaaatgaattcttttatatatatatatatattcacttaatgtatttttactatatgaacttaattttattttattgtacacatacatatataaaatgacattaaacatttttttattgtaatataatttttattaactactaataattcaatatttatgtcaaatgttaataattaaaattattattcaagtaaagtataattaaaataatagttatttattcttctatttgtcttatacacttaattagagcttataaatttatttaaaatataaagatcagtttctttttatttagtttaaattgaaaaatataatataatatgtatagttattatgcaaatatttcaatgttatgtcaaatgataaataagttatcctaacaaaatatagaaaagatttaaattaaaaaatagaacttgtacttttaaagttaaatatttaattcaaataatgtcttttaattttcaaaacaataaaaaacaattttacaaaaaatgagcttactaaattaaatcgttaatgatgaagttattgatggtgtaaataattagtttagatgtatttagtaattttggtataaaattatagttgttaatttgtttagtattttttgttgggtcgagatacaaaatgatcttaaatttaaagattaagttagtaaatgtcattttttttaaaaaaaaaaattaagaaaatgatcaaatataataaattagctaataaagattataaaaatatttttactacatattattttttttaaggaaatatacaataattaaattaagctatataatatttttattgcatattattatattgttacaaaaatgaataaatatattcgatcattaaat

SEQ ID NO: 22511 - DNA, 3109 bp, Cannabis sativa
agagaagccccactgagtaagagtgtcttttagagtttgattccaggccctaggagcttgcttgagaccataaagggctttgtgtagaagacacacatgattaggtttggtggagtcaatgaatccttctggttgcaccatatacactctttcctgtaatgtcccattgagaaaagcgttacttatatccaattgtttaactgtccaggccaaagatacagcaagagtgagtataattcggatggttgctggtttaaccacaggagaaaatgtttcttcatagtctatgccaggagtttggagatatcctttagccaccaatctagatttgagacgatctagactaccatcggcattcaatttaactttgtgaagccacttattgccaataacagtcatgccaggggagtatgggacaagagaccatgttccagccttctttagagcagcaaactcagtttgcatagtcttgaaccactgaggattttttatggcagcagtggttgatttaggttcagatggtatacatgcttcagggagaggaaatttagttgcagagaaggcttttggtttggttattccattttggctacgagtgaccatgtgatgtgttcgaggagggtggactgtttggtgagtatctgaagagagaggctgctgagtgtgagtgatgacaggtggtaaattttgactcatgatagtggctacgggtgctgggatatttgtgtttgtgggattggtgggagaggtaggaatgggattttcagtgacatgtgttggataagtggcaatagtggcatttgcatgactgggaacaggtgtgccattctcatgtactccagtagataatgcaggtggaccatttgtagagttgggcatcataaaaggagtgttagtgggattattattattaatggaagtatcaaatgtaaatgagggagtagaagtgtgatgatgtacctgtatgggatcaacagtggctgagttcccatgaaattgtgtttcattgaatgaaacatgcctggaaattatgatgcggccatcaggatgctcacacaggtaccctttgtgatgtgaggagtagccaagaaataggcagggtacagatcgaacttccattttgtgagcattgtatggtcgaagatgtggaaaacaagtgcagccaaatggtttcaagatgttgaaatctggcaatttcttgaatagacattcatagggacttatgttgccaataaccggagttggtatccgattgatagtgaacacagcagatgacatagcatgccaccaatactccatagataaacctgcctgagccaacaaagtgaggcctgtttcagtaatatgcctgtgctttctctcagcacggccattctgttcactagttctggggcaggggtgttggaaatgaattccctgatcagctaggaatctagcaaagggacgatactcacctccccaatccgcttgcacacttttgataggtaagtcaaattgcttctctacaaggctcttaaacttgataaacacatcaaaggcttggtttttggttgtgaggggaaagatccaacaatacctactaaagtcatctaggaaatggacatagtatttaaatccatcctttgaggtaatgtgagacggaccccagagatccgtgtgaataagggcaaggggttgggatgctctgttagatgagtgtgggaatggaagcttatggctcttgccttggtggcaagcattgcaaaattgcaatgtttgtaatgaccctgtataattgatgtgtggtaaaatcttggtgagggtatttaatgcagggtgaccaagtttatggtgccaaatgttgatgtcattctgtttagtaatggtaaatacatgattcgaagatgtagggaaatcagtagttttattgatatcatcaatattacatgacattacattgttatttgaatgacaagtacaggtacaacaattggaatttgtaggatcattggacagagtagtgagatgacattgaagagcggtattggaggcttcaccaagctggtacagaccatccttagttttccctttgagtagcacagtccctgtttgtttgtccttaacaaaacaacacgatttgtgaaactcaagaaagacatcattatcagaagttaattgggagacacttatgagattcttggtcatagatggaacattaagaacagattttaagtgcaggggtttagtaggtaaagaagaaggaaaggaggtatggccaatatgagtaataagaagcttcttaccattacctacagcaatagtttcatttccattgtagttggtggtcacggccaagtttgatgtatccattgaaacgtggttagtagcacccgtatcaatgtaccaagattcatcatcacccaattcaggaaacatagttgttgtggcagcctgaggatcatagtgaatgtcagtttcaacaagaaaagcctgagtttgagaattaccgtatttgggagtgacccaattcttgtcgaaccgatagtggcagacggcagcagtatggccagtgcgaagacagacttggcaaagtaatcttgcaccaggtggacgaccatagcttctgtttctgttggtttcaggttgattgccacgattggagccaaagggaggtctgtaggggccatttcttgcagcaagattggcttgcatttttacagagagatcattcatagaatgatgatgatcaattcgagtttcatgagaaagcaggagtgcttgtacttcttcgaaggaaagtaaatcgcttcttgaagttataccagacacgacaggatcgtattcaggcccaaggccattaagaagctgcaggatcaaatcttgttgtgaaacaggggagccagcaatcattaaagcatcagcaatcgactgagctttgtcaacatattcagaaatggtgaggttgttcttgagcagatgagagaactggcctttgagttgtaacaggcgagcttttgtttgactagagaatcgctgttcgagggcacgccagactgtgaaggatgtgtggaagttagccacagatgcaagaaccggttcagacatggacgctcgtaaccatgagagaagg

SEQ ID NO: 22512 - DNA, 3402 bp, Cannabis sativa
aacaaaatataccttggaaattttttctactcgtttgatgtgtagatgttgaccatgtaagaagttatacaaatttaatgtaaccatttatataaagtgagaaacaactactattaataaaatatgtgtattaccaacttcaaatatgccaaaaataaataaatgctctttccctctcctattatttacttctaacacaacttcattaccaccatttccaacacctataaacataaattaatttatcaaaaagatacaaataagatgatgttaatattataatggaaaaatttagattcatatcatacctataacatttttattgattattattcctcgatttataatttcataattccttttatgcttggtgtttcgtaaaatagcactattttcatgaatagttattgtacccacagttgaagaagatttatcattctcgaatttttttttttagatatacatgctttttctgcagaactcattttcccaggacctttatctacatttgtttccttttccttttttctcaaagcataattttctctcctacgcttgttaactgctgctctcttataatcctcatgttgttcgccattcttaatttgactattcatctcaaccaatttttcagaagcattaattttgtggtattcatattattagattgttttcataatgcataaagctctcttcgtcttttattaattgcatgttttctattggcttcgagtaaatcttgttttcgtttcattttgtaaatgaaagaaccacttactatctgtacagtaagaaattgatcttgatcctcatttagtagcattaaagtttgtatacatcctgctataaaattgaaatcagtcaacacttggaatcctttcgtgatctatataacttaatttagtttgattaacataaacagacaaagtataaaagtacaaagttaataatatgtccgaataataagacttctttttttgtcgtataaaaatatagactgaagatagattattatctactgcatacccttatttctttttatttttctcattcatttgatctaaatcttactaaataatgtctaaatttgagtttataactaccaaatagtacatatctaattacaatccttctcttaagataatgtaacggttatattaattataagatatgaatggtgttatcaaaattatttataaagaaagttgtggttggttagctatatataataataaattttataaatgggtttattatatttttagtaatatgtttgttataattatttcctacaagtatattaatgtaaagttccatcacaaaagatacgatcagcctaatcaattagttcggccgaagtgatgagatcagccgaatcaattactttgctataactctaatctgtaccatattaatttgtaaaatcctaatgagtacttgaaccgcctatctttttcttccttctcacagctccaccactacgatggtttcttctcttttaccgtaattcataactttttcttcttctgaccatcactcacagacgaagacggttctaaacccacaaaaccgaagcctctcaaacccatgaactcaataataatcttattggcatattatttggtcatttcggtatactaattttattctgtccatatattcaaattaatgtgttatatatttggttgtactaactctattctatctatgatacaaaatggtcacagaacaattccataacgcataaagggtaaacagagtaatagcaaaatcagagcaaaacaaacagaagcaaaactgaaacaaacagaaacccaataaacaaatacctgatggattttaaacaaatggtggagaagaagagccctccatggtcgtcatcacaatcaccaacaccattagccttgataaggtagaaaatagtggtttggtttggtggaggaataaccaagaaaaaaactcccaaagtcaaaggtaaaaaatagtggtttagtggaggaaatgcatagtcagtatttgtgcctcgtcctcagcataggcagcaaatattgttatggtggctgactttgcaactgctgcagttaggatttattagtttttttggaaaaaataaaacttaagtaatgtgaattattggtattggtaaacagagaagagccttgccttgattaggttgttcttgatcttttcttgagttgttcatacaaagaacctagtagtaattagaagtagcatcaaaaattaaaatagaatgaaactatgaagactttctccaagagtttgaacttttcaggagagaaaatttttgctccataaataatacttataccaaactaactttcttcataattaaatataaaataaactgatgaaaaaaaaaaagatgattattttgaaatataattaacaaaacgtacaatacttgacaaaatttgcaaatcttgaaagtactgactattgactaatgaagtgcagcttcaaagtacgaataaataggagttaaatgaaagaatggtaattttagttgctcctcctttagttgatgtattgcagcaacaaatatttataatttccatacaacaatatgaataacatagggcataataaagagctgctcagttttctttgggattgaacccttaaattctaaatggaaacaaaattaaacagactaagatccattacaactctcaaatctataattttataaaaattagaccattttcatcaaaaccctcaaaatctaattggaaccgaaatatatagaaacaaaataaagaaaaaatacctagagttttgagtttttttacaacgatggctttagatgcgccagtaacttgattaggccttcccagttcaaagcttaaactcaatctctctctgcttcagaaatgaacagttgagaaagaagctaatgaaagaggcatttgggattaagttaatgagatggaaaatgaaagaaactaatgaaagaggcatttgggctgactcaattttttttgaaagaataaaggaaaagagtcatagccctatctacatttcattctttacaatattcacgaatcaaatggttgtaagactcacctgaaagttcttctccggttctaggacgaagacagttgtgaggaagaaagaggagaaaagaacagctagtaggaagacgtgtctcttagttttaaattaagataaataaaagtgtagaaaaagacaaaataaaaggactaaacaacaagacgtgtctcttagttttaaaattaaggtaaataaaaatgaaaagtgtagaaaaagataaaataaaaggactaaacaacacgacaaaatagatggacgaaaattgaaaatgctccttcatctttatataaatggtatagatatattgtaaagatcattgctattaggcac

SEQ ID NO: 22513 - DNA, 4875 bp, Cannabis sativa
aatataatataatacaatacgacgttccaaacgagcccttaaatcataaatctatacaacctttgctaaattaaaaaagaagaaaatgaaaacactatttcttaggtattttctctgatggggaatgagacaatacagaaaccctagtgtttcttagggaccactacctatttatagactcatcttagaatgatttttgggtatttataatttgagtcctcaataaattataaattaacttatggtatttacacattattttcataataataatttaatactcttttgatacccataacataattggtcacttaattttgtatcatactttataatagcatatatattatacatatgtgcccacaataggattttaattccaacgaaaattaccaagtatgcttcaacatgggtaagaaaacatagacgtcaaatctactcaagtggatctctaattcaattattccataccacaacaggacggggttgtgagcgagttgagtgacctagatgcacaatattttgcactacaaccatctcttttttataggttctatggaccgatgcctgctgcttcatttggcaacaaagaatcatagataagctagtcattagaaggaagaaccaacatgaaaagattcctttgtctgaagtcaagatcggtcaagagcaaaaagcaagcgtgagctatggtttcagaagaagaaggaagagctcccaagttgatttcgactgcaatttaagaaagcacaacaattgaaatgggtagttcgtattggtatcatatctattcacatgttctgatggcaaacactcgagcaagtacgagttttgcttctagcttttgttcctccctctttatctaagggtaatattttctaaaatgtccaaccatgccacactggaaacatgttttccggttacactctccaggatagtgtttcttacaacgagggcactcagaataagaataaccctgacatcaacctctaccttagttctcttagaacctcttattttttttcccaaaccatcatatgtcgaaaagtcttcctcttttgatcaacagtggaaacaccaccatccttaccatatcagtaggaagagtggtggtcccaccaatatttggagtctctcaaactcctgaagaaatttcacggcaccctcggctcgaaaagccttcacaaccattttacataagtcattgtatcacttgtagtaattacacgatcatgttttatctttgcatttaaccagccaggcatctctctttcttactgaagtctgtgggtactatacccgaagccaacttggctaaacagtcaaactttgttgtgtaatctattgttgacatattttctccctgaaccaattcagtgaactctttccgcttagcactacggactgccttatcgtaattttagcgttgaacaaatcctgaaactcttctcaggttattgtagtgatgtcttgggtgagggatactaacttccaccacatgagtgcgtcttcctagaactgaaaggtggcgcaagtcactcagtcatttttgacaacgcccatgtaattcaagattctttcttttacagtgaacccttcgaccttcatggcatccgaacctcccaaaaaactggaggcacctgcttacggagattccaaatccttgggtgctcctgaccaagtgctggtaatcccactcacaattttcgagattcataaaatagggttaatccctaaatccactctcacataattataaaattggcatttaaatttagacaaacatatagagctcggaacgagctttccaacaatatacggagcacccaaatcgcagtccggatcaaaaagttatgctcgaaacaagattcgacatcaatttgcccagaaaccacaaggcgggccgcgacgcccaatgagtggggccgtggtgcctaggttccaaacccagaaatctccattccaatttcaaatttttagcccaacatgcacaaggatcccaaccaaaacttgcatacacttcaaattcatactccatggattataattatcatagcagggcattagaacacataaattaagcttttaatcctcaacaaactatgcatccaaaaatcagattataacaacaatcaagataagctcaaaacttgagctgcatcatcaaaattctccattcaagagcttgaacaccaaaactaaaactcatgcttgtaaacaaccaaaatagaaccaatattcagatttttaatacaatcacaactttaaaaactcactaaagtagtctagactctagatgcataacccatagttttacaagttcaaacagaatcatcaatttcacttcaatccactacaacatacattcaatcaccttgaacatcaagagcacaagaaattatcacaataatttgcatttaaacttagaaattcagaggttaaggcaattacctcaagcttttccaacaaacttgcaccaacaatcacaaatccaaactttattcaagatgactttttaagaattaacaatttggaagagatgagaaatagagagggtgagggaatcgattttagggctggacaaaaccaaaaaaatgcatgcaattttctaccaaaattctttttgttgataatcaaataagtcacaacctactcctatgtgctcgaccacaaaattgtctcaacacactggtactccaatgaagaatcctacaatgtatcgaaatgtgtcaggagcacttcaatatctcaccatgaccaaacccgatattgcttttgccgtaaattgattaagctaattctagtagacccctacgtcagatcattggagtgcgtgtaaaataattctgaggtatctctcaggcactcttgatggaggattgcaattcaaaccagccacaacacttgatttacaagagtttattgatgcagactgggctggctgctatgatgatcgaaagtctacattagggtattacatttactttggtgaaaacttggtgagttggtgctctaagaaacaaatagtagtggctagaagcagtttgaatttgagtatcgtgctcttgctctagccacaactgaactagtatggatctaatccctgctcaaagaaattggtttccaaagtcagcattgtcccatactctggtgtgataacttaagagttggatctctagcctccaatcctgtatttcatgctcgtactaaacatattgaagtggatcttcattttgtaagagacaaagttctagctcaagaattggatgtacggtatgtggacaccacacaccagcttgctgatattttcacaaaaaccactggctgaaactccttttcatcactttaagaacaagttaacacatggtcttgacatgtgcaacttgaggggggatgttattggaatacaagaagagcacaccagttggttaattttagtttgtttttgctcagctagtttgtaacaactttctattgtatttgttagtctttctcttcttgtaattcaacaatataaataaaacttagtgccaatctaatttagattgagtgattctctctctgtctctctccattgtttttagttttcacaatactaaaaaaaacttacatctaatttaaagatattaaaaatatgtaaattattgtacacatcaaaaacatttgtgggtgaaagtaatattacaataaaatgttttttgcgattaaaaactatccaaaaaaaattattagtaaaaacagtcatttttttaacccataataaataaaagaaaaatgctaaaggacactcatattatctaagacccttgtgagatgtaatatcgatgttggtgtaagagtttcacttattttactttaataaagattatagaaaaccgctaactaatactaattataagtcatcacctcataatattactagacatattgatgtccaattacaatgctctcaataaaactattactatctagcattattcagctaacttaattttataatatatatactagtaagtagtgatattactttatcaagtactagctagcttcttcattacctttgtgaaattgaataaaagggtcccccatgcaagtatctagtctgaaattttactatatgcttttttccttttctcttttggaacaatacaaggaacttagcagaaatgaaagatttgattttatatatttgagagataatgagattgaaaatagagagcaaaaagacatggatgggttggttataattcaaaggcaacatgataaaaagggttgtagctgtgatacttggtgtgttatctaataaaaagggtatacattcatgcatgaatatggctttgtatatgttatctttccatgtatcttataagttgaatatgacatgattttatttttatttttggctttttgctatagagacataaagagttgtttcttgatgggtcttttttggtcaaataaaatatttctcatcttggtcaagaattaatatgtctaacatattatttgtaccttctaaatgaaacattgatcatttgggtgtatgggaaggagtaagggttaggtgaaggatgatttacaaagtgatgacttggttcaatgcatatatatgatttagggaaattctaaaaaaagggtgtactttgtgttttccgttttaattttaattttattttatatgacagtgtatatcgtagttatttatgatattctgtaaaaaaatttaaaaaaattaaaataatttaacatgtcaaaaacaaagtataaaaaatgtatgttgcatatgtgcttttttttattttatacgagtatgaaatatacagtttgaaccttactttctatattgtacactattttgaatttcttaaaaaaaaa

SEQ ID NO: 22514 - DNA, 2841 bp, Cannabis sativa
  modified_base (27)..(40): a, c, t, g, unknown or other
aggatgttaatgaaacatacatggtannnnnnnnnnnnnntggtaaaatatttccaacagagaggctgcacaaattgccttcctacccttgtgtccttgtgaataaaaagagttcaagtctctaatattgaaatccaagatctctgagtagcccttgggctcatgcaaggtcataataacgctttgaaccatgattaggaggatctccgttcaactataaaccttgcattcgacgagcctcatgccatctggaaggttgaacgcaagcctctgaaaccccttgagttctgaaggcttcaagggtaaatgttatccatgtttccggattgaggacacgtgtaattctaagatagttttagcctatctgttccaggcccaatcacgggcctcatcaagataatggaatggatccattagtaaagtcaagccttctggttgttgaataaatgaatcatccaagcgaggtagacctacagaactgtgtgcatttaaatagccccatgaaaagattttggaggagtagttaatatacatcttgatattcagctatgtattgcattcaataattattaaatcccacaatatcaggacttaattctcaagatcttgtcagagaatcatatcttctaaagatagaaataacaaagtaattaccaatcaagcatttatgtgtctttattattcacaaaagtagaacatggtttgataactatcaacattatatgacatccatatcagcagaagatcaatacctcatgggttgggtttcaccaaataagctcaaagttaatttattatatgtatttaccctattattggacaaggtttacatattagaaccctaccactataaatataaggaaactcattcatgcaaagggttagaatctcattcttggagtactctagcaaattatagggttcaaacacttggcaaaacacttatgtaaatccaaaagacttttccagtcttattataataatattgacttgccgactagaggtcgttaatctttgaaccacataaaaaatcttacctcattctttatttatattatatttctttagacttattgtagtttattggtttccaaaaatctcagtcagcatatggttattcataattatagtgttgtcaccatagtaaaaaataattattattatatgtttcaaactatttcagtctcatgatttatcggtacactagatttacactgatatgattatcagtacagttggctaagtagaatgtcttttctaaggcattagcaaagtaaacaaggatcaaatgtatgggttttacatcagtctgaactaaaatagaaaagatatcatgaacttactgtcatgtcttttccattcaatatccctaattgatcatagatcaatttatcttaattctaagatgattaaaatttaagctaattgtattattaacgttatttgatttcttcgttaccgacatacccgtcaaataaggtcatacttatatattggaaattcagtagttcagttgagtaagagcattaattatatatatggacatttataacttctaagattatttagaagtaaaacaatgattttctttaagctatgcttaatgagataaaatggtgaaacactcatttcagtaattatactagtttacttaaatatcatttacaagtagctaattttttaaaggataaaatacattaaatgataaaatattaattttgtcatgattcaatgtcgatcatccatagaggatcaacgattatttagattgtagcaatggataattcattgtgtatttatattggagatatagagcgttctatgtaattaattaagagtataattttgagtctatagtgaagtaataagaaattaatcaacttattaaaaagcttgattatataggcacatatactccttataattgatgcttgagatattatatcatcttgaagaactcaagtaattgatttggataatcagttaaaattcataaactcaccatgtcatgttttaaaagtttatactaaagttatatttgattgagaataaaagaaagttaaacttttatttgttaattatgacactttggtttacttactaaaagttttcttcatatttttgtaaacagcactgtttatctatcttgttgattcaactatgtgagtgatgtataatcatgtagtaaattattgtctaatttacttattattttttttgttaagaaaggattttattgaaagaaaaggcaaaaacaactacaacagacttgcggcaactgcaggagctaagtcctttagcagcccttcagagcaggccatggcacatctcgcccaacccgctacagcatcagccacacggttctcagaccgagggcaatgcacaaacacaacaagatcaaaacacttacaaatacatcgacaagattcaaaaacagggtaagtgccccaagcataaggcaaacaaccatttttcaaggccatgatcgccaccttagagtccgactggactttgatctttttagcacccaaattgcaggccatttgaagagccaagagaattgccagcagctccccttcgagaaccccagaaaccgtatggaagcgtgaagcgacccatgaatccccaacatcagccacattcatcttgacagctgcaacaccagcaaccccattcaagatagatgcatccgagaagaaacactgcaaattgtcattattctgaacaaccaactcgacattaatatcctcagaccgatccataagtctcagaggcaccaggcgcatctccatctccttaactctgagattaatatccgaaatcaatttcgccaaagagaag

SEQ ID NO: 22515 - DNA, 1570 bp, Cannabis sativa
tcctttgctcccaactcatgtgctgcgcagccaagtgaggcggtctactggcgaaaacaagatcatgggtcttgagaaaaagctcggcagccttagaggaggacacaacaatagtgggaataagaccgagctgcatatgcataattgggccatatttttgggacaacctctccaaatcgcgatgagggttcttgcctaataggttcaagcttccaaatagaggatacccttttggaccaggagggagattcttctttttctccttggttttttttcttagaacataaccaactagaaagaatactaaagctagtactttccatagccaaagagccattttttgggagggtgggggtgttaacagttgttggaattgatatttattcaaatctagagatgctgagatttttttcaaaacatttgaatattaaatatgttatattattgtcactacaacaaaaagtacaataaaggtcttacaatacgacaatatatgataataaagctactgctttccatagccaaagagccattttttgggggaattgatagttattcaaatgcagagatgctgagatatttttcaaaacttgagtcatttccattgttttgatgtattgtaagaccttttatgtctttttgttgtagtgacaataattgaacatttaatattccaatgaggacaataataaaacattttagagcccttttttccttgaaattatcaatatcttctttttgaattgataccataaagtaaattaatggaaaaatataaagtagactaggggaggagatgccttcatgtttttgcaataaacaaaattaataattacaaaaggagaaaagagaaagaaagaattgacaaaatgtgcaccacaaatttgtacaatatgctatatatgtgcaccacaaaatttgcaccaaatagtatgacaaaattttcagaaatgaatgagtagtactttaaattcttttgccaaaggaatgataaaagaatcattttgtttttatatagatagtataatagagctatgatgcttattcatataatcttgtaatagtgatgacaatattaagttattaaagctttaatggtgattacattatgattattgttacatcaaaccaaacatgacattattcttaagttttcctaagatagaaaaccaatgatcttcattttatttctaagtgtgatgaaaaagctcataacttctattatttcttaaggcgataactaggaatagccacaagatgtttagtcctagcagtagtgataccaaacacttcactcatatccaactccgaagctaccatattatcaggtagttcccaatcaaagcaatgaacaagctgagccaccatcaacctcaccacaattagaccaagttgcattcccgggcaccctcttcttccagacccaaatggaaggaacccaaagtctctacctttgaaatctatgtcacttcccaaaaacctttctgggaaaaacttttctggctcattccaatactcggtgtctctcccaattgtccatgtgtttatgatcacacgcgagttttggggt

SEQ ID NO: 22516 - DNA, 3731 bp, Cannabis sativa
  modified_base (1259)..(1262): a, c, t, g, unknown or other
  modified_base (3661)..(3665): a, c, t, g, unknown or other
  modified_base (3695)..(3705): a, c, t, g, unknown or other
gtaatgaaatatgagaaaaaagagccaaaattgaatagcaataaaagaaccaatggatattttggtcggtttcggtttaataggtcggtttactatccaaaaaaaaaaccgaccgaccattggtggtttttttgattttcgattccactagtttcggttccaacagtgttcggtaggtcggtttgaaggattttttcggttttctagattttatgctcacccctagtcgcacctgataaccaccatattgttgggactcagaatcaattcacttcttgtatagattctaggtctttcacctacaggtgagtgcacaccttatctacctatgatgacagagacgctaggttgtgaaacaacaatatgcataaatcttgatcaatatggctctcatcagtataattaaaattaggaaaataataagaataacaaaagaacatatatcctttttattttctacaaaatctaccagcataacggttatattttgaataaatccaaaatcataacctgcataaatatttgcacaaaaatataattgggcactctgtgtctcaaagcagtccagaaaaatatgtaaattaagttttcaattttttaaaaaatttacaaatcataaaaattagaatatgtttaatgttattcaacacatataaaatcaagtccaataatcaagttgagtccctacctctcccaagttgttaaactttttccaaatagaggatcctaagctctcaagtcccgagctttaattgtttaatctaattttagatatcactttcacatataccatcaaatggctaaataattatgatcattgcattctacattcaaaactgagtccaacgacatataacctgaccatattaaatgtttagagtttcgaaacttaactaagcggcgcacattaactatcagtggcggtagaaatcaatgtattggaaacgttattaaaaataagagtagtatatatcaaaacgaccacctcgacgagtagatcaaactcatagcaattatttgtcgaaactgtacatgatatcaccaaaaagtttccaaaaaggggcagagctacaaaaatatcaccaaaaaaggtatcaagttgggaaaaatgaattagtacagattgttctccttgatgagctgattctagtgttgaagaccaaggccgaacctaggtataagcgggctaggcccgcgcctagggcccaaataaaaaaatatcttttaaaaaatatacatatattttttttttaataatnnnnaaaaatactatttatttttatagtaagggccctaattttttttttttgtctatggcccatttcagctcaaggccgaccttgttgaagaccggtcgtcaaacggacatcggagttgatcaaaaacgtattcaaagtttgaacctcaaaactttgactcgagatctctcgctaacggtttcaaatgaggaggcactgcttgagggttaggatcaccagcgggtggggagttcaatgctctggtgtgtgggtcaggaggtgatcggagtatggtcgtcgacggtggtggttttttaagtgtttgaagagagagaaagagaaagagaagtgggaatgagatagacagagagagagagatggtgtcaggtgggtaagggagaaaaagaaatttaataaataattaagaaaattgttggtcccacatccttaattattattttttttttattctttttctcgattttgaccgagtcctcacattcttcctcattaaagaaattttgtcctgaaatttcaaagtacaacctcaagttaaaaattaaacaagtgtgaggttacttcatatacatctcagactctaacttccaagtgaccttatcttttctgtggttctaccataagaccttaactactaggatctccctgttccttaatgcttttatctcactaaaaagaataacctcttttgcgagcgcatttaatgaaatgtgcctacaaaagttgattttttttggaaaagttaagacactttgccagtaaaaggtgataaatttattcgaccaggttcaacttatgatggcgagttacctcgtcagtaaaagtagcttttatcgatgaattatacttatttcgccggcaaatgttggtcaaccaactgacaaaaggtgagaatttttggcgatttagtttcacttttaccgacgaagtagaatgcacaagcaaaagtaaattaatattaggaagtttaaactcacttttgccagtgcgtaaatgcaccagtaaaaatgttgaaaattttggcgattcttttcccgctcagtgaaaacgtgcacgaaaaagtaggtgaaaattttggttaaaacttttgtcggcgcactatattgcgccggcaaaaggttccacaattaatgaaatgatacgtttcatttagagtttattttaaatacttttaccggtgcacgtaaatgtgccggtaaaagtttttggtcagattttatttttgtcggcgatgcatataaatgtgctaacaaaaattaatgctgaatataatcgcacccgaaacccccaccccccatttttctctttccctttcttcttctcttcttctatcttctttatgcaaatcaccaccccacccaccactttaaatcaccactacccaccaccattttctccaccctcactaccataatcaccaccgcctccaccaccatttcatctctttttttttttttttttgaaaaattataaaaaaaattgagccaccacaccaccttcgacgaagaatcaccatcgcacatctggcgacctctgcccgagcctccgattttagtgtcgcatttctcactttcagtcaaggtaatctctaatatttatttaaatttttatttgtgtatataaatttgggtattattttatttattcagattcgggttaaattttgtgtatagtgatttaagtttacttttgtgtgtagttaaaatttatatgtatatttatttgtgtatatttgaatgtgtgtgtattattgatcatatatatgtggttgtatatatatatatgtatttaaaatatatatgtttatgtatgtatatatatgtgtatgtgtatatgtatgtatatgtgtacgtatatgtatatatgtgtatatatgtatggaacacttctcaatgagtattattcattgatgaaaattaaacaaatttaactataaaaatttattttttaaaaaattatttttattctatttaacacaattttaagtcatgaaacatcagctgtattttttttaaaaaaaaatgataaataattaaaaaattcaactcaacttaaaatacattatatacttttttagtaatgtaaaattttaattaagaataaccatgaatcgaagtactgtttttatagtaattattattatatatatttttgactaaaaatcaaaagctttattaattaagaatttcgttcaaaacaacagaacgtacttcagcggaacaatcctccaactaaagcacacaacatgtagagaaacaaaagtctcttgtcaagcaatgagccaacttgtttgcagatcgtttaataaaatacaactcaatatatgtggaaactaaaagtaaattacggacatcttgaacaaataaaccaaattgaaaaatcatagaaaaattactttggatagnnnnnacacagaccaagctatctgtttccaaaatnnnnnnnnnnnatggatgatatgcaatccaacttaaa

SEQ ID NO: 22517 - DNA, 3195 bp, Cannabis sativa
aaaaataacttcctgtttgtggagagaaaagatgagagctcatcttgggaatctcagattggatgaagctctatcaaaggaagctgctaaaccagtaaacatggaacaaaaagattttgacagtacactcaagaaggccaagaacaccatcattctttgtcttgaagatgtggtgttgagaaatgtggtaaaggagactgttatcccaaagtttgcacaactgacgggcctttccatgtagcatgactcagccatctctttgacctggcaaagaacctccgggcaaaaatatgcctgacaagtccatataaggacggatagccataagttggccaatatgtctcatgcagcttttgaccggatgctcaacctcccggctagataaaatgggagcaacaccttgtaagggtgattgtacaagccaagttcataaagaagataagtgtcaagggatctaactggatgaccaacatgccggccaaatctagcactgccatgagtgccggacagagatacacgatccttgattttatcttcatcaagcttcttcaaatatctacaactgaatcatacaaactcagatccaaaaaatctatccaagaataaagaagatttatcagaccgtaactacatcctaaacaatagggatattgattattctgtttactccttttacaaagccatatgtaacaactctcccctataaatagtgaaggcattcacaatgggagaggaccaaaaaactgagagctatactcgtacttatgcatctaagatcactttgctgaaagatttatctgtaaacattttaagagtcgaagctagatatcactttgttttccttagtgatctgcacgatattatctcacaagtaatacaactaaaggggaagtaggtcattacccacatacaagggggctgaacctctataaattatatgtgttatttatttatttattattctaacctccttaccagtgattaactagtgtttattagaccgagttagttggttattttcccagtcaacatttttggtgctttcattgagagcttcaactttcttgtaaagatctcatcacttggtaatcacaatggttctgacaaggaggagcagatccacagagcctcaagatccaatggttgtggaccctaatgtctaggttccaccaactggtgacaacctgaccaactctgcttgaccacctcaggcagccccaactgcagtgactaggctcgaaggctcagtcaataccggtcagggtcacacaggtatcgagcaactcccagtcaatgctggatatcctacctagagtaccacagggaaacctttaacaaggcctaccctaggtatacactgaagaaactggaccaaggattggccaacttggcataagcgagcccttggttgacttgggggatgactctgaacttgccaggttgagagaggccgtaggaaaagttcagggtcacacaaacttcctccatcatgaacaagaagaaacacgcgctgctgtgagcgatgcttttccctagtagagacgcgaattccatgaatggatggatcagtaggccacaatcctccaagcccatcaggcggagctgaactaccgaaatagggaggcaaattagctgatcagatggtttaacgaaagggttgggtctagagtggaagagccaccacttgtaagggatcccctttggggaaaatgtccctatgtcccagagggactcatatgatatatctctcaaattgctaactcgcatctcctagtcggtgcatgtgagccacttgcttgatggaagctggtcgattatcaatgcatactctgtttagaggtcacaactcctatatgtgagtttgagaatcaactcttcttgtacggattattgagagtaggattcccgtccaggttatgaaatatgttccacatgtcacctagatcgatgccacgtcattgtgcaaaaatttagataacacttatcatattaattaattggactataacaataattatttatgattaggctaaatcatgaccaaaaagctttcatttgtcattctgccaaaatcttttgcgtccttctttgttattaattttgtgtcaaatctgttaggaagcgcacaaacaattttttgaaccaatagatattcatctaatttttcttccaaaacaaaaaactattagcaatatcaaattttctttcataaaaatcagacaaagtttcaatttatgacatgctatttatcaaatctagtttgcaacatgttaaaacatgatctttttacatcaacggtaccttcaaattgagtttgaggatttcttacgcttcctttatagattcataagatgatattcatttgataaatcattcaccaataccattaaaaatattaaattaacatgcaaagctttattattatagccagatattttttcatctttagtagtcccattcagttcaagttttaccttagcattacctacatcattattttcagtaggttgagaccaacctgtaaatacagcccaccaacttctcagcttgtgacttaatgaatgatgtcattctgaccttccaatatggataattcgagtcattcaacaggggtaatcgagtaatggagcttctttctgcaagcaacgacatctcacacaaaataaaataaatagaataaaataatctcaagatctcactaagagtttaatgacaagctctaatactaattgaaagttcgtattttaaaattaccaatttattatttaattaatttcttaattaaatgtgaaataataaatttagtgctgaaacagtttttctttagctacagaaaataattctgtaactctagaataaaccataaaacaaacagtgcaaaaacgtaaaaatacacaaggtttttgtacgtggtttcaacaatccttgtagattgttactagtcccaggaccacgtctaaagataagattcattagattgatctcaaaaatacaaagtaattgacttatgcataaatagactcattcttattgtatgtcgcaagcttgatgtattccatcttctaatcgaatattattgaaacttcaagtgctcgaactcctttcaatcttcttgaagagtgcttgcttcctctcaacgcaatacttgtaaagctatctcctgaaagcttgtagaactttctcctgaaggtagca

SEQ ID NO: 22518 - DNA, 1509 bp, Cannabis sativa
tattattattattattataaatttctctctctctttctcaatcaattattattattgtttttttttaaaaaaaaaaaaaatcacattccactactagttattttggttcaaaagtaatacatactattaacatttatttttcaaagtgattattttagaatgtgagaaatatataattttttactatcactagaaaaaataactaaactaggaaataccattttagtttttttttaatactttcttaagagataaataaccaaattttagaaaatgaaaattaaaaaaatattttttagtaaacaatattacttatgtatacagtatttttttagcaactttttacgttaaatataaatatattataatcaaataaaaacttacctagcaataatatatacataaatgtcacttttaagtttattattaaaattagtataataataattatttattattttaaaatataatttcttttataatgcttaagagtacatttataaattattttaaaaatgtattgaaaattgctttataatacaagcttaataacaatattctcaaataacttttttttttcgggaaaagatacttcttattataaattaaactggaatgtcatttagaataacagagtaaaaagatagaggtaaatcctctaaccaagagcaagtctcatccacccctatagcaaacttagctaaacagtgtgcaaccatgttggctgagcatttagcatggacaacattcacttgagggaaaaagaataaaagactagaaacatcaagtaatagatcatgataggaagtaattgcagtagatccattttgcaacgcgtttgctaccacaagtgcatcagtctgcactattgcaatcggcagttgcagttgaataatccaattaaggctatgaaacatagccttggcttccatttcatgagatgcaaaattaccgataattggtttcgcaagtgcagcaagaacatgacctgttgcatcacgaacaacagcccctactccaataatattccaattagcatcaagggcggcatctacattcaatttcaggtccgtaccagttggaggtttccatgttgcgttagcagctgctagtgcaggttgtgtagcattgttggttgctgcagtatgatacttcttccctttggctgtcctaaaattagataaataattgacaacaaaggaagcaattgttggtgctggttttgcagtagaaccatgaacaactcgatttctttccatccatattgaccaaagtgtgcaaataatttgttccatctcttgcttgttgtaaatagttgagagtgttgaccaaaagtcattcactcatttattttgatgataaacaaatatttgattattatttgttactaatcttttcttgaatatttcgcaagcaagttcacagagtatctatatttgctcggtaaagtcaaacataatcaaagaagtagattcaacaagtatataaactacttcatacttcataaga

SEQ ID NO: 22519 - DNA, 2808 bp, Cannabis sativa
agtcatcaaaacctccctcagctaaaaaacccacaagatgcttctttgttgtaaataatttacaacaaaaacaaaattctttatctaaaaaaaattaaatatatcaatcacgtcctatcttatttctctccatttggtaattctctaatataatgccacgaagaaaaattcctaccgaaagcgcatccctagtaaactcgtccttaatgactctttttggacctctttcaactataaagtttgtcatattaatatgacaaatcctattccaatttcctggatcatcaatatcaaaaggaaagttgaatacatcacttgaagttttctcattctcattcattgtttgatttagttcttcatttttattcacatcacttgaacttttctcattttctttaacagtttgactcagttcttctttttcttcacattacttgaaattttttcattctcattactttcaatatcaaaatgattctcaatgtcgttgactacgaaattgtctacattatttgtagttaaatacttattaagagaaccaaattaattttttttgtaatacttctttaatttctcttttcgtttttgagctcctaatttgtatttataatttataataggatcttataaaaattgcaaacaaaattactgatatcagtacaataatacattaatatcacttttttttttcaataatatagcaaaaccataaaaaaaatacaaaacatgagtcacataactttaaaaatcaaagggaaccaataaaaagcaattttttttcttttgcaaataaaacaaaatatgtatatagcaatgcaatgttgacatttttttcttatgtgaattgtgaatcaatggtgataaaagaaaaatatgtgtatgaacatacaaaaacatatcattatcatacattgtagccgttgtaggtatactgtatacacaataataagtaaataattttaatttcaataaatatagcaattgataaaagtaataaaatattaactttgaaagcttaccattatagtacaatgaaatagaaattggaaagattattttttttcttttaattttgtatatgatggctgatgagtgatgaggtttcaagagatagttgataaattgtaaattgtaatgatggttttttttggagagatatttagagtcttagagagaactttagagaaggaagggttagagaaggttaggtaggtgcctaggtgggagtgggattgaaatttgagagagaaaaggatgagagaggtggtatagactttttaggacagtttggattgtattgtattatattgaattatatatcatgtttttatataatattatattaaactttaatttatattaaaaaaaatatatatatatatttaagtgttcataaaaattaataccaattataattttacatgaaaatattaaataaaatataatttaatataactagtaaacaatccgcgcttcccggcggttgttaaagaaaattttaaattattatatatataaaataaattaataataattaagtaataataaaaaataattttaatttttttttataatattttaaaaggtagaataaaaaaaatgtttacaatcatgatgaagcaatctgttatttatttatatataaagtttttttataatattttaaaaggtaaagatatttttgtttgtaaatatagaaaaaataaagaaaataaaaaatggataaataataataagaaaaaaaaattaggtgtagagatttgagatatatattaaagtatacgtgtatatatattatatagttaatgattttttttttggaagaatagttataaattttaaaaaaaatgataaaagaaataaaaagaaaaaaaaattagagaaataagtttaatgagagaattaagaaaataagaaaaaaaaaatagtttggagcaatttaagagcccctatgccttctaacaattttaatgttaccgacacaacatctaataatatttatatataatataaagataatgaagatgttataatataaagataaacaattgaataaatttttgattatgaataaaagttaatgataaatacatgagagtattatcttatcagacataaattaaattaaattaaagtgaggggacgtaattttcttttataagacagggcaaaagtaaacttaagaaaaaaaaaatactcttggtgaatttgaacttgatctctatctcataggtaatatactttaaccattacaccaaatttaatattatgtctataaatatcatcttttactataaataaattccgtaactaactaaattgcatatacattttttttttatagggatgactgttaactatttcttcttctagccttttcactgaatttttaattaaaaataaaattttatatagttatttgaaagtattctgtactcgcttatggaatggaattttactctattggatggaatggaagatagatttaaaaaacaatgagaagctacaaaaggaattttgcaacacaactatggttaaataaggaataaaatattaattatttaaagagatatatattgaatattaaggcatgtgatattaattagttttatttttattttttgaaaaaaaaaaagctaatgttatttgatttgctatagggtagtgatatatatatatatatctactagaagaaacttattgcacgtatacttagttttatgttaggtgctttataatctaattgagaaatattcaataaataatcatataatttaaaatggtttaaaaactaattttaattagtgt

SEQ ID NO: 22520 - DNA, 2973 bp, Cannabis sativa
agctgttgcttgatttcgataattcctatttcttttttttatttttaagattattgttattgaatatcttgcaatttattaacttaacgatccttcttaaaaattattaaattaaactatttaaaattcaatacttaattagaaaaatattaataataatacataaaagaatactagacactactaatacagtaatactttttataatttctaatttaaatttactctaatttaatttgtgtcatctattacaatgtgatacttgtaagttgtaatactatatttattggattaattttttcttttctctaaaataaacacaatattcaaagtaaatactaattaatattaaaagtaaatagatattttatttagagatcttaattcaagctatattataatataaactttaacatgattgcgatttgctgctgttttaattttttatttttattgcgtttttaattgatatcaaaaatctagtgctcaatttttctaaagtacagatctcatatgtagttcaatctattaatattaatgctcataaattaactaaatatattttttttggtagacataaattacatatggtaaaagaatacttccccacctcagtcaactcttatgtaataattctgtttgttttatgtaacagttcactttctcacgaaagaaaagaaaaataaaagagataacttaatctaaaatgttattttttaaaactaataataataatagtttagaaaataaataataaaaacttatattattagaaaagaatattacgaaaaaatttataagaatttttttttacactttaaaatagttttttttttgtatttttacgaaattctatataaaaaattttatagcaagcaacttaaatcgcaaccaaaatttacataacaactaatataaaaactattggaaaaacaaccgaaataactcaaactataaatttaaaataaaaattaaaacatagtatataaaataattttctaagttataaaataaaaaatatttaaatatttggataataaaaataacatcaatatatttatcaattaaagttcactgaaaatttaccttttattcaaaaaaaaaaaaaagaaaaaagtatagcttgctttcagtttctactttctaaataaaatacctatttacttttaatattaatgagtatttactttaaatgtttaatgtggaaaagaggaaaagtcaatttcaataaatgaatatttattacaagtgtcagattgtaatagattacacaaaattagacagtagatttaaatccattattcctttctgaccggattagaaagaaatgttcaaaagctgagtcagcattgtcaagtaggggaagttaatcttactttcatggaaatggataaaccttaccttggtgcatgaccgggaaacttggagacccaagagaaaatagaaagagcattgatacgccaccttaaactactccctaccttatcccataacacataatatttttttttctttttttttttttaaacgaacacatgatattattatgtactcacattaactcacacatgataattaaatataattatcttatagagtattctacactataaatgggcaattatcaaatagaaaaatttattatttgagtattactatgacatactctaaaccactgaacaccttaattaaaacattaataaaatttacataaaccaaatttttttaaaaaaatattataaaaattcatcaacgaaacatgatcattgttttttactttctacattataaacatttttatttataaaaatacatttttatttataaaaatacatttttagtaaaaaataataattttttttataatttatttataattgtattatagttgttttgagattattttttcaattattttttaattgttttatagtttatatatagttgttgtcgtgtggttgatcttggttatttttgaattatttttttaatttttcctgaacaaaatgtatttttttaattttaaaattttataagaatatttatataaatataaaatttagactctaaaattataaataaaatataaaaatactgtttttgaaaatttctcttttattaacactatattataaattataatacaattttgtattaaaatttcacattttctaataaatttaagttaaataaatatatatacgtctttatgtttacttgtactaataatttttattattatattattattaacgttttttttttttttgatattagagaagtgagaattcaaacttggaaatttctatttatgaagaaaaatgtagtaaattataagagtaatgctagacagaataatgtataatgaatattagttatcactgtacgaaatgtgtgtaatttaagtagatgccaatcattttccgatatgtaattgatacagtatattaaatgctaaatgagtgcttattatttttttttatgtattattatgtttattagtctaattaaatattcaatcatatacaatttaatataataatttttaagaagtattattaactaagagaagtttaaagatgctagacacaagtagtttcttagctctataaaataagatgttagcattttctattattatttaaatgtatattattaaataaataaaaaagagagaggtgaagagaacaaaccatgtgagaacacgtggcaaaaacggagaggagaagagagggtgtgggggcaggatggggttgtaaacattggtagtgacgacgccgtttgatggtcacactaccactataaatacgtggcttgagatggggagtttattactataatcttcatattccaactccttccctcccccactcataatatacgtgttgctcttctcccttatttccactcctgccacctttgtcttcttctatttccataaccaaaaattttcaattcaaaatgtgtggaata

SEQ ID NO: 22521 - DNA, 5707 bp, Cannabis sativa
  modified_base (2229)..(2230): a, c, t, g, unknown or other
aattccatcaatgtactacgagccaaggaagatattcaacaaattagagttggcttacgagtctgtccatgtctgtcaatgcaactattgcttaattttcaatgataatgcatctaaggagtcttgtccagcttgtagaagtagtcgttgggttacttctgagaacagcacaaggaaaaaagttccttgcaaagtgatgcaaacctttccgttgacacctcgactcaaaagattatataaattgacaattacagcgaagagcatgatatggcatcatactggtaaatcaaaagatgatgggatgatgcgacacccggttaatggtgttgcttggaaagacttcgatgcaaagcatcctgagtttgcaagtgatccaagaaatgttcaattagggttagctgctgatgaatttaatgcatttgacaacatgagtcttgcatatagtatgtggccggtggtgttggctaattataacctcccaccttggtaatgtatgaaagacatttattttatgctaactgtccttattcctagtacaaaatcttcaggtaaagacatggatatatgtttaagaccattggtggacaagttaaaggagttgtggaataatagagtacccaccacagatagttcaaccaacatgatacttacaatgtgtgcagtgcttttgtagacaatgaatgattttctagcttaatagtagcttttctggatatagtggtcaaggttataaagcttttcccacttgtaatgaagacacaacttccattcaaggaatcaggaagacctcttatgttggtcatagaaggttcttgccaagtaatcatgaaatatgaagggacactcgatttgatgaaaatgttgaaagaagacctcctctaagatgatttaattgtgagtagatataagaacaagtcaatgctctcgaaccacaaattctaggatatcatcaagattttgggggcatgaaatgtagaaaagttgcggaagatggtaattggaggaaaaaaaaagtattttctacaatctggagtattggagcacaaacactttaaaagcacaacatagatgtcatgcatgttgagaagaatgtgtgtgtcaatcttcttgacaccatattatataataataaatctaagcaccaatgcaagacatgatttaaaaaagatgggtgtcaggcaatcgttgtggatttatgaagatgggaacggaaggttgttgaaactgcatgctctttatgttttgaatcgtgaaaaaagacaacaattttgtcaatttattaaaataatcaagtttctcgatggattttgttcaaatttaaacagaaaagtttttgcaaatgagtcaaatatgcttacgttaaagtctcatgattgtcgtgtcatcatgcgatgagttctttctgtcagtgtttgtaaatttctaccaaataataccgcaactactattactcaactatgtagtttcttcaaataattatgttcggaaactttaaatgtaaaagatatgaaatatgctcaaaaggatctaattttgatattgcgcaagatggaattgattttcctcctgcctttttttatataatgatacatttggttttacatttgcctgaagaagctatgccaggtggcttggtatttatgaggtggatgaaccttttgagaggtacctgaaaaggttaaataattatgtggaaaacaaggcacgtcctaaagggtccatcgccgaaggttatgtcgcagatgaggaagtaaccttttgttcaatgtactttaaaaggtgtgaaacaagatttaatcatctagatcaaaatgaagatgcacctggtgtctctcgcactcttactttttttcaattctcaatgttttcccttgaccaaaggaattataaactcttttgatcataacatttatgaaaaagccgagtggtacatacttcaaaattctccaaaaatacaagcttatttagagtaagtttgttacctctcaatgataaactgtcttacagattaagtttttcttttctctctttctctatcgtaccttcacattatcacatctaacagtaaatatttggagaagacctggcaagaatattctaatggtaaccacaatattttgcatagaaaaaaattttgttcatggtttcataagaaagtacaatgagagtattttaaacttttgtttcaacaatatataatcatgtcatattaatacattttatgtattnngatatatgagttgcacaagcttgactccttacaaaatggtgatgaattgatcgctttagcatccagctcaaattatttagcaaccttctacgaaggttgtatagtgaatggtgttcgatttattgtgacaaaaaaagatgaaaagtgaaacacacaaaatagaggagttagtgttgctggaactgaagggtttaattattacggcacacttgaaaatgtaataaccatatcttatattggtgcatatatagtgacattatttgcatgcaagtggtataacagtattccaataagaaagaaaacaatcactaaaaataatataaatagtataaatatacagggattttggtatcacgatgagtcgtacatacttcctaaccaagctaaaaaaagctttatatctccaagatccacttagaggtcgtgattggaatgttgttgaagatgataaccatcgaaaaaatttaggacaatgatgataatgaagatgagacaaatgttgatgttgtacatgatttgaactcatcaaattttgtgttgatgtttgatcttggggagttgattttgcaatcggatgaaccggatgtaattgttgaacataacaaccaaccaatggatgttgagagggaaaacaatgaatttgataaagattatattgctcaagaaatcgatgatttactagttcaacttgttcaggatgaaaataaaaacttggtgaatgatggaaatgatagtgattcctctttgcaactttaattttacttttgtttgtaataaaaatctaatgattgaataatattatgtttttaaattgtatttatgtttgtgtcgacttttatttatttactttgcacttcgtggatttttaaattttgtaaaaaaaaatcacatttttataatgttcctctccaaagtaagtacaatgtcaactgatatagtgacgcaccacagtagggaaggtggtggtatggacccccctgatccttttagagtatcgtcgtcctactaatcaggtttcatatttttcatctctaacattattcttactataaatacattattattttctaatgtactaatagaatgattttttcctcgaacaaataaagcccaaccaacagtcagaaaggattgtggccttgcttcaaatagtgaacttgaaaaacaaaggagggaaactggtaaactattagaggttttggtggacctcagtacatgcaaagtagttgggactgaagccagtgcttatgtttgatttatgggccaacaagtaaccaatttgtgtctaagtcatcattacaatttttttttaaagtaccccaacaatttaaagaccaagtgattaatcaaataagggtgagttatttttaattatctatggttttaattattttataaggtcgtttgagaattaatataaatccttatttgctttatcatgcggttttattttaatatagacagaaattttcatcgagacctactaatagggactctatatacggagatggcagagagatatagtgagcaaaagaccatcagacgtaagtggtttaagcaatattacactaaactggaagaatggaagaaagtccttgacttgtcccttgaccacttgaataaggagagttggaagcctatttatgaactcttcatcagcgaaatttttttgaaccgctaaaaaaacgggcaaataggcagctgataaaatatcgaacgacgcaaggcacaagatcgttggtttctatacgtcacaactttgtaagtaatcatatttatcctttatttttaaaatataatttatcttaaaatacattataaactcttttatttatttatttttgtatagggtaatccacctgaagagcatgtggtcgatgcatggagagtggctcatacgaaataacagtctggtggttttgtcaacgaagtcactgcagaagattttttaagtacataaaatattgtattgttaaattttaaatattatattaattatatgttatagtaatgtttatttaaataggatgaactgcgcaagaaacaacttgaaagaaaatcccagagcgagacagctggtactgaatttgatagtagttatcaattcgacgtacttgaaaaagttttgggcgaaagatttgactatcaaagagacgtgtgggttataggatctcaaaggcaaaggaaaaaaatcatacaatcaaagtcagtcaactgcgcctcctccacctcctaatgaaatgtttaagattgtggcatatatatttacaactatacgtgagacataagggagtagtctgatccttgaataacctgataatttatataacccatggtttgaaaactttattcaaatgtacggtcaaatcgcaatctcttggtggttcatcttctcagaattatgtcgctcctccacaacatcaacaccagccttcttcgcagcagcaacaccaatctggtccgtagtagggaaatcagttcttatatggaaccccttcgcaatctcctccactgatcagctcaaattttgttgattttgagatatttaggagttctttgcatgagcaacaatattttcctatcccgatacttaaccaagctcaattaggagaacttatacttggtttatcgtctaattaaccatatttttttctccgacacagtcgtcaggacctccaaataataataatgtgaatcaatactttttcatctaagatcttaatgatgattttatgaaataattagtttaagtttgttaataattcagacactataaatattatgtaaattttatttatttagtttaatttgaaatattttaataatattaatgaatattgttattgttaaattataatacttagagttggttacattatatttaatttttagttaatttattatttatatatttatataatttattaatttaatttaattttttattattaaaatcctattatcgatgggcactagtggtgggcacccgccgctattaatagttattagcggcagactcaaaaattgccgctaataactattattagtgtctaattattagtagtggactattaacggcggattctcaccgctaatagctaatagcgatagatttgaaggttattagccgtggatccctctgccgctattgatcaataatgttgtagtgggtggatgtaatttaattgagctttgtgccgagcattatcaaagtgtagaatggcaacataagaatgattagaaaatatttttgaaacaaataaaaaaaccttagttgttcaataacaatataacaattcatgattgtgctaggtaccactaatcctttaagcatttcttaatttttttttttttttgaaacaaatattgcaactttcattaaagaaaatcagctaacaaaatagcttccaaaccagaagggacagaccccctactggaaatacgatcaggacatgaaccagaagaacgagctaacca

SEQ ID NO: 22522 - DNA, 2458 bp, Cannabis sativa
atattttttttttatattaaagttcttaaaattaatttagattataatatttttaaatttgaaattaaatactatatttttgtttttttttaaaaaaaatctcattatttaaatattaaaaaactaacaataataattataaaaaaaaagtgtataactctcattctctaaaaaaaagtgtataacccgaccaaacatagtagtctttacttctgcaatgagaataagaaaatactatgtttcatgacttgcatataagaaaataaatttaaaataaactaaaaaaactataaggctcatcatgcgaacgtaagccctttctgtaataaattataacatagcctttcttatggagaccttaggtcactcgcttctaaagtgcaatggaagtcaactacctaggtcattagcagtgttagtcctaagctcaaatttgggggttttatatttatacaaatatttatctaatcaattaatattaaatatagtgggttgatgatgtattttaaaatattaggtgaggttagcaggtgcatcgctttttattccattttaattttgtctgctaaaatgttattttataaataattgtaacaaaaaatataaaatttaattttgacatctaaattgttgtacaaataataaattaaaatacatatgttaatattatacaagagtaagaacaaatttttaaattgagtattttagttagatacaagtataattatatataagataatcattattttgatatattttaaacattatttatataatttgtacataatttttatattagcttataaaaaaaaatcaaaaaaatcataaaattgttataaaagtattagatttattgattttatatagtaagcattcttattagagaaaataagaaagttaaattaatataattttcaattaatagggatttaattaaatttattaagatgagtagtaaaaataagaaagttatttttctattataattaagtactctacaaggtaaataagatatagtaaaagataaaatattaaattttgattctctattatcatattcatattaccaatatgaattatatataatgtgagggtatattatatgagatttgattatatatcacattattttatactttacactttattaatattaatataattatatatttttgtgaagggggaaagtgatatggtaatatcacaccattaccacactatgtagcacattaattgaagtaaaggtgtaggatgtcactacacaaaaaattattttaatataattatgtattaattttttaattatgtttaagtctatagttatttcaataatcgcgtatttacacatagaaattagcagtttagtattatttttttatatgtgcatgagtagaaattaagctttattgctagaaataggtattagagatgtaattttttaattacggaaattttattgaattttatgtgtgtcatacatgttaattatgagatttaactttttcatgttttatgtccggtaatagtgtaattcgacaatttgaccattagtgttactttgatatggttgagtagagaagatttatggacagttagaatattgtagttatgcagggtaattagttatgataattttacccctatttgtgaaggttacttagtagacaagtaagggaaatttttgtctttttttcagctaagcttattctagaattaatatttagtggattttgatgaaaagtaaactgttatatgctgaagttactaaattattcaagaaggaattagataactccaccaagaaaatcaagttacactctctctctcttcaaaccatctttctctcacccctaatctaaactcaaaaaaaaccaagaataattcatccatttagcaaggtttttcggctttaattttaagaggaattgtaaaaatagatcaaggtaaattttaagtttattttttttcctttgaattttcaagttaaagtttggttttatgcatgattttgtgaaagtggttttgtatgagtttggggaggttagaaattgttttagggattgattatgattgtttgtggttgtttcaagggctcgtagcaactgtggtttgagttgagtgggcttgagttttagaactcaaagcttgctcaataatggtggttttatttcagagatttgttggtgcctttatttgctgaattgtgtttagagcatgtttttaaggtgttttggaaagtttgagcaagtttgggttagaattgaggaagaaatgttctagttttataactctgctcagaaatagttcatggtttctctaggcaggtaaatggttacccatttggggattcgattactcgtttggaatgatttttgggtacctcaattttcatattttctcgatatttagagcattgcacgctatttattgatagagaaacttcaaattatgagtttaa

SEQ ID NO: 22523 - DNA, 3088 bp, Cannabis sativa
tactaaagcgtatatatataggcctgtcacgtgtttggtactttggtttgctcaatagtcttaaatcaaccttcaaatggcatgaaagaaaaagacttgaaagaaaaaagtaaattacaagttagttgacctttcccacttgcctcgtaaactcaaagtctcgctgtgttcacattgaaaattcatcattccgtgttttgtttatttttatgaatttgacctcttaagttggattgactttatgttaaagtcaactagagcattgtattggtttgtttggtttggtttagtttttatatattttaataattcaacccacccaaaaaaagaaagaatgagataagttcaaagaaatgtctcttgagttattccgaaagaacaaagcatcttcattacttcacaagtacgtcagcacaagagccgcggccattagtggaatataggctaaaaaggccatgcataaagaaaaagagggtcaccgattaattagtatagtattatcatgtattatagagagtcactgacaaagggatcctaaataactgtgaattagtgtataagctacacaaccccaccattggaacaaaccacacttcaaataaaagcccttaccagagaatatcaaaggagtttagcaagaatttaattgggaattaaatatctaatatgggtcaaaccgaaaggaataatttaaagtgattagagtgcttacgagaaacaatgcatacaaccaagttgaaagacagccgttcttcatgataaaattgcaatttaaatttaaattatttttttgaaaaaaataaattaattaatttttcaaaaagggtaaaaaaactgaacttccggatcttgtggttccataaccatgttgtgagagttgaaattaaggtagatccactagttgtggcttgtttatcggggtatgtggatggaatacatgtaatgagaatccttatggtttattcacattccaaactaccaaattttgtgaaccacataaggccatcatcaagggctttggcagtggcgcttattattcagaattttaggagccaaattgattatgttattagcataaaaggccacttctagaactagttttgagtgaaaatatttaaatatacgagttaattgtggcataactacttatagggtcatctcactagtaattaattcttcaaaattattttttgacggtaaaatctctaaattcaaattatgttaacacttattcctttctattcctttttagtagttaattgttaagttgactgtctatgtgtacttaggatattatccacatggacacggtgtacacatgttataatattattggctcacgtaattaaatattttaaaaaatatatattaaaataaatttacttaaaataaaaaataattcattctaaaaaataaaaaataaataaaaataaatttaattatttctttttccatatttttcctttctcttttttctcaccctctctatctaaatctcaaatcctatttttcataatcatccattgcgctgaaaccatcataaccatccattgcgacaaaaccaccattacccaccatcttcgcagcctatttttcatagtcaaatcacaaagaaaaggttaaacgaaaataaaacaaaatttaaacaatccagatttaacaaacaaacaaaccccaaatctattttaccatctcctctctctcactttcgatctctcccattactccaccacaaccataattttttttttgtccttttctccttcttcatcctttctttcttgaaactctaatttctcaatcttgctttttgggttagaactagtggagaggtgagaaaaattggaaggaatgttgttaatgcttgttatcttattttttacactatgatgtggcatatagttgaatgacacgtgtcttgcatttctcaatctgggcagatagttttagtcttagcaactcacaaggattgatatgaaggtctaaattgtacatacatagcaggatgtccggatagagtcatcaatggacattcgaccagctcagtcctgtgatcaactcgcatgcaccgaccaagagatatgagttggtaattttagtagtgatcgatgatatctccaagcttgcatgacaggaagtaatccgtatacttttgtgggattgatcgtaccttcaaagaataaaggcaatcagcctagacttgcctgatttcttcattgtaattatggaaacatattattttcctattttatttcttatagattaagagaaaccattctatgtaattaacccctataaaatggtggttgcatctcactattgggggacacaaatttaattaaagataacactcaagagagaaatattgatctaagagagaattactcagagatcatttgtaaaagctttcaagaaggaatacttcattctttgtctcacaagttaatacaataaaaagatgagtaggttattaatactatcgcagggtcaaacctctagaaattttgatgttttctttactaattattctttgcttgctattatttatttaatctaatcgatttaattaagattcactgtcgttggctaaaagcgaggttaatattttggtgcttccattaagagcaaagaaacaagtttttgtcttaagtcttttacagggcacaggatgtttgtgcaaactcgaaggggagttcaaattgatccagtcgatctaatggtgacagatctaaacgtgtagccacctaaaaaggcaagagatgtaccagggacaacccttggacaagtcaatactaaaccaccaacggtaagccatggagtgacttcccctctgcctaggttcaatccaggtgtgcaagaaactgggaataccagtacgaagatcgagcagatcactcctagcactgaaatcttgtccatcacaaacagtcaaaggccaattgaagatgatactaagctttagaacttacgagctactttacggttaatgcaaggccataataacattctgcaccatgagcacacaagatatccaaaaaactatcaatgtcgataatcattattatatgttcaaaagtttaattcccat

SEQ ID NO: 22524 - DNA, 3602 bp, Cannabis sativa
tgccaaattatgagctgctgtatttctttgccgtcgagtgtggtgaagggttacagtggggagcgaaaataacatccgtcgaataacattgattatgtttccatagcttgaaagattttcatcagttgattataaatccttgagtaggtttttgcaattcacttctatatgatcaatgttaattctattgtcttgattgtttgtcttaaattttgttcttatattggtatattaatctacaccaacagtaactaatttagtatgccaattaaattgcatcgaaaatataaaattcctattatattaacattcctacattataacatgataaatgaataatatatttttttcttttttgaaatgtaatgaataattaatttcaaataataacatataatatcagtaaaaatacattttgtgcggtgtatcggtagaatgactccaaacatatcagatgagtagccagaaataataacattgaaccattttcaatcaagagagagaacgtaaaagacactcaaacactgtacggcaattgtgatgagtattacatctattatctatatccgtaattaattaggactgagttacaatttctgacgattttgtttttgtgtactggcaaggcaaaaaataaaaactgacaattaatgcttacccatcatgcaaattaagtgatattcttcaacgacaaattctaaaagatattattatagtatcctcttatgtgtcaatatcacgattctttcaattaagcattgggttctatataatttaatataatagcttttagaaagtatcgctagccaatcacaacgcaacatgtcgagaaggtggtgcctaatagcaatgctcttattcaaagctcattaagatccgtttagctaactcttctgcaattaaccactcatattaatgctctaacatttacatatttggtccaaccaaaacaacttttattacagtgaaattaagatctgaaactacttacttaccatatatatatatatactcttttaaaggtggaaaattatacattaatctcaaataataatgataataataacaaaacttagaaaaggaaacacccctgaaacttctttaagctgagctatttaataataagtaaccggccatataacaactcaactttactgattacccaacaccaataattagccatttctattttacttttactttttctaattggtaaaaaacatttacaaatgagaatataccttagattagtaatataaaaaaacaaacttttaatccaggctggctttgaatataaatatattctccaccaaatattagttatataacaaaaataaaataaaaataaagaaggtaacctttttcagagtctaatatcttttcaaatattccatacaaacaaattatgcatgaaaaataacgaaatttgtttcactattttgttacaccaaaaatagtttaatctagctcacgcacatatccatttcaatcttaaatcgatcatatcaataaaaaaaatgtgttaattaattttataaataattttttgggccccaataaatagaagccaattcatcttttctcattaaagcctttttttttgcttcaactactccgcagctcacgcgcatcaccatcaatttcctctcaatttccactttctctacccaattttctttctaattttccttttttctcttttttgtttttacaaagaaacaaacaccaaatcaatgttctataaatacataccaatgtaaaaaccccaactcgagaaaatccactctctctcatctgggaaaattttaaaacaagaaaaaaaaaaaaaaaaaaaactaccaccacccttttcccagttctccaatttaaactcagacccataaaagaaccatgccgcttccatggaagaaatctaaggtgacccgaatttcccgtatcgttgcggatctccagtcgccgaaacgcggtggttctcttgtggtcgagactggcttcccaacctctcttatagacctttttgttaagaatcgtgatcgtttaaagaagcactctaattctaagaagaagaaaaagaaggataataagaaggttgttgttgtttctaatgttaatgattcgaacggggtcgaaacagatttgccggcgaattttgatccgatcaaggagaattcggattcttgttcggagaaaagctctgttcgaggcgaacccatttgtgaggaggtgaagatttcggcgtcggaggaattggaggaagtggaatcaattgaggaggctttcgtagaaccggaatccgaatcgataattcgagatgagagccgggtcgaggaagagtttgtctgcggtggaactctactcatggcggttttgaaggttttcttagtggtggttttggctttgagtaccaagaaattggtggttggggtcacattgtctgcttttcttctcttgtttctcgaatatgttgggaaaagctctgtttggttcttgaaaccttgttcgaaaatgaaggtaagattaagatctatggtgaattgggttgcgagctttatttggtcagaaaaggattgtttggtattaaatgtaaaaaaccaaggagagagctatgctgttgtggctgaattgcttgataggattgactcaaaatcttcaaatgatgatgagattgaggtttctgaggttaagaatgatcttatgatgaaagagaatgagttcttagtcgatggtcctgagcttgagctacttagccgtgataagaaatggggttttctgaacaatacaagtgtgaagaaagagaattctgccatggaagatggtgaaactgttttcccaagtggggtgatgactcttgaaaagaataagagtagcaagagatcaaagattaaggccaagattattaaaaacttagtgcctaagaagttgcgtagttcaaaatatagtaagagtaagtctaaggatgatattgttaacgtgttggagacatgtagtgaagggtctagttatcatgaggttgaagaacaagaagagcaaagatgtgaaagcattaagggaagctttcgtaatgatggggtttcttctttggatggaatggaatcagccttggttagtgaaggagaagataaagaagaagaaaaaaatgaagaggttgaagggaattgggtttatttgagtctggttgttgttgttctggctggtctttttgggggtcggattgtcgctcttctgataacaatttcttggtgtttcatgttaaaaatcattgtaacaagatggagatccattaatatgagattggccagctccactttctcaatctcaagccaatgatttggtgagaagctttggattaagctcatcagaaaaagcttcaatcttttttttttccattacttgatagttaatggtggttcttcaattaaagtgttcttcaactcttactgctcttactgtatctataaagttaaggcagaaaagtccaacctttggttggcaagcaacttgaggtgtttgtactcaaaactgtaaaaatacaggaaaattagagatacaaatcaaagtatataataattttaatttgttttaagcttgtatcttatttgtta

SEQ ID NO: 22525 - DNA, 6375 bp, Cannabis sativa
  modified_base (4332)..(4342): a, c, t, g, unknown or other
tgtatgaaactaattctgttttgacaacaccaacagacagatttgatcaatgtcttcattcatcaattctagtgtgcgcaagttactgaaggtgtccatgttggtaagcctctcagtacaaacttcactcttatcattggcacctatcagaaaatggtcaagaagcaacctcatagcaaggtctgtctgggcattttacttgttagcagactggattgctgctacaattattggacaaatcatcaagagccttggcaaaggcgacgacaccgaaaacaaccaaggcgatcattactcattgtgggcatcttttcttttgatgcatcttggtggccctgataccattacttctctgtctttggaggacaatgagttgtggatcagacacctctttggcctcattttgcaagttctctcagctgtttttactctctacaagagaggaacaaaaaacaggctgttgtggcctaatatcttagttttcattgtaggagtcatcaagtttggagagagaacttgggctttgcgtcttgcaagcttggaccactttggagagaccaattcaccagatccaaatcctggtcctgattaccaagaagcagaacaagtctactcaacaatgagaactgtccatgtcaaacgtaccataacagaaatgatggcatcggaatcaaccatgtctggtggtgtaagcaattatggccatactcaacacatttcagacaataatgaagaacaatcttcacaaaatttacaagagctgaaactactcaaagtagcatatgcccactatgaaactttcaagggacttgttgttggcttccttctcagctccaaagatagagagtcaagtagaagttattttctgcaaaagagtgctattcaagcttttagattggttgagtatgagctcagcttcatgtaccaagttctccacaccaaggcagttgttattcatggaaaaatcggttactcccttcgcgccagtactatttgcgtaacggtttcaggcttcttggtttttcatttcactggaaagcatggttttaataagatagatactgatgttacttatgtactattcattggagccattgtccttgacactctttctgctcttacgcttttcttctcagattttgtcctcatgggacctatgggaaatttcatcagtagattatttgttccaaaagctataatgcagaggaatagatggtctaaaacagtttctcaaaaggacataattagtcactgtctggcaccaaagatggaacttaaagacatgtttagttatctaaacaagtatggggagtttgaggttatcaaaaggattgtctacaatttttcttactggaaaccagtggataatcatcttaagaaattaatttttgatgagctgaaagataaatccatcaaggcaattaatttgagagaagcaatagaggcatgttcacaaagaggagaagctgctctgttacagaatccttcaagctatatcaaactgaaatggagcataggtgagttccaatatgctgagagccttcttctttggcacttagctactgagctctgctactatgatcaggccaattcaagagaagaagatcaatcattctggcaactctttgctgaacgttgttgccgcacatgtgtttgtctaggccacaaagatgatgaccaatcaagtgaaagtgattataggaatatttgcaagctcatttcgaattacatgttctatcttctagtcaccaagccagtgatgttggcaccagttaagggaaattggaacatggtttttggagatacttgtgcagatgccagcagatttttcgaaaagtacaagctttcgcgccatggtaaggtgtgtgagaagattctatctgtgaaaccgaaaattaaatcgacagctgtgaaaggtaagaggagcaaatctgtgttctttgatgcatgtattcttgcacaacaattacagaatgaggaatcacagtggaagattatgagtggagtttgggtggaaatgttggcatatgctgccattaattgtacgccatttgttcatgctaaacagcttagtaaaggaggagagctcttgagtttcacatggctgctaatgaaccacttgggcttgggaactcaatttgccgagcaagatcaccatgctggaacaaagatcatgagcagagtcatttgagaaactaattaattacataattctatcatcaataatagttatatgttagttacttaattgaggacaaacaatttggctatattaatcaaatttgagtttttttaagtacgaagtaatgaatgtttattcaccatttcaaaaatatatatattatatttactttttttcagttataattttgtatttttttcaaaaatattattagaaaaaatgtatataatggctcctctcaaattatttatttttcacttttgacctcccttgcaaatactttatgcctcagtagtcctggcactatgggaacacataaactcaaataatttatctatctaactaataattaaaccaaccactcaacttagaaatactaaaaagtaccagttgtgtaaatttagtactacttttgttgttatcttattattaatgtaattaagtatgttattattaatgtaattaagtatgttagattattttaagaaatattgttaatcaatggcaaaacgttatttttagatggtattatgcactattgaccaataataatattgaattataataaggaacatctcttattactcctttaactcgttgcaatcatcaccatatattcaattattttgaaatatgtaataaacatccttaattaaagaggaaagaaagaaaatgagagtgggagacaaaattaaatccaaacaaattaaagaagtgagaacccaatattgattagatgtataaaatataaaacatgtacatttatattcttggattcagatgatgtctccactccaccgtacgtagtttatattataatatacattactttttctttatgaccaaccaaaagtagttttctatcattaatatgatttgaaatatccttaaatctacaaaacaaagataaaaaaaaaaaattagatcaaatcgaggtgtgggaaaatctattccaccgaataaacattccattctcaccactattgatttatgaacataaacccacttagcttatatacatatttaatatagagatttagataatagtagagtttattatcgtattagtacacacactcctaatactagagaagtgtgaacccaatatttattgaaaaatgttaaaaaatattagtggtgtttagtattttgtttattgttatatagtgtaattaagaattaagtttcatataatttaaagaaatactaaaaggtactattagtacctaacacccttttaggtattatattgttagttgtacaattaggtattagatcttatataatttaatataataatttttaagaaatattacaaactaattgtaagatatcacctctgaaaagtatcgagtaccactaatgctcaattaatagcaatgctcaaaaatttattagtgtgtcacttataaaaagtattagccaccactagtagtatctaataataatacttttatttatgtatattttctcgagcattattattgggtatcagtattgttaaatactttctataagaatgtcttataattgattagtaatattctctaaaaattattatcttaaattatatgagatctaatgcttacattaataataatatgacactaaaaaatgggaaatgctaaagggcaccagtagtacctagcaccctcctacgtgtcaatatcgctattggtctaactaagtatcaggtcccatatagtttaatataatagcttttaaaaaatatcgttagtcaatcgcaacatgatatgtcgagaaggtgttaggcactactagtgcctaatagtaatgctcctaaaaaatatattaggattctcatactttctcccatgccacgcgcatagaaaatgtgaatgtgaaagaatataaaaacataaatacacaaccttaatttcacatttataattcttcaaatgatgttgtcatatgctgtcttttttttaatgcttaaaaaataggttaggttaaatggctaccatgtgataatttttttatttttatttttaaaaactaaatatttgttttatataaaatgtatctatgtaataaaatttttgctctaatgatattttttttttactttttagattaattttaacaaaatatactattatttaactaaatattttttattaattttatannnnnnnnnnntatatttaaaaataaaattatataattattttatataaaaaattaaattaaatgtaaaataaatattgcaaatatttttaattatttgctactcatgtagtgctactttgttcaaattacttaattcaactaggagttaagatattttttgtcaaataattaataattttacaataattttcaaatacattttaattttaaaacacgtgaaaataaacaatcaattattatattaaatttccactattatttattatttctaaaaaggactaattatttattataatttaaatattaaataatattaaaaaaaatcacttgcgttttgtattttaatttgtaaaatgtgacattttatgtataaaattccgctaattcacacaaacaatagttcattacgatatctcacttgagttttattttacggtctttgaatcttaccaaattccattaccaaaactactgtcgaacttcagtgaccaccacatgcacccacgaccctccctctctctagttctatttgttgtgtgaccgagacccacgcgatcctcccgatctatggttctatctgatgtgcggtcgatgacccacgaccaccaccgtcgaacagacaaataaatgatatgtgatttctttgtatgttttgtttattatttagtaaaaaattgagtttcggtgaaactgtattttttggatatggtacgatggggtccgatagtggtccgatagtgcgtacaataatagtgtaatttagaggttagggatgaaggtccaatggtgctccgatgcaggtctgatgcctttctgatgttgaaataagtaaaagttgaagacgtaagtccgattgtggcctaatgctatccattttcttatgaacaataataccataaaaaaataggtagtatcaagtcactatcagatttatgtcttcaacctttactcattttaacaatacaaaagcaccggacctatatcagacttgaaaccaacagagcaacccaaatcgtaatccaaatccacattgcaactcacgtagcaataacaatcaccggagcaatcaagaccataaaaataaaataaaaaaattaagaaaaaaaaaaaagttaaaaagtggtatacaaggtgatttttttttactaaatataaaatagtttttgcatcttccactgaaaatgttctaagactcctatcaactggttctaattctttttttactacctgtactaaaagaaaagaaaagaaaagagaaggaagaaagatattcgaagcaatttagtgtgtgtgtgtgtgatatggctgaacgaaactgggtaggagctgttgataggattctaagagtgttggggtgttcacatttcaacgatgctacaattttcaagtataatcataagttgagtgcgatggagaatgagtttcagatgatccgagcttcatttgatgatgcagagttgatgaagacgatcccaccttcattttatgatgatgatggtgatgcagagttattagacaatgcactttatgatgttgatgatttgttgagagaaatgttggctgtgtgtttgagaagacgccatatgtcttcaaccaaaaagcttctactactcactactctcaactcatcatcctcaatctcaaacctactctccaaaattgacaagatcatgagtatgaaaattgtcaaactagacagacaatcatcattatcacttcatgaacttgcagcaagagatgttgaagacgttgtaccgaggccgagggaagctcactcttcttctttttcatctggatttgacggagaaggagttgttgggaggaaaaaggaacaagaagaagtgaaagagttgttgttgcagaaagatcttgaagagaatgtattagtaatccccatttacggtaggggaggagtagggaaaacaacactggctaaatctgtttacaatgatgagatggttgcaaaccattttcatctaagaatttgggtttatgatggtggtgatgcctttgatcagatatcagttatgaagaaaatcgtt

SEQ ID NO: 22526 - DNA, 4216 bp, Cannabis sativa
  modified_base (2825)..(2833): a, c, t, g, unknown or other
ctggtaaaataatttcccacaaatcaatcatggcatcagccttatcgcttaagaaactgaagtccaactctgggttcgctggccaaatttgataaatggtcctcctaccgatgttgttgaccctttctttggttccagcctccaactccttgagcttttggtcatgatcaatctatttttgatcgagattagcttggaggagagtcctcgagttccgtgatcctctgttggtcggcttgtcattgctttgctacttcctccttcgtgcgagagacctcggcttcagaatcgttccactttttggctttgatatccctctattccctgatctggctaagctcagtctgaagcattttgacctgatgagacggctgatgatgtgtggcatggacaagaaaagaagcctatgagaagaagacaaactgaggttagtaaaaggagcaaaataaggaaaaaagtggaaacaagaaggcaaggaaattgacctgatgcagaagctcataacttcttttggccaggtcctcagtgctgcctcgaatagcgagatcctagtcactggatccaagtgtcaagagattgcaccaactattggtggcatgttgcgagctaagtcatgacccttcagttccaacctcgaggggtaggggataggaaggctcaagaagaaccatctcaggacaagaaccagagaacttcacttgatgcaccgacccagtaggttgtccctcgacattcgctgcagtagagtcctcattccccatagtagagacctcaatccgtgcagcagagacttcattccttgccttgggagacttatcagcctcaatggtaagctggctcgaggatttcttcttgttggtcgtggtcttggtccttttaggttctttggtaaaaactaaagcctcaccagtttgggcgaccctcttcttggatttcttgtcggctaagggaggacttttgaacatattctccaagtctacatccataactgcaagacaagaaaaaccccattaacacttagacaaaataaataagtgagaatggggaagaactctcacttaagaaagttaccatatttttcggaggatgacgagggaggactataatattcactaaactccctagatcctgttatcataaatatgtcataaggttttagtggatctaaatcccagcttgaatctatgtgactcgctctatccaacatggttccatactgctcagcaatcccatagaatgagctagtacatctaattttaacatgaaactgtgggtaccaattaccgaacttatgggagatgcgatctatgtgactcgttctatccaacatggttccatactgctcagcaatcccatagaatgagctagtacaactaattttaacatgaaactgtgggtaccaactatcgaacctatgggagatgcgatctatgaggagatggttccaaataaaaaaagtacaccgtttatctcaaaaagagactaaggtattatgttcggccctaagcattgtgggtgaccacccacattgattacctcaggatcttccatctacccgaggagggactctctcgagatattgtgcgcgagccacaaagtcattactttcttcttcttctgggacggggaccttttgccatgaagtatactttggtattttataatcgcaagtatatttgtcagacgcaaggaggccaacattcgtcaagtctcatttagcaagaaatctgaagctcgcgactcgtacgatagacttagcaaggtcttgtgacgctcggctatctctagggtagggactggcctctgaagaaccgctgcaaacagataaaatttcagtaagcaactttaaaaactacaagttaatataattattttcacgaggatagaaacttacgtatgattcgaaaggcagttgtgtttattggagataagcccgtcgtccaaaagaagtcttctttaaaatctgttgttatacccaaaattcggctgccatctcagtggaggacacgtatcaagataaagggaatatggatcaatgcaagtcactttatatggaataactcattaattatttgagtatcagagtatatttataacctgcagacggtaaggtcttaggcaaggaatcaatatacaaactggtacttagtatattagcgagaaaccatatgttgctgaatgcaaatagcgaggcatcaaggacagtacacataggaagatgaaagcgacatatatcaattgcgaaagcccttagtgtaaaaactaagtgtaacagtcggatagactcaagaccaagtaagcgaggtgcccgtcttgctatgggaaaacttcctataacttcatccagtaaacgtcacagaggcttacaaccctagcgagtaagaagataacattaaaatgagctttgaagaaacctttgtaaataagaaccgcgatcgacacaagacatgcattgtcgacctcggaaggaaaaatggccttagcttgctattgagatcattggaacctagcttctgtcgagacatcttcagatacaataattaaagatgtgtttaaaacacgatcattttgacctagtaaaagcaagaaaatcacaactatatgattttcaaatcataactgcatttacactacgtgatatgtaattaaatcccatgattttagggatgatttttgtaaacatattacagtcaactttgtaattaactgcccactatgtaattataaatagtggcaagaaagattaaaagggggacgaaaaaaactcatacaggaggagccctgaaaaacaatcagaaaactgaataagattgactcgtggactnnnnnnnnntttaactgcaaaaccacataaaaagccttgtgtgttcatacttttattttcttggcttttattttttccgtgtgaaatcactaccgtgaggctcaaatttggttaacgaacatctgcgttaacatttgtcttgttgggcagtctaactatgagcttgcgatcgccagtataagccccaagataatagaagcctcccatagcattcttccttgcgggaaccattttgacagagtaaaagcatgctatttctaaaggagtggggcactcccagcctaggatatggtatagaaccttgagggtcgcaaggatcctgtatgagatagggttcaactggaatggggcaaccccgaggtagttgtagcattccttaaagtaatccctaagaggaaggaccgctccagcctggatatgttcgaggctctaagctccaacacccgacgagttactcgtgttgggtccactacactcctcgcgtattactctttatgggggaaaacagctgaattacccaggtgccacagaccttataatgcaccatttccactgcttaatgccgcaagacttcaggatgccaccaacgtaggccccaatagacctaaccttagactcgataagttctgcctcgaaagtaacattgggatcctgtggggtcttttatttgtggggcttaggagacatgattttaaactcaaggtcacctggttcaaaagcaacactgacgttgggtaaaaacattggtcttgcgagtggaatagaagttaatattgtgggttcaggccaggccgcgtctcacaagaaacgacgcttgccataagaaatttattgtaggaattgcctataacgattgactgcctcttcttggttcgacttaatcagatggtctctaatcctgacatcatttacttccaatttggactgaggtttgaaatttatgggtttatatggggaggttagatgtttgggatattctaaagaataaacttctgaaccagattgggacatttctacaaaagaaaaacaatcccaatttctggatgaaatttatcaaactagaggcttaaggaatatgataaacctaacctatgtctaaactttaaaaatcacccagaaaatatgaactctaattgttaaaccgaatgaattaataaaatgtaagacattcataactcgaataaaaaaagaggggaggatgacgtgctagaaaattctgtgaatggagacgtggcggccggcgaaatgattttttcaaacaccgggagtcggagagcaagtccaagtaaattcacaggaagaatgtcaaagataaggatggcatgcacggattcaggaagctcgagtggaagtttcagaaagcttaatttttttgaagaagatgaaaatggt

SEQ ID NO: 22527 - DNA, 4771 bp, Cannabis sativa
atccttggcaccctattagataatcacaagtctaaagacaccactagtgcaagacaagatttgaaaaatatgggagtttgtcaatccttatggatttacgaagatgcccagaaaaggttgttgaaaccccttgcaccttatgtgttgactgttgaagataagcaagggttttgtaaattcctaaaggaagttaaattgccagataggttttgttcgaatttgaagaaaaaagtaactaataacaatattgttggattgaaatcccatgactgtcatgtcataatgcaaaggttacttccagtttgtatcagcaagtttttgtcaaaggaagtataaaacaccataatagaattgtgtaatttttttagaattttatgaattaatttcattgcaattcgcttacaatttttatttattagcaaaacatgggtcgcattgataattggaaagcttgtcacacaaagaacggcacaaacgagtttattagtgagcatgccaaagaaaaatatgtaagattatgtaaactaattacttttgaatatatttaaataattgtaaatttttttagtttctaacttattcttaaaataggtacggatgaagacaagatatgacagtcaatctactcattctgagtgtggacaagatgttgagattgagatactttgtgagactcttggagagaggtgtggccacgagcgatgagtgggttgcaaattgaaagggcaatcaggaaaacgacgctcacaatttgctgcagctactaaacaacttggcttaagccaaaccgtatttcatctacaaagacatattcaggtgatgacacaagtattgacacctgaacaacgtgcccatgtggagacagtgatgagtgacgttgctccaacgcaaccaacgcgtccacaactatctcacttttatatgcctagagatggatctggttcatcttctcatccaatgggttttcagcatcaacagtctcagcaggctccactttcatttcagcagttgttacaacaaccattacagcagtcattacagcagcctcaacaactccctgaacaaatggctcatcaatttcaacaatttcagatgtttcagacattcatgcagatgatgtcacagttgccgtcgccaaatagcccaccagtaatgatgcagctgatgacgcagtcacctcagacgtctcaagtctcacagtctcggatgccacaagtgatgccgacgcaacaaatgtcacatatgccgcaaacttttcagttgatgccgacaccacaagggcaacaatatggacagcagacatcacatatgtcgacaccacatgggcaacagactgctcagatgatgacaagttcacagatgcctccatactacccatagatgctagatgtttctcaaccgtagattccgatgaatgctaatgatgatgatgataacgacgcaacaacaaatttcttttagtatttttatcttagttatatgaactattactttaatttttatttatggtttatgaatattcactttagcaagtattatttttattgaaggattttgttatatttgacatttgatatgtgatataaacatatttagtttggtgttatgttttacttttaatttaattattttatatattattataataaaaaaatatttattaaaaattgattagtgaaaaaattaatatttaataaaaataatttttttttatttataatattagtttttttataaaacaattaaatcaatggcgactttttcgttattaataatattatcaatgatgaaaaagtcgtcattgataggcttacgatttttttaaaaaaaaaaaataattctttttgccaaaaacaaagtcgttggtaattatttttatcaccggcgactttggatttcgtcaataataatacctttcactgaccaagtattaccaacgacattttactaatgacatgtcgctattgatattcaatactgacgaagtacccatcttttactaacaaaatgtgtcctcattaaaagtcataattcttgtggtgtaatataaaataaataagaaaaaaaaagaagatgataaagagaaaaagaaattaaatgagaatttctcagtaacagaataaactctaattgatacaaaaatataagtagaataataaaaaactaaattaataaaataattaaaaatataatcaattattggtaattaatgtattaatttaaataatttagacatctatgtataatatttgatagcaaatattatttacattttttagaaaaaaaaaacaaatattaacataattttaaacttgtactataagggcatctctaaccggattttaaaaacgccaaatatagtgtcgtttcacacaatatttactttaatgggatactaaaactatacttataaataagtttgtctacagtgtcccaccaaatttagtgaggtactgtagaccacactatttttactttttaagtttttaataattaaataatattttttaagaaaaaaaaaagaattatatatatttagtaataaagtattcttattatattaataaaataatagaataataaatcatataaaatttagtgtaattttaagtataatgattggaatttaaaaaaaaaaataatgttgaaatagtaatttttttttatgttgatttaacactaaatttaaatttaggaatatagtcatttagtaccttgtgtttttatgaaaaacatatttggtaccttatgttttcaataatacttaattggtacctcatattttttaattgtacatatttggtatcctaaaataaaatttaatcaatacagttttattaatttaaccaaacagttctcaattatatgtaatcaaataaataaatttgaattcagaattcataaaattttagactatttattgtattgattaaattttatctaaaaaaattgaatttatggtaccaaatagatatgattgtaaaatacaaagtaccaaataagttttattaaaaatacagggtaccaaacttatatttagataaaatacaaactttactagagatggcctaaagaatataatacaagtggccaaattcaactcttaaaagtaataaattctcgaataatataataagattttcaagattgagattcctttctatggctactactcactcgagttgggcggtggtacatataagactttactaaaagggcatcaaacactatcacatcactttctcgacatctcttatactgaatggttttcaatggcggacgaaaaatttgaatccaaatgggaaggaaaatcttcagcccaattgaaaggcctaacggcaaatcaagtttggcctttcctggaggatttttgcaacttccacaagttgcaccaggcggttgatacgtgttaccaagtagatcaggacccatctgccacagtggtcgccggaactgggcgaggcctgacccgttactgctcctccacaagtacatcaccgtccggcgagtcgtcagtgatttgggccaaagagaggctcgtagaaatggatgcagcccaaaggcgtttgacctatgaggtgctcgacaacaacgttggatttaagaagtgggtggccactttcgaagttgtccctatcgtcgaaggcggcgcgtgtgagatacagtggtcgttcgtgggagaaccgccagaaggttggaattatgaaagcttggtaaccttctatgactcttctctccaatccatttctaagaaaattgaacaagctttgttgatgacctcttctgtttagtgggtaaaatgaaggctattttttactttaaattacaatagaataaaaaaagatggtcatatatatatatatatatatttaaggccaattatgtaaaacctcaattggtattatgagggatgctaaaccacaaacattcttagctgttggattgataaagagagtgtttttttggtatcctaaggctggtatatatccatttaaaagtaagggtatacattttgttaaaattggttattgctcaaaattcatctctattgtactaccatctacattaaaataatcaattaaattggtaaagtgtatttttttctttttctttcaattaactagaataagaaggttgagtgcttataataacgagttaagaaagtcacagtgtaatttaatttgtatgcaattagaggtaattacataatttagtatgtttgtctgaccatataattacactggaactgtgtaattacaaaaactttccatttaaaacatgaactactcaaaaatattattttctcgtgtaattactaactatttttccaaataaaatattaaaaattcatatgtaattaccacctcatatccaaacacactttatattttaaaatatagtgtaaagactagactgtgttattaccagcctagtaattatactatttaacaattacacagttacttccaaacacactttaagtgataattaaatttttgatttgttttgtttattagaagtaattaaaatccactaattcttttttttaagtgtatctaagtaattatgagaaaaaaaattaaataaaaagaagacagtgacaaactttgcataattatgtagcacactctttaaataagtactttattacacctctatctgttttggtattcatgagaaagttttttagtttatttttttatgattgtgtacgttgtagctatttaagactacttttaaatattttagaaaattttgaatagttaacaat

SEQ ID NO: 22528 - DNA, 1574 bp, Cannabis sativa
acacacttgtgtatagacaaaccacactaagacttcacttatttttctgcacccacatccatgagaccaagaatctatttatagtacctcatggtcggttgatgtagccacttcaatttgctagagaattctagcaattatatcataatgggcttggcccaaaaactagaaatatctagtgactattgtttctaaaaatttttagaaaactattttctagtctttcttacatttatgtagattttctactaacttttggcaattacaatgggcttttgtctcaaatcaactaacaaatatgtaactagaaacttctagaagtttagaagaggtgatgatttctaacatgtatccccgatccattctgcataagcacttttatcttctttcctatgagttgttgaagatcgttgtttacttatatgggatgtttattctctgagatttggcatctgcagagaaatattaacattaaagggggagatgttaatgtgatggtggctctggataaggtgcagtccatgttctctaaattttttgatcatgtcgaaacaggttctgtttcttgtaaggaactagagttagttcctatccatagatgagaggaggcaaatgtcgttctgtaaacagatgcctcctgatctgaagggatagcgagggttgttgttgttatgattaacactctcgataattcgtgggctttcaactcgcaacaaacgactacaacatttgctttggaagcagaatcaaaggcaattttgtttgccctttcgtgggctattcagaatgattggagggaggttcatgttctttttgactcgcaagtggtgattcaagctctggaaaggcctagatgcatccctaactagaattttttaaatgtatcgctgtctgtgttagatttaattgaatgctttcgtagctgcagttttttctttgttaatcgtagtttaaactcgtttgcggatggtttagcaaaaagtgctagaatttctagccaagttgttggtccttttcaaggggagggaattctcctgtgattcccatttatcttttctagtaattgaacttggctttctttcaaaaaataaaaaaacaacaaagaagatataggaataggacaaacattgcaaactcatgtggttcttatcaacaaccaacacaaattcaagaaattccttgacgtctgactgaggtcttagtgcatagttccttgaatgggtatttcagatatttttttttggtacctctgcactatgctgagaaaaccattggtgttaagaccatgagaaattcattcacacaaaaaaaatcaatgaaataggtaaggtttggttaagcaaatacatagctgagactataagtagtgatacaaacattgccacaacaaatacatattttaggttcaagcatctagtggacgacacaacatttgagacctcaagctttgaaactatatcaacaccactatttacagaattggagttcctgacatcattatctgatgaggaagaagcttcatgtgtttcatccaactgattcaattgagcagtaaaacttgttagtcatcacat

SEQ ID NO: 22529 - DNA, 8104 bp, Cannabis sativa
  modified_base (2129)..(2131): a, c, t, g, unknown or other
agaaactcctattgtaactagcgctgtaaccactttagaaacttaaactgtaaatttaaaaaaaaataaaaaataaaaaaacagtatatggggtaatttcccattcttttaagtattagttaatgataatagagaattgatgagaaatataaagttcaaacattgtatatattaaaattttatagaatatttcaaattaattataatgtacataaatataaaaaataaagtaatctaaaaaataatcttttgaataacaaaatagataaaagatgtatcattatatctcttttaatgagctacattatataaacatccaaatatatatatatatatatatatatatatattatacatttaaatccacaataagattctcttaagtattagttaatggagaatggatgagagagaatgttctaagtatcatgttgagaaaatgcaaaatttggtgatgaaaatgacaaattttttcatggctatttggtgatgtcagagagattagtcttctactactctcttcgttgctgatttctaactatcaagtttttatctgggtttgcttcttctgttccttcttagtccctgtcctattgtgttggtgaagagaaaccattgtcttggggctttttcttcagagtttaccttgttaacaaaatccataactctttggtttcgggatgttattttgacttgtattctggggtaaaaaggtggtttcaatttatatctgaaaaattggtttcctttgttatacctgtggccgcctggtggagtctgtggtaaaaaggggatgctcgctattttctccggtcatggtggagtctgtggatggatctcattttcctgtgtgtggtccttggttttccacggaatcaaggtttcatgatgttctttcgagtgggctatggtccatcatctccacctctgttgggtctcaaaaggcggtgctttctcgtgacgagccgtcatctggctctgagaacggagggccggtggtccgtccgttactcatcgtccctcgtaattcgaaacgctggaagaagttgcctgttagagtggtgacaggtcacaatcaggacgtgaaccaagtttgcttgcccaaggctgcttctgaagagcctatttcgtgctttgctgaaatgggtaataaggatggattaaatttgaattttgggggaaagccacctttgtctttaccttgtttgatgcttttgactcagagagcgatgacaattgaaccgttggttcctgcggccaattgtactgggattgactttttggatattgggccgagcaaaagtaagtgtgtagtggaccatatttcaaatgggccggggaggaaaggaaatggtatttatgggcctggagagttaatggaaggagttaatgttggagagtattgcttgtgtagtgggcccgaccggactgtggatttttatagagattgggccgctgggtcaaaggctgcagtggggccggacttgttttttaatcctaaggataaggtgaagcttatggatggtagtgggcctgcggttggtacggactcccttgagagccttgaaggtggaaagaaggcagaggaaaagtttaaggaggagagggctttctctcatttctatgaagcccaagaaaagcttctttatgatcttatactttttggaaagttggacctttgtgagattaaaaatttgggtggtgttattggagggaagcccactttggaaactaatgagcaaactacaccttttgagaaaagaaaatttaagggctctgcttctctatgcactagacctcaaaaaatagttagaagacacccagatgttgttagcaactttccttgggattctaaggagagggacctggtatcgagggcggagtttgatgaccttgaagaatatccttctgaagaggcttctgatgatatttctagttcaccgaattgtaattatgatggtagaaagagtcccctgattggctcgttcataattgaagaatctggctccagcttgtctgttcattcgattaaccctgtggaggagaatgtcaaatctcctccacaggagccatgagaggcgttgcttggaaatgtagagggttggggcagacctctacagttcgcgaannnaagtccctgctcagatcgcgctctcctgattttgtttttctgactgagctcaaggtggatgctaagcccctggtacgtatactaaaagctctccatttttactttaatattattgtgccgcctattgggactgctgggggtattattttagcttggaagagtggttttagttttgagtgtatctcttgctcgcgtaaccatatttcggggctggtctattcggaccccccttctcacccgtggctcctctcgtgtgtgtatggaccgccttacaacaatgcaaaaaaacatttctggtctgagatcatgactctaggagacagatttggtgggccttggttgatttttggtgatactaattttgtccttaagccctctgagcgggaggggtcgacgggaagggatccctttatcccttttatttcccaccttgtagaatcccgtggcctaatcaatatgaacattcagggggatatgatgacttgggataatcaccggtctggtaaaaaccatgtgaaatctgccctggataagggcattgtgaatggagcctggcttcatctctttcctaaagctattctcagctccatccaaacgagcaactcagaccacagaccgttgtgccttgacacaggggggatgggtactaaatttaagagatgtttcaagtttgaagaaagttggactagggatgttagaagcaaccttgtcgttgccaatgcgtgggattcggtggtccatccttgggcccctgctcgtgtattcagaaagttaggcgctactcgggtagcgcttcttcaatggaatagaacccagtttggtaatcttgatggggtcattaaagacttggaacagaaactggatagagttcagcaattgtcggctggaaccagggattggaatttggagagtgacattagacgaaatttgaatgaagctagagccaggaaagcgatttactggaaacaaagagcaagaatttcgtggctgaaggatggtgataagtgctccaaattcttctttctttttgctgctattagaggaaggaggaatgcaattgagtgcattttggataaaaataatgtctggattgatgatcggaagttaattggccaggaattcatggattttttcaatagtattttctctggagcggattatgatcggccgttagattgtggtcatttgtttagagagaagatttcaattgagaaccaggtcgaggtcagtaggtgtccttctcgggaagagatcagaaatactctgtttgccatgagtaatcataaagctccaggtcctgatggtatgtccgtctttcttcaaacactactgggagtcggttagggatgatttttgtgatgctgtcactgacttttttgagaagggtagaatgcataaaggtgtaaatgctacaaatgtggtgcttatccctaaagtgcagaacccaaagagaccgaaccactttaggcccatctctctttgcaatgtgctgtataaggttatctcgaaaatcattgcaaatagaatgaaaccgctcctcccctctcttatttgtcctactcaggcagcgttcgtgcctggaaggaatatccaagataataatgttatggtgcaagaaatcatccattcctttaataggaagaaaggtaaagagggcttctttgcgatcaagatagaccttgttaaagcttatgacaaattgagttggaagtttatcgatcatgttcttgattgcttcggtttccctcaaaagttttgtagttgggtttctcagtgcacttccaccacttccctcaacatttgccttaatggtggtccagttggcaagatcatgccgtcttgtggccttcgccagggggacccgttatctccctaccttttcatttgtgcagcggaagtgttttctagacttttggaagaggctcttgagaaggggactattaagggcattaagcttagtagggggggcccggtgctatctcatattttcttcgctgatgacctcatcctggtgggtcgggccaacctaaatgaagccaaatgcttttggaattgtcttgagaagttctgtgagtggtctggacagaaagtcaataaactcaaaacatcaatattctttagcaaaaataccccggctggaatgagaagaggtattaaggaaatcttgggtatagatacgcctgaaggggtcataaagtatttggggctgcccctgttcagatcaagacaaaaagatgccgacttcagcttcattcttgataatctcacttctaaattgcagggctggaaggccaaaactttatcaaaagccggccgggctaccctcattaaatcagtaggtctgtcattgcctatctatgccatgcaaactactaagctttctaaccgccttgtgaataggattgatggcatgattcgtgatttttggtggggctttgagaaagggaaccatggtcttcaccttagagcttgggataaactgtgccttcccaagtctttggggggactagggtttcggaagacaaaagaaatgaatctagcctttatggctaagtggggttggaaattattgaatggtgatcaatcgttatgttgcaagatcctggaagcgaagtacctgaggggaagggattttctcaactgtaattataaagattctgattcctggttttggaaaaatattgtccatgctagaactatcctccggaaaggggcttgtaagagagtgactgatggaagagatactagtatttggagggatccctggatccctcatttaaaaggtttcgtcccgaaaccgaatgaaggagtgttaatggataacaactgtgtggctgatctattatctcctaggggtgggtgggatatccagaagcttaacagtctgttcgaccttgagactgtctcagctattctgaaagatggaaatcccgctggccttggaaaggatagttggatgtggactttagaaagtgatgggcacttctcctgtaaatcggcgtatctggctcaagcttcggaaagagcgcctcactgcgatgtcgctccagctctttggaacaaactgtggaatagcaacattatggagcgtcataaggtcctctggtggtgtatcctctctcaggctcttccagttcgagcagtgatcggaagaagatttcaaattgaagacactagatgccctttttgtggacttcgggaggaaaccatggaacatctttttctaacatgcgatgtggcgatgcatttgtggcggtcctctccgtggggaattttccctgtgtgtgatactggtattcgagtttgggactgggtgaagttcatttggagccttaacaataggggtatccgggttgaggatgtctttctttatgcctctattgttgttgacaatatctggcgattgcgtaacgatgtggttcacaataatagctcacctaatattttgaaatgtattgaccatatccgtgcttctttcaccgagttacatacttctcttttgccttctcctttgccgcctgtgaaggagtgctggactcctccacctctggaatggattaaattgaattgtgatgtccgtgtgggcctggagagtatgtgcacagcggtagtagttagaaatcatatggggagggtgattcacattcactcacacgcacgtccgtcccggttggatttctctctctgaggccctttgtggtgaagctgcggcctgctgcttggcggtttctgttgcgatggagctagagtataagtttattattgtggagagtgactcaagactagctatcaacgcttttaatgggaaggcgacccattgggctcttgacaactatgtctcctattgtactaagtcttccccttatttcatatgttgtaacttttcgaacattagtaggaacagtaactttgcggcccataatgtggccaaatgggcttttaaccgccaaatgtatggatctattccgatccactccttaccggagaacattttatgtaacgaccatgaggtctagcttattttaatatatgaaaacgcttattttcaaaaaaaaaagatattgaattatgggactaaaagtacgatcataatgaatatattaaacaaattttatacttttctttttctttgaaaatgatttttctctttagaatattttttttttgaacaatctttagaatattattagttagtctattgtgaaaaagggcatattaattataattgggggggagctttgtcttaatcattgttataaattataagatcatataatttataatttgacatcattcatgattatatatgaaacatctgggtccttttcttgctcgattgcttatattcttctttttattaattatatcacaaatagattattattgtttatttaatccaacatttataacatgatcaaacaagggtaggcatgcaaaagtaaaaaaaaatccaatataataataataataataataatgttttttgcatttataaactaataatgttgcattattctataagaatctcaaagtttggtaataacactttattttgtatattttgccctaaaagttaaatgaaaggtaaatattatagggaatgtatataatagatcaaaggggtatttcggtagatttattgtcaacatcaacattcagaatctattttctttttataatcgtatacgttatagttaggatcgcttgtaaatttttatacaattttaaataatttgcagtataaggtttaaacaattatttaagagagtcgtgcatgcaacaaaatgtttaaaccttatttttagtattataaattacacacaattttttcaaaatttacaggtagtcataaataactataagtacacgatcatgaaaatatattagactaaaaaactgtcctatacacccaaacagataaaaagtttaccaaaataatcttttaatgtactatagacatacccaatattataatccaacattttttattttttatttatgtttaagatgatattattaaagtaaatctcttcattaaaatattgtctaacaaatcctaaatagtaaaaaagttggttccaccattgatcacataatagaccaatttaaattaagtgattttgctacaataataatttttatataaattcgagcacatatataagatggtgtttagtttggtgtactgaaataataatggtaataataatataatgatataaaaatggtaataagaattgattataatatttagtttgtagttaaaataaacattgtaataattataaaatattcaagaaaaaaaaggataatatagacttttgactttttttttactataattttataaaaatatattatttttctttttgtaataaagtgtaattataatggggattatattttggtatgtaattatcattatcattatattatattataatgaattacaaaagttaaaaaaaaaaaataataatgtaatagacttatttattatcggtgaaccaaatatcatctaagtacagacgcaaaacaaaagctgtcactaaataaccagaaaaggtagctagctagcaaagtccaagctaatagtgaaaaaagttcactacaatataagttgcaaattacagagcaagaagaataagttggctaataagatctaattaagtttttattgacataaaaattctaaaaaaaacacttagtgaaaacccaacaaaggcactaacttactcagcttcacatttttttttcttcttcattaaagtaaataataatcactatatatacacaatattattaaacaaggtaacattgttcatataagtgagaatgtggggagcaagaataatcttttgatatcaatctctttctctctttgttcatttgttttcttctctcttcttattccaactttcatttcacttgtttcaaggtacctttatcaatacaaaaacatctttctatatctat

SEQ ID NO: 22530 - DNA, 3359 bp, Cannabis sativa
aaaatagcatgtttgcaataattattaagttaggttaattagtatttttttttatcgaatttcgacctgtattaaattatggttataaatattcaagatggttaaaaatccttcacaaaaaattttcggatataatttaatacataccaatcaggagaaataatttgataaatatcaaaatttagaaaatattatttaatacctaaacaattaatgaattataaaattaaatgaaattatataaatatttttaaatccaacgaccaaaaataaattaattgttataattagacagataaaaatatatatttttagctcaacacaaaagtcattttcaaaattgtcatattacaaggtttttttcttcatatatataaatataaatataattaaaaaaaaattaacacaagttaatttcgtttttgccaaaaataccaaaaattcagctcacttcattgtttgccttacgtaagaataaactaaccttaacctacgctcaaccacagacgatcagtaatgatgcgcactacacacacggcgtaaactaaccctcatcaacatatctccaaataaataaataaaattaaaaaaaaaaactgaaattattattatttcttctcagatttacagtaaagaagaaaaaagttatatcaaactacaaaggaaagaaaatctcagaaagaagaagaagaagaaagagttacaggtgacttttttgatgagcttttactatatttctactcatccttcgatgacgagctttctacagtcgtttcaacctcatcgtggtggtcgtggtcgtggttgtggtggtggtggagttcggattctccggcgacgtaatcgaggagaccttcgccggttttatctgatgtggccggaggtaaggaggttttagcgaagacgagtacagcgatgaggaaaagagcggtggagagaagaagtggccagaagtaagctaaaatggtgagaaatttgggagctataaggatgagtgtagtgattagggtgaagagaatgagtgttatcaagatgtggaacttgaatctcatcagtttttgctggatctccattatcagaaaaagtaagttttgtttggttggagagaaaattttggtttggattttgggaatttttgtgtgaaatgagaaaatggagaaagaaaaagtgagtgaaagtctttctctctctctctgagtctctgtgcagagattctctgaagagtttgtttagtgtttatttgctaattgatccttttttggttttagatttacttttttaaccttgttatgtgatgggtggtttttgtttgttgatggaatttactaaaatgcccatcagctttttggtaagtgaatttttgacttaatttgttttagttttgttcattattgaaaacaaaatttcaatggttttgtttttggtttgtgatttttgtcaatttgtgtttgatggttttttgtgtttattagtggatggtatttggagggaatataacaataaactttttacattcaatgaataatagataggttgaaataattttttataattcaatactgcaaatcgcattttacttaatcataccatgaataattttaagttgtataattatgcattgtaaataattttttacgatgtgaacgatttgatgaataccttaagtagtgttagatagtagtcatcgagtttgacatatgatgataacttatacttttacaaaatggatattataaggctatttcctttttaatttgacaagtagtaactctactattattgggttgatctctacccgggagggtctcgtctgcagcaaagtgtattggcttcttgcataacaagaggatgttgcgagtattgcatcacgagatggcacaagaggttgcacatcgcgagaggggttccatgtttcttgcatagcgagacaattcttgcccttgtgtgtttcttactcgttgcgtttagctgggtaattttcgcccaaaggaccaacacttaacttattcccctttttgttatttctccttataatcttggtaaacaattgatgttattttgaagatgatctcttcacttcttatataattgtgtggaaagtaaggttaactctaagtataagcaagataggttgtagttaaggttttttggaattcaaaataaaaatttaaataaccttaaactcatatattctcagaacctacttagtaaaaagaataatttcactagtaaaactacaagtgcttttatcattattgatttatcttttcttcttatttttgttagatatatataaaaaaaaagtgggatgcacaacaaaataacttaagtgagattttcaaaagaaatcattcttaaatgtcgtttgtttcttatacatgtcatactagtagtctaatgttacggactcatactttttaacatgagttcaaaagtttaatctcaacctaagattacagttgtatatattaatataacaatttgtactcttttttaagtgaaattgtatataattagatcaaatttagatgaacttaaaaatattaaatgtgatttaataaacatttttttttatagaaacacttcataaaaataattgtcttctttacaaaagatttgaaataagcataagtgcaatgatttattttatgtatttttccaattatagaaaccaaacaagtagaaagaaagaagaaactcaaagaaaaaaaaaacatgccccattttgaagtgatgtaaaaagggtaaaaaagtaatttggatggacgacccacaaatatttgtcgtttaagtaaagtttgtcgtatgtatgaatgagttttgaaaatggtcttctgatttagctttaaccaaagtttttgtttgtttatggaggcaaggataagatctatcacatgaatgaagcagtaatacaaagcccaaaaaagttattccaattaagaataattatattccaaaatcccatttttatatttcaacattttaatttaaataatagttttagcattatgggtgttcattactttttaatggttattaattatataatatatagtacaatgttatttttctctttattcagttaatattttattgtatgtcataaaaataagttttggattaaacaattattttggcttatccaatctctaaaaataataggaataattacataagacactattttttttataaaaaattatatttttacgtttattttttatttttttattttttacatttttacagttttctatagaaataacataaaaaaataaaaaaactacatgaaaataacatttaaataacatcaaaataacacacagataacaaaaaatcaacaacaaattaacaagagt

SEQ ID NO: 22531 - DNA, 2452 bp, Cannabis sativa
  modified_base (1024)..(1024): a, c, t, g, unknown or other
acatattttgttagtgtgacatattatatgatgatttttgtaaaatttattgttgtggattacctggtgttgaccagaatatttataaatccgtgttgttttgtttctagaaatctcacatttgagaaatttataacacaatgtgttttgttcccataagttccataaaggatatctactctatcggcggtcctttgtggaattattagcctgaaattattggcttaattattaattgaagacaacgacctgtgactgatttttctcaagaaatttcacatatataaatattttgtaagtaatagttcttaatacatgatgtagtaattttttcagaaaaagaaaagaaaagaaaaaaaagaaacttataatgccacacttttcgatgtatagtgtaaatagtgctataatactttgttagttttatactgtgtactggattaaattttcactgttgttctactgttatgtttagttgttctattttgtgtactattggtgttttataaaaccacagtattttttgaaaaaatttctgtgtgacagtattttttgaaaaagttaacccaaatttcaatatttttgtaagtttttcgtcatactgttattggtgtaataaagtattaggttttatacttatcaaaaaaaaatattaggttttatacaatttaagaaaattactttaagagaatattgctcaccaatcataatacgctacgtataaaaaatactagatagcactagtttctaataaccttgctcgtaataataatgtgacatgttattcaaattattaaagtgttgtttttttgacatgtatgataacaaatattttattttccttttcgaaaggagatcacaattaaattattaattaatgtccgattgaaaatagtttttttttttttgttgttgtgttgttgttttttttttttggggggcttttttatttttacactttaaaataattttctttgcatttttacaaaattttacatagaaattcctattgcaactagcgctncaacctaaattgcaacaaaaaaatatatagaaacctctattgcaactagcgctgtaactactttagaaactcaaaccgtaaatttaaaaaaaaaagttaaaaaaatagtatatgaggtaattcctttttttttttattaatttaagagatataagttagaacaagtaggaaattatccatatttccaagtgttgtgtaaatgaaatagacctttttttatccggagatttggaaaactcttaaaccaactaatttctgtggttttcttaaaaactagtaaacaaattgcctttcgcgtctcattatttataaaaattttaaattaatattaattgaataattaaattgtattaaataattttaaatttatttttgtgtataatttttataatgttagagagtctcacatgaccaatgtgtgaaaagataatagaatatataagaggaattggctacacttcccattgtcaattggttttgagataaaacttcattcaccttatcccaaattctaacatggtattagagcaaaacaacaaaaaaaatgtctaacgattatccaaccaaaaaaaaaaaaatcgattcggagtagagctgaaaaaaaagagccaccaaaaattaaaaataaattgatccaagagccaatgtcaaaaaaagctacttgtgattcgaggatagtaagccaaaaaagagtctcttatgatcgagttgtccaagatggtaagcaaataaaatagttgtcatcttgagggtgatgttaaagagtctcacattgccaatgtgtggaaatataatagaatatataagaggaatgagctactcctcccattgccaattagttttgagatggaacatcattcacttaatctcaaattctaacaaaaatataattattataaaaaaataataaatatttataaagaactttaaagaattctaaaaaaaaccataatacaattttttatataaaaaaacacgcaaaaaaatatcttcaaaacaaatgtcatcaccatatctcacttgtagtcactactatatttaaagttgatgtcattatcgtatctcacttgtagtcatcaattaattttcttcttactagatttactctttacataaaataaatcaaacaatgatcgataaatattattttttagaaataagcgaatcattttattataaattaattttgtgaatcatttgttctcaaataaagtagaataaaaaatttaataaactaatgatctttagttaaataaaatagaataaaaaaatgggaaaatgagagaatttaaagtagaataaaataattagaaaaatgagagaatggatagagtttttttttttcaattaattaatgatctttaataaaataaagttgaataaaaaaatgcattcatagctaccaagccataagtccatgatagggtt

SEQ ID NO: 22532 - DNA, 2041 bp, Cannabis sativa
ttaatgagttaagcttttcttgctattgctatgttttctgttcttaattgagttttactcttctggtttatacctcctctggtttttacctcttctcagcttgaatagcttctacatggtatcagacgtcttccatggagtcctcgattccatctccagatcctacaccttcgactgttactgcttctccaccagatgtgactgcgcaatcccctgcctcctctgttcacaatccattttccagttctttatcgacatccctcacgatcaagcttgatcgtgccaatttcctttcttggaaatctcaggttgttccagccgttattggacatgatcttgatgctattctcttcaatggcattccacctcctcaaaacttgatcaatggcaacccaaatcctctctatcaacagtggaaaagaaatgaccaacttcttctttcttggcttcgctcttccatgacagaaggcgttcttgcttctgttgccaatcatcatacctcctttgcggtctggcgtgctttggaacaacgatttgcgagtcaatctcgtgcgcggcttttacagctcaaaggtcagttttcaaatgttcaaaagagaaatctgtcaatctcagattatgtggataaggttcaaactcttgctgattctttggcaattgctggtgctaatattagtgatcaagatgttgttcttcagatcttgaatggcctaggtgctgaatttgaccctgttgtctctggaattacttcaagaagtgactctttgtctcttgatgaggttcaagctcttctcatgtctcatgagagtagacttgaacatcacagtaccatgaccgacatctctatgaaactccaagcaaatctggccgtaggtaacaatcgcaacaactctggcaaatatatcccaccagctgctcgaggaaatatccctgaatctttttcaagaactggttttaaaggagcttctcgcggcacctttggttttcagaatcgattaatgtgtcaactttgtcttaaaattgggcacacggcagctgtttgtcactatcggttcgataagaattttgttcccccgaaaccaaatgttgctgccccccgtgcgtatcttacagaactcgacatggacaatgagtatcaggtatataattccactatcctacctgactttggtgatgataacctttggtttgtcgatacaggcgctaatgttcatgtgacaaatgggtctgaatctcttgaatcaccctctccctacattggcaccgagtctttagctgttggtgatggtaagccattacttatcactcatgttgggtctacttacttatctccccatacttctcatcccttgcgtttaaaatcggttcttaatgttcctgccattaaaaagaacttagttagtgtttcaaaactaacaaatgataataatgtgttccttgaatttcacaaacattgttgttttgtaaaggacaaactcacaggggctgttcttctcaagggaccggttaaagatggcctatatgtgcttggtgattcaagtcaatcctctcctgcattacaatgcaatctcaccactgtatcttcctttaattcctcccctactgattctacacatactgctccttgtaatactcatgctggtttaaacatagaatcatgtactatgccaaatgataataaagaatcagtttttgcctatccttttaattgcttttctactgctttaactaccactttgaaacaagatgttaatgtttggcatcaaaaattaggccattcgagtactgctattttaagcagaattctttccaatgtttcacatagtgggaccttaaaagatttacaattttgtgttgcatgtcaaaaaggcaaaagtcataaacttccatacactatttccactagtcttgcttcacaacctcttgcattaattcacaccgatttgtggggtccttcccatgttgcatctaaagaaggttttcaatattatattcattttatcgatgatcatactcactatacttggatttatcctttaac

SEQ ID NO: 22533 - DNA, 2937 bp, Cannabis sativa
aaaaaataccacatttttctctgataaggcttgttttttatttctgttacctagaaaatgttgtatgaataatgtatgattgttctgtgaaatgatttgattaggttttggtagggtttgagaaattgaaactcaaggtttcccgttcttgtgaaaaatagtagaccatttttggagcagaaaaaaatggctgtcgttttttattttttgagaggatcgaaatttgtattttgaccataacttttcacttggggtgtccattttagacgttctatatacccttttaaatcttgcggcgagctctgcaatatggtatatattttagacccaatgttttactttagggtgtttatactatgaagtttggtagaaaaacttatgttattttatgcaagtataggcagtgtttgaaatagatacgtatcggtttaccattgttgcaacatagggataagattatcaggaattttctctacagccgacatgcacgaatttggattaaaggtaagaaaaatatatatgtaccacatggcatgccagatacgattaagatcgtttgtgagttggttgattatgaaagcaacgagacagtcattacccttatgagaacaaggtgacagtcattaccattatgagaacaaggtgatggtcattactgttattagaacaaggtgacaatcattattgttataagaataaggtgacagtcattaccgttataagaacaaggtgacagtcattaccgttatgagaatatagtgacgatcattaccgttataaaagcaaggtgacagtcattaccgttataaaagcaaggtgacggtcattactattatgaaagtcaaaaagtgatcatgacctatatgagagaaaagtcatgactataaactagaaccattgttaggttccatacttgtctgttatctccatagataacgacagtgacatgaataccacgggaggtatttgggttgatccatatgagacaaccgggaaaagtaatgactataaactagaatcgttgttaggttccctacttgccggttatctccatagaagggggtgttatttgggttgatccacatgggataacggggaaaattcatgactctaaattgaaagcattgttaggtttcttacttgttggtgatcctaattaggtagcagcaatgacatacatagatgtcaggttaaagtatcaacttgccttattagataatgtgatatatggatgctaggttagggcatcaaacctgccttattaggtaatgggatacatgaaagctagggaatgatattcaggttgtttgatttgacaacaacagtaacatttaaatatcaatttttaattatcagggttgttttactaaacaacgacaaagacattagtatgacaggtaagggttttcatcaaaccgtccacatagcacaaacttcatgtaccgcaccacactgcataaaaaattggtttgaaatcctttgcagtgcgattatggtttgtatttttgtcaaacagcacagtacgatgcgtgttgtggttttaaatttaataattgcagtttaaaccgcaccacactaaatattataaagttaccaatttgtacaatagaatttttattttattttttcatatgatgacaaatatatgttatatatatgtatattgcattattattttagaaataattgaatataatgacttaatgattagtatatattttatgatattaaaactttaataagattatttatatattgttaaaactttttattagattgattttaaaattttaattattatgtttgataataatgatagtgtaaatcgctcaaaatacattgtaccacattgcattttcgtagtgtgatttttgcaaatttaagaactcgcagtgcagttgcgatttgagaaattacaaaaatgcatatgcaattttgtttgaaaaaaatattacaatacgcaccacccgcaccgtgaacacccctaatgccaggtgagacatcaaaatattttgctaggaaagtagtgagaatgattactttatgaagtaatgactatagtttttatcattggaatggtaattgtgtatacatgtatttctttatattgacatatattgtgtttgaatacttgtactaacccatatttagatatatgagtaatgtacgattgtgtgattctgatgatgtgagtttacttgttgatatttgtgtgatgaattatatgattgttgttattatttttcttgttgagtctttgtgactcacgggtgacttgtagtgcaggttagggcaacggaaaaccaagacaaccatgagatgaaaattctctccaaaaaatgcacatatcgtcttatccgacttgtgtggtcaagttatcaggagttattttggattgtacctgatgtatattttgacttactttcgtatatagcccttttataaaacttttgtaactggggatccctgaaataaatttttagcaatgtcatcctatttattgctatgattttattatagtgaagtttaaactattatcacgaatttaattaaatagttaatctactatttgtaaactacgtttcaagagcacacgcgtgacatccctagggtttaggacattacaaaacgtattaaaaactcaaatacgaaaacaacaccattattaaatatgtcacctaaactcatttatttcgtgtcgtttttgaattgcttcgtcatgttgtgactcatattgtcaaccctactatatatacctcaaggaagcttgatttgaaactttaacatcttcaaaacttcaaagcaaaaaggagagatgttcttcaaatgtttgagctttttctcagagattttgttgtgcaaaccaattttgtcaagtagaacaatgagtaagttctcttttcccttttctgaatgaattctctctctctctctctc

SEQ ID NO: 22534 - DNA, 9383 bp, Cannabis sativa
tttatgtatgcaaccctcgcaatgcaacctgatcttcaaaaccaccgtactctgttcacaaataaaatataaataaaattaatttcgatttattcttttttttgtttaaaatgtgagtaaaaaaaagtcataaaaactcagtgaaaggaatataagagttccaatctaaatacacaggaaatttcatcattgactctaataatggtgtggctcgtgtgatgttttattacctgttttggcttttgaacttcggcaggcttcttctcctcagcgggtttcttttccgccgccggtttagcttcttccggtttcttatcacctccggcatctttcttcggcaaaggagagacaagctcaactttcttgttgattttttgctccaccttctctttaacggctaccggatccactttcccgattacggtcagtttattagcaccgatgtcaccagtcaccttatcaatacctataaccaaaaattatacacaattaacaaaaacctaatttttcaatcatatattttaacaattacaatttcaatttcccttcgtctaaaacaaaaaaaattgaataattaccttggaaactcttaatgattgctcgtttaattttcttaacgcaaccctcgcaatgtagatcaagcttcagaacgatggggactggtccgtcgtccttcttggcaccggaatcaggagcaacggcggcggcggcgggtttcttatctccgtcattctttgcggcttccttttgctgccattgttaatcaacaaaaacaaattaatataccaaaaaaagaaaaagaaaaacacatctctgacatatatatcagttctaattaaaactagggattgaagattatagaattgaaaggagtgaatggagttcagtgaggtgtactaacctcgcccatgagtgtagagaaaggagtattagatttgatacttgataagaataggaatatgaatatcgaagattgtaaaaggaaagacttgttcaaaattgaagagttgtattggagagaggaaaaagaggttgcggttgtcttatataggccgaaggaccgagttgggtttgttgggatgagggatttgatgtatgtatgtatgtatgtcataaaatctttaacggcatcatgggacataataacttattagggttattttcggtatttacttttattcaataggtcataattaggctgcttctgttcaccaattttcttttttgtttcccaaaattatttacttgtgaattaagaagaatcattatacaattgtaattacaacttcgttcctcttcagaaaaatagtaactagcgtttattaaaataagaaaattgtggagcttcattcactaattaataaacagctgtttgattttattttattttaaaaaaaacaaatattgaacagctgtttgataatggccattctttttatttcttaacattttaaattattgacataatgcttatatatacatttagaaatagtgatttaaaatcatacaaagatttaggacaatcttacacgagtgtagtatcggtgctattattttttattataaaaaaaatctataatatatataatgggattatgtatagatgtaatcatacacatgctaatccaaataaacaccaaattaatattgtcatccaaatttctcaactacaactactatatttatcaaaaataatagtagaaaaaactactaatatcgaaaaaaaaaaactactatatttatcacgatttatactaaacagctaaacaataacatatcatagtaaaaaacggcgaaataacgattttttttaaataaataaaagtgtgaaaaacaataaaacgatacaaaattttaatacttaattatttccaaaaataaaacaggaagcatataaaacttaagaaacattaaagtaaaccagcaatagaaaaaaatgacacaattttattataggatagtttttaaaagtaattatgtaattattagtaattatactatattttaaaatataatatgtatttaaatatgaggtagtaattaattaaatatgaatttccaaatatgttattttactaaatagttagtaattatatgagaagataatatatttttagtaattgatgtttaaaatagaaaattttaagtaattatatagtgtaattacacttttttattagttcataagaatttaaaagtataattcaaactctttaattacttctaattatatatatttttttgaaaatacttctaaacatataattatagtgtaattacaaacatgtcaaattatagttttccaaatccaccctaaaaaataattttagaatctttattttattttatttttaagattcttaagtttgaagtttctccttttcattaaaatatactaatactaattgtctaaagtggtacttacgtgcggtcttgacattttagaagtcaaggtaataatgtattaattcaagtgatgtataatttttggaaattttgatagaattttaaaagctaattattgttaattatttaggctctttttactctaaaattggctgaatggtataactttttggattttgaaatcagtaaactttgaatacaattatcaaattattattgcatattatatagcaatatgaatgtccttatatccataaagaagtggagaattttgtgtaatatatgcattgcaccaattcaatttttttcttcgattaataaattgaagattaattgtatggagcattattttaagtgtccaatatcctgcataaaatgtaatgcacttcaattaatatcatatatttaaatttaatttataaataatattagggaaataacaataattttactttatttttgttataaaataatattggttatatagaaagaaataagagatcgtagaaaaaataaagagaagaagaaaatgagagagtaaatgagatttttctatattttaatgaaatttttttatattttaatggggtgaactcttatttatacaaaaatatggcgaaaataataaaaaactaaatcaatgaaataaaaggaaatacaataatatttatggtataattgatttaggtgatttagacatttttatctatataatatttcataatactatgtcataataattgtctcattaaaaatcttgccagaaaatttattaagaaaaactaggccaatgaattaaatttctctcatttaggcattcataaaattttctaatcgacgaattctgaccgatcttatatatatgtcatcttctcaaatattgatgtttgtaataacattataaataagtctgcaagattgacagttcattgattatgctggacactcttgaaatgtatagtaaagaattttgtgaaatgtattttaattatatttttttcaatgtgccttctttttagttgaacattacaagcagtattatcttcatagagaaatgttggtgttgatacttttttatttagtgtaattaatatgtttcccgaatatgttatgtcatgatctcactctcacacattctctacttgcttcataaagtgcaagtatgttagcatataaaatttaaagttgtttctcgtgttaaaaactttttgtcaaaatctagtgggacaaaatctgagcttaagaaaaagagtgcaatatatatcatattcataattatttgaaagttgtctcgttaaaaaccttgtcgggaaaatctagtgggacaaaacttgagctaagaaaaaaaagtgcaacatgaatatgtctctccctcatgcacatataatttataattattttggtgataatatatctcataagattattgttatcaattttaaaatatcaccgtatattatctatgacaatatatgatctataactcttcaagagtgtatgtgtggacttctaaattatgaacgagaagttcctagaacatcaatatttatccaactaattgaatctttcatatgtgtgtatacaactttattcgtatcaaaatttaattttaaatagatataataataacacattaataataataatatatttttatttacgaaaataatagtactccaaatttaagaaaattgtataaaaaggcaaaatataatttgcataacacaataattacctttagaagaataataaatttttatatttaaattgataattttgtaattttattaattatttttttttcattatttccaccttaaattaaatatcaaacaaccctaagaagattaacaattctctctatctaatctacttcttcttaacctcttcatccatcttattctccctccctctcatcaaatataaccttaaagtactaacatttaatacacatcattgtaattagtgtgtgtataatttgaatatgtatttagcattactcataattcttttgataaatgttaaaggatatccgtggtgtctagtattttctaaagtatcaatatcgctatcggtccaactaagtatcggatttcatataatttaatataatagcttttagcgactatgaatagccaatcacaacctaatatatcgagaaaatactagacaccattaaccattagtacctactaatagcaatgctcaattttgtttctaatggttatgtaatgtaacttagagcaatatcatataaatcagaaatctttacccatattatatgccaaaataatggtaaatatacgttatttattatgaatagtaattgaatggcagtaacggtaaggtaatatttggtattaatgagatgacgtcagtgttgtcgcaattgggttgctgtttgccggctggttagactaatatggcaaatcggcattaatgggctacttgggcttgatgacaaagagcggcccatttttgactttttgtatataattatgaaatgaccgatgtaaccctcatccttgttgatgaaggtctcctttattttctccgctggctggtccctttaccattgacactgacacacggtttttggtctcctccacccgacaggggtactatggtaaaactatgccatgacatttttatgttactagggcattgcttccactgtttcacttccatgagaggaatctacacggttcgtgctgaccactaattgttaaaacttgagtttatcaatggtcaaaattgtgtgaaaagagtttgactttttagttttcaatgaattacatatatattttatataaaatatgatatagtgagcttcttgatcaaactattgaatcacgttttcaaacttttattataatgttgttattattaaacaaatatttttttaaaactaaatgatgtttgaatacgtttggcctagcttggtgtgcgcattttcttattttattttattagttttggtgctttggttattacataatgaatctacctttgatcattatcaatattgtgattattactaaggaattgatattttaatggaatattttcataattgtatgatgacttgatcgagctatcatcatgaggaaaaaatagaaaattaagtttcttaagaatatcaaaaaagaaattatgaaaaatagtacgaacataaaatgaaatatttagggacaagatcaacagaataaatgagagtaagcataaggaaagataggatatttttttttttttgacgaatggaaagattaaggatttagagatttataaattacaatttttttttctttggaatgagggataatagtaatacaaatacctaattatttttagttatccactgatatctatccaaaccattataaactatacatttatttatatgttatactatttagtgtagtattgagtgcaaattttatgtatatatttatatgattaattagagattttattatatcaaggaacaaaaataaagacattacaattgcaatattgttgagaattgtggttccatctcaaacccaattgaaaataagtggagtagtctatgttcttatatatggctcaattatctaccatttattctatgtgggacaatgtccacaacattccccctcaagatgatggctattttttgctcatcaatcttgaaccgtatcagagtgaacatggtcactatctgtataggtgaggattggataggatcacttgcctgcaacggatatgactctgataccatgttgagaatcatgggggtccatctcaaaaccaattggctatgagtggagtagcccatgttcttatatatggctcaattctctaccatttattctatgtaagacaatgtccacaacatatataaaatacaaagactaataaaaaagaatgattaaataaattacaacatatatacactatatatattacacatataagtaaggttgatgaaaaagatagcacaatatattatataacatatatataggatttttctaaggtgagaaattttaaaaatgctttatctgtgaggatttattataaaataggtcatactacatttttgtagatataaaaggaggtatatagccattacaatgtagagtagtgtaaaagattattattataatatatatataagattttctaaggtgagaaattttaaaaatggtttatctgtgaggatttattataaaataggtctcactatatttttgtggatataaaaggaggtatatagccattacaatgtagagtagtgtaaaagattgttattaatttataccgtgggtactcatcaaaaaaaaaaatatatactgtgggtcctacttatttaatgttttgttctttttttattttaaaaaacctattctttttattatacaataattaaaccagaagaatatatttttaaaataataagttacataagtaaacaatataaaattgcatgtgagtgttaacagtaaaaataacaaaagaatttaaaattacagatgtttgaagaaatcactcaataaatattaatattttatagctttctctgttttttttagatctaatcaaataaatttttcttgacttggcaaaagaaacatggtgaagaagaagaagatcgatggagaagaaaatgtcgtcagcgaatagtctaatggagaagaagagtgacggcttgaggagagagaaagacataaaggtcccgtttgttacacgagattggaattaggagtaagataaattatcctagtcctttgtttgtgagcataaattaattgaccagataaatagtcctttggccaaaaactaataacttttgtgtaagataaacaaacatgaccaaataggtggaattaattgggattgtcatattttttcctaattttttttaaaaaaataaactcatctattaatatctgtctaaaaatcaaatgcccaacatcaatccaaactaaaataacattatcgttcaaattaatcataaaattttacatctatttattgtaaaaaattctaaatctacaaactcatctcacgtagcccaaccaccttcaatcttgaaaaccatcggtcacctccatcacttatctcacacagcccagccatgagagatctagcagtgagatcacctttccatcgccattgagtccctgcctagtcagatcgaaagtgtcatcacagtgagtacctacaattgccgtcaagctcttgccgttgaagtcttcctaaacaccgccattttccaggacgatgatgcctcctgagtgcaggccttgcagaagcccacatctctacaaatatgaaagaagaagaagatgaggcaaagaacaaacaatgagcagaaaaaaaaaatattaccccaattaatgcattattcttttagtggggtttatagcattaaataaaaataaaaaatgaattaataaaaaagtaattataaaaaattggttagatgatacatttaggacacgcgagagacaaatatcatttctcaattaaatagtaaatgtcagaaaatatagttgaataaaaaaatattttagtcaatcctagtttaaatatgttgcatttaagaccacgatattacaatgtacttatccaattagaacaagctattaaatgccctacaaaatataaatagagcatttagaaaattctccagagtagaagagtcctatataatataatcatgaaaaaattcttttactatacttcaattgtgatcaactaaaaagaaattacaaaagtgtaatcaaattatatctcttgttcatgttattatatgtaaattaaaatatataaatcatatatctcttaaaaaatattatttatcacattttaatctatatattattaaataatataacacattattaaggagaataggttccaagataaggattttgaagttatgaattaacaaggttaggtcctatatagttggataggataattcagaaagggcagaaatgatgaggaacggagtgaaagtggagagccgtgaaacagaatttatagtcttttcgaatcgtactatactaggtataatgtatgggtgtatgagatttccgtctttgatcgtcgtagctcacgattcattcccaaactactctgggaatgtgtccaacaaagttgcttcatttcaagaggacaaggaagcaaaacaaaaaatccaagccgttaattacaacattaccttactggcgaaagaagtcaaattcttcttattttatttttattttttaaaacaaagaaaataaatgaaaaataagtttattttattattaaattttagttcttttcataaaaaaatttatttcatgacttttagatattatgaattcaaaatgcttgttcttaacttttttttttttaaaaaaaaaaaaagtagttaagcatctactgtaggttattacaaaatagggtataagagagaagaaaaaaataggagagccaaacaaaatgaaattacattaataaagcaatgagtgagccttatatagctcaagttcaaaacaagtacaccagctgagttagttacaaagttaggatagctcacaacctccctaactaacaaaactaacactaaaactaacgaacaattgatatactaactaactaactaattccctactcttaaaactctcccacaagatggagagctaatgctcattaatcccatcttgtctgtaaagctattaaacagagtaggaaagagggcttttgtaaagacattagctagttgattcttgaaagaaacatgactggttttgatcactccttcttgcacctttttccttaccaaatggcaatcaatttctacgtttggtcctctcataaaacacaggatttgcagctatgtattgtgttgccttattgtcacaataaagcaaagtcgggcccttgtgttcaacattcaactccttaagaacagataataaccaaacaaactcacatgttgt

SEQ ID NO: 22535 - DNA, 2695 bp, Cannabis sativa
atgaacccgactaccaatcccaccattcaagggctcaaaacggtggataaaggcaaggcgattgctatgacagatcctgttggacaattaatttctgaacaacaggttctaaaggggaaacacaaccatactcagcaagcggatttacacgggataagtgggaaattaacgaatactaagagaagcggttcttggagaaatgaggagttcaacaatatctttaaagaccataatttattcaacagccagcacaagaatggtctacaggggcctgcaattgattctctaaacattgatactgagagtctattggatgttcctgttacatacacaaccggttgtgattttctttcaaaaattgaaggtccaactaagcggaggaaggtgatcccgaagagaaacaagaacaggaaatgaactaattcaaatgaagcaatctcaacagacccgatgatagcaagaaggaaggatgatgcaaaggaaatttcagttgtttctgatttgacctttgctatgaacttggaagcggcaaactcagtagcgctgggtcgccgagagcaatgatggcccttttttggaatgtccaagggcttgggaacccttggactctaaacaccttgaaatcccatgtcaaagactatcatcccgggatgatattcttgtctgaaactcgattaactagtgctcgaatggaatttgtccgcatccaattaggctttgatagttgctttacggtggatgctaaaggcaagagtggtggtttggcgcttctttggtcaaaagattactcggttcagatcaaatcatatacggtttcacatatagatgccattgttgaaaataatctgggtttttcttggcgatttactggtttttatggcattccggattcgggaggacgaatggaaagttggaaacttttgaagcgtctcaaaaccatgttttcaggtgcttaggtttgtggaggagattttaatgagatcattaatcataacgaaaagagtggaggaggtactaaacaagattacttgatgcgtaattttcgtatggccatttctcattgtcttctaaaggaaattcaagcggatggagatggttttacttggtgcaatggtaggacagccaacttaatctttgaaaaacttgacagaatcctttgtaactcggcttggaacaagaattttaagcagaatacggtgtctcttttaaactggtggaattcggatcatagacctttgctacttcaggctcagctcaaggataaggcgaagttttcaaaaagaaatgggggcacagatttcattttgaacaggcctgggcggataatgaagagtgcctcaaaattattaaggatatttggagacaaaatgatcaccaaaacccagtatgtaaattgaagcggctgcttgctgattgtggacagcattaaatcagtggaaccaaactcaaaagcgtgaatcagtagcacgaacgaaggagttaaaagaaaaacttggaagcattgcggattcagtaaaaataaatgattggctcactaaaaatcggcttgaacatgaccttaattgcgtggaggaaaaacgagagatatattggaagcaaagaagtaaggctctttggttaaaacatggagataaaaatacaaagtattttcactttaaagccacttcaagacgaaagaaaaacacaatagagggtctctttgatgataatcaacaatggaaaataaaggagaaggatgtggaggatattgccatttcttactttcagcaactgttcaccaagaaaaataatggtattgatattgctgatgttctcagaaggtgtgtcccaaaccgcttaagttcagctgaaaatgctcttttaatggagccttttacaagtgaagaagtgaagatggctatgttccaaatccatcctctaaaagcgcctggaaaagatggattccggggctttttttccaaaaaaaaactgggatgtagttggaaaggaagtgactcaagcttgtctagatgtgctcaataataatgccaactgccaccagatcaatgaaacactaatttgcttaataccaaaggtcaaacagccaacaaagatgtccgaatttcaccccattagcctctgcaatgtgatatacaaggtgatttctaaatgtctagctaatagaatgaaacaaagtttaaattcggtaatttcggacaatcaaagtgccttcattggaggaagaatcattcaagacaatgcgattattggttttgaaagtctccattgtatgaagaaaggtcgttttggtaatggaaaaaagatggcagtcaagttggatatgtccaaagcttacgatagggtcgaatggaacttcatagaagcaataatgggtcatttgggatacgattctcaatggattacaaaaattatgaactgcgtaaagtcagtttcattctccattctcattaatggatccatcaaaggttccttcctttccagaacgcggattgagaaaaggtgaccccctatctccattcctttttcttttatgttctgaagggctttcttgtttaatttttgaagccgaaagagctggtcgaatacatgggctgcgatttggtactatggaacaacgattgtctcacctcttatttgcagacgacagccttatctttctggatgcaaatttagaagacagtaatgccttaaaaga

SEQ ID NO: 22536 - DNA, 8784 bp, Cannabis sativa
tctaatattaaaaaataaaattaagaaaaatttatataattgaccaaaattttgaaaaaaaaaatacaaatatatgtcaacactaaactttcttatttgtaaaaatacaatttcgataaaaataataaaccacttcttttgattattttataatttatttataattgtattgtagttatcataaagataattttttgattattttttttttgttattttatagtttattttgtagttgtcctaagattgatttttagttgttttcttattttttgttgagaaaattgtatttttgtaaaaaaaaaaactttaagttgtaaaattataaataaaatataaaaaatgatatttttgaaaattccttcaaattaatttcataagatcacttttaatattttttagctttccttttcataatattttgggttaatttgaataattaatttataatcttttttttttttttatgaatcaagtgatgtttcaatactccatatctcaatttgtacaatctacaagcattcttaaattagaggacctttaagaagctataatatttacattgtgtcaaaccgtacttcatcactgttagaaattttttttttggccatatacatgaaattcgacctttagttacattcttaatttgagtaattactgcgttgctattttcaactttgttttcccgaaacttggtgtttcgagtacaccggatagtgtacaccaggactgctagtgcagcaaccaaagtggacttcttaaatttgctcatttttgctttacctagccacttgacagcacttaccaaggaggtagagttcatgttacaatgaaaccaatttcgtttggtttaagcaatcctgtgaaaaggagcaagcaaaaaatagatgatccaccgattgctcttcattgctgcagaacaaacatgtatctaattaagtattgaactttatagcctatttttagtcttgagtctcttaagcatagccaaccacaaaataaagctgtgcttgggagagttaagtcgactccacacaatgacaagccaatgctctttagttactgcagggacaagttttttatatccttgtgcaatctgatgcttgctccttgtattttccctatatcatcactatcaaacagctcattcattttctcctttaaagtaactaattctctcaaataccaactatcactttctttaacactgtaattccacaaattatcttctttaatatacacacaatgcacccatttaacccataaattattttctttcttagcaacagtccacacatatttaaacatagcaactgtattccaatcagaatcctgtttgagtcctagaccccctgttgatttgggttgacaaactttgctccatgccacagcagcagccccagtcagattttggctggtactccataaaaaacccatgcaaaaatagcctctatgtctctaacaatacttttaggcagaaccattaattgactccaataggtgtgaatgaccatcaaaattgaatttataagatccgctttacctaaaaatgatagatttttagagtttcaagttctaatcttggccacgattttttccactaggattgagcaatcctttggagaaatttttttaggacaaattggaacacccatctgtgtcacaaatgttattgcagtagacaaaggtcttattaggattaggaaataaacttgatgtttgagaaaagagcttgagtccctgcagcataaaataaatgtatttgtagtccccattgtaaaagagcaaaacatcatcagcaaagctcagatgattaagcttcaactgccccacatctctcatggtatttggaatccttctttagccccactttcttcataatcctagacagatacttcatgcccaacataaagagtaggagagacataggatcccctcgtctcaatcctctcttggcctcaaagaattcatgcatggatccattaaacatcaaagagaatctaggtgttctgacacagatcatagcttgatgaagcttgctggaaagttgaatgcacaccacatttcctcaatgaattcccattccaaggtatcatatcctttttgaagatccagcttgatcatgcaattggccttgcttgttttcctcccataatgcctaatgagatcttgacatatcattatattgtggccaataaatttcccttgaacaaaactactctgattctgtgaaaatacattcaaatatacataaaaatataaatatataatcggatagagtaatagggcaattatacacatgtattcgtaccctaccctatacctgtattgaatccatattttcatacccttattttatcctaaactctattcaacgcgtaataccatactcgtaaatgtatttaggtaaaatggccatcccaaatcaaatggcagggatataattgaaaaatgagtaaagattaacataattttttttttgacgtaaaattaacataatttgaatatatggtaaacttggaagtttttttgttaattggtctatttttaagcataaaaagataattttgccaactctctaaataaatttagaaaatgaatcatcgctataaaatttgtcattaataaaaaagttggagataattcgaaacaaacaaattgatactagtactagtcaagaaaagctaattaattaattattaagcatccgccacttgagaatttcgtacatatctaattaaaaaaaaatcaaattatataagaatcaatgtaaattcgtatatcgattgatatcactacattgggacttaaaaagtagtttaattaagaatttaaatagaattgcacccatccatttattgctattgagaattagtggtgcccaacactttctataagtatcactctatgattagttaacgatattattccctaaaatttattttcttaagttatatgtgattcgctatttaattacaccaatagcagtatgacattaaggaggatgctagacactagtagtgccctttagcaacatgaagccaaagtttttttaaaatttaggaagttttatctacaccgctaaaacatataattaataatttttattttatatgagatatatatttaattttttctaaaaaaatatatatttaatttatattattatttgtttttttaaaaaaatcttcttatattcttaaaaaggacatatataaattaaaaataaaatatacttaatttaaatattataacaaaaaaattaacataacaaattatataaaattttattagaaaaagtatatgaaaataaatataaataactagtgtgaatgatgagaattctatccaggatcctacatataattaatcaccactcattgaattatttcgtgagaaataagttgaaaaaaacaaattaaggacattgaaaatttagtgtttcgtatcataaagtattattcatactttggaggtcatttcctagaatacattttactgtgcatggtatcaccacattatgatgaatgcggttgccaagtagattgcaacatatatagttattcatgaagccaaagtttgacaagaaatttcacaaggttattgaaatacagatccactgttgaatatcttgagggtattaggtgtgaaaagtgggctcatgcttattgttcaagcaacatgtacaacataataacaagcaactatggcgaaatgttcaataacaagagaaaaaaaacaagaagttttacaatcaatactttcattgaattcatcaagttcacacagcaaccttagttttcaaagcgacatgagaaggcatataagtgtagaacacctttatcgttctttatggaggaagacttggcattacaatgaaagaatattaagtactttaacatcgatgctagtggtcctagtaagttcaatgtttaaataggatgtaatggttcaaagggtagtgacaatgcttatgagccaataacacaccctcaaaaaaaataagcacaacctcagtctatgcttgttcaggataaagagagagaaatacaaaacacaacagacaactaaaatctaaattgatcttttagttagtttagagagacatacataacacaacagagaaacactagagatttgatatcagagttcactcaaattctaggattacgtctctgtgaagctcgccttagagatgcttgattatgtacaatcaacatcaagctacatatatagccaacacaattcgcctccacaattcattgccaaagaaagttttttcaaattaattgcattcacctttttttaatacctttttaggcaaaatcataatttgagccctttagaaatgtaaccaacaacttatatagacatttaacaacattaaccttaaaggtaaaaaaaattagtaaatcaaacttctttaaataataacttttaatatataaaaatataaatttgaacatagaaaagatgaagaagataggccccaacaaattaattaagctatagatgattggccccaaccaaaagctatattaattaataaatgaattaattagttaattaatgttacttatcgttacaaattgtggtcacgttttacttgccttgccgaaagccaatataactttgttgttgtgtggcggctcctttgtccttcaaagtaataatctttttctcacctatatatatatatatatagctatatatatatatatgttactctttcataattattagtaacattaattagttaaaccccatcatcacattatatgtgaacaaacctaacttattattactcatttctttctggtgttaaatccattaatatagtccagtgcgaaaaatgctatataatatatatagctaggctatacgcatacttataaggttattttttgtgtacataataaattaattaggttaatcaactaatagtatagtactataatatacagattagtactattcttagtatctcaaattaaaaattaaagaataataaaagaggccgggtttatagtgtataaaaaaaagaattatttagtaccacatactgaaatttttaattttttttaccgtaaggcagaattttcttcaaaaatactgtgttttttttttttcaaaaatattgtataagtcttatgctgcgtgctgtgttaagtttttatttttgttatacggttattttttagttgttctactgttgtttttagttgttatgttttgtattccacggttgttttataaaaatacagtatttttgaagaaaaaaaatcgtgtgatagtatttttgtaaaaattaatctaaattatagtatttttgtaaatttgtaaaatgaagttaaaaaacttaagagtgagaaaaggactaaaacattaatttaaatattaatgatgatagctaaaatatttatcattttatatataaaaaaataattatatatatattgcttctatcaagtccctcaagttgattagagtctttgggcaaaaaaatttaataattggacttttttatatgaaaaactttatatttatatatagtggtgaaattttaaaatataatattttaaaaatataattggatctttattttataaaatagtagaaattatacaatatatgtaaaaattataagaattaactttttataacataaataaataatattttagagttatgggctttttagttttttacattagtatgtatttttttatgccatatttttagggaaatttacaaaaatactaatttttggtctaatctttacaaaaatactgccacacgggagaaattacttttatattgtcttggccattttttttttcttttatactgtaaacacaaaaaaaaaaagagacctccattttccacacccacagacagaaccaccataggaacactcagaacaatcgaaaaacaagcattgcattaattcttatgagattgagaataaataggtgaaatcgacgtccaataaataatcatggcaaaataaatgtaaaacaatactaaaacaaatcaaacaaaaaaaagggaaacatgattaaaacaaactaaaaattgttttgtacagcctcaatgcaagcccaatcttaaaaaaatcataaccaaaaaactactaaaacaaaacaaaaacaaatgtaaaacaataagcagatataagcacttcgaaaaacataaaaaaaccacacacctcaaaatattttttctaatgagctcgtcaaatatatttttaaaagaaccaaaataaaaaaaaataactacaaaataaccatagagaaggaagaaaaaatgtattttatagcctccatcttccatacttacggatagaagaacaacagcacaacaagaacacccaaaaaacaatcattaattccagtaaaaatagaacaagaatagtgaaattgatgttaaaaaataaattatggaaaacaaccgtaaaacaacactaaaacaaacatgagatgacctttgcaagtctaagaaagatggtgggttggatttctaagacattaccttattatggaactagtgtgctaccgaaaagcatgtttgggctatttctttaaagaaagacaatctttgagtgacatgggtgaatgcaaatattttaagaattagaattggtgttggtattggagaagaattgttcaagtcaaggaaaggataaagggtgtgtttactcaaaaggattttcaaaaataccaattttccatagcccatctttgttccaaaatggcgcaaggtaatgggaccagatggcgttataatggtatttgggatagattttgtcttctcaaacacaagattattatctagttattggctttgaagaatagactttcaccaattcgttaaattgtttagtgtgtggaaatgggttggagagccattgccacctcttttttggctgttgttacagcaataaagtgatgcacaagttttggctttggacgactggtattctactagctcggaaaaaagagcttcatgaaatccttgattagaaagacaaagggtctatatatgtaagtgtcattacaactatgatttattacgtttagcatgctaaaaacaaagtactataggaccaaaaattaattattatcaaggtcactttttttttggacgtaaatgtcaatattaattgtattctttattttataaatattaagaaaatgagtagaaagaataaagagtgagtggaaactttgcataaggctttgtaagtaattttaaactttgtaattgtttgtttgtgctcagtatacttgatttagcaaaaaatatatatatcatattccctttacaaaaattaattatatatttatttatttataatccattagttttgttctgtgaaacaatatactgttttaatttgtttaaaaatataactaaattgacagaaaatcaagagaaattatagaaaggaaattaaaattattcaaaagtactcattttcacaatttattgttttctaattttttttctttttttaaattatattttttgagttacttatatgatcagattcgatctcataaccctacacaccttataatataccttttatatgaacacttaaagctaaccttaattaggtgagttaaaaaagtcattaccacaatcacaagtaattttatgttacttatagaatattgtctctctcactttaaattttgaggctggatgcagctatttttttctgaaggattaggtaggttttttcattacatacacttacatatatatatatatatatgtacgtatacatgtatatatatatatatgcaccatatatgtgaaatgtatctttaattaagcaccgaattatgacattcatgtggtagcatttaaagatagggtagctagctactaaaacacctctctctttctgtatgttagaagaactctgactcaataaacatgtagtactatatatatagtctcattcatcaatatcatatctctttattattctatgtatatatatatatatctacacattcatatatagaccagaccaaaccactactactactactacagtattttaaccaatttttaaggaaaaatacttactgttataccatgtaaatatttaatattgggtccatgtacatttaaattgaataattattgtaaaaattattaactaattttaaaaatgttatttctgagttaaaattattttagactctgtattgattagactttttattttaatattgaaccttatatttttcaaaatcataccttaaagtaattttttgtcaaaataaaacttaataataattccatctagaagtattacaacaaaaataattacgtacaccgtatctacttgtgtaaagatttatcttcaagttaattatattaaaaaaaattatcgaaaattaaattcaaagtcctatttatactattttgaaaaatacaaaatttattatatcatttaacaaaaaaatatcaaattaattaataatttttaccgaacaccaaaattcaaaattcaaaatatattaaccctaataataatattaaacaccacaccacaaataatttaatggttggatttaatttcatttatgaataatttgtttttcttattatatcatatatatcaattggtccttctagaagatcggcaggggtgccattagtactactgccagctgctttaagagagttcatctttttctcttttttccatgcaattatgtattaagttccaaagttaaattattgcatactgtaatcaatatataa

SEQ ID NO: 22537 - DNA, 3022 bp, Cannabis sativa
tgaagcttgtgaggagtaaaaggccaatagttgctccgaattctggttttctttcacaacttaaggaattcgaaaaatctcctatttgtaagcatttctttccttctaactttggtttcagctcatataaaccaatgtgatatcatgcaaatggtgttgttcttttggaaattgaaacaggtttagttcttaatcaggatgtagattgtgatatgatatacatcttaaagaatataaaatgaacctttggctgccaatttatgttcagttctataccagtccactgcatgatctatatttcttgatggttgggtcaccctagtaatttataaatattctttggaattacaataatgagtggtatagatattgaaggaaaggagtatatccaagaaattaatgtatagtattagggttagtactagtgcctagtggttacagtttgtatcccacagtggaccatatttaaaaaaagttgaaagatatagggctttatgcaaaataacacactttgagtctattaatatgctatagattacctctacaattagagcctatccaagtgctatttgttgagaaaaatgataaaacttcaagcgcagtgtaacaccctacaagctaagacacattatgatgttttcttaagtactgtgctagccattgttaatcaaagaggttttgatttgtgctaacaaccatcttaccataaagtctggtatgtgtatttgtaactctaaaaaaattttaagtaaaaaaaataaagataatgaaaattggcataaaaataacattttacaagaataaattagtaacttttaaaaattttgaccatgaaagtattaatattacaaaatacaaattacaatgcttgaataggtttaccacttccaactaaaatcagataatgtcttcaatgtctaaaaatataaaaattcgaaaaaaattgggaaagagaacacctagagaacgagcaaccatgaaaataacggcgatattgatcctcaaaaacataaaaactaaaaaaaaaaaacaaaaatcataataaataacaaaataaaatgacaaaaaagaaaagaaaaaaaaaacctatatagggttggtaaaccaaggccacgaggataccctcgacatgctagggcaccctctctatgtagtgtttcaatctttggccattcattttgaatttcctcccataggttgggtcttcaaccttaacaacaccatgtgggaagacagttttcacattatatggcccagtccatcgggatctcagcttcccagggtggagatgaaggcgagtatcataaagatgcactcgctgatttggctcaaattctttccttaggatctgcttttcatcagctgctttcaatttagccttgtagatcttaaagttgtcataagcatcattccttaactcctcaatttttgacaattgaagcttacaataaggcctgccacattgagatcaaaatttaagctttttacaacccagtatgctttatgttccagttcaacatgcaaatgggaggccttgccatagactattctataaggagacatgcttagttgagttttataagcagtgcggtatgcccagagagcatttagaagtctggaagaccaatctttgtggttagggttaacagtcttttctacgatttgcttaatttcgcgattagctaactcaacttggccatttatttgtgggtgataaggcaatgcaacctttttaagtacaccgtacttttgcatcaaatgctcaaaagagtggttgcaggaatgtatgccgtgatcactgataatagcttgtggtgtgccaaaacgagacaacacattttcttttaagaatttcacaatagttgtgttatctacatttcggcagggcacgacctcaacccacttggagacatagtctatgacaaggagaatgtaaatgtagccaaaagaaggtggaaatggtcccattaaatcaatttcccaacagtcgaaaatttctattatgagcattgggttcaatgacatcatgtgtcgctgggacagtgtacctaattcttggcaccttccacaagactggcacaaattgttagtgtctttgaacaaagtgggtccgtatagaccacactgtaagatttgggtagcagtcttttaaaagaaaaatgaccaccacatgcttcgttgtggcaaaagttcaagacactaaaaatttcaccatttgaaaagatatggatcatcctagtcaaagttacaaacttcgactaaaaatgtacgtttatcttgtgcattccaagaagctggaagctcactagtcactaagtaatttacaatatgagtgtagcatggtaacttagtgacgggatagagatgttcatcagggaagtcatctcagatggcagagccattaacgaaattagaaaactcaagacgagaaaagtggtttgctaccacgatttcaactcttttattgtccttaatggtcaaatcaaattcctgtaacaaaaagatccacctaatcaagtgtgccttagcatcctttttggaaaggagatatttaagggtagagtggtcggtaaaaccgcgataggggaaccaatcaaataggaacgaaacttgtcgagtgcaaatactacagaaaacaactatttctcagtagtagaatagttcatttgagcattattaagaattctacttgcctagtacacgatgaagggcttcccttcccttgttgaccaaggatgacccctacagcgtaattgctagcatcacacatgatctcgaacgacaacttcgaatccggtggctgaatgataggggcaaaagtgagtttggtgatgagtgttaggaaagattcctctcacttgggtgtccagttgaacaacatatcttttactaggaagttcgacaagggatgagttattgtcgagaaaatctggaggaacctcttatagaatccaacattcccaagaaaggattgaacatccttaacaatattaggggagggtagctttgatatgagttcaat

SEQ ID NO: 22538 - DNA, 4141 bp, Cannabis sativa
  modified_base (47)..(52): a, c, t, g, unknown or other
  modified_base (3005)..(3014): a, c, t, g, unknown or other
  modified_base (3280)..(3295): a, c, t, g, unknown or other
gcaccgcgcggtttaggaaaaatcaaaccgcgaccgcaccgcaaagnnnnnnaaaccgcattttttttgcggtgtggtgcggtgcgggcggttcgagcggtttgggcggtttaatgaatacccctaatataaagtatgaattttataaaagcacacacgtgacgtccctattagacagggtgttacagagagacagtgttttaattagttgcaatcattttctttagtttctcttctatttggaaaaaaaaaaaagaagataaagaagaagaaaaatagaagaaaaaataaataataagagttattggtttgggttacaaaaaaataaatctctcttctgtattgtattaagtggggattgagatagttgagcctaaatgacattttcatttacctttatctaagcctaacattataacattttaaagtccttttgatttcaaaacatttgttgttgacattagtagagaatgttaaataatgcaagcatattgaaaaaatggtttgtagaattatttagtatgagttgagcatatatggtggattctaaatattggggtcatttgtgagttatattatctatttctctaattgaactttaaggttgaactttgaggcagttgagcgaaaaatctggttaaaaatcgcaattgagattttaaaggaaagacaatgtattatagatagcaatgatgacttacttatgcgtttgatgttatttttctttttcgtttgtttaacttggtctttactggagggccagtaaatgataaattttggagaatttgttaggtttatttttatgtatttttagagtctattttagtgtgtgttttaatatttttatcactttattgttcgaatttatgtttggttttgtttttgtttatttttcaggagaaatattgggagatctccatttttacttattttagtgttcttcaagcctttttgagaaaagaaaatggttaattataaggaagaaggaaactccaataatgcttagttaaattccttattgcctcaaattagtcaaagtttgtattcagctctaaaattcatggtctatagtcaagagtgggcacttttcatgacctttttacagcctaccaaacaagctcttaatatttttttcaagtggaattaatagtttatttattaataataaaaatatataataatttcatgaataaactatgatatatttcttagtttaacttcataattaaaaattatttttcgtttttaaaaataaaaaataacttttaaaaactaataaggggcatttatattttttgtatggcattttattttttacattttctctcactgatgagtgcacattcatacactcattcttagtcaattattacatggattagtatttatttttgtataaatttgatgtgttttctccaagtgtgtaggtttgtgcttaaaagataattttgtgatggactgagatttttcgagttaatttttgacaatgttttcatcattttctcgaagagcttatgaaatccaaaatgatagagctcgttcctatctttttaaaatatgttaaatcatctcatttggagtctgaacgcgaaagttatgcatgatttactgagcaaggtcgaagcagtaaaaaagcgacgaaaaatggcatgtggcgctatagcgccgattctagaaaatatgatttttgcactgaaatgaagccttgaggaaatccggatggcgctatagcgccgtacgtgtatttttaaatttaaattctaattctaaatggattctttctatctttttgggactatataaagaatgatgtaattcgacttttgggacgactggggagaaaaaaacaagcaactttgagattataaaacacattgaagacatggagagaagagatttcaaacaatcatcatcaactatcatcattagagtcattttcttcttcttcttctttattcttttgtttaattatttaattatgaacatgcttattgtggttattatgtttgtgattatgaactaaaaactttttctaaagtgttgatgaaactatcttaaagtatgaattaagttttagattattctcatatttgttcttgctatttgcttgtccaattttgtgttaattatcatcttgttaatgttttatcaccattaattagtatagagattttaggttttacacttgagagaggtaatctaaaattagacttagaattgcatgacataagaaaagtgtgagattgagagattccactaattttataagtttcatttatagagaatcatattgttttattattgcttaattgattaacattgaatagagatatcttgttagttaattaagctaattctatcaccactcgagagaggttactaaattacattaagattcttgaaactacaaattatagaataaacgatgcaacgataccgcgcctcgcgcggttatttaattttttttctttactttatatatattgattttttatttatgttgtaaaaaataaaatttctgtttaatatatttaaataaaaaaattagtcaattaatatgttaatattctaaaaaaaatataattttagtatgttaaaatatcaagtcacattattttattaaattattattattatattgatatctatatatttacgagtataattatttgttaaaatatgtgaaagatttattttttttaaaaaaaagatgaaattactttaaacgaaaataaccacaaaataaataatttaaaattgataaattttagactcggcgcatcatctttgtagtttatattatatatatataaggagcattaattaaaaaataataacacaaaatctaataagtaaaataaattaaagagaatgactaatttagaaatgaatatattatcaaatatacaaaatctctcttctttcatggaagcatatatatatatatacacatatttatagtatgagatagttattaagtaaatatgttataataataataatannnnnnnnnntaataataataataatagtgaaagttataaaaataaaaagtcactattgataatggacgattaattaataaaatactaaacacaaatatttctttcattagcaaataatagtataaaaatagaaaaaattaaataaattcagaataataagaaaatagagaacataaagtacaattcataaaaaatgttatacgacctattttgtgctttctcttatatttatatatttatagataaatagatatataagattattattattattnnnnnnnnnnnnnnnnttattattattattaaaaaaaagaatataaagtactcttgtgtatttttttatataaataaattttatagatataaaatattaattattataacttacttttgaaataaaataaatttaaaggagaaatagttttgaaaatgaataatgtttttaatatgttgtactattagttttaaatgttttaaattacattaaatggcaaatggataataaatgattaagatagtttaagaaattaaaaaataataaaaaatgagaatagatttaaaaaggaaattgatattaaatatttgacaaagattgaaaaatataaaatatgtattgcattaatttaaagactaaatttatcaatcatacatcgtaaataaattatattaatcacttgcatataaaatatataatactaattttaaaatggacaataatataatttataaatttaacattctcaatagtctcatatttacactaagcattaatttgattgtacattgaacattaatttgattcttttttttttttttttttttttgcgagaaagggagcccgctaaaaagaaaggaaatccactagattgcaggggtcatcgcctatccaaacagctacttcatctgaacctgaagcccaatgcgccaatttatcagccatcgagttggcgttgcgattgatgtgaaaaatctgggctgcaaagaaaagagacaaagtttccttaatttgccgaatgaggtctccaaacaccgagagatcttccttgtgatgacgaatggcgtcagtaactgctttacagtctgattctacttcttgaaccataaagtgctcgtcaatacaccagcggagcagagag

SEQ ID NO: 22539 - DNA, 1911 bp, Cannabis sativa
taaatatatatagaaaatataaatttttatttataaatataaaatggtccccaaggatataagaatgtgcaaaggaccataaagtatatacctttcttcaactttttatttattattattatttatttatttatttttatttttgtgactagtgattacaaatttacaatagggaatttcatagaaatatttcaagtggcattttatttggcacatccacaaaaatagtgtgtgcttgtaaaagaataaaatgaaagtcactttaatttaatcatttttcaaaaaagaaaaataaataaataaagttatcaagattgaacaatataggaaaattttcaacaacaagaattctactttatgaaaagctaaaactactcaacttgtttcttgcaaacttgtcaaattaacaatattttgttgactatttttttttttatccttaggccaattatatttatatatatgtatatattaattatttataccttttagagaaagaagtttaaagaataatattttgatcatgaaatataccaattcctcttattttggaaggtagttgataaatgacagagttgagtatatttcaaaaaccacacatcattttcaacaaaagttacttttttttttcttgttagagtaaccaaactaaaccaaatgtaagaaaatgattcatacattattgtataaatacatatatttttatatgatgatccaaacccaattggcaaaatgtgtacacttgtcttttgaatcaaatctcactaataagaaaatcatgtggtgcaaatttttctatttttttagttttgataattgtgggaccacatgtgagttatagagattttataactcatcttactttaattgagtcataagtatacatctcaagaattttcattctattaagaatacgctacagtaaattaactatccaaaaggccaaacataattgagaattcgaacccttaacccaaacaaattgtgggaccacgtgtcaattatacagattttataactcatcttattttaattgagtcatcagtatacacctcagggattttcattttattaagaatgacacgctatagtaaattaactatctaaaagaccaaacataattgagaattcgaacccataacctaaacaaaacaaatatttttgatgtatgaaaaaatttagtcttttcatgaactttctttctcttggtgtaactttgacacatgtagttttattaatttaaagtgaaattaatcttatggtttagtatttgactattttgtcttcttattggtgagtgtcataaatttctctgtttactaatttaaatcttcatgcaaactggtcctattgagtattggcatgtaattgcattattagtccataatggtgatgatgttaaagagagctttcatttctatttgattatttagtcaaaagaaaagccataaatatagctccaataaagcattaacatgaagcttttttgctacaataaatcaccattgaaaaataatgctatgcattcaaaattttaagtataattataaataattttataaaaaattgatccttccacttagctctattcttgtatacattccaattgaaattacattcgagccacgtggtatagactacttggatagtagccctgcattgccacgtggctcgaaaaatagcgagttctcataatgtaaaggaaaaaagaaaaataattttttgtagttctgagtactaccaaccaatcgcaatgccacatagctcgagaggtaaatagtactcaagaatgtaaaatagactaattttgtaggcagtgtcaatccaattccaaccttattgcagcaccggccgataaggtcgacagagacgaaatccatcgagtatgcaatatttacagatttcaacaag

SEQ ID NO: 22540 - DNA, 2371 bp, Cannabis sativa
acgttgtactaaaactcgaataaaatcatgttgtgctcccttgttttgcataaatataaatttagtagcattttatattgtgtttcagtcatgatgtacactaaactaaacaaatcatttactgatttgcattagttgatcaattgtgaataatatgattgtgatttgagacctttatacggatctgactgaagcttaaaagtgccgagccattccctaactctgttttttcttcttcttcagagcatcttatgggataatgacatgaaaaacacaaagtacactctgaaggaaatgataatgcattatacttgtcttgagctcccagaagggaagggtgtgactaaatcagaatctttggcggatttagcgtgagtttagttttagattgctagtatcgtgctcttccaattaatcttatgatataataatttagccttaaatttccagctaaaaaattaaactcatgaaggtttcgcctttctttttatttaggggacattatggagaagagaaatactacgattttgtgacaaaaaatcgccaaatgaagtacatagagtgaagtagaagaaactctaatttaatgtcttggttgttgtctctatctatggtgaattcagcaagtgaaactgactaaaggttcttagagctgatctagaattcaatttatgcacctttaaaaaaatatttcttaaattatttctctattattagtgtcaggaattttttagagtgtgagcaagcaatgtacactattaaatttaatcacagagaatgttagcttgtcactctttcaattattggaacttaccataaacagaaatgctacgaatatcatcagtacttgtaaatccatcatcttttttgtatttttttctccctttatgtatatgtgtgggggtctcatgtttatgggagatgttatcagtcatgttgtattatttacatttcagttatacattaagaaaatttcaggataatgtaataaaatttacaaaaactgaagaaaggacaatagcagtgatattaaacgacacgtcgtcttttaaaaatgaagaagaaaacgacattggtttattgtttcttcatatcaatccataatggattggatctttgattaatgggacccatctttcaattataccgacttaattaagggtccagatttatcagcaactcatctccaaaaatcagcacccattcgtctcctctcgaagcagaacttgaaaattaattaaattttaaaaaaatatattaaaaagcaaaaaaagaaaaagaaaaaggaaatggatataaatacagcaagttactaaaaattgaagattgtaacagaaaagagaagcaaaagaaatctacggaatatatcggttggaactttggtcgtttaacaagtaaggtttctttccctttctctctctataaatatacacatttatgggtattgtttatgtagttaaacttgatttgaagtgatgaatgctgtgttctgttctgtttgaagatcaatattgtcttttgttgtagttaagtggatagtttgagaaagctagcaagctaatttggatttattccgtacattaattaatattaagattattattattgtttaatttttaataatatagaaaattaaaaattgaaagctaataatatgaaaagattagcttgaggttgagtctccactccatcttcttctctcctcttcgacaagttagccttgattcactctccataatcataatcatcattgtcttctttcgcttttgatctaacgaagtccctctgctctatctttatctccaataatttcatcgacccggagcttcctccttttattctccaggtattgcttttaaaaatgtagtaactgaggttattagattcttgcaagtgaaaagtgaaatcttctgtacgaaaatgaagtcaattttgataacggatgattatgatttgttatttgttattgaatcgcaatctgtgttggccaatctagtttttctggatcttgtaagaagtcagattgagtagtgtttttctagtttttttaatttttttaatttttgggtactgttattctgctcaaatcgaagtagttcattactcaaatttggtaaattattcattttttaagtcaatagcatcaaccagttaccaggccataggtttttttttcttcatggtggatagttatagtttattgtatcttataccaaaagctccaagctggtttttgtacagagtatttgctagtcttttacactggaatttgtgtgaagcaataatatatatacttaaagcacattattttatatagatagatagaaatgttaggaagaattcaaagtttaaaactttttattagcatttg

SEQ ID NO: 22541 - DNA, 3736 bp, Cannabis sativa
  modified_base (2456)..(2458): a, c, t, g, unknown or other
  modified_base (2694)..(2694): a, c, t, g, unknown or other
  modified_base (2743)..(2744): a, c, t, g, unknown or other
atagttagcttgtagaaataaaaagttcaaaagtatacaacttaatcttctgtttactcttttgtttttactttcatctctttttgggaaagaagttgaacattgaaaccacattgataaatatatataaattataaattgtagaaagagctaacataattagagagattattaatgatgaggttgagagacaatagaaagtgctcacgtgaaggtgtggtctaccccatcatatccaagcatatgtataacattatacatatatagatttatgagtgtcttgtgtgcacatatagtatccaaatagttcaacaataaactttccaagaaggatttccattgcatcccaacatctcatgatttcgttttacaccatttttcttcattaggacagagaatagatgtcaatgaaccactagaaccagtgtaagacacatgaatattatttacatataaaaatataggaaatttaatttaacatggttaaatgtaaagtataatcttttaatataccacttgattaaaaataagatactcatacttttaatatttcttttttttttttttaaaaaaaaatacctttacatttaaaaaaatttatgtctctaattctctcactttaactaaagtcttgttatttccacccaaaatcttaaaatttatgagcccaactacctcaaaacctccaaacccatcactatagtttcaactcgcccctttttgcattttttttagtttttgacaatgtcgtgaaatattactaaatgtcgctatatcgtaaaacatcgctaaatgtctctaattcacaatatgactaaatatcatgaaattacactcaagtttttacgatgattagtgatgtgatgtgtactttttagtctcatatcacaaataaattgttcatatcattactaaacatcgctaaatacgcaaaatctcacaaaatattgcaactaaacttcatcactaatatcaaatttggtttatcattgtaagttcattgctaaatattacaaaaaattagaaaattagaagaaaaaataaaaaaaaatgagagagaatgtgagagaagacaacggggcttgcagccgagatcttaggtgtgtgttcgagggcaagagttctaaattaaagctcaatgtttgagagaagtttcttttttaaatgtaattttttttttaagaaaaaaaaattaaaaattgaaatatattatttttaaataattaatatattaaaatattatgttttacatttaagcataagatatatatatataaaaaaaaaaataaaaaagggaaagaaagaagaaatcacgtgccagtgacaaccgtatgtgtatagatcgcacgtgatgaaaatcattaacacaaaggatctagctagctatagccctctctctcaccttcactatttctttattagtctttgactagttactagctagtagtgaccatgatcacgattcacaatttaggatgagaaatataaaaatctatttgtaggtattaaacagataagaaatgtttgtttatagttctgtatttagtaatgttgtttattagttgggtttggtatggtttgtaagatctaaaactaaaagtatgtcggttagagcataagaccatctgagatgacagtctagccaagaagggacagttcaatccttttgtagaaaaaagaacccaataactcaaaagttgaaatagaaaaagcaaagggtcacgtagaaactcaatataaagttcttttccaaagaaaaatcaaagttgttatcccaccttagcttgtgtttgagaagcctagtccggccgtaggcccgaactgtatgtcaaattgggcctttctaatttgacttggcccaaccttgatgggcctatcagatttactatgtttttttttgggtaagttgaaaaaaacctcttttattaatcaattaactaaatttacctttaattttttttaactgaaacgtacctctttttatatgtattgtaccaaaaatgtcctgacataagggagtcatatggagaagtgaaaggataaaattagtacaatgtttaaaaaaagagataaaaataatagactttaaaaaagaagataaaaataaaagagtataatataaaaaaggtatagagtctaatttcctctttttttttgaattattaattttttttttataatatgaaaaacttacaaaaatactggaatttaggttaatttttacaaaaataatattatacggaatttttttaaaaaaatactgtatttttataaaacaatagttgaacacaaaaaagaacaactaaaaacaatactggaacaactaaaaaataaccgtataacaacaaaataaacgtataacaacagtgaaaacttaacacagtatacagtataaaacttacacaatatttttaaaaaaatttccaccccacagtaaaaaagtaaaaaagttaaannnttcagtatgtggtgtaaataatccgataatattttggattatttgtttgggtaaataccattttgaactctctgcgttttgcaaaagttaccaattgaactctctattttgttaaatgacaaaatagatcctgtattttctaaaattgtacaaacaagaccctgaactgactttttgttaaaataaaacttaataataatcaaatttaaagatgttatgataaaactggttacatnttctgtatctgtttgtgttagaaattattttaaagttggttatattaannaataaaattgttgaaaattgaactacattttaaaatataaaatctattttatcatttgacaaaacagagagtctaattaataacttttgtaaaacataaatattagctttgtactataggaccagtcaaaataattttaatatgatcaatacttatataacaattatattaattttcttttatcaagaattatactatcttttttttttttaaaaaaaaaaaaacacaagaattatactattttaaattatttattatggtataatgaacatttttacaaattttatttaaagcaatatatattttgaaaattttgttcgattatttagtattaagttattactatttaattcattcattcatactttacacttgcatttataatcgattttagttaaagaacaacaaaattgagataaaaaatagactttttttttaagtcagaatagtatattgctcacaaacaacaatttacaaatatttaaaattatttggaaagtttatttaaaatttctatctactgactatcttttctactcatttatttaacgaattcaatctagaacaaacactatgaacaatacatgtgatcttaacaataggtaacttttgattccaaataattctattcctagcatgttaaatgtagtaagttatgacagtaatgacactcaaaagaactattattttacttcttgaagtttttgatttttaaatccactcaagaacttcataaaagctctcttttttgagtagaaatttcaatccaaagccaaacatgctgaaccacatactggtgtatgcacaaccaaagaagagatgagaatggctatccactccaactctgcacaataaacacaaggaagatttggtataaccaaatcgacaaaatctatcataagtcgacaatctgttcttcaaagctaaccaacttataaacatattgtggtgaatcctcaccctcaaaacaagttgttacagcagtaacaatg

SEQ ID NO: 22542 - DNA, 6199 bp, Cannabis sativa
catgttttactgtttcccaatggtgggagtagaagctaggaggcaaaccatccggcccaggggccttgtcttgccccatgtctctgattgctgcatatatttcttcctcactgggtagagtgttgagatcttcggactcttgggaggttatacccttctcaaaaaggtcctgaggaatttcagataggctagtgtccgccttcttaaataaatctttgaagttttgtatgaaacagtgagcaatttcggtttggttccgtatccagtcacctccctcggagcttttgatgcactgaataaaattccttctccttctaacaatggtagaggccataaaaaacttagagcatttgtctccttcgtgaagccattgcacccgagatttttgcttccaatggatttcctcccttagaagggcctcgttaaggttgttcttcgcttcttgaattgcataccagttcaaaggggttctcttttccatgttttccaacgtagccgtggcattgtgaacttgctgactgattttcttgaattggtttttgttccacaatgtaagtttgcgacaagtggccttggtctttctatggaagttaatcattgggttaagatgtaatctattggcccaagcttccttgactacccaaaaacatcgaggatcacacgcccacatgttctcatacttaaaaagtctattccgaccgctaactccccctgtagtgtctagaagaattggcctatgatcagaacaagtggccgagagatgatgaattactgcatttggaaacaatactctccaatccgtcgtggccatgcctcaattaaggcgggcccacttcattgccgaagccctggaggcatttgctgtgccctttgcccaggtgtaaccagggcctagaaagcccaaattaataagaccagccctatgaaccatacgacgaaaatcgaaagcgtatcttgatgaattacctggattagcatagttgagacactcccggtcatggagtgtaccattcatgtcacccaaaagcaataccggttttgtgtcattgagaaccacatctcccaatctcagccaataaacttccttatcctcatatctcgggggaccatagatgccatgtaaagtccaagtgtaccctggggggtctgaattgatttcgaccgagatagtgaatttgttcgaggatatgattttacaatctactcttttcatccaacatatacccaatccccccgatagaccaataggagaaacatagtgcattccttcaaaacttaacttattatagagtcttagaaacttactttcttgaagcctcacttccgagagaagaagaagctcgggatggtgttgacggatcaaggccgccaattggcgaactatcgtggagctcccgagtccacgaaagttccaagcaatgattttcatggcgattctggagacttttccgggcaagtctccgaagccccaaaccgaaaatcctccgaggtgatgttcccattagtggtattagaagttgtcgcttgttcctccaatttagtgatatgacaaccggtcttacttttccccattcgttcaattacaacaaaatggttatcaaggtctaccttaaggtcgaaagttttcccctcccagtggtgatggattgttgcagcaactcccttttttgctttagcccgattttgccatttgaatggttttggcaaagctgagagagaagctccagactttggaggctgtccccttcttttcggaccttcactagaattcttctcagcagtggatttgccacggggtcttccccttctacgaggggtatgagtatgttcatgacttccaggggagaaagggggggtgttcagagagttcttttgggtaggagagggcctgtcgatatcctctttcgcagaggggcctagatgtttaggattttccacgtataaggaactttcctctaaggatggttgtttattcttggccatatcatttgcttgagatgttgggtaaaagagaatgccatcagaggcctttcttttccgtgggccctggagatgctcatccactctaaagtcttcaacatcaagaattggatagaaaatcgtgggctctctgtggtacttatcaaccattaaggagcccattaccaattcacgccctttctgttgggcccaacagctagaaggccatttgaccacgcaggtctgggagctaagaggagaagatgtgtaagggagggattgaatgttgtcatccgaggctggcccattgggcttaggtatcccatgaaaaggactgctctcgttgaggggggcagaagtacatgcagtacccagcgactgaatatgctttttcgggttggtctgcaaagtaatgccatcgctatgctccttgtcctccttcgaaatgatagtttgtaactcattttgcttctgagcgtggttttgtggtgagttctgcaggatccctttttcaaacaattttcccgatatggtaatattggtgagaggaattggagtgttgctgggtgtagcatcgatcaggtcctggataataacttttttggtattattaccaaatggggcaaactctcctatacccggtaggtttaccaacagaagttgggtaatgaccgcctctgcattcgacaaagtgttggctggggcgtcgtcggaatcttcaactatccggcgcttagacgggaactgaagacggaactccctcaattcatcgttctcagcgtgttgtaaagccttgtgcaccttaaattgattgcgcagagtcgggtcctttcccagctgtttctgtaaaaccaaatcttggaaccacttggccaggggagtggtgaaggttgatttttcttttgcatcattcttgagccaaactccatacattggataatagttgccatgggcatcttttacaattgttggagccttgaagcagctgccttgatcatgattaagaatgccacatttaaaacaaatctctggaagcttttcataccggtattgaatccataaatcattcagtctctgtctacgaaggaaaaaaccagagaagatgggtgagtcgaggtctatcgtggctctaaaccttaacgtgctcattcctactgcatcttcaatacccaagggtaactcgtacaccggggaagccttggcagcgagttcctttaggtttgaaaggttccagtagaatgggggaatactctcgacattcacccagattggcgttttgttaaacttcactttggctggggttagcaaggcaggccatggcattatgacgatgagtgcaccacaaacaaaccatggccttctagccaacacgttcattgcatcatctctattcgcaaagttgaattgtatgaggcctccctcaatctctttacacttccatcctttaatggcgtgccaagacattttgagtgacccttgaatggcggctttcccgaatctgtgtttgctgataatctttccaagtaataccctgttagactcctacggttcgtccacctcgcatggattaagggtgaaggtgagttcatcctgggatatttgaactgagtcttcgaataagttacttacaccagagggatccatagaggatgcgactagcaagaatgtgggttaagagcaattagcaacaattctcttatgaactactaatagttaagcccctagagagcattttttcccactaaaaccctatgtgaatcaaaaaagctctcttagattgaaatttataattctaataattattagaattattataattctaataatttctcaccttgcagaatgatacatcaccatgtcttaatgttgatatcgatcaactttgttttgatcaacttttcctttctcatatatattaatatatatatataggtgttattatatttaattctgatgaggagtgaaaatattataatctaaaattaaaaaatcttacgaaacccctaaaattgagaaataaaatgcctagaattttgacagatgcatgataaatagataaaactctaaactgtatatatcgtataaaacccaagtgaagagaaaaatgattcaatatatttatgaggaagagagataaagatacaaaccttaacattttggagctgtcattgactttgtgatgaagaagataatatcaaatggaaggagatggatgcctggtaaaagtgtgcaagatttttgttaggagaaatttattggaaatagaaagatgaattttaattggtaaaagaggaatattcaaattagatgagggcaatttagtcaattaaaaaaattcatcaaagaaagttgtaagcttcccgtacaatctaaaatcctaaagttggggttaactaactttgcctaaaagctaaaatttttatttaaattctttgaaaagctattttttaaattttaccacactttataactactaaattttctaaaaagtgcttctagttttttaaaaagctattccaatctgggccttataaattttaattttttttttgaataatttataatcttataaataaaattcaaataaattattacatccataatttttttatacgcatcgtaaataattatttaaactttatttttaacactattataaattatttacaataatttaaaaatttataagtaatcacaaataattataatgtaaacgatagttaaaaaaaaattaaatagccatcataaatgtcgaaacaaataatagtgtactccaacactcttttgggaggaaggagtattacaaactttttcctaaattatataagttaaacaccatcaaattaattttgtttttgctttttttccaaaaaaacaagttatagcattgaaattaaatttataatagcaaattatatatatttatatatataatacacatgcaactaatttttaaaccatattttttttacacaattaattatataatttttttaaaaaaattataagataaaaaattataatcacaacatacactcctacataaaaataaaaatattgaattataattgtctaacatataaaaaacaactctaccaatagacaattggagtatgggtcattttgatacagttgtgttgtgggaaaaaacaattatagttgtgatgtaagaaaatacacatgcaattgtgcaaaaatctatgctaagtttttaataaattatatattttaaagtgatatgaattaataaaattttcattttaataatatttatattataatttaatttattgtaattataaatatataaaaatttatgttatgatttttttatttatcattttctctaaaaataaaaattttaatgaatttaataaaattaatataaaaatattttatagtattattaagttatttttatcacatgtaaaaacataaaaaataaattagaaagatatttaagtatacaagaaaatatagttgtttgaaaactattcacgttgatgtagtttattaataaaaaattatgaaataaaaaaatatttaactgtattcttcttttccgaaagaaagacacgtggcataaagcaaaagataattactatattaatttgggcctaagttttcttggtcgcgaaaggccagactagattcagattgagcccaagcccagtgaatgatcggagctttgcttcgatactcaatggccttctagaacccggaagcccacccagcctttcaggacgcgaaaggcatgaagccttctaggtgtgctagaggacacatggaagccaatcgaagaatagaagctagatgtctgccctaacatttttgcttctctaaaacagggctgatcttgtctcctatgtcaaaccatggtagtgcacgcacctcctctgcatgcaccctttttttacagctcatctgacgactttgtctaccaagggtgacttctacatgacacgtgccctgcaccaaacgtggtcctagatgtatggaaccatcatcccacaaaagaaaatctcttactgggtagaaaagtcatatatattgtgtattttgctccaatagtggacttgcttttgcataaaacctaaatgggtcacgggtatgcctgtatctgaactctagcctttataaactccatcaccccttcatggaaaggggcgaagaaaaacctagccgcaaactctaagctatcttctttctcaagagaaacctaaagatatttccttataga

SEQ ID NO: 22543 - DNA, 4254 bp, Cannabis sativa
atttttgtaaattttcctaattaaataacttagaggcccagtctaaatccaaccggacacacctattgagcctaaggacttcatggacattggacactaatcagtacgtcggcccagacacccttcgatttaaaaagccatgaaacaaaatgaacggttggatttaaaacaggctggcatagaccaacctcgttgccgttcagatggaaatatatatttttaatttcttctaaaaaataagagacaaagaaagaatctctcggctattgttttatatatttgtatgtttttttggaatttttataaaaaataccgacaaaaatttataattttacgtggaaatttttataaaatatttttttttttataaacaactgtaaaataataaaataagacaattaaaataatagtaaaataattaaaaaataattgtaaaataaaataaaaatttaatatagtacatagtatttttttttaaaaaataaaatattttttaaaaactattcatcccacaataaaaaattttaaaattttaaaatttcaataatgtaaaaatatttttttcctgaattgaagcgaactcagtaatcaaagagctaaagatcgggaaatggctcaagctagggcaggtcttttttttttgaatgaaagcgtcttagattaataaaaaaggttagacctcacggtcattacataaaatgttcaacgggacggtggatagggcaggtcaaaaagtccaaaaatcccactgtcaaaggtttttttcaaaaaaaaaatttggaataaattgaagaatacttcttttttgtaattattaatcaaaaatattctcatgttaaattttattaaaatataactaattttatgagtgagttgtttaatatacttttactctctacttaaatctaacctataataattaacttaaaaatctaataaggacattatatataaaaagtattatattacttaaaaaaaaataaaaattaaaattaaaataaataacataaaatagatatataatttcttcaccaacattaaacagctataaaattctcatactatatttttctccaaaaaaaaaaaaaaattctcatactatttttgaaagaacgataaaatatatatatataaaaaaaaactaataaacaaatcaacggttggatttgaaacagggtgtccgagatcaacttgttgctgttgggaaaggtttaatggtcaaccattaccatttgaagactaaaaaactaaaagaaagaaagaatctcctgggcttctccatccagttaacgatcgattcatctactactggttttctcttctatctcctgattttcagagcttaacacttctataaggtgattctcattcattttctcttcctctgttcgcattggaaaatcttatatttttgaaatttgttcatttcttttggggattgagagaattagggtttggttctttggaaatttgtaggtcatgcattgtgatggaatgcccgtaaatttggaatacgattggatagcataattttcagtggacatgtgtttaaatttttcccaggaatcttttttggacttgaatgctagtgcttttgaaattcaattagatttgcttttcatttttttgtttgatcacgttcattgtgtatgttttgctgtgaaatctgagaaaatctgtaagtattggtcactatttttagttctgtatttgtcaagacattgctacattattagcccagtaacattgaagcttgtccttggatcaactgggcatatcgtcaaatacagaatatagtaatttgagttttgatattgaacagattttctcaaagttcccttatgataatcatagctctcttatttaaagattggatcttttgcatttattggaaagattttgctttgctggtcgaggggaattatttctgcactgtctttgtgagatttaataaaattcaggcacctgacatatctgtggagataagacaatatagctaaagtagtggtgaaaagatatttaatcttccattcttagtttatatgatgtttcatatatatattatctatatgtattttaaattttgtagatacttggatggaagagggagattgttgctatgaactagatttcatgggaggatttgttgacagcagagtggtatttggtttgatggttcaataaaattcacttgagttacagactatatatacaatttgtgagtattatttgataattttttccccacagattttctttctgcttgaaagctaattgatcttaattatctttaaatttagagtttgatatatgaacacacaatttacaccaaaaatattacactttcctttgttgtacatgttctttcttagtaaccaaacagatcttttcagtatttggtttgattgtgatgtttgtatttttcttttcagagaaaaaggccacgaaagggattgaactgcagccaaagctgaattgatgtataatctcttttcttgatctataagctaatgttaccaattaactaaaccttattgaagatcaagaagaagagtgaatgagaaaatgtccgaaagagacgaaacaataataatgtcacaaacccaggaaagttccatcttcctaactcccaagattttctttcaatccatccaaattttcctccaaaacaaacaaattttcttttccatttttaccctcataaccctcccactctcagcactgctcttctccctttccctctcttcccacccatcaaaatctcgaatctaccacctagaatacctagcaagcctggcctcaactcagttcgaagctcgacacgtgtggaaagattcccgcgaagacgccgcatcgatcttccgcgccaaaatcctctttttcccaccttgctacgctctctccttactcgccgccatctccaccgtcagctccgtcaacctcgccgttaacggaaaacgccccactctcaactccgccgttacggcgtttaagttaacgtggaagagacccttcgttacctccatcgtcgtctacgctctcctcctcgcctacgtccaaattccccgaacactttccgccgtgttttattcacctgcgccgagactgttcatcctcaccgtcggatcaatcgtcgaggtttatctaatggcggtgatgagtctaggtatggtggtctcgatcgcagaggataatttcggatggtatgctattcgggtcgggtcggttatcatgagtgggagacgggttaccgggtgggttttaagtgccgtgtttgtttttgtaacggggcttatagcgagggatgtggagaagttgatgaacgatcaagatccgtttgggaaaccaacatcgacggttgtgattgtggcgagaggtgtggtggacaaggtgggtctgattggtttgtatggggtagttatgctatggggttatgttgttaccactgttttttactgtgattgtagaagacaatacggtaataagagtgaaattgaaaatgtaacacttacagtgtaggtaatttgcttttttttctttttgacagatatttcaaattttgtattttttttttctttttatatattattttggtatacatatggaataagaaatttttatgtatttgcttagataatttattgtacaatatttatatacaaaaaaacaaacaaaacatgagctaaaggcatatctattatctcactgcatttacttaactaaataaatgtagctaaagttcaactcattttacagttctaaacttttttgattattattatactctttttctttctatattaattataggtaaagaaaaaaaatataaaaaaaaaattgtaaaagttataagtaaaatagaaaaaatagtatttttgtgaaatattttagaatgggctattttaaaaaaatattataaaaaatgtaagttttgctatatatataaatatatatatatatatggtatacaatttttttagggagaatatggtatacaaatataattgtactaaatatgatgtttttaaaaaacaatataaatatgacataaatcatcataccatacaaaatttagaaactcgtagataaattttacttctataaaatcaaaacctctagaaactagctaaaaataattttgttaatgcgatgaataaaaaaactagttatgaatactaaaactcttataagatttgtgtattatgaaaccgatttttcagtctaagaaattggtttctactttttagatctaga

SEQ ID NO: 22544 - DNA, 3973 bp, Cannabis sativa
ctctctctctctctctctctctctctctcacacacctcgtgcatgtcttttgaagtgggtattgtattgtaattttttttttggttaatcattttagttttcttcgaatttgtcatttttgatctggctgtgatctattttttattttgatttatgtatttttgatgcaatgaagacttgcattatttaatttaattcaagaaatctctatttgttgagttggttggacttttattttttgggaattgaataaatagagttgagctgactcaatgatttaaatttatggcttttaatcaatatttgttgagtttaggagaaacaaaagtttggtttttcaatcactatattattaaaaacttgatttccatctatatttagtcatgtatttgtagaaacgaatgattaggagtttcgattttaggtctaaatgaggttaatttatttttgattttggtgtggagtcagtagtactattgattagtaaaaaatctaagatttattagaacaagtataaaaattgaaacttgctcttcgttttcactggatatatgtaaattaagaatatggatatattaaaatttttgactattataactagtgattccattaaagaattaacatatatatagaaaactattttatattgttataaaatagaaaatgttaattagttataaaatatttttaagaagttcttacacaacaaccattaaacactattttatcttcgttttagtattagaaaagaaaaagctagtatacattcttccttaggagtatcctagttgcttctcaataaaaattaaagtttcttgtgtctccacaagttcggagtaaattgtgaacatgggctagctggtaaccatttctctttttggcattgttctgatctcctccattgtcgccctttctcttattattgtgcctagagtatttagtgaccggagggttggcagctgttgcatttggattggtggaagtcattgttgtagtggctgaaagttgtactgagggaagaggtgggttattgtctaacctggcttcctcaatgtttatatacttttgggctctcttcataaattcgtcaatagtaggagcacctctcccttggaggctatcccatagtaaagacccatgagttatgcctgctcccagtgccatgagtctcccactaacatcaacattctttactttggccacctcgatgttgaacctattaatataggcctttagactctcaccgggttgctattttacattggccaaggaggagcattcaagttttcgagacctggtggcacgaaattctttttttaaaatcacatgatagtttgtcccaagaggtgattgaatgtttcttgaatttattgaactatatttttgctactcctaataaggtcaccaggaacaacatgcactttagatcgccactcacttggcttgtcctcattaatgtgttaaaatcactaatgtgggctcttgggtcagtacttccatcatattttgtcattgtaggcatcttgaacccttggggtatggcaatgtcaggatgtgtggagaaaaaagcttaggttccttattagattcgtatcccctgacttttcctttggcgtttaataaatgttgaatttgttgttccaatgctataatccgtgggtcatttatcacgggagcaggagtattgggatcgactcgcggaggagcgcttgcattacgttggggcgcatattctccttgctatggaggaatgtcatactgtgctcgataaggagcctccctatgtgcatgccccatgttcaagtggtctctcaaatcaggttatcgccattggttcagatggtcccgaaggtctgggctcgtcatgtcacgtgggaggtgtcgaggatgttcctcataatacggaggaggtgcatcatcttgaacgctcatagactggctccttgagtcgaaatggtaattctcccccatgaaactaattgttctttattgttgaggccaccgaggtgcaggtcgttgctgggcgtatgattacattgcggtagtttgagatcttgacaagtaattattgtctcgaggtgaatgaggctgttcatgctgtggtcaagtctccttgagtgctggtcgtggaaggacataattatcacgggagatggtgtgtcgtctttcccgtccatgtcccttaggttgaggtacccatcgagcatggttgtctcggtagtcctctcgcccgttcgagggggtcgagtaaagtcttgacttggaagacaactgggaggtgcttccctttgtcatgacctctctctcgagactggttgatgtggtgctggtgcattagtacgtggaggctcaggatgccttattggtgatgggaggaacctgattgatgaaggagggttccgaacatggtctcttcccccctcatcaacactaatatccctaggtgctggagatggttgagatggcgagactccattattgcgtgttgtgcccctttcttcatgggagcctcctcgtgggcgatgtgtagcattgtgatcatgtgggatagcaggtccttatgcatccctcctagtttgttgttgtgtaggaggggtgtattattcctcctattctcacgactcgaggttgttactcattttcgttgttgtgatggaggacactcactcctcccaccacggttgaaattctcataagaaggtttttgtgatatggcattataattagcatcacgactttgggttgttcgtgacctagatctctcttggccttcgagagggtaacgtgttgaactactcccatggggtcatccccttcttgccgtaccaggacgtcggcgggttcctcttcgttgtggccttgtgttctcttgggctccatacctctctttccactctctgttgagtttgagagttttatctaaacgcgctggtgcaatgcctcgtattccatgaacacctcatggacattggtagttcatcatacaccttgggatggtgataatgagcttcccgcatcttggacttgacctttgtcgttaggcataggttgtttgccttgacgtcgagaggtgccttcgctagtgggctcagcaggttgatactcttcatggtgttccgtggtgttttcttcattcatggggtcatcacgatccttcttctcatagttcgtccgtctcgtactcaccatgatggtaaagggtgattaacacttgagttcaactctcattgaaagcaccaaactgttgacccagtttttcgtcaacgaatataagaagatcgtaaaacgagcaagatgaacacaagtaatagtcaataaaagtaaactggtttgtaaaagtaaattcatcaaagacgaacacaagaattttttactggttcacccctttcagcgataataggccagtccacttggagtgttattgatctcaatgcttgaggagagttctccacagttatgttctccaagagttcactccttaagtaagtttttagaatttgagagtgggagctcaagagtatgatttcgtgagtatcaagtttagggtccctttacaagtgacttcactctccttatatagattttcatctaggatttaaaattccttaatcattgtgtacgttcccgtaactatagttgggttaagtttgagatacaaaatataataataaaataatcattcaaaaaataaatatttcttcacttatcattttttaactatattttcaaaatagctttaagagcacgtgtcttttgtatttagcggactcgcatggtcatggacagacaaggggagccaatgggtcggttcgtgccgattaggtccttgaggtaatttggtagcttatgagctctttgtgccttagcaactaacagagccggaagcttagtatatcccaaaagtgctccattggttggaggtgcaatgtgccaaagtgctctatttgtgccaaagtgctcccattgtgccaaa

SEQ ID NO: 22545 - DNA, 2588 bp, Cannabis sativa
atacataattatctagttagggttttgctaatccatttcttaatttcgggtattacacttaaggcaaatgataatccacttgataaatcgagacgggaagcagaggagcctgagcaagtcttccacaaagttccagtccaccgtatcataggccttgctgaggtcaattttcataatgcacctatccgaaatattcttcctagtatagccctttagaaggtcttgaaagatcatgatattatgagccaggagtgtatttttgataaatgcaccctgattgctgttgacgagtgaaggcagaacttctgagagtctagaacaaatcattttcgagatacatttatagactgtgttgcagtaggtgatcggtctataatccttagctgaagaaggattctccaccttaggaattaaagaaattatagtctcatttaaggaatagggcattcttccggtagagaaaaaatccagaactgctagagaaacatcatcacctatttcattccaaagatccttgtagaagccagacccaaacccgtctaaactcgggcttttagaggagtgaatgctaaagagagctttctttacatcccctttattaaaaggacgaatcaagctaacttgttgctccacactcagacaattaccctgcttaatacaagtttcatcaattgagctgactgctaaacttttgcttcccataaagttttcaaagtgcttcacaaaattattaaccacctcttcaaaatcatctactattgtatcccccttcatgaaagtggttattctattttccattcttcttttcctcatagtagcatgaaagtaactagagttttcatcattgaacttgacccatctaatcttgctttgttgtctaatgaattgactcattctctcctttgctgtcaagtaattctgctgcatttcattaactgaaagttgcaaaagattatgaaggggattcatggcagccacttcttgaattctgcaacactcctctttcacctctctgtgctccttagcaacatcccccacttcatttctctgaaaagtttttagagcatgtttgatcagatacaatttcttcgtgagactattcagaccaccaccagacgcctctttgttccaacaattcaacaccagctaagcataacccagataagaaggccaatgattcccaaatctaaagggcttaatccctatattgttctgcatttgaaaacgaacaaggaaataacagtgatccaagatgacctcccatttgaagaaagcatcagagtaaggaaactcagccaaccagatattatttataaaaactctatctatcttagaatagattctgtcccccacctcatgtttgttagtccaagtgaagaaagaacccgaacttttgaactcctcaacttgacccaatgctagcaagcttgagcgtccactatatccttattctgaatagaccttcctccatttctattatggaaacaaaacattgcattaaaatctcctaaaattatccaaggctcatttagcttaccaatgctcgctagattatcccacaactctttgcggttctccatagcattacttccatacaccgtcgtgacaaaagtactctttttctgcccactgaattttattttacagtgaaccagctgacttgtttcatgaatgacctccacttgaacaaatttattctgccaaataagcaagattctcccagcaacaatctcacttgaatagcaattccaattaggaaagttctcctccatcatacccttaactttctcattttttatttttgtttcgaacaaagcaccaaaaccaatcttattaagcctacaaatatcaagaatcacaacttgcttttcttttttattcattccacgcacgttccaccctatcatgttacttacttccatcagcaatgaggtttggattagtaaccatggtctcttcctcagcagctgccattaacaccgcatagccattatttggcttttccacttctacaccatccttagtctctttgttccctgcaagtcgcgaagccttccttcgaggcgcgatccattcctttacctgctcaggaattactatatctttcaccctcgacattgtctcagcatcaccttcacttgagcactattaccagattctttttcctccgatattccagccaatatccctgcttctttttgctctttcagctggtccttcttgttttccttgtcagcagtaggtttctttctccaaactattttcttctctttattacagttagcaactgtatgccccaaaattgcccaagcagtgcattttgtaggcaaccattcatactctatcccttgttccactaattgcttattttcattaatgaaggatattgttttcggagggtcatctgagttctctatatccacaagaatccgagcaaattttaccatagatctatcttgagtcaccttatcaaccataattggtttgcctattgtgctaaccaaggcacttagatttttcttctcccaatattgtaataccagcccatttagtctaatccacactggaactgagttcacaattctatt

SEQ ID NO: 22546 - DNA, 1542 bp, Cannabis sativa
ttttttttttttttttgaattacaaatttgaaccttcttattagtaggtcaaattgtaattgtgatggcttaataatattaataaataaataaataaatatgtttcgccaatattattgataggtaagatctagcttttaaattataattgaacaatagttaatatataagaaattaggtattgtactactatgcacattgattttgagtaagtaatatatatatatatatactatctatgaaaaaggcacatttggtatgatcctcgtagagtgttatggttttctgtttatatataaatatttgttagcttgtataattgggatcattacttttagcaatcacaattcacatggaggtttcaaaaagctattttgcacgcttcatcttttatatatactttattttttttcctttctttatttattgactaatttctttaatgggctaatttattttatttgaataaattaaaaatttattggtttccagagccattaaggttccactatactattctatactacatataaaaagttgtaagcgactaaagaaacgaaagggcggccatatacagctcaattccacggtggattaactttctatcatgctattggttgatgcaatgtcagcatctaataactctttcattacactatttaaaatgagaattgctactcaacactaatagtgtctatctaagtatctctagacatgttatttttccattaattatatagtattattttctaacagttattataaattatatgagacccaatacttaattgaactaataataatattaatagtaatagacctaaaatttaaaataaggagagcgtaatattttttggtaagtgagaagggaaaggggcaaaagtaaacttaaaaagaaaaaaaattgtttttggtgggattaaaattttgtcctctaatctatatgctaagtcgcttaactattacactaaaattaatattatgattataaacatcatcttttattacaaatatatattaaaactaactaaaatgcatatatatttttttcttatttttttttaaagggggcgattggcccgccttacttatatgtgagtctgcctttaaatattgacacataaaaatatcctaagaactattgtcctttaacatttctcatttaaaattctctttaacatcttttttatttatttatgaaagtgttatgaaagttttacactagcacattttttttcttcttttaaataaaaaatataaaacagaaaagagatggtaacttgcagcctaagatttttctatatttatgaagaaaaatttaaatttgagattttttaataaaatcacattaaatattgtatttattaaattactaaaatcttatcatagggttaaagggttggtagaaataaagttaaatctacaactacaatctaagaatctttttaaaactacttgaggctagctcgagtggccataggtgggtgtgtgagtcttggaggtcctgaattcgagtccaggtaaaacatgttgtaatatata

SEQ ID NO: 22547 - DNA, 3910 bp, Cannabis sativa
tattttaatttaagttttttttttaaagaaaatagataaaatagtccagtctattcttaaaccaaacacatgattagtttcatcataattcaatcgtatctagtccaatctaatcttattcagtccaatccagtccaatcctgggtaccaaacgggccccagaattatagttacacatgtccgtaagcatgctaattaagttgttcatggactggctaaatatactctagagttagatgaatatatttgttagatgggtaaaatctctcatcctattttcactgtaaatgaccttattttcaataatagtgatatcaaaaaaaaaaaaaagttattttttatttgtcttgtagtgaaatcccatttttctattgatgttattgttatttgataaagttacattaaaatttattaatggcgtccaaccttgaaaaatgacatttcaaaaaaaaaaaaaaaaaaaactttgaaaaaatgccacatgtttaacttagcttacaaagagacaaacatttggtgggattgtctctgaaatgggttggaattgttgagtttttatggtgcttacatgtgccgcttcttcgagatgtcggttaatattataaacattctttttctttcatattaaaactggttgttattgacattgtttattattcattattattttgtgaaatggaaaacttgttgttattgagtgtttttttttttattgcagattgttattgagttaaaaataatgtctatatttctaatgccgcaattctttttatttaatatattttacaactcaatttcaatttttcttcttatacataaagtaatgaaaaactaaaaaaaaaaaatataattttatatatgttatataatttcattacaatatgtatatagataataatttatttacatttttttagcttctactgaaagagcaaacctagccaataaatgagcagcattattagcagatctatacacatgagaaatttgagctccagaaaaattagaaactaaaagagaaatattgtttgacaaacaatgaaaattagaaacaagctctttagaagaatgtaatcccttaactactaagagagaatctgtttcgatgaaatgcactagtagttgaaggtctttaagccattgtagactatgcataagagctaaagcttccataatatctggtgtaaaacatccatgaaaaggactagacatggcagcaataatttctcctgtacaattaaaaccaaaaacttgattcattgtgtcaacgactgcatccgtgttcagtttcaggtggcctgaaggggggttcatccaaagatcttcacgtgaggttgctggacttgaagctactactggtgcagtggtaacatcaagcctttttttccctagtaacgtggtattcttccaagtaagagagtgcataatatagaataacatcatggggctttggtttggtaccatgtctctctttgttccttttagtccaaatgcttcagagaattgtagcaaatcgctcaagttgtaaagatgaccatatagtagagacatgaagtagaaattccttcaaattcatgtggtgtgtgagtaaaatctcaaaagcagagcaatgttacacatgtctagcacacttacagtaaaaaagtgcatgagtaattgtttgctctattacataaagaacatgtggttgtatctgaaatgtgtcgattgtggagaatatcagcgacaagaagacaatcatggatggcacgccacaaaaaaataagaatttttgaagggattctcaatgtccaaaattgtttccaccactatagaaattggatgccacttacagtaggcttgtgctcatcgagtttagttactaaggagtaacctgatttaacagtataaacacctttcaattcgtgatgccacattaaaaggtcttggtgttcaaatagtgttaacgatatgctttgaattttagcaacatccaaagtaagatacagatttacaagttggtcataatcccattggcaagaatctaaaatgagatctgagactttcatagctaagtcatgacccctaaaaactagtggtttaaaagaggtgatacctggcaaccaaggatccgaagcacaaaggatattagcaccattaccaactttccatcgaagaccttttaatagcaattctttgccccaaaaaatacctttccaagttaacgaagggtaagaacccaagtctgcatttaaaaaagaagaatgcttgaagtaccttggcttgagtattcggctaaaaagagagtttggattggagaaaattagccatgcttgcttcgctaaaagcgcctggttgagatggacgaaacttttaaaacccatccctccttcgactttcgattaagtaagagctttccaagctttccagttaatgctagatgacaatgagttagatccccaccagaatttattgcacattatctctatttgattaataagagatttagaaagtcgaaagtaactcattgcataagttggtatggattgagcaaccgctttgaggagtatttctttgccaccaatcgaaaataatttttcttgccaagcagaaaggagattccatgatttttctttgatttcaccaaacaatacattctcatccctgcccgagtaaaagggtaaccccaagtatctttcatggcaaggctttgtagtcatttgcaagatctgttgtagactggtttggatgacacgtaatgtatttggagagaaaaagagaactgactttgcagtatttaggctctgacctgacgcacgtcaatagtagtcaaggaaatgtttgataaccatagctgacctcctattagcacgacaaagaacaagacggtcatctgtgaaaaataaatgagagaccataggagcaccacgagcaattcaaagaccatgaaggttaccatgttgttcttcatgctgaaatagtctagacagacctttagcgcagataataaagagaaaaggggacaacgaatcaccttggcaaataccacgggtaggagtaacttgaccttgaacgaaaccattaactgtaaatgagtaagaaacactgctaatgcaatgaataatgagatccacaactgctgaatcaaaacccatagtaatcatcatactttgaataaaatgccattcaaccctatcaaagactttactcatatcaacttttatggcagcataaccttctttccccctcttcaaatgttttaaagaatgcaatagttcaaaggcaaccaacacaccgtcagtgataaaccttgattgaaggaaagcactctgagattttgaaattaccaatgagagaaaaggcttcaagcggaggacaataactttggaaaccagcttatataggacagtgcagaggctaatgggacgcaattgagacatagaagtaggcttcttgactttaggtatcaaggtgatcaaagtttgattaaaataagatgggtctcctctgtcattaagaactctcaaaattgctttataaaccaaatctccaactatatggcaataattagtgtaaaacattatgaatataccatccgaacctgagctgttgtcatcactcatagaggaaagaatattgaaaatatcatctacaatatacggtagagtaagaatttggttaaattcagcagtgatagtacacagaacagtgagtaagacttgttgcagagcttctaaatcgaccccagctgtagcataaatgttcagaaaataactctctatgatgtgtccaatttcagcttgtgtagttcgcataacagcttgatcatcaagaagggaattaattgtatcactgtaatgtctgctattagctctttgatgaaagaacttggtgttggagtctcctgattttagccatgaaattttagcac

SEQ ID NO: 22548 - DNA, 5308 bp, Cannabis sativa
gctaacatgtccacaagcaaattttgttctctcgaaacatggaagacgctgtaacttttgaattcttgcaacaactcttaggacatcatggcgtatatagccatttttttgccctttgtctggtactcactagaaatttgattcaccaccagctggcaatcactgtgtattttgatatattcagctcttacttccttacctaattttaagcctgccaccatagcttcgtgttttgctttgttgttggaagcacaaaaactaaaatgtagagcactctagagttggtgcccttatcgggagatcagaatgatcccgactctgaatcttttttcatcatagaccttcaggtgggcagttctaggactagatcttctaggtggtcattcaagctagaacactctactataatattaaaaaaggcttgacctttgatagatacctgcagctggtactagatataaggctagttccatggcccattttagcaacctgccataggactctagataccgaagcacctggaggaggggatgattcgttagtacttttatggcatgggcttagaagtatggtcttaattttcaggacgcatttagtaagcaaaatgtcaacttctcgatcatgggatatctggattctgcacccaacaatcttttgcttacgtaatagaccgagaattggaccatttcttcctctcgcacaagcacgacactaataacatgatcagacactgccaagcaaaaatacaaatcttctccttccacgggctttaataaaatgggagcttgagtcaaatgctcctttaggttctggaaagcaactttgcactctttagtccattcaaacttcttgttgcctcacaatacattgaagaacagtatacacttatccgtagattttgaaataaacctactaagtccagcaattcgactagtgacactttgggtatccttgtgtttcttgggagaaggcatgtcgatgaaggctttgatcttctctgggcacgcctcaattccacaaaagctgacaatgaaccctaagaacttctcggagaaaacaccaaaggtacatttcttgagatttagcttcatcccatacttcttaattactacaaaagcttcctcaagatcttggccatgtcctttagaggtatgggacttaaccaacatgttatcgacatatacctccatgtttctccctagtttttttttaacattcagttggccatccattgatatgtcgctccagcattcttaagcccaaatggcatcaccttgtaaaaataaatacctttgtcaattttaaagctagtgttctcctcattcgtgacatgcattttaatttgattatacctgaagtaggcatccatgaaagtgagaaacttgtactcggatgtggcatctaccatctgatctatctgtaggagtggaaagaaatctttatggcagacattgtttagatcggtaaagtcaatgcaccttctccacaagccattgggtttcaaaaccaatactgagtttgcaagccatactggaataacaattcacgaaggatatcattggtggtcaacctatatacttccattttaacaacttcaacccttaccagatctaaaggtctcctcttcttgcggacttgcattctgtcttcttgaatgtttaaagcatggaagatggtgctatagtcaatcttggtcatatcaaaatggctccatgccagcacatcatagttccttttgagtgtgtttatgatattctctcttatggacgggggtaggtttcttcccattctaatagtccccgtggggtcttcataactgatgcttacctcttctacctcctccattggttctaggtttctttcattccaaaccatgggatccactttgtcttgaaaatcctcccagacagccttaatgtccattagatttgtcgttctgggagacgtaagtgtctcttccgggatcatgtacatggctcgtgtttagaggttgtagcaattactcgcactcttcatatcacctttgtttgtgccaatacatccattatcacacgggaacatcatgtataaatgcctaatagaagtcattgccccaaaacccactagagttggctgccctagtattgcattatatgcggttggacagtctgttaccataaaagttgagtgcttgaaagggcttgcattattttctcctttgagggtgataggtaactagaccttccccatcaaaatgagggtatctccattgaagccttgcaattgaatgggggaaggggttaagtctgtctcggtaagccatatcgcttggaatgccaatttgaattggatgttcacagagctcccattaaccataagaaccgtggaaactcgttgttggaaatttatgcatcaatcactaaaggattgttatggggtaatcgcacatttttggcatcatcctcggtaaaggtgattgaaatattcatcattttggggcactgtacgggagattgcaccagcacacacactttcccttctactacctctttcaagtacaatttttgcgagttttgagtacttcttgcaagatggggtccaccttagattgcaaccacatgtccgtccactaaaggtggagtgagtccaagaggatatggggttcccggtcctggtgcaagtaatgccaccccaaccgaggctggtagagcagggagtacaggcaatgatgctctttgagcttgagaacatccaaccccctatagaggatttacaacgttctactattcgagaacaatcatgtgtccgtgtatgaccctctatcttggatagatgatcaggatttggacccagtgtctagagatcccgcttggaccaacatttcaatctcaacttttaaataatcatactcattttgatcacatctattccttcctccatgtgacattcatagaggtttcctgtaatggaccatgttataggtctctttgtacatgttttcttgagtgtctattagacttgtatactcagtgtacttttggtcatactcctttcgtggcttttttaaagaatcattctaattgtggcttttaccccctatcttttttcagggttggctcacattagactcttgggcctcagtttttgcttatccaagagctacactacatcccgtctatgctgccccgtacctagaaaaattggtctacgtaccaaatagattggaagtagcaggtccataaacggttggggaaaactaagatcgtagaagagttaaggccggagccagaactttgggtgtgaagtttagagtatcaatggaaggaggtggagttagaggaactctaagatcctgtatgtaggcatcctctaggttgatgattccttgggccttcaccataaactcactcaaagttttggctctctttctgtgcacctctcccaatagcagagagccaatagctaatccagattggagggccatcaatttcatgtcatcgctaactttagtgtgaggaactacctccatcatcctttgaattaaagcctttaagatttaattaggttgttgtttgacattagtgagagaaccaacttccatgtccttgtcacatgcaacaataaactatttgctgaaagacgactgtaagtccctctagctatcaattaatttttgggctagtcgcttccaccaatcttctgcagacttagtcgaggttaaggaaaaacataagcacttggcattgtcactgactcaggcaacttgcatcatttttttgtaattttccaaatgcgctcgcgaactagttcttccttcatctaactcaatgtggggcactttgagttttctagaagtgcgatctctacaatcctccttacacaaggttctgggtcttcatcctctgagtccgagagggctctgctttgttttttaaccaacttggttagagcagctatatgctcctccaacctcgttatgtcactctcaggaagatcacatcctctcatcttatcgcttaagtggttcctaaggtcacccccacgtggccttgccttttcacccttgtacttctcgtacttggcattgattcactgtcgaaggtctatagtggactagttgtccttagaatgtcccacgatcgtccttatgtcttgattgacagaatcactagggcggttcctttgcccttttggcttagttactcttgcatttttccccttagcacgatctttcctctaggatcaaaagggtgttcaggctcgaaagcaccgctggccctttgcatccttgagggttgtttgagtggatttgtgtctttttgtttaggaatggacttttatgggagctcatctaccttgcctttatatttatccttgcaaggattcaaggttttgacttttggttgtttgtgagcacatcctccaaccattacttcaactgaagggtcatcttcggtctttgccaagtctctaaactttgtctagaggcattacatcatctttttcattttctcagtgagcttcctttgttctgttaactttatctgagtagcctcttttagtcacttacattaagtttgggtcgtggtcatagtaataaccatctttatagttcccattttttatgtagtctctgttgtcgtctactttttgcctgtttttagggttctggtcatcgtcgaggctgtcaaacacattctcgacatcttcccttcgattcttgacattggttgcaccttcttatcctataccgcatgtttgggaaccagaggtgagggagtctgcttcctccataactgtatctaatggggttttcttacctccgttctttcatgttaacaccatggttgaggtggtatgacgactagaaaactttcgttagctcataatgaaagcactaaaatatttactaagattttcagaagctgattaattagatcttaaggaaaatatagaataataaacaatagacaaatagttttttacatggtttgaggttaataatccctagtccatgagtccattgtattagcctaaccgtcaagtgtttaagtattacaaatgtttacattattagtattaattctacattcctcttgtttctcttggagaagaagaaaactcataggaatttcgacagagattttgtaagtaaaaattgttcactctttgcacatgaaaaatagggctattcatatgaacatgtgtggatgagggcataccatccacccacgtagagtttcttacaaagcacatttctatggctattgtgtacaacatggcgatcttaccgttggtgggatgggagtctcctcattgtgtggtgtac

SEQ ID NO: 22549 - DNA, 9309 bp, Cannabis sativa
ccgaccaaaccgcccaaaccgtcattcgggttaagattttttttttaattgggtaggttgtatgcagaattttacaaaccgatttttacgttgggttagaaaatatgtactataaaccgactaaccgaccgatgtacaacccttgtgatgagacttgtgatgagactgtacatttataaattatagtataaaaaaatttaacataactattaggcgcacatttatcgtaaaaaaaaataaaaataaaaataaaatattattatacattttgtaattaactattttttttttttcttcaataagaaaaattatactattttattaacatgatattgaataaaattgaaaaggaaatgataattttttagtttgattagttagtggtgattttgatgcctatattgggaggttggataaagtgttaataaataataaatacgtaatattagttagttgattatagaataacacgttctttaattctttttgttttttcattttaatatttacgttatttgaatattcgaatgtttttacaaaactcatgaaaagctgacacagaattttgtcagaggttaccataagcccacttacaaaacgacatttgtctaactcatccaatttatattattttttcaggtatactaaatatttttgaggaaaaaatatacgtgagaaattaaaaacattgtttagttttgcatttattttaaaaataatgtacattttttgttaaattaaaaaaaaaatcatgatgatgaggactagagaaattataagcaaataattggagtaggaggaggatctcatttaaggaattccccaatcccatgcgaagtggcaacattattgattttttatttttttgacacaaaaacattattgattatttcacctaacctttggaaatagttaggggattttaacttaatgtttatatatatataaaaaatccaaataatttattgctcagattataaaaaaattcatcagtaaaagtaaatatagacaacaacacacaaacatctgagactgtgtctgaccagttttatttgccaaagcactaaacaaaaatatacgttcatatgttttggattaaaaaataaaaagaaaaaagaaatatttcttcatataaacaatttaatttagtgtgaatagggatacaattaaaagtaatgacgcgtttcttccttataacagttattaacaataatcaactatacaaatgaaacagctaatgcataggtttttttcaactagtaaaacagctaacgtatagaatttttactagtgaaacagctaatgtattttctgtgataaatgataatcctgattttctgatttttttttatataaaaaaaactagtgtataataattttaattatatttgaagaaaatgaaaacagagaaagggcaattaagtaaattcagggagtgtgaagttgtacaggaaagaaggggagttcctaaaatttattgtattattttggcttaacttaaagcttttgtccttatgttcacttaactactaactccactttgaactttcttctctttttctcgtgaaatttttcataaatgtgctcgtgagagatcaacccaaccgattactttatttttgggggtaaaattttaaaataaataaaatggataacaaccgattaccgattacaccggtttcccatagtcaacttttaaagaaacaatttttattttttgtaaaattgaaaaaagtagtatatggttatgtaaatttgttaatacatcttttaggtgagctttattctaagccttaacttgtggatgtgaacgagaattggattcaaaaaagggtaatgcaataaaaagcctaaaaagggggtttcatgaaagagaaaatcaaaataaataataatattaataataataattattattattattaataaaagaaaaggaaagaatcgggtgggctttgagctgtgatttagctgtcgttttttttttttctttttcaaaataattaaaaaaaaaacgtataatattttgatttctctttctatttgacacactcacacatctccaaaatccctagaaaaaacccttctcttctccactctccactatccattcaacacattctctctcctcttaaaccagaccacaccagagagagagaagagaaccaaaaccaaaaccaagccaaagactccgcctttattctcttattattacattgcccatttttctttttcttctcagatctgaaaaacggagtctttctgagaaaacccatttggggttaaccagcctagaaagtgagggatttataattattatcctggaaaaagaaaaagaaaaaaaagtggcattgagagcatcagatgtctcatgtgagatgaagaagaagacccatttcagccttagttttcttaatatttcagtcctcattgtcttccacctcttcgctgcttcagtctccgtctgctcctctgagccggcggcttctctcatcagccatggacgcctcagctcagcagagacactgttcatcaagcaacgtcagttgctttattacagggacgagtttggtgacagaggagagaatgtgactgttgacccatctctggttttcgagaatggaaggattagaaacgcttatatagctttacaagcatggaagcaagccattctgtcagaccctttgaatattaccggtacctgggttggatctgatgtttgcagctacaccgggatcttttgtgctccggcactcgataaccgtaagatccgtacagtcgcaggtattgatctcaaccatgccgacattgccggttatcttccggaggagcttgggctgcttgtggatctagcattgttccatattaactcaaacaggttttgtggtacggttcctcacaagtttaagaatctgaagttgcttttcgagttagatctcagtaacaacaggttcgccgggaaatttcctgtggtgattctgaaactcccatcgctgaaattcttggatctgaggttcaacgagtttgaagggtcggtacctcgtgagctctttgacagaccattggacgccattttcatcaaccataacaggttcgtgtttaatctgcctgacaatttcggaaactcaccggtgtcggtaatcgtagtggcgaacaacaaattccacggctgtgtaccgtcgagcttggggaacatgtcgaacctgaacgagattatcttgatgaacaatggtttgaattcatgtcttcctccggagattggaatgcttaagaatctaactgtgttcgatgtgagcttcaacaagcttatgggtccaatccctaacacgttcaaagatctgaaaagcctggaacagctcaatgtggcacacaatatgctctcagggaagattcctgatggcatttgctccttgcccagtctgcaaaactttaccttctcctacaatttcttcaccggagagccaccgtcgtgtttggcactacaagggttcgatgatcggaggaattgtcttccttcaaggccattacagaggtctgctggggcttgtaagtcgttcctttctcacccagtggattgttctactttcaaatgtaaaccctttgttccttctctcccatcacctcctcctccttctcctcctctcctttcccctcctccggtggttttccctccaccaccagttgttaagcctttaccaccaccacctcccccaccaccatctccatctcctcctccaccgccagtctactcaccacccccacctccaccaccagtctactcaccaccccctcctccaccaccagtctactcaccacctccgccgcctccatctccacctccaccttcccctcctcctccgccaccaccagtatactcccctccaccgccaccaccttcaccaccaccaccatctccccctccaccttcaccgccaccaccatcgcccccaccgccagtttattccccaccaccacctccaccatcacctcctccaccttctcctccacccccattgtattccccaccaccaccaccaccaccatcttcgccagctccaataccttactgcgtccggtctcctccaccacctccgccaaattcacctccacctcctgctcctctaaactctccacctccaccaagtccttactactataactcaccaccaccaccaactcatcactcgccaccaccaccacatcactcgcctccaccacctcatcactattcaccgccacccccacattcccctccaccaccaatatacccctatagttcaccaccaccgccacctgttcattctccacctcccccagttcattctcctccaccaccatcaccacctccttgtatagaacctccaccacctccttccccaccaccatgtgtagagtactctcccccaccaccaccttcaccatcaccgccgccacctacggtttacttaccacctccatcaccttcaccaccacctcctccaccagtgtaccattctccaccgccaccatcaccacctgttcattatagttctccaccacctccagttcactatagttctccgccaccaccagttgtccactacagttctccacccccaccggttgcatcaccaccgccacctgttccatgtgagcatccaccaccttctgcatcacctccgccgccaccaattgtttatgaaagcccgccacctcctactcctgtatatgaggggccattgccaccaatctatggggtttcatatgcttctcctccaccaccacccttctattgattcttttgagaattttcttcctctaaccttttgttcaagaaccttaaagaattttacagcgttatttagtgatcaatcccccaccaccaaaaaattattaaaaaagtttcttttttctttttttattccccttgtgcttcataactacaagttctttttctcatttgggcaattctcatcgctcggtggaggaggaagaagaagaaaataaaagccaaaattagttgaagatatgaaaagggtcactgttcaattctgggtttgtttcattgactcttgcggatgtcaaattcatttgtacaacagagaagaagaaattgaggaagaggtgaaaaaagtaaaaaaaaaaagagacagtgagagaggtaagaggagaaaaaaatctctccatatttatttaaaaattgttatgagatggatattttgagttgtgaaaaataaaaatggcagagaaagagttttaggttgcagagaattgtgtatgtatagggatgaatttggtgaccatattattcagggctacaagaacagcagcagcagcagcatcacaccatcatcatcatcatcatcatcatcataattatcttttgctgttgctgctgcctgctcgtttgtgggtttttattgttattatctcttctatatcatacttttatttcttttgatttccaattttatagtataatcatgaaccatttttacttgtattgattttcacaattcttatcattccttttctttaatgtgtatctatatattgtttatatcattctttctctctgtttttttttaaactaagtaggaacaaatatgaataaatgcatttcttgaaatccctagttgcaactacattttgtgtttatcattaggcttcgttttcaatggtcaaaatctcatttccttgtgtgattacatgacacttttagttattattgatagtatcaagtcaaattggattttagggtaatggaatttaagttcgattctctatatttgggatccatttgtattgaaagtagtgatacacaaactctttgagctgagtataatggcggatttgttgcacatttccttacctcttcttcaggccacacaactcggcttgtcttttgacatacaagagctttgcttcattatttgaggtttaggcctaggaaaacgataagatgtgaaaaaataatcaaaatattattgtggctcttttttcttgtgttgattttgtcaaagtagcatttattcgttctcttcaatgaatcctataattttggtcgagactacacgtcccaattaagattatgggctggggacaattgaaacagggtatggtcaatctttaaccccacttgatccctttttttcttctgaaaataataaaataaataaataataataataataaccccaccatactatactacttactacctctttttatgttttatttatttttttccttctaaaaaaccccacctgagttatgatgattgctgttttcaatttctcatctaagcgtttctaatttaattaatgctgtttgggattggtaccatgtgcatatctcctaatgtttgggtttggatttgaaagtttgaattcattttgtggttaactttaacctcacatttccccccattggaatttggtcaatacatacattgagatctttacataacaattttgtttggctcatgaaaaagggttattcatagtggtcacttttgtataactcattctttctttattctcatcccgtacgcgttttttattataatgacaccacgcagcatttttctagttgactgttgtcactatcttttaggctcttttttattattttatatatataaaataaagaatttacattttacaccctaatctctttttctaatctccgcaatcaacgatgtttaagttcaaatttcaacttcaatatgttactttcttatggcttttaattcgttttggttgtcatttgaaattaatatttttgagtgaaccacttacggaaagctccccttaatttttttccctataatttctgaccctttttgtgggtcagagagacaagtatcagaaacagctgatcataatttatattacaactaactaaataaatcataacaccataacaaaacggttgcgtctttgcaataaaaccaaataaaaataaattttatcccaaataaaatgatttaatacctcctatactattatcctatttgctcaatctattgacttggccccacaccaatgtggggcatattacaatgccagcttactaatacttacttctatagctaccaccaccgacgatccttccattgcatcattacccaagtaaaaaaaaaaaaaaaaaatagtcataattatcttacaaaatagtacaccgttttgaaagagtacacctctcttttttattcacatcacatgttttactaaataaaaccttcatgaaatgataatggtaatgaaaattcatgaaatggtattcttgtgtctatgaaaatgactacccaaagttggtcattgggttgtgtgttataaatatttgtgtttgaagtccttttctggcagagaattgatatttctaaattggaatgtataaaagaacaaatctgttgtgggcgaatagttttcaccaatacgtgtctatttccactttttatcgttggtgaaattattttcattttgataaactagacaaccaatttgcaaaccacctactcatatggtccatatatatactatatatataaatgacacatttgcctactttctttatctctacccaatttgccttacgaatcttcttttctttcttccacatagaataatagcatgtaacaaaaacactattacataaaaacaaatttcatattcaaattcgcccaacacataaaacaaactaacccattttcttttccaaatctttgtatacatttcaaattgttacacttactcaatttagttggctgttatatattgaatggaatttggaaaagaaaaaaaaattgttgggtttcttttttcttgtaagatttcaatagtaggaatttatatttggcaacttattccacaagagacctaattttatataatatatatttataaataaaaagatactctcatataaaagagaaggggattcacttttgaggcaagctctagctagcttcctattgtcttttttgttatattggtgtatgaaaaaataaaataaataaaataaataaataaataaaaattaagatatgcaaaggatagtattatcccaccaaaggttggtgatgttactggaaatgggtcctcctcacatgggcttgttaaggcttttcacatcatttatgagtaatcataattttaatgtaacaagttggttgacttgttttcatttctctactcaaaaacgttacacaactatatttcatttaatttggccttcatatacagcctgtgattaggtcaaatattttaatgctatctcaatatatatatatatatatatgtatatatttatagtatgtgatacccaaatgggattttgacccctttatttatttataattattatagtaaccttctaacactaccattaaaaaactaaaaactattccttcacaatcttcttcagcatattcaagaatttatcccataaacccaaataaatatatatacatatagtacaagatacacggtacccatttgcaaattattgttttcaatgctttttctttgaaaaaaataataaactattgtaacggacacttgatttctattttccttttcagactaagaaacataactagaagtaaacatagtaatgaacattgtgaaaacccaacaaagtaatatatagtttaattgttgacaaactaagcaatctatacccagctattgtaaccaagacatgtgcaattactcaattaaagccataatttcagaactttctttaatcatttatttgcacttgctatacaatttttattgattcatttatgcatttccccttggaatttataaaactatttgacttattttgaaagggaaaaatatatacatataataacgaaactaatgtcctatgttgcaggccaaatagtgtacgtactattaattttttagtgcacaaattaaataaaatatgccaattcaattacatatatatatacatatatacattccctaattcagcatctgggcatttaggtgtcatttacacaaattttatgatttttttttctctcttccattccagaaaaccgaaggctacctcccttagtgaagacctacctctacattttctgcaaacttcccaaaatataataaattgttaaaatgcaaacaggcaaactaatttggttgtttaattaattactttttctaattgacaaatttgaaagtgttattattattattattttggttttcatgttttcagagtatttagtctacatatagatgaactgtcaaattttaaattaaaagagcattgctattggggaccagtggtgcctagcaccttctagatgtgtcg

SEQ ID NO: 22550 - DNA, 3813 bp, Cannabis sativa
  modified_base (3138)..(3138): a, c, t, g, unknown or other
aagaaaaatacattatggtaaaatgagcaagactttatttttaattatactattagcaatatgatatttaagagcttgttaggtgctattagtatcttttagtatttttttcgtaaaaatttaattgatggagttattaaattaaattatatgaaattcgatactttattatactaataatgatatgatatttaagagggtgttatatgatatttaagaggatgttagacactactggtactttttaatatttttctcgtagaaatgagacgttttataattagttaataattttttataaatttttattaaattaaaataaataacactccatattaaattaggctttaaagcacccatagtgcctttagtatgctaattttctttattccattatgggaagaccccatatgcatgtatagaatagtttcacaagatttagaagccatgaaaagtagtgcttgtttacattagattttcttcccacacttctttacaaagatatttttatttttttgtaagcttttatattatattaatgttgaaaaaaagtacacatatataataataataataataatacaatataacataatgtttagctttcatgagatgaaataacataaatgaatataataaatatcatgaaggtcctcattctcttcatggcttcatctctccacacaaagtatggtgcttttgggtgttactgtcgctactcaaagtggggactaaattgtctcaatacttttattaaacaatttatttagcaacattattattaaagatatgaccaaatgaaaattgtctacttatttcacataagtccaaaaactttcactaaactttcaaacatttgaaaacattagtccatgctcttcctactaaattgtttaattatatatatatatataaatccaataacaattcactcaatactcactaaagggttttgtatgaaataactaccttattattaccactaattaattacacctttctcttatattttaaagtgtaagttttgtattttgtaaaaattattagttgtaccttctattttattaaataataatttaaatattgtgttttttttataatggtacaaataaaccttgaatataattttggtcaattttttttaacataatcaaccttaagccagtttttaatacgaacaaatagaaaaaataaaagaattttcacaccacatactgaaatttttactgtgggacgatttttttttcaaaaatactgtatattttttatactatgtactgtgttaagttttcactattgttccacggttatttttaaattgtcccactattattttaattgttatattttgttgtttacatttattttataaaaagatagtatttttataaaaaattccgtgtggtaagtaatattgtaaactttttaaaatttaatatttttataaaaacctaaaaaatataattagtcttattataatatttgattaggttattattaagttttatattttgtattattttgaaaagcacttttttttttatgggtaattttgattttaatttaaaacaaaaacaaaatatttggaaggaaaagataagacaataagtgggttagtatagtaatagtagtagtactaatactagtactatactacttctactaccataagtcatgattcataaacaaggatggtggcaactttaactgtcccatttgtgatcaacagctaaggttgggttgggacccattatagttaaaaaaaaaaaattaaaaattaaaaaaaatattttattctattttttttttttctgaataaatattttatgcttattgtagattttttgtatatgttatgttataattttatgcaacattatgttatgttgtttgatattaggactggacccagtagtgagtagtgagccccaagcaagccctggtccaaccaattctttgagatttagcttgaaccccacactcgatggctaagtcaggactcagaaatgggtgaccctagacttgttttttgctttgttttttcgatatagtgttttgatcttaaaatattttgaggactatgtgtaagttataccatattcatatcttagttttggattattgatatttctataaaaaattgaagatttttatctcattaaaaatggattgactttagctcttttttacttttaaggtagtgattaaaagaaatgttaaaggttacttatgatatctaacataatttaattaatgtattatagaattattattgtaaaaattttgaacaacttctgagatgttatctcatagtgcgaaaatacaatataatattattgtaatgtagaaataataaattttagaatacaaatttatgtgttttggtatctaaaaagatatttagtctaaatttttttatgatcgtatacattgtagttatttaagacatttaacaaaattttgagaaatttaaaaaatttaacacgtcgaaaatagggtttaaggagtatgttgcacgcgtgactcttttattttatacgcgtataaaatagacgagttgaatattaatttttatattgtaaattatttgaatttttcaaaattttacaaaatatctcaaataaataattataatgtaactactataaaaatttgaggttttttcatttttacacttcataacatttttttttttgtatttttacgaaattctacatggaaacccttttgcaactagcggagcaacctaaatcgcaaccaaaaattatatatcaacccacatagaagtcaccggagaaaccagtttagaaacccaaaccgtaaatttgaaaacaaaaaggttaaaaaattaggtaaataccattttggaccctgtattttgcaaaagttaccgattagaccttctatttttttatatgacaaaatgaactatgtatttttcaaaatggtaaaaataggacccttaattatttttttatcaaaataaaatttaataataatccgaatgtgttatgacaaaactgtttacattttctgtatctgttcatattttcaagttggttatatttaaaaaaagttgtcaaaaattaagtttaggatcctatttgtactattttgaaaaatacagggtctattttntcatttaacaaaatagagggttcagtttataacttttacaaaacacaaaacttaaaatagtatttaccataaaaaaattaatatatgaaataattcccctaaaaaaaaatttgaactaaacaattctaataatatagtacattagtttgctttgttggttggtgggcaagaggttaatacagtttgttgctttggtactttctaaaagttgcaaattacaaaacaagtgaagagcaacatgtgatggcggtgataaactaatgttatattttctcatcgatttaatacattttactgttttctctcttattttcaccacccacattcacttaatctttgtttctttctttcttagtttagtttagtttattaattaatttatttaacttttacttttgactctctactctctaattggttcttaatccttccattatttacccttattataattttaaatagagtattgatattggatattagtgctatttagcacattctataagtgtcacctagggatgcatatggaatggggcgctacggggaatgccgttcccgtccccgactattcccgacgggtaatagagcgaagaattcccgtcagtaatagaaataataacggggacctgtttatttaaaaataaaaaattcctagtactgataattttaagaata

SEQ ID NO: 22551 - DNA, 3207 bp, Cannabis sativa
gacatgttttcagatctgatctgagctctgattcgatctgagaagagagagagagagagagaaatgagagtgagacgaagatgaatggtggagatgaaggggtatatatagggttaggggttttgagatgaacggtccagatttactgatttcgggttttggattttttttatttaatttttaattattttttggaaagggttggtgggtggatctggtaaaaattgtaagtgagagaatagaaaatgaaggctattttgaaggtggggtccactatgaatgaatattgcttttgtgtcttgtgattatttgaggatatttttaagcttaaaggtttactaatgactataattactactattatataggtaatcttgttgttgttactattggaaatttctatagtaaatctattagagttgttatggtacaattttttttttctattttgacatttaggaagtttttagatagaatgagttattgtataggtaagatagatggatgtagtccaatgactaaagctttgctagcttttttttgtagattgaactctcttttccttaagagtacattctcttttctttaagattctgcaagcggtggcggtgtatatttattacccagcgtaaatcttgaattagaaggtgaacttacgattacactgtagacttctaagtcgcccaacaagtatttgattacttcggggaaatgggtgtgttgagactagtcacacaagaaccatctttcgaaatcattgaagagattgttgatcactagaccgaccattaaaatgtaagcatagttacgatcctgtgaaagctggactaactccagctaaaaattgatctataagggtcgaatagtttaataatattatcataagctaataattttatttctacggatcaaggttcgagcttttcaaatcaatccaatcaattgtatgcgattagaaaagcttgcaagagggggcacctcttatgttttgtaatcggctttatttagcggtgggagagcgaggcgtatctgctaggcaaggaacgattcgaatgcgttaggatggggctcaacactcaatttttcataaaaggatatggaataaaattagggtgtgattaattattctttcaagacgagagtgctttggtggcatcgcaccgatatatacaaatattaagttttctttttttgttgaagtagctttatttacgggtatatatattttttccttttgttgttgtggcaatctttcttagtgcacccttaggtgagtaaagagagaatacttggtagcaaaaccgttggagtttagtaggcaagccagtagcacgcatgccaagaatagttgtccaaggtctcgttccattcagcccagtattaaaccaatcagctaactgaagttagaaagttcaaaagtagttgcttttctagttgcacattcatcgtatataatagtatgtctgggcacagctctggttttttgttcgtaacgagagcaagattaaaaagttcatcacgaagttcgagacaattcttagatagcaaacacttgggttctccaaaaagatctattagagtcgttatggtagattttttttttatctattttggcatctagaaagcttttttggtctaattttttttttcataatcgtatacgttgtaattatttaaaactacttgtaattttttagaaaattttaaatagtttataacgcctaaagtaaggtttaaacagttacttaactgtgtttataagaaaaaataatcacgcttagggaaaaaaaagtaaatctcattttcggcattgtaaactagttggaattttctaaaaatttacatgtgtccttaaataactataacatgcatgatcatggaaaaaattagactaaaaaaattttttgagtactgaaacagataagaaatctaccgaaacactcctttaagggtgtgctatagacttacccaaaactatttttatttttattttttgtaataaatcatgcaattttattaaatatcaattaactaaaataatagcatccagacaaatcacatcgctcccattgaaaacacaattaggactggaaacagaaaaataagtcaactaatcgaccaccatattcccggactgtttgacaaaaaaaaatctaaaataaaatcatatgaaaaatattacagtattacaattaaccttaaaaatgtctatattcaattaccgctcaaaagatacaatagttgaaacgttcattcaactattgtgcaaggtacataaatgcaccactaaaaactccttcaattgcagagaacttgttagtcccaacaactaatagtgatttgatgtcgaaccattgaaggacaaagaagacgaacaaataatgaaacaaaataaaataaaactatgttacaaaagtaaaactaattgcagtagcaaaaactttgtaaatatacattttttttctttttgtaagaagaaaatttggttagttttgtttcaactttcaagagcaaaacctaataagaaaaagttcaacaatgacagaatattgaatggatattattatttttcgaataaaaagtaatttttattaatcaaagcatcgctctaaacaaaaaataacaaatcaaagagaaaatcactctcgtaaaatgacgattagcataacatcaagattgtctatcaaaatattgagtaactcaattaacggactggcttgaacaaccaacaaattgtcagtttctaccataatctttacaaataattcgaaggaatattattgagagaccttaacttgaggatatccacaccagaaatatagaaatgaggatgtccactccattacaacatgtagtgaaaaatactattagtatgatagtaattgtacactctagtttaaataataaaaaaatttgagagttagtattattgtattaggctatgtgcttagcggtggtagctcggaactatctaggttcggtgattcgaattcttacggatcggttggacttctcagatgcattgtgtggagaagcagcggcttgttgtgcagcagtttctttggctctggaggaaggttttaagtttattttgatcgagagtgactccagattagttatcaatgctctcaatgggacggagtctcattgggcgattgacaattatatctcattttgtgctaagtcatctccctcttttaattgttg

SEQ ID NO: 22552 - DNA, 2743 bp, Cannabis sativa
  modified_base (373)..(373): a, c, t, g, unknown or other
tatataaactgtatatgtactataaaatatttatatgtactgtattagtccactcacttgtttgaaccgtatatgaatattttgcaattaattaatttattattatgaaacaagtgagtggactacggatatagtatacgaacgataggggatttgggaatgtgccctaccaagctgggaatgaaggaacatactccaggagctctcccatagctacttaaaagcatagtgagagacccagagggggagtgactaaaataaaaaaaaatgaaaaaattaaagagggtaaggattgagtaaaatacttatcaataggaataataatttatagtcttagatttaatctaatggctcaaattaactcttgaaaacnacaccataattaatatatttatttatttataattaatttttaatattattaattctagatttgactaacaaaactccaaaccataatttgtttactgttaattttatgtctaataaaaattaattttaattatagatactttttaatttcaaatttacatagaaaaattaattaaatttattttgaataataattatatttataaaaaactataacatgttcaaattataataatcctcttaaaacaattaaaacttcacgagttcaatcttttagaaataatttttttttcctttatattttatatttaatttaataatttcaaaatttaatcatattttattaataaatttacttttcaagattataatattcaaggtatttaaaaattttagatgtaaaattaattatttactttcattattctacttataatcatgcaagaaatagaaaataatatatattcataatatgcttattcttcaacttaaagataaatgtttatatttaaaatttctaaatatcaaattaattatttattttaattatactatctatataaacatgcataaactagttagtagtacacgtaaataatttgttagagtaaatgcatatcattacattaaaaattacatatgtatatatttatatttcatacacaacaaaatataaatcaataagaatcaatttatacagcaaaattattttaccatgtttgataagttatcccatctcttgttaagtgacatgagttcaatccttaattccgtcatttgataattttataccacttattatttgcctatattttattagttttgtttatttttttgaagattttttttatctcctctttatcattcttaatagcggtgctcatccaatcaattttgtactattttgcttatagtccattcgatttgtactaagtgtgaatttcatattttggatctaataaaaaataaagtataaaaatactatctaaaaaaattggtattactataaatatagattataataacataatatataatacacatttgaattttatttatttttatattttttaatttgaaataaacatacttttaaattttttttacactaatatttataattttgatattgtattttatttaaaaaattcttaaattataataattcatactaaaatagataataaaatttactctttaataaaaaaaaaacatttagtttgtttatttttattaatccgtttattatttatttaattaattttatgaaattgtttattttgagttttaataaacatattttataatataaaaaaataaacatattttattattaataatttttaaaacattgatatagtaaacataagatattataaaattacattacaaacattaattatattaatctatttgtagtaattagtttagttattaatgctttatattatttagtgattaaaatgtatgattttatatatatatatatataatatgttttcaaaatatataagtttttaaaataatttttttttgcatatttgttgtattatgttgtttttgttgtacatttataaaagaaaccctattttaaatttgttagtttttaatattgaattacttaatatttattattttttccacatcttattttcaattgtttaattagtttttaatatttatttcttattattatctcacatcttattttatttttcacaacaattgcaagatttgagaaaaatatttcatatatgaattgtcccataataacaagatcaattactataatattagagaaatttaaaattgtttaattaattaaaattaatcttaaattaaaaataaattataaagatcgagtcttgtgggatcttgaactaatttagtgagcctggattgagcatgtcatcgtcaggattatgggaactaaagaaataattgcccgttgaaccatttaccttgttaaaatgtatatactggtaaagcatataccaatccttcaatataagtatccaacaagtttctctattaggttgttgtctcctatcgaccagacgacaactcgcccatgagatcaaatttagatgaaatcaacagtaatcgagatcattcaaatcttttttagtgtaaatttttttatctatttattattcatatttttctttgacaaagagcaataaatattaatttatttggatattatttattaataaatttattattttattattccctattatactttatgtaatacaactattaatatatatatattaacaatgaaaaatataagatttctcactcttagaatgtgggaataagatgaatgaggttccatttcaaaatcaattggcaatgggaggagtag

SEQ ID NO: 22553 - DNA, 8075 bp, Cannabis sativa
  modified_base (45)..(64): a, c, t, g, unknown or other
  modified_base (1812)..(1815): a, c, t, g, unknown or other
  modified_base (3895)..(3895): a, c, t, g, unknown or other
ttctaaatattggggtccacattaaaattaattcacaaataatannnnnnnnnnnnnnnnnnnngctaattgcctttactaatccaaactactagagcggtcattacattacagctctccattaagcatgttccagtcgatcttacctgtcccacgtgtaatcttgaacttgaaactgtgtcacatgttcttttcaggtgcaattttgcacgttcttgctggaatttatcttcggctgacacagctggtgccgaagacatgatttcagcagctggttttgagacttactgttgcattgtaggaaggcagtagcttaggcagctgccatgattatttggcgtagttggacggctcgaaatgatctcttatagaataataaaccgactacagtttcgaaggtgattcgatcaacaaaaactaaatttgacaattggcaaaatactcaatcaaatggttccacacctttactaaatgttaattttagtaatggtagagagcattggacgaaacctgtttcaactaagttcaagatcaatgtcgatggggctatctttgcaactaagaatcggtttggaataggcttccttcttcgggataagaatggtaagtttattgaagctttctcaagcagcaagattggtatggtttctcctgagattgctgaagttttaggggtcaaagatgttttaagttggatcaagacgaaggcgttaactgaagtggaaattgaaactgactcattagttgttgttcaatctattaatggctcggttcaaatgccatctcaatttggtttacttgttcacgattgtcgtttgtactttctaaattacataatgtttttctttcttttgttaaacgatctgtaaaagggctgctcattgcattgctagacagtcttgtttcatatcagatcgtatgtttgatgaggcttctgctcgatcagatttacttctattgtaatggaggattgcttttcaagttgaataaaatttccaccttctttcaaaaaaaaaaaaaaacaattattttgaaaataacaaaaaatcaatcatctgtatttttgtaaaacaaatatattaaaatacttaaaaatattatagaaaccgtaaattcgaatatttgtaattttatgtcatttttaaactcttatgaaaatatcttatgtatatcaaagtgtgagactcaatattctcttacagtcttataattaaataactcacttttcactcatgattgagccacttatattattgtactattagtgataatattttattaaaaaagatgcgattctcagattaataaattcttttggtatgttaaaaataatttaattatagtgtatagtggtaaatgaactgctacaatacactaattatgaaaaccaataattaattaatattataagcaaaattagttgaggaacattgtataagtacatatggttagcatgtgttgtcttaattatatgaaacaatatatatatatatatatatagtttatatatatatatataccacatttgattaggtactacctataaataaatataaattgtattaggaaaattggagtttttattcttaacttttatatctaatttgaaaaatctcacattcctacatgtacataagttgttccatcagatgaaaagaaaaattaagaaaaataatttttcagcaaaaaaaaaagataaaaaaactgaatttaattataaacatgtaaaaagagatatttttttaattttttttagttaagtagctaaattaaatatataaatttaatttttttaggagtttttttattttnnnnctttaaaatagttttttttttgtgtattttttttttgtaattttacggaattctacatagaaagaaagtactcctattgcaactagcgctgcaacctaaattgtaacaaaatcgtatagaaacccctgttgcaactagcactgcaatcactttagaaacccaaaccgtaaattttaaaaaaaatatatggaataattctcttttttttattattcgtaattaaattaaaatttaatggttttaatattttttaaaattaatattaattatatatttcatatttatatatatttgtattaaagtaaaattaggaggttccaactacaagagaactatcttatagaagaaaaaaaattaaaagcaaaaacaaaaaagagttttatttttttgaaacaaaacaaaaagagtttaagttgtgtcaaactcatgtttgttcgtgaacatttaaaatttattaagtaagaagagaaaaccttgcaaattagttcaatagtggatcaaaaagctcactacataatacatactttttttttttttttttttcaaaaaaataaaaataaactcagctttcccaaattcccaaaattttaagaattatagctactaacaatatatctcgtccttaatattttaatttagtacttgcaaaattacatatatttattttttacataatttttttatacatatctttttagtgaaatattaaaagacatttagtgtctaaactatcgatttgtaatatttcaatttaatattatattttattttttaattactttaataataagtatagaaacaattaatagtactatttataataaggcactaatctttagttaatataagagccctaataattttttaagtatcatttttatgagttggccatgtaaagtaagtgccacttcaagacaattcccataattaaattaaatatttgtaggatgccatcttggttgatcccaacatctctccatgaaataatacaaaatgattataaattaatatttacataacaaatatctcaacatatcttccaacatgatctcttttaaatccctttttacgggaaaaattttaatataaacaacaaatatttttttttgtttagaaaatgtgccaaattaacaactcatcaccacatataattatatatattaagcttataattactgatcatcaacatttatatagctaggccaaaaacacatttgctctcatatatttgaaaccctagctagctaagtagttctctaaatggatactcaaaaactttcatcatcatttctaaccctaatagtaccattcttgtttttcattctctttaccactttaccaactacacaagcctcatcaacatcatcccaattagttgaaaacatatgtaaagaaacaataaactacctcaaatgcatcgaagctctagaagccgatccccgaaccaaatcaccgaaaaatctcaatgctttcgccaaagactccattggtttagcaatcaagaacgcgaaagaaagcttatatttcatccataatctattaaaaattaataagatgacgagtagtagtagtagtggtagtacaagacgagcagttcttaaacaatgtgttgcatcgtataaagcagtgattgggtcctttaaaagcgcgcgtactgagctctctgaggatgctatgtcggcaaattacgatgtcatggtggccgtagactacattgatagttgcgaaagcgagatgagtttgaaaaatgttcaagttttgtcaatggctgaaagaaacaatcaagttagattgtatagtagtattggatatgttattactaataaacttgattaaaatttttgttctaatatttttttttatatagtatattatttgtattgtttcaatttttctcataagtgctttatacatttagcatattccaattcttatataaaaatagtgatcccaattttattaatatatattccctatttttctccttaatgctttttattttttgacaatctccttaaagcttttgaaacacaaatagaccatttaaaaaagagaaaattacactctataccttttttanattgtcctcttttatttttaccctattttttaaagtctatcatttttatctctttttttaaacattgtaccacttttgcccttgacacttcaagataatctccatttgactctcttatatcagggtattttgggtacaatacatataaaaatagatatgtttcaattaaatataaaactagaggtaaatttgattaattgattaataaaagtggtgtttttcaacttaccccttcaaaaaagggatattgttataatacctaacaaaagttaaaaaaaaaaattataaaaatacgatttttttgtaatcttatattattttcttgttatatgtatgttgtttgggttaggggtgctcttgattggatcacatctaatggatttagagccaacctaacctaacccaaccaatctaatctaattatttattggatgttggattttctcattcggtccaatactatcaaattgagccaaccgatctgattcgatcaaatggatgcattagattggttaggttccaatcattagatatattaactgattttctatcagattgaattggaaccatccaatcttttttagccatcattaggctgatcaatttcataaaataagatatacataaatatataatttaaaacctaattctcatagtaataaaataaaaatctaacattcatagtaatcattagttaatttagtccaatgacaccataatgaaaatataacaacacaacacaaatccaatctaacctaataagcataagtcttaactcttaatatagacaaattcaatcagagtcgtctcaaagtgttgagagacttaggctgaaatttgaaatgtagctttttcttctacgaaaatttaaaataaatattatttaaattttaatacaaaatgaatttaaactcttttatctccatgtaatagataatttttctcttcacataagttaacttagagtaatatttaattaaaataacatctttattgaagtgttatatattttaacacttttgtaaaataaaataaaatactatatcaaaatataatattgacatggtattgtttaagaaggtacataattatttataaaaagtaatctatgttaacagttatataaatttaagaaattaaatacataataattaataaatatattttttatttaaattataatattgtcattatttattataacgttatcatgaactcaaggtgctatggactaaagaagaacaattgctcactgccatgatgttaaaccttcgagccataccaccattgaaacactgagagatttaagtcaaacaacaaagatgaacaaaggtaagaaacagagagaaagaatagagaaatgtgggagatgaaagaaagatctcattgatatcaataatagcatagctatttatacaacagatcaatcaagaaaatatctaagacagttggacaaaataacagattacaacagaaagtaataaccaaattgactgactataactaactgatgcaaccgaatgagctggcagccaactgtcaattaactgtcattaggatcctcaatagagtccttaacacatgatcactaatttaaaggctaacttgaagctaagaattgagatgttttggccaaagaaagtctcgaatatagacacacaatggtttcagagtttgtaaatacatgaaacaaaggaaatagcatattacaatgtatagttagttgattattataggccttttatgggtgctatttaggtgtaaacaaacgttttttttaagctaatacaacttttgattcatcaaaaaaacgttatcatgaactttttattataaaattcttattagttatttttttttgtaacatttgatttattttttatcatttttttttatcaatttgctcttaaaaatactattatagtaatttctaaaacttttgtactaaaaaaatgaaccttattaacttttacaaatttaaaccaatcactatatgtacataattatatgtagggttaatagcggcataagtacctaaagttttaagtttgtaagcggcataaatccaatgtttatttttagcggcataagtaccaaatatttgtaaaactgtaatttttcttcagttttgtcagtacatactccattttaaatttattaaaggaacatttagaagaaactgatactacatgccacttacaaacttaaaactttgagtacttatgccgctatttacccttatatataattttttattaaaatataatatatacgagaattctacaaaagagaatttacaaaaaacaccccatagatggaacatttaatacctcattttcattcgtgaggtgcatttttttttttcaaaggaagattatgcattaaaaaaggcctcagccataacaatgtttttcaacacagaaggagcattcagctcattaaaaacgcaacctgacataaaatgaccccctagcaacccaatgggaggcctcattagcagatcgataaacaaaggaaattgaaacatttcttaaagataataaaattgagcgacagtaagccaccaataaaccaaactgagacgacatggagactgagctatttattgcttgaactaccaataaagcatccgactcaataatcacttcttcctagcctttagctttaactcaactcagcgcttctttcattccaatgacttcagcaatttcaggagtaacaaccccacttttgctagctgaaaaggcttcaattaatctgccatttgaatcacgcgccacacaaccaaacccgaacttttgagatgcttcaaatatggctccgtcgacattaaccttgacctttaatccttctagtttacgccaatggttgcactgaaaataaacaccagtatgatacaatgacgactggtttttagcaaccttccaatggtcaataaccgaacgagccgacttcacaacacttgctgctgtacaggttttttttctgccataacactttatttcaagctttccataagctccagcttatcattgcaacatctaggataatgtcactacatcccccttccaaaatcgcaaaaaatcagctgctgaattcctgaaataaaccaggaaaagacgctgcagcagagaggttcaagcaacttttagcaagtctgcaatcaacaagaatgtgaaaaatcatttcattctcagcattacaaaatggacaaagtaaatccacatgtacatgctttgtactaagctgaactttagtgggaaggcaacccgaacaagccctccacaagaagtgatgaacttttggaggaacttctagcgtccataatttcttctagcagttttcctcatccaaatgtaaccaactgccagcagccgattgcaagaactggtatgcactcttgaccgtataaagacctgagtgttccatgtaccaataccatgaatcttcttcagttgagttacttagctgtatactcaaaatcaaatttttatccctctccacaaacatatcaataagaatctccatgtcccaagatttctcacccaccaccatcagactagaaacaattgtatcaactaagcctggatgatccgagacaatgaaaggattactatccataggcaaccacggatcaaggagaacactaacagttgaaccattaccaatcgaacgccttgcaccctttctaaccagatcttgagcttcccaaatactacgccaaataaagcttggattttgtccaagttcagcttgtaagaaagagccatttgggtaataccgagccttataaattctttccaccaacgtatcttttttagtgagcagccgccaaccttgtttgcccaaaaaagatagattgtaatcacgaaggtttcgaaatcctaacccaccaacatgcttatgttgacaaagtcgcttccaactaaaccaactcacacccttacttgatgagttagattgggctttccaccaaaactttgccatcataccttcaagactagcacaaatctccttggtcaacaagaacacactcatagcatagcttggaagagcttgagcaaccgacttaatcaaaacttccttatctgctttagacaagaatctagtctcccaactaaaaatacgcttcctcattttctccttaagaaacccaagaatagcattctttttcctaccc

SEQ ID NO: 22554 - DNA, 4303 bp, Cannabis sativa
  modified_base (3502)..(3503): a, c, t, g, unknown or other
tatttagggtgttaatcaacatacgtgtgggtaaatctgttaaaataatttccaacagttcttccttattaggaatttgatctccctcttaaaattttgatactcattggtgtcatggccgaagtcagtatgaaactgataaaactttgacatatccctcttgctcaactcccttttgatgggaggggccttattcaggactggtcctaacgtatatggggcctaaggggaaatcaaattttggggcccctatatataatttaactattataaaaatgatagttctagtgcttagtgtaatggtaaatttttaaaaattcttaagaagtcaaaggttcaatccctcataaccacacattaaatattttttaaaaaaattaaaaagtagaggttaggaattgatcccatgacctcttactttacaataagaccttttaccactacaccaaataattttttattatattttcttctaatttaacactttatctatatattaatattttttttcacaaattcgaggccctgggcgttcgggggcccgaggcgcacgcctagtctgcctaccctcaaggccggccttggccttattgtatgggactgttccctgagtgaccatgaagatggcctcaggtttctccattaagagggtgaagcaagtgtacttctcctccttgtctttctggttttgtggcgtgggagaagtgtttcacttcccctttttgccactatttcttctagagctattattattgcgcttgtccctagtgtttttgccactagaggtttaggcaaagtttctagtgccagcctctacacttgacaagtcgtggggtggcaagatgctcgcgactgcctattgtcgacttgccctgtctaggcttatcggacagcttcctccagcatgataaagccatcatctctgtcgagtaactccttcatgttgttggtcgagatcctccaaatatgtttccaaaagtcactcaatggaaggatgccccctagtatgttcattgtctttcttctgttaggcctttgaccttggtggcctcgaccatgaatctttggatgtaatcctttaaaggttttccttatcattatttgactttgacaagatctttcagcggtaatggtatcatcctcgagaatgagaactatgtgtagaactctcggaaaaactctttccatgaattgaatcttcttggggccagcttgaagtactattgtggagttttttttgacaaagttatcgagaatatgcgacaccgcacatcaccagtaatttttttgagatcaagttgcatctcgaaatacttgatgtgtgctagtgggtcttctcgtccggtatacatctttcatactcacatcttgaactttggcaaggataaggtatttatgtatgctgagaatggtgatgcccttgacctgtctagttcaaggtccgaaggttttggacccgctaggcccttgatcatatcccttatttggtccaactgtgcttgcataaaaggatccattgctgcagggacttggctgactggcccttcttgaataggctacaaccctgaatgtgtcaaggtctggttggtcatactctgggagagggtatggtggaggccagcaagcttttagctctatttctctccttggccggccgctcttagatagggtgactggccttggctagccaattctatgctaggtagggcctagccactcgtatccctcgattgctggtacatctggtgtattaagagtgggtagatcgcataagttgttggacttagctggatctagatatcagaagtgactagactcacttctcaagttgttgttttgggtgtttccacccattcctggacccagacagttgaagatcagcctttgggctactttctcccaaaggccccggatcaggagttcaccctgctggccaaccaggggtgtaccaccaaaaggctggccggccagaggttgtccaagtgggggtgttgtagagcctgagatccctggtcgggcccctagattgttggttgccgagatctagctattctcaccatcaggccttcatggcaaggcttttcctcctttgggtaggggaaggtctatcctagttccttaggaacctggttggacagtctattggtagaccctccccgatttgttgactagtatccctaagagtggatctttgattagatcctgacctctccaaacagttctttcatttaaccgccttatcaagtcgctagcttatggattgcgacggtctagcttcgcctagtgagattgaaggatgtacttctagtcatccatccatcctagaaattcaagtctctattgtgcacatacatcatagttaatagcgcgtggttcttcagtctagctgacttggcagacagcctctctaagtctagctaacttgagatcttttcccaagtatatatggggctcgccgattcctagccccgtctctccagcataatactggggacaaggtctggttgttttgtttgggggccgctccacgtgggtccttccttcaatgggaggcaccaatgaagggtcctccataggaggcatggaccgattatttagatccactagaatagttgtgtcaacctagccaggtgtggtggccagattggtggtgcctgctgagatggcaagagtggccatatgtggtgttcgtggagattccagttgtaactgaaatacaaatatcaggatatgtaatcatagggtcttaagaaacctgatgaggtagatgttgtagccaaagttctcctcgtgttaaccatgacgtttgatcagataaattatcaatttcctctcaatgaaagcaccaaactgttgacctcaaatttggccaactgacagcagagtcgaatttaatgttgatgcttgccacgtgttacacaattagaagaataaagtagatagacatagaattttatagagctttgaccctcttagttagcgggtaaatacctacttcccttttagctgtattgataccgagagataatactactcagatcactatagtgatgggatctgaagtagctctctaaaggttacaatgtaggaatcagagttgagaaatctcaagttagagaagagcaatgggcgtgtgagagaaagatatgagttataagacttatagctttgagtttgagacttaatgacttacggttttagggtttgactaaggctctttatataagagagcttacacctttcaaatccttttagaaataggtaaaataaactattatttacatattaaattaataaaatacaaatgactaaaatgcccctcaaaaataaatattttccctgtatttttgtgggtagttaaggcccaatttgtgatcttgtttgttgtccacgtatgaaagctgcgcaccgaaatcctgtcaggccaaaggctggccggccatgggatgttcagaagttgggcagcctatgctggcaatagggtcggctaggggtggccggnnagcccccttgaggtggctggttcgtcactctgtcgtcctgcttgagtactcggacccctatcgttggttaaagtgttgagtagatgacttgactttcttattagcgagatgtattggcacgtgacattgatgttggccacctaaacatgtcacgttaggtggacaaaaataaaaataaaataaaataatctatgaataaataaaaaaaactcaatttctagtgtaataagctcttttgttatatagttagatttagtataacatacaaacacctcaaaataatataaatggggtcacttttgatcggtttgtcatttgtgtctttgagatataggctaattaattctacattaattccttgatttagatatatcataataatttatataaaaaagcgagtcgaaaaagatggagcaaattagaagactttagttttgtgtccactttttgtttattttttatttttttcgaaaaaaagaaaagagatagaaatagtagcaccacatggctgaccctagcctaaagaaatttgagaaaaggaagcacccctaactagctagtcccccaccactccaagagatgcaatttataataattcatgtcctcaatattgaatacacagtatataacttctttcaacccactgcctgcaaacaataaataattaaaataaaaatctctctttcgtacacactctctctctcactctatatctctataaatattcagcattggctagtcattttttcaaactgctcagtcacataactctctttctctctataaaatacatcttataa

SEQ ID NO: 22555 - DNA, 1269 bp, Cannabis sativa
taactttttagcttcaattttttttattaaaagcataaaggaaattactccctttattatttttttaatttttttttttaaatttacagtttaagtttctaaaatgcttgtagggctagttgcaataggagtttttatagtatcaatgttataatatagtatttatgtaaatttttaaaataatatttttttttcaataatataattttttaatattttgtcacatcatatatgtatatgattaaacctcctctaaaattttactagagatgcttttatgtacctccatttccctattctctttctcaaaataaataataataatatgagatgctgtaccttctagaaagattcatttctcactaacaccaattaatagatataaaaaataaaaaaataggaaattccctattttgtttttattgttgttgtaaataactttataataatagtggtactatctaaaaaaataaaagtttacttttgaacttcgaaaattcaactctgaacttcaaccataagaatgtgtcgtcgtggccctcgtgggtctatttatcaccatacatacatcaagatgttactcgttttttcttttcgtttctatttttttttttctcatataagcaaaagtagcctacatcaccttttgtcttgcagaaagtcacaacaagcaatatcaaaaaacttgtcttttgtttctggattaaaatgcaaaagcttttaatttggttggaaaattttacttggattaaaattattttacttaatttaagttaacttatattagtataggaaaattttattcacaccccataaaattataaacacactctagtttaataatttttattttatataaaatatatatctttaatttataaaaaaaaattatccttctaatattcttaaaaaatacacttataaaataaaaattaattttttttcaaaatattaagacaaacaattaaaattaaatattatatgaaatgaaattaaaaaaagtataaatgatttttaaaaaaatgtgaaaataaaattaaaataactatttatatttagagaaaataatgtgaaaaggaacttttagaaaaaaaaaatattaaaagtaaacgttagagattaattaaaattaaaattaattttcttaaaaaaaaaatagggtgtacttataattttatggggtgtaaataaaattttcctataacaggctaacatttcatcaaacctaattctacccctcatttcaaacacactctctctctctctctc

SEQ ID NO: 22556 - DNA, 1030 bp, Cannabis sativa
ctaccctttctagtgatattgttttgatctgttacacccgagaagacttctatatttatcatcttgctatactttccttattccactgtcttattatcaatgtgtaatgtgagactgatattacttgttgtccattatctctccaagacaattcatttattacgcaatgagttttttgtaatttccgtgtccatgtggcacttttatatttatgacttaaaatatgggcataacaatattaatattataataaaaaaattaaaaaatgaaaatagtgtaatattgagtttttaataaagaaaaaattattatttttaatctattttaatatatattcggttggtacattttgagtcattataacacatttttataattaaaacaaactattcaaaatttatacattgtgatgaacaaaaataatcttcttttatttttttttttccgaattcatctattaatttttttttaaaaaaaaataggtatattttcaacataaatatcctaactagctaatctattattaatttcttttaagaaaaaaataaaaagtcttataatttcaaaatacatataaaataatgctgataattaattttttattttttttttttaaaaaactttaccataatataatgacggttacaagtagaatatggtgatgacaatgtagtgacaactacaaatgagagtacggctttaaaattataaaataagttttctgtagatttatatttaaacttattaagaaatatattgacaaccacaaataagatataaaattaataatgactttgaatgtaatagtgactacaagtaaagtatggtgatggcatcaattttaaaatcatacaataagttttctataaatttatattaattattatatatttttttttaaattttaattcaatttattcaaacgatatatattttgaaaactaatcgtataataatatacatctataataaaccaattaaaaaaaagtaaaaacataaaaatatccaaaaaaaaaaaaatactactttt

SEQ ID NO: 22557 - DNA, 10509 bp, Cannabis sativa
  modified_base (44)..(74): a, c, t, g, unknown or other
  modified_base (7307)..(7320): a, c, t, g, unknown or other
  modified_base (7808)..(7810): a, c, t, g, unknown or other
taacatacatgtaatcataattcacttcaaaattctaaattgannnnnnnnnnnnnnnnnnnnnnnnnnnnnnngggcataaaacccaacatgtttgtacactcagccatgtagtctgcaaaggcgtggccctttatggccattgttggttgatatttgatgttgaattggccaagttcaatggcccacttgagtagtcggccagatgctttaggtttttataaaacctattgcaatggttgatcagtgtacacctttattgggtttgcatagaagtatggcctcaactttttggatgccaagagcaagctgtaggtcagcttctccatgagtgggtactgacttttagcgtcggttactctcttgttgatgtagtatacagggtgttgtacaccgtcttcttctcttgttaggactacactcacaacatgttctatgattactaggtacacacctagctcttcattgtctaggggttttgacaacacatgttttttcagctcctacaatgcttttgcacattcctctgtccatcaaattttttgttgcctctgagattgttgaagaagggtacacacttgcctgtagacttggatacaaatctaagtgcagtaatgcatcctgtaaagctttgtacttccttgatggtcttggacaatttcatgtccaaagggcttggatcttgtctgggtttgcttctattaccctagcattaaatatgaagccatggaattttcttgaccctactccaaaagagcatttgagggagtggagcttcatgttgtacttgcggaggaccctgaagcatttatctaggtcttccacacgcccctagcctttttagacatgacaagtatgtcgtccacatacacctccatgttgcggccaataagatatttgaacattttgttcacaagcctctagtatgtggcccctacgttttctagcacgaaaggcatgcatttgtagcagtacgtatatgcctaagtctgtcacgaggcttgtatgttcctaatctggcggatgcatctttatctggttgtaaccttaccacacgtccatgaaactcaaaatttcatgactagttatggcgtccactagctggtcaatttttggaagtgggaagcaatcctttggatatgcttttttaaggttagtgaagtcattgcacactctccacttttttttgggtttgggcactagcacagggttggatacccaaagtggatagaatgcttcatttatgaagtcatgggctcgttgcctctcggcgtcatatttaagcgcttgagtgcattctttgtccaacaacctcctcttctgttgtataggtcggatgttgggatcaatgttgagggcatgggtcatcatagaagggtcaattctgaccatgtctcctgtgaccatgcaatgaggtccaggttttcctttagaaattttatcagcactgattttatttctaacgctaaacccttcctaatcttcaatcttctagctagagaagtgtgatcaacctctacttcctctagctcttctacaagtccaaagctatctgcaggatccccagagcgaggatctatctctacgtccctgctttgggctgggcatcattgccctttgttgggctcttttttagagctcttggcaggcatcttctctttctttccattagacagggccaagttgtaacaatgacgagtaaactattggtctcccctcaaacatcctaccccatgccttgttgggaatttcaagcagaggtggtagatggatgtcaccgcctttaggtcgtatagggcttgttgacctatcatggggttaaaagttgagggaacctcaattacgacaaactccaccatcagagttctggttgttggatctccaacagtgaggggtaatctgatatacaccataggtgcaatgccatggcgaaagaaaccatacatcacttaactgcagggtgccaaattaataagttggagccccatctttttgtatgttgatttgaaaagaatattggaggaggctccattgtccaccatgcatattgccacagtcatattcccaatttttggagtaatgaccagggggtcattgtgcaggaaattggcttaagcagcatctgcttctgtgaaagagatcgtgggctctccaagctttggttgcttagagcccctttcttcgatagctaggatgtcatgttttggcttgtgatagagtgtttgagcatagtgctccttagatttactgatctcgcttgcaatatagagtcccccgataatgaccccaaagtgacccgccactggaagtgtcattaggtctccagtttgggcaccttgtgcctatctctggtcgttctgcacataacaatacatatgggaattgttcttccatataaggaattcaatctccctcttcaaattttgacactcgttggtgtcatggctaaagtcgttgtgatattcacagaactttgaaatgtccctcttgctcaactctcttttgatgggaggggggttcttgtatgggactattccttgagtagccatgaagatggcttcagatttcttagccaggagggtgaagcaagtaaacttctcttccttgtccttttggttttgtggcgtgggagaagtgttatacttcccatttttacaactgtttcttctagagttgttgttgttacgcttgctcctagtgttcttaccactagagatttgagcaaagttgttaggttctgcacataacgacacatatggggattgctcaaacatgagttggttaagttagttatttctaactatcttaacaacctcgtttcttgtagccaccgactttaggatcttgatcctaagcctataatgtaaagaccgcttaactttgttttggaaattcacagataattagggtttaattatgaaactagaatattatttatgatttatcattttaaggagctttatttgaatccaggatgtattatttatgccatatacgaaattttatgtttttgcatgtttcgtgcccagcaatattggaacacgtcatttggccaatagaatcacattttaatatttagtagtagcggggcaatatagttagacattgggaattttgggattagtcgaggttttaaagatgaccaaaataccactaagtgacttagaagctttttggatttagtgaggggtaaaatggtctttttggccctttaatcccttgtcttttagtgggctttacttaagttttattatctgaatatactctctaattaattagatatacattagtttataccttttatcctaaaattagaaaattggaaagaaaatagccttctctctcttcactccctctctctcacgaattccttggagaaccatagcaattggtgtttcttcagcttcattctgtggattttagttgattcttaatggatccattgaaggtaacccctctagcacctttctccttggttttcttaagctttaagtttaggtttttgcatgattttatgagtaagggttttgtagcttttagggttgcttgaatttcccttctgaggttggattaaagttatttatcttgaattaagcaggttttatgtgtttctttggtggtagagaaaggtttgagtttatgaactcaagctttaatctacaatggtggtttgtgattctagttgtgtttaggtgttttattgcatggattatgttcattatggtttaataagcaggtttggaaggtttggtgtgatttggggtcaatttgagattgtgggatgattttgtgtgattcctgcactgaaccggaatttcgattcaggggggcttgtaggaaccggtcgaccagtcggtccctaggaaaccccacagaactggaattctggttggggacccggtctaccggttggggcattttagggaaccctagtttttcccatttttgcaatatttaaggtattgccctgttgtccatcaatagagaaacttttagtttcaattttcagtccctgaaaagtgctttaccatgtcactaactaattttacgaataatgttatttaagggtccataaatcgtcaagcagctgttccactcaggttggctggcacacgtgaattcggtaacgaggtaagaaagtataatgatatacatatgcacttacatgtttagcatgcatgttagttaagcctgttagattacattataatagcggtatcagtatatttagtgttatattggatatcgataaatgtatgttggcttaagtgctacttgacagtatcatatcggtacgactagtatacagagtataggctgatattatggtcaatagtacaatcgtacgaacgttcttgactcagcagcgtgttggacacgggactagggttatagttgggtgtatgggtgcctgattataatccaaattattgctatttatttatttatgcttctcttactgagtttttcgactcataaatattgtttgcatgtgtaggtaaaggcaaggctaaggttgagcagccatgaaagcgagcagattaagattgaacatgtcggggcggttaggcctggagcgtacaatctttgagacatgtgggtgtatagtcgctaggcgacaacttttgtaatatgtactgtgaaactgttgtaaatattttgtaaatgggatcctgctttaacataagtaagttatttcgatatttatagataggtaaataaagttttaattatttacgattttcaataaacttgttgattagcaacaagctgcacaattaagttaaaaatcacgttaatacgcctaaactagtagggtgttacattttggtatcagagccgccaggttgtcttccgaagatcgtcacggcatgtaaaatcatcatcaacaatcagctcgactcacaattcagtaagcatttataactttagtagcttatctgactagtatgctatagtaaaagcctgataggaagcatgctagtagtatgataactaaataggctcatattttaaatttccaaaataagcgataattagtaagttttcttgctcgcggatctgaccatgctagctcttggtttcacaggctgttataatagaatggatgctaggcgaaattctaggagtcagggtaactcaatcagatctagtgggcgtcacggagctctgattcccccagatgttcgtggctgaggcagggcatgtagtcgaggacatgttaacccgctgcaggttgcccaggaatagaaaaatcggttgttgcaatggaagctagaatcaaaaaataagaagaggaaaacagatgcttgaggcatcagggtgctcttacaatgcctactccagaaatgtaggtggctcctacccctgctgtgcaagcaggattggttactgcagtgaaccgaatggaaccactgtatgaaaggttccgtaagtaggcacctatagtttttttgggaggtctcgatttgatgaaagtcgagcaatggctgatggttattacaagaattttgaattttatgggcgtcacccgcaatgatagagtggcttatgccacattccagttctaggcctggtttggtgggacatggtgtccctgactcttgatgttactactgtgagctgggaagagttccaagaattgtttaacgcgaagtattacaacacggtggttagaagtggaacaagaaatgaatttacccagctgaaccagaaggagaatatgagtgttactgaatacacaatgcagtttgattgattggctaggttggcctcgggaattgtgccaaccaatttcagcaagaaagaaaagtacatggatggattaaattcaaagataaaacatgatcttatgattactactgacgacaacaccacctattctaacatggtaggaaaggcactgcaagctaagggtacagttgagtgcacctaggagtctcgagggactcaggttgttggtagagcccatactcctcctacctctagttatggtagtggttgtagtggctcgaccaccaatcagaaacgaaagacaccatttgcacccagtggctcaggtcagaacaagaggtttcgagggaaccaggtcgagccaaccatcagggtttttccaaaatccgatacacttacacgaagtgtcccagttgtaagaagcatcatctgggtgagtgtagagggaaggcatgtttctagtgttggttgccaggaaactataaaagtgattgcccacagcttaagaaaggggaacagaagacagctgcaaaacacgctctagcaagggtgtttactttaactcaagcaaatgcagaagctagcccctcaatttatctcaacaactcttatttctctatattatttaaatttggggccactcactcttatatggcagccaggatttttagcaagttggatagaccgcatgatagttatgataaagggtttggaaccctgctgcctggcggggaattagttatctccaaatggtggattaggtctatgtcaattagaattgaggatatggagttaagtgctaacttgatagaattatacttggaatggattttttatctaagtactcagctagtattgactgtaaatggaagatggtgatcttccaaccagagggcgaggaaccgttcgtttttgtgggatcattttagggatcccaaattccagtgatttcagtattaacagctagagatttgtgacaagacagatgtttaagatttttggcagtggtattggataccacacggtttgagacagttcagtcagaagacattagggtggttcaggaatttttagatgtttttcgtgatgaacttctaagtttaccactgtagagagaaatcgatttcgttatcgatctagcacctgaagcagaatccatttctaaggcaccgtacagaatggctctagctgaacttaaagaatgaaaaattcagcttcaggggttgcttgacctagggttctcatggcctagcgtgtcaccttggggagctcccgttttttttgttaagaagaaagacggattcctacgcatgtgtattgattactaggatctaaataaactgactgtcatgaacaaatatctgttacctaggatcgatgacttattcgataagctttaggagaaaacggtgttctcaaagattgatcttcgatcaagttatcatcagttgagcattcgataggaggacattccaaagactgctttccgcactaggtatgggcactatgaatttttggttatgtattttggactaaccaacactccagcaacatttatggatttgatgaatagnnnnnnnnnnnnnntcctcgatatctgtgttattgtatttatcgatgatatccttgtgtactctcaatcagaagaggagcacgagcaacatctttggatggttctacaacgggtatgagaacataaactatatgataaagttaagaagtgcgagtttgggctatttcaagtgtcttttcttgggcacattatcagtaaagatgaaatcaaactgtatccaaggatgattgaatccgtcaagaattggacgagacaaaaattagttatagaagttaactttgttttggaaattaacagataattagggtttaattatgaaactagaatattatttatgatttatcgttttttggagctttatttgaattcagggtgtattatttatgccatatatgaaattttatgtttttgcatgttttgtgcccaacaatattggaacgcaatatttggccaatagaatcacattttaatatttagtagtagcggggcaatatagttagannntgggaatgtcgggattagtcgaggttttaaaaataacaaaaatacctctaaatgacttagaagctttttggatttagtgaggggtaaaatggtctttttggccgtttaatcccttgtgttttagtgggctttacttaagttttattatctaaatacactctctaattaatgagatatatattagtttataccttttatcctaaaattagaaattggaaagaaaatagccttctctctcttcactccctctctctctcgaattccttggagaaccatagcaattggtgtttctttagcttcattctgtggattttagttggttcttaatgaatccattcaaggtaacccctctagcacctttctccttggttttcttaagctttaagtttaggtttttgcatgattttatgagtaagagttttgtagcttttagggttgcttgaatttcccttctgaggttggattaaggttatttatcttgaattaagtaggttttatgtgtttctttgatggtagagaaaggtttgagtttatgaactcatgctttgctctacaatggtggtttgtgattctggttgtgtttaggtgttttattgcatggaatatgttcattatggtttaataagcaggtctagaaggtttggtgtgatatggggtcaatttgaggttgtgggatgattttgtgtgattcctgcactgaaccggaattccgattcaggggggcctgtaggaaccggtcgactagtcggtccctaggaaaccaagtagaactggaattctagttggggaaccggtctaccggttgtggcattttagggaaccctagtttttccctttttgtaatattatccatcgatagagaaactcttagtttcaattttaagtccccaaaaagtgatttagcgtgtcacttaccaattttatgaataatgtgatttaggggtctgtaaatcgtcgaggagctattccactcaggttggcaagcacacctgaattcggtaatgaggtaagactagtataatgatatatgtatgcttttacatgtttagcatgcatgtttgttaaacctgttagattacattgtaatagtagtatcaatatatttagtattatattggatatcgataaatgtatgttggcttaagtgctacttgacagtatcacatcagtatgactagagtatgactagcgtactaagtataggctgatattatggtcaatagtactatcgtacgaacgttcttgactcaggaccatgttggacacgggattagggttatagttgggtgtatgggtgcctcattataatctgagcttaaagaccgcttaactttaatttggaaattagcagttaaatatggtttaattatgaaacttgcatattagttatgaattatcagtttacggagatttatttgaatttacaatgtatgttatatatcatatataaaatttcatatttttgcatgttttgtgcccgacaacattggaacgcggtgtttgggtattagaatcacatcttagtatttttaatatagcgagccaatatagttagacattagaaatgtcgggattagtcgagattttagaaatgaccatattatcatgtggtggttttatgactttttgcctaagtggagggcaaaagggtattttttcttaagtgactttttgtcctttagtggactttaattggatttttattctgattttcagctgaatataattagataaaaccaagtgttatttcctcattttattaaaaatgaaaaattagaaaaagatacttttctctctctccaagttctctctctttcgaaccctatagaacccagctacagtttgttgttttgctgcttaattcaaggaattccagcaattgttttgtgattccaagctcaaggtaagttcctagcaccttctctttgttaattcttatgttttaagcaaggtttatgcatgatttcgggattaaggttactattcttgtggtttgttttcaatgaggtattctgaagttagatttatgtttatttagctgatttgaagttaattggtaggttgttttagttgttagacaaagtttgagttttagaactcaaactttggtctttaatggtgaattttgattttgagcatgctatgtaattttgttaattggattatgtttattggggtaaggaaagtttggtttgatttaggttacgaattggtcaagttttgaaaatgtttgggttaccttgtgtaaaatcggttaaccagttttacaggccctgtaaaactgattaaccggatcagaaactagtttcctgaactttttgtgttgtcgattgggttagttttacagctttggttggttatttccttgacagtttagggtattgccatattagcttttagtaggaaagttttttatttaaaacctaagtccccggagtgatttagcgtgtcacttacccgtgttatgaacgatgtgatttagaggactgtaattcgccgagcaattgttccactcaggttgcccggcacacctaaatttggaaacaaggtaaaattagtatgatatgcatatgtgattacttgtttagcatacatggtagttgccgtcagaataacatatcagggtatcagtaaggtgtacatagagttgtaccgagatactaacagatatatgttaggcaaatctatagcaatcagat

SEQ ID NO: 22558 - DNA, 4362 bp, Cannabis sativa
  modified_base (48)..(50): a, c, t, g, unknown or other
  modified_base (743)..(743): a, c, t, g, unknown or other
  modified_base (4181)..(4185): a, c, t, g, unknown or other
attttatcctcaaaacacttagcttcttataaatgatatttcagtaannnaatataattactgaaataagagctcttctatttatgtccttaagccaagctctaagaaaatcatcatttcacttctaactagttatagaagttatagattctatatctatgattaacgttcccactcaattgtactaccatgttcccaagatgcaagtattacgccgatctaaatggtcagctgtaacgaataagttaaagaacacgtgtaatactttaagcaagaacctaattatttcaggattgatcttttgatttaatatcaactaagtgacattgacttagaaaagacattataataagtttatgatatcttttttactgtcaatatctgtccagtctgatgtatagccaatacatctgatactagtatactttgttaatgacctggaaaaaacatgccacatattagtgtgtaagtaaactttatcgttgattattacgtcagtataaatctcgtgcactcatatatactgggactaaatattttaaagcatataataatgattattttccattgtgcatacaacactattatcatcaatgacaatatgttcaagatttaatagaatctgtatattaaaactataatcataaaaactacacgtagacctaaatgatttctgatcttccattgatagtaaataagattatatattgatatgggttttacttagggcataaaatcccaanaaactcccacttgcactattataaagctagaagtgcattcaatcaatctattgtctcgatgttcatataaagtgtagtgtgtttgactttacacaagtaacgtgatctttaaggttgaaacaactaataaccttatcaactattactttcttttgtgttcacagtacattgtaaaacgccgttatctatatgcatcactcctcttgggatattgaattctttactacatgataattgcatctgaattgtaacaccttactagattagacacgttatcatgattttaatttgttgtgcactcctttgttattcaaaaagtttattgaaaaacgtgaataactaaaattttcataattaaactttaaacttgaatatataaatattttacataatttggatcctatttttaaagttacaaccgttttacaaaatatttagttataaaagttattgctgccctaaagattgaacactctaagtctaattgccccgatatgaacaatcaccatttgttcgagctcactactgttcaaccttagttttgcctttacctacacatataaataatatatatgagttgacagactcaataagaaaagtataatcataatgtaaacataaactggattataacatggtgcccatacaccccaatcacaaccttatcttgcgtctgacgcatactaagtttagaacgttcatacaatagtacaattgactaataattatcaactatactcgatactctagtcgtacggatgtgatagcgtcaatctgtactttaccaaacttatattcgtcagtattgtgcaactctatgtaactaatattgttcttactgatatggtatctaacatacaatcataaaatatgcatgctaaacatgtaaacacatataaaattattatactaatctcaccttgattccaaattaagatgtgtgagtcaatctaagtgaaaactgctgctaaaaaatatacaggctcctaattcataatatacgtaaaattggtaagtgatatgctaaatcactttttggggtcttaaactcaaaactaaaagttttcctatcgatagatagtgtggcaacaccttaaatattagtaaaacgtaaaaaaactaagccccgcaatctgaaaaatctcgtgaactaaaagcctaaaatggtttactgttttttggggtcccgccagaaaaactagttcaccatttttggaaaaacagtgaactgtttttctcttcaaaaaagacctaacttcgaaaacctatacaaatatacccagagttgcaccaaactctccagaacacctattcaagacataataagcataatccaaccaaaaacaacaattataatctcttggaaataaattcaccattagagacctaagtttgagtgtgaaagctcaaaccttggtctttctcaacagcaacaacaaacagcagcataaaccacttagaacaacttaaatataactcaaagaaaaccttcccaagcaccattgattcaaacagcaactaaaacctaatcaaatatgcaagaaatctagtctttaacttgaaacttcaaagaaaatttagaaagaaagtttactttgagtggataccaaaagatcttgtcaaaactccttgaatttacttttaattggtggactttgtggttttccttgggtcttggttatggccgaacaaagagagagagagaggaagagatttggatttttctagtttggtgatttcttgattttggtttaataaatataatagtaaaagttctttgtcttattctaggcataaataaactagaataacttagataaattaggaattacactaaatacaagtaccactaacttagagaaaataccaaattgtctcttgccattacaataaagtaatctttaacacttaggggtaagatggtctaagccataaccccaaatatttccaaaattctaaatatctaaagtctcgctgattttaagatactaaaccatatttaagtggttttataggccaaatatcgtattctactgttactagacataaaatatgaaaaaaaaaatcatatatatcataattatttgcttatttctaaaaataagtcctaattatttgctaattctaataataaaactaagcgatcattacaattatctccccgttaaaataattttgtcatcgaaatctaacctgaataactccgaatactaagttctcatatcgaactctaattcgtaagtggccggagtttactgttggcgtcgaaaaagtcgatggagtagctgccagtgtcagaaaagttggcgaaattgttgacagcgccaaaaaagtcgtcagaattggcattgtcgctgaaaaagttaccgaaaaaataccaagaaattggtttcttcatcaagaaacaagtttttggtgatttttccgatggccaatttcgtttcgacgacttttttgaagtttgttgtcggtgccaaaaaagtagctagagtagctgtcggtgtcagaaaagtcaccagagttgctgccgacgttgaaaaagttatcagaattggcattgttgctagaaaaattaccgaaaaaataccaagaaattggtttcttcatcaagacacgagtttcttcatcaaggaaccggtttcttgacgagcaccaatttctttatgattttttcagtgatttttctggtgacaatgccaattctgacgactttttcgatgccagtagctctggcaactttttcgacaccgacaactactccgacgactttttcggtatgggcagcaaacttcgacgatttttccagcaccagtgacaaataaagttgcctaaaaacaaataaaaacattaaatataggatttgaaaaccaaatttacacatatatgacatctcaaataccataaaaatacctaaaaataaaaaatgccatataaattggtcaaacttaaaattgtcatatttaagtaaacaacttttaaaatcccatagtgagtgtaattttctcaactatgtataccaacaatccaaataatccataaaaaataaaaaaagtcgatataactttaaaataaaaataattttaataaattgatatagatataaatgatatttaagtgatatgtttctaaatctttaaaacatataaataaaaaaatatataaattgaacattaaaaatgtgagaaacgtgaaatatatgtggcaaaagacaatttaagtaataaatagtataaaatgatcatttatctacatgttttaaaatgaggtcatctacttacatagtactataatttggagtcatttattatagagatgattttacaaaaatataaaaataaaaaaaaatttacaaaaacacggttgtacgaaattttaaatattttaatgatttttatgattttatttacaaaaaatatgatcttttgatgtatttttatnnnnnactcttgttaatttattgttgatacttttatttgttattattttttaatttttattattgtttagatattattttcttattacttatatataatttttgaccgagattttcggcaactaataaaatattataaaattattgagctgtaagaaagtgagagaaggatttttacgtggt

SEQ ID NO: 22559 - DNA, 1901 bp, Cannabis sativa
tcatttttgacattttgtaggatacttatggtcaatattgaggtgatggcaaatcacatttgagtttatcccgagcatgtctaaatggctccaagtgaattgatcttggtttgccattagaaaagtgattaattactattttagttcttctcccaaacttttcccattataaaaacacttaattggattgttcagatctaaaatcacctctttcaactcttcaatcagcttgagtttgttattatcatcacggatcctaggatccaagtcttttgtttccttctcgatttcttcagttagaattaccatcagttgatgactggctcctctttttttcagttccaccttgtagcactcccgggctaatagctagtcgcctctaattgtccctactctagaatgtgtaggaaattttaaggacaaatgttttattgagcttattgcccccaattcaattaaagttgggtgacccatcaacacattataaacagaggggatgtctacactaaaaactcttgtatttgggtcgcagacagcggtggttcccgcatagttaagggaagatcaattatgcctaggtttgcaacactcttgcttgtgaacccacatcaattaaccatgcaaggtcttagttttgcctcttctaatcccatcattttcaatgtttccttataaaggatgttgatagagcttccattatctacgagaaccctctttattcctttattggcaagtttaattgctatcacgagaggatccgcatgtggatatcatacatgcttcgaatattcttcagaaaaaatgatgggtggttcatttgacttcactctcttcataggttctagagcaaatgcagatgattcattttttttacctcatttatgtacctcttttatgcactattgttgtttcctgcgaggtgtggccctccaaaaataactaagatatacttgccctctacatggggaggttgtaatcttggattattcgggtaattgggttgattaggctcatttccttatgttcccacgtattgcctaaaataacctcacgagattagattttcaattttatcttttaattgacggaattccttagttatatgcccaatatcttcgtggaaacgacaatacttagttgaatattgcttattcctcgcatgcctcatcggttctagtctgcgaaatgcgactcgattttcattggtgaggtagatgtttttgcgagtctcatttaatacagtatacactgaataaataggtacatacttctcatgcttcttttgtttcttcttatccttggatgagtctcttgagtcatccttccacttcgtatttgatccattgggattttctaccttcgtagtcacggtggtcgctgttgttgtgctagtgctcggtttatctcccgagcctgactttaatagctttattttattccgtgcttcttctttttacacaaaatttatgctctttcattaaattcattgatattccttataggatgcccttccaaatcatcccataattctccccctacagtggataaattagttgtaattctagcctgaagggttattaattgaatgctatcattcaaatttctaactttaactgcacttgtactgaagcaactcaagtatactttaagggattctcctggttgttgcttgatgttagtcaatgaggatgcttctagttgatctcgcagcttgaaactgctttttgaaatccttcgacaattgctcccaagaagttatggaatggttggtgaatttgtcaaaccaactacttgtggctcatgtcaatgaagtcaaaaacaatatgcatcgcaagttttttgaaacattgcttgctcgcattatggtgttaaaattgtttaagtgggcgacaggatcagtg

SEQ ID NO: 22560 - DNA, 1217 bp, Cannabis sativa
atcagtatacgtgtcctaaaggggtctggtctcgagtttctaagtgagagaaatctcactataacaacagcctactgtcaagtttcttgtacatggtgtaggaaaaaatctaggaacaatagtacacgtgaaaatcgcaaaagataaaaaacttcatgtccttgttcgtagcactagatgcttcaagaaaatgatggcacaagtgcagaacactaatcgttgttgatggaactttcttaaaatctatatttagagggcattgctctcaacctgtacacaagatgcaaatgaccacatatttccccgggcattctctgttgtggatttagaaaattataacatatggacttgatttttttataaaattaagggaaacatatggggttagagaacaacagtgcttaatattagacaaacatgagagcatgattaaaacagttgctcatatatttcaagagataacttacgactactgcatgtaccacctattaagaaaccttgaaaataaccttcaagaagaatgctagcaaactcaagaaatcattctttccagtagctagagcatacatagagaggaagtttgaataccatatgagtgagcttgatagcttggacaagcgtggtcgaccctatttataaaaagttggataccacaaattgttaaggtaccattgcaaacacaataggcatacaactttgacttctaacattgttgaatctctcaactcgacaaacttagtagctagggaactaccaaccactatagtaatggagtctttgcgagccttcatacaacaattgacatacacaaacataagaaaaccatagacaatgaccacaagtttgacacctgttgctgagaagaagttaagcaatatctttgtggaatcattgacaaaaaaattgagagcctctctaaatagaattcaaattcctctttccttctcttcataattttgaattcctagtgaagagtaccttgccctctcgattcaagtcaatactcaatcatagcgtgaaagattgtgaagaatttcaacacctaaaggagattcaggttcatattttggtaatacactgggatagaaaggaataagggttagagatctgaatgaaaggagctataatattttgttgccaccaatataaggttttctagaactttatatgtgtttatttcattgttttaggatattcatgtttaggatgttagatta

SEQ ID NO: 22561 - DNA, 1646 bp, Cannabis sativa
aaagtccttaaatttaataatctcaatagttccgggagcacgatttggtacatgtcaaagttcagggagaaaaattaataattaaccagataaaaactatgtttagataaaaaataaaaaattcaatttctaaattttatttagaaattagggtcctagccaaacgggtcattgtagtgaaagccaatggtaatgttagtcttattttttaaaaaataaataaataaacaaacaaaattcatcaatagtattttattcatcattcccaataattcccatatagtaatttttattaaagaaaaagggatcaatacaagatttatcgcggacacttttacaaagatcaaattccatatttacataaaattcagatcaaacaataacgacaagcttctatattattgatatttaacaaggactaactttaagatgccttacttttatttgtaagagaggagaaaacaaacaaagtacgtatctttttaataatggttcttttctttgtcttgatcaaataaaacttcagacaccacctttgctcctcttccttgggccatgtaaaggcctatgtgatgcattagattctgcaatgaatgagatcaaacaattaatccaaaaacacatacaattcaagtttctattacttttttggcttattggttctatgcctatataaagagctttcgatcttaagtcactttactagaaaagtaaaagcagcaccaaaactggtatgaaattaattaaggattagtctaattcaccacagaaaaataagaactcaaattcaagatatttactcctttgttgctaaaatatgaagatttgttgcaggttgacaccatattaagacacttgaaaagttgatagttgaaaaggtacctgagggtgagatattagatccttggatgttcttgccacatgaactgggatatcataagtggcacagccacgagaatacacaatcacatcctcaaggggaggaagatgccgacgatttcttgcagacaatgtggaacatacgaagtctagtacacatatatctgtacatatccccaccaccaaaatcttcaaaatccaacaaaaggggttgcaaagtattagtcaacaaacaacataaaccaaaaaaaaaaatggacaagagacaagacaaatggaatctagtaaatctcaccgctttaatttgattattcttaacccaatcgacaaaaacattggagccatctttttcaattgagccgagaaacccatcaatacaatctttgcatctaagtgtgacattagattcattctctaaccattgtaaagctacacacaaaagacaaaataaaacattaataaactaaagacaccatggagtgaattgttaagaataattccggattcagattcagattcagattcagattctccctattagctattgcttgctagctactgccgaaacttggctttattcactcagacttttccttgcactgccacttgtctatcatatcatatcattccatttccataaagagatataaaagaaccattttgtagtaatcagaaacagaccatcagatttgaattggagaaagtcactgatttgtgatgagggatatctcagttgataataatctaatgctctagtcttacacata

SEQ ID NO: 22562 - DNA, 1488 bp, Cannabis sativa
taaaaatactaatcctatgttagttaaggtgttacaaaacccctcaatgcatatctacatttatgagttgtgactgttcctatctctttttcccttatccttctcattttaacaagataggccaagtaaagccacattttgggttggaacacaaataagcatggaatgaccacttggtagtaaagttatgctacaaatctggaatatggtcggttgacacttctttttagcctcatctgtatttcttttctcttcgagcttctcgtagtactggatatagaaaaatcaccaattaaaatgtacgcataattgtaaacaactattatcacatggagtaactatttgaacaaaaggaacttatggactataatcttgcctttttttcgttttgctgctctttcatcacttttaaatctgaaaggagatgttatgatagaagattgttatttgcttcctatcccaccagaggattttgagttggtgggacataaacatttttcccaaaataacagaaaggacacatcctattattatacaaattacaccattcatattattatattaatatttaaattcaacagctattgcaaattacaccattcatatcagatccaaatcaaaaatgaaataattcaacgcaaaagaagaatagatttgtaaatgtgaaactgaaaaggtttaaagaaaatcatagtctgacaataacgaaaacacaaaccattcaatataaacgtaaaacgaaacgtacctgaaaaatcaagcgacttactgggcatgggcaaagtgcaagctccaacactcatatctcttccgtcatcatcttcgacacccgacactaatctctctctctctctctcttctccatgacatcatttggaatgtcacccacactcatcccaacacttcccaatacgaaaagtcttggacttggtccttccacgacgatgtttcggcctgtgactttcagaaactcacatgagccgacgcttcagatctcctaaacgggtcatgggttgtagtcgccggtgactcacagtcacgattctttgctctatcgcttctgggtttggtaatgaaaccccaagctgttgagtcagttaaaaacgatctctccaggaggcaaaacgattattggactaaggttgatgagattggatttcgtatgggctccgtacgattccaatttgaacgatttggttacagcattcaagaaaaatagaaagtctcccaatgttttgatcatgggttcagggctatggcatatgcttagggttacgaatgaatcgaattgcgggatttcattgcgggtggtgagagactcagtggtcaattagaaactcaattcttatttttgagaatgttaacggggttcaccttctgtttactttttctatagaaaaaaaaaagaagaaaaatgccttaacgccattaaaaagtatctgttaaaaagtaggctaattagtaattttcccccctgaactttgacat

SEQ ID NO: 22563 - DNA, 4758 bp, Cannabis sativa
gtctcaaccacaccaagtttgtcacttaagaaatgaaaccgatggctggttagactcttggttagacagtccgcaacttgatcatgggaaggaatgtatctgatgtcaagagtcttgttgagaactttgtccctcacaaagtgaacatcaagttctatgtgtttagttcttgcatggtagacagggtttgcagccagagcacttgctcccatattatcgcaccatgtgatgggagtagtgtgaagtgggaagttaatctccttcaataatgcttgtatccaggagatttcagcagatacttgggcaagagccttatattctgactcagtacttgagcgagagacaacagcttgctttttagatgaccaagaaaccaaggtgtctccgaggataaaacacaattaaaccagctacacttcttcgatcatcgggcaaacatgcccaatcggcatcagaaaaacctgtaatggttaatcgttctgagtacttgatgtgaagtccatgatgtatagtccctttcaagtaccttaggactcttttagctgctgtccagtgtgttgtcgtaggggcttgtaggaattgactcaatttgtttacagtgaaagcaagatccggtcttgtgtgagttagatactgtaggcctcctattatgcttctgtattccgtgggattgctgagaagttccccatcagttttggataatggttttcccacggtcataggtgttgagcaaggttttaaatgaatcattcctgttctagccagcagctcacgggtgtatttactctgattcaaataaaggccagtgtcatctcgatgcacctcaattccaagaaaaaattgcagaggtccgagatctttcagagcaaaaatatcgttaagtttggtggtaaactgtctcaatttctcccggttgttgccagttactataatgtcatccacgtagatcaagagcatgataatggtgctggtggttttgtagaaaaataaagaggagtctgcctttgagctcttaaaaccccagctgatgagagtggcttttaacttgtcataccaggccctaggcgcctgttttaagccatatagagacttagtgagcttgcagacatactctggatactccttgtcttcaaaaccaagtggttgttccatgtaaaccgtctcttgaagttgtccatttaggaatgcattgtttatgtcgagctgccttatttcccacgattttgccactgcaattgaaagaacaatccgaactgtggaagccttgataaccggactataagtttcactaaaatcgatcccaggcctttgattaaaacctttcgcaacaaggcgagccttgtatctttggtgtgtaccgtcagcatttcttttctccttgtatacccacttatttccaataatattcataccaggttttctaggcaccagaacccacgttttacttctctttaaagctgagttttcctcattcatggctgctgtccatccaggatgttgtaaagtttcatcgacagtaaccggttcagcattattacaattccatgtagcctgacccgtgtacactttcggcttgaaaattccagccttagcacgtgtaatcatagggtgtgtggataccacgggcattggctgagttgtgtttctctctgcattcgagagagattcaaaggcatggttgtttgttactgaagtgggagatggagatcctggttgaattatatcagtggtcagatcattattttgctcattaggacttagttgcttgtgagaagatgatgcctcttcaagggaaaagtcagtgggctgattgatggtaccagattgaataatattttgtgtttcaggtgatggagaaaatgcagcagaccatgagggaacatgaacattgacagtttgctcaggttgatgagtgtttagaaaacctgatctaaaggggaagtcattttcattaaaaatgacattcctagagatataaagtcttcaagttgtgctaaggcatttatagcctttgtgcgactcactataacccaaattcacacacctaacagagtggaattgaaacttatgggactggtatggtctgatacaagggtaacacgcagctccaaaaactttaaggaatttatagtctggctttttggagtgaacaatctcgaaagggcacttgttctctaatactggtgttgggagacgatttataaggtacacagctgtttggaatgagtcccaccagtattttaaaggcataaaggcttgggcaagtaaggttagacccatttcaacaatgtgtctatgttttcgctccgctcgaccattttgagcggatgtatgtgggcaagaatgttggaagtttattccattttcaatgacacaattggagaatgactgaaattctcctccccaatcagtcttgagagctttgatctttctctcaaattgattctcaaccagatttttaaattgcataaatgctgaaatggcttcacctttgtgtttgagagggtatatccaagtgaagcgactatggtcatctacaaaatgtatgtagaatctatagttggtgtttgagaggattggggcaggaccccaaacatcggtatgaatcaaatctaacatgtttttagcacgctcagaattagtggtaaagggcaaggcatgtgatttgccaaattgacaagcctcacaaaagtttgtattgctattagtagtggattttacattgacaagactcaacacttgactcaagacacgattggatgggtggcctaatctcctatgccacttatccttgattgaattaaaactttgctcagcaacacgctggcttttcgacttagacactaaaccagtaaaaagaaaactagagttgacagatttggtggattgatcacagtgaccttctttggattttggaaattggtatagcccatctttaactttcccttgaagtagcaccttctttgtttccaagtccttcacaaaacaattttgagagaaaaattcaacagaaacgttattatcagatgtgagctttgaaatgctaacaaggtttttagtaatattaggaacatgcaaaacatcatttagcacaagatcagtagacaccagatttccacaaccaacatgagctatttggagtccattaccattaccaacagttagagattcctcaccattgtactcagtcttttgtgtcatgttgtttgtctcagccgtgacatggttgctcgcccctctatccgcataccaagccgtatcttcaaccatttctggtgtggcaatgaaggcagctgctccaccttgacttcccttatttccagtgttagagttgtttggatctgtgcccatgtacgcctcatcgtaccgattgtagcagtacgcagcagagtggccatagcgaccacaaacttggcatgtgggtttcgaattacttgtgtgtctgccaccaccacggcctcgagaacgcccagaaccaccagagcttctgcctcctctaggctgtccagaattaccaccacgatttccacttccatagttattaggattgtgacctcttccacctgagaaaccaccaggttttgttgtagcgacattggcattagggagaatgggatttgttggagagtttttgttagtgccagacaaggcactaaggcgttcgactttactgtcaaaactcaaaaggatgtcctgtaattcttgccaagttgttgaggatcttgcctcaacttgaaccactatgggtaagtactcaacatcaagaccagacaagctgttggaaacaagctgtttttctgggtaaggatcacccgcaagggccaacacatctgcccactgtctcttcagacgaaggtaatcagccatggacatagaccccttcctatatgtttgaatttttgtgcgatactcgtccatcttgacccgagagtgtgcaccaaagagagtctccagtgcctgccacaaactcgatgaggaatcgcaccccatgacttccgtagcgatgctttccgtcatagatccatataaccatccaagcaagagttgatgatgaactatccatgcttcaaactcaggattcacgataacagtagtttcaccagcaacttcatcgacgggaaggaactcaatcggtttaatcttggttccgttgaggtagccgtctaaacgatgaccacgaacgatagccgagaccatggtcttccatagtgtataattatttctatccagctttagggcaaatggctgggttagggtactggccacatgaggtccaggaattacagcaggggaggctgaggactgagcaataacgctggctgcactgcggccagttgagtctccttgtccaccgtgagtaggagtttgttcagccatgaagcaagatcaccaccggtgtcgttgctctgataccaagtttgaaaacagagtaagagagaagagagaagaatgaatgaatactcagcactcctaaaacttggggctggctgctctttatatagatttaagtgattacaacaattagaatatacaggggtataatgacctcattatttacaacggtacaaaggaatcaaatatcctaacagaatgatttgcaatcattggaaaggggggaccaatataacaaatcaatgacacctgtctaaaccagtacacataatgataagcaatgataaatactaattaacactcttaattcatttcttaacagcccccctcaaactgagtggggtctcaaccacaccaagtttgtca

SEQ ID NO: 22564 - DNA, 4890 bp, Cannabis sativa
aatcaataattattactatatatattataaaaaaaaattacacaattttttttttctaattgtaaataaaaatgtatgaaaaaaaaaataataagtttgtttgcacatattttgtaattaattaaaataatgtatacaaaattgtaaaatagtaaccaatctaaaataaacgattagattagatttgagttattgtacaaattagattggattcaaaatataaaacccgcatttagtgccaatcaaatgaattgtagaaaaaaaatagtgtagattagactggaagaagactttaaataatgagcattgctatagacatgttgtcttggaattgactagctatacttcttaaaagttattatattaaagtatatagaacctgatacttaattagaccaataacgaaattgacacatagaatagtagacaccattttaacatttctcttaaataatttttaatttgaaaaagctagaaaaaagttaaaattaattacttatgttttttttttcatctaatgaaaataataaaattaattggtgaagaattatagagcgtaagagtcgtgtagcaacccgatagccacactacagacaatagactaaaattgttattagggttttctttctcctttcctttcctctctctctccaccactccctctgcagagagctccagcaatgacgactgtggttcctacctccgaagaagatcttaacctcaccgtcgtccgattcacttccgagctctcctgggccgacgccggtcctgaggtttttcttttaatcttttcccttcctctttaacccattacgattcatgatttcaggcttttatgcccatgcgtgcgcattatttatgtatattgattgtcaagactaacttttcttatgtaaaatagtctgatttcaaagtttgaatcattcatttattttctttataagttggttctgttcttatgtaattgcaattggtcatacattatttagatgagtggttgaacatagtgagtatgaacgagttaggtcttcggtgttcatttcttttttccttgtgggagcttaatttgtctattttgaggggcaaaaagactcttcttgcttttgtttctgatacctaatcttatgccccaaaaaaactaggttttcttttaacatgaataattctctccaattgggctgtttgttggtataatttgttacctgattagacttttctggcccatgagcaaggttgctgagccccaagtgactagactatgtcttgaagcacaagaatgtgtggcaatgggcaggtggtttgatttggtctcactgatgctcacttcagctgaagttattgtttcaaaagtttccgagaaaggtaaacacctcttttttttttttttttttaatttatttgtcttaattgttctttgctagaacttaaattgataaagaatcgctgtactgtgtggttagagtaagcatgcatactgatgcatacgtaatgtttaatatgggaaaagtaggaaccagaatatttaaccatgcattatacctcatttaactactcaatttgtttttctagtgttcttgttgatagtcattgaagttgttgtatcttatctgctctagattttgagtgcatctacactgttatttgcaacattgttacgaaggcacaaagcgtagatgaagctcatgagatggcagagcttatttctacaaagattgctcaacaaccaaatgacaagtctgccttgcgtttaaagatgtactacacaatatgtttgtaattttagcttttaaatcttggatttctattcttaggtttgtgccttttttaagtttaaatattttttttacagtttgttcaatctgtacaatctattggagaacccattcagccaataccatgtttacatgaaggcccttcaacttgcaattggtggaaaggtcactgaaaatgttgtgccgtcatttaaaaagattgatagtttcttaaaagaatggaatgttgggattgtggaagagaggaatctttttcttgccatctcaaatgttttaaaggaaaacaaaaggtatggtgaatttgcatgcattttgatgtctataaatttatattatatataaatgatttttttggtaattagctttaaatacttatctaatgaggttctgtgctgtttctaattcagctcagccaaagatacttttaagttcctgaccaagtacctggaaacattttctgctgaagattcacatactctgagtgaagctaaggagcaagctgttcagacaattgttgaatttgtgaaggcaccagacatgtttcaggtatcatggtatccaattaaattttcatttgatgtggagctatattcttaaacttatttatgatgtttattactatattgatggtgtttttagaaaattgatatacgttatgttatttgtagtgtgatttgctagacatgcctgctgttggacaattggagaaggatgctaaatatgccttggtatatcagcttctgaagatctttctcactcggaggttggatgcttacttggaattccaagctgcaaattctactttgctcaaaagttatggtaatataaaagcttagtctagtatcaagatttttttcttgacaaaaaatcagtttcttgtttttgttttttttaaaaaatatacttttataattttgtaggtctagtccacgaagactgtataactaaaatgaggttgatatcgttggcggatcttggctctgatgaaagtggccaaataccatacagtcttataaaagacacccttcgggtttgttttctttgcctatttaccttggtattgcatttcatatcttggtcaatcatgtgcaaagttttctcgttgcagattaatgacgacgaggtggaattgtgggtggtcaaggcaatagctgctaagttgatggactgtaaaatggatcagatgaatcaagtagttatcgtgaggtagtttcaattctcttgtaatacattagttctttgggctcatgggcatgtatatttgtgttggtagaattacacatcatttgaaattttatcgtaaactttaattgaggagggctggttacacctcttaatccgaaacatgcgtttagttagttcttttgttttaccagtgtcaatcaattgtcctcgtactgattttcatttgatgtgcagtcgttgcactgatcgcatttttggtcaagatcagtggcaaacacttaaaacaaagctagcaacttggagggtaagctgcttgcgctagatgaatttttgtttacttgttattttcttttcatccatctttcgtatggtataactcaattggttgaatcttcatttccagggtaatgtggccaatgttatcaccactattcaggccaacaagcctaccgaagacgttgctcaggcaacacaaggattgatgattcgttgagagtttttttcttccaatctatattttcttgttgtttttagaccaccatcgttatctagatatagggttgagagactgattgatagctgtgctacaatttattgtcctcatttgtttcattcagcttgaacacatcaatatattggcaattttgacaggctttcattaatagtcttttgatatttgttagatccttcgaacttgccacttgattaatgggtgaattcttgattattacatggcaagtgacactaccttccctttagcatattgataattttcaagctcatataatgcctaattaatttacatatagttccctgggcccactgtttcatatctgacaatctttctcaccgccacggattagcacctgcatttttcaacctttcattttagattattgtaacgtatggtagtcttgactcttgaaaggggagtttgagctatgtgtcgtccatctatggagagtaaaataattggggcatgttattctcacttctaaacaccaaggggctgtttttggtgggaaagtacccctcaattatttgtaaagctcgaagttgtagtgagatcacaaacctatttaattaatgaagtaagttttgcgcagttcttagttcacttgtcaagttctctatggatacattgtttatatgaatgaaagcaagaaaatcgtattaagtgtggcaaatctactaggtttttcttattaagttagtttactcattgtcgagtagccctatttggagctagtcgggccctatctgaatgatcagaaaaacaaaatcactggagagaatggtaattggttacatgtttgtgattctcaaattgagaaaaattgtatttcattataacctttcttattgtatttagttactgtcatcagatttaaaatattttgaaaaataaatttaaatatatagatccaagatttgacctaaacatctaaagcttttctattcaattgagaaatgttaaaagatactagtggtgtctagcactatcataagatgttatatcgttattagtgtaactaaatatcaaatcacacttattttaattttaaaactataatagaatatcactaacatttataattgtgcctattaagaaatgttctattcaactcactataaatattgagcattgttattttattttgcagcttaaagtgtttaatactatattgatatgacatcttataattagttagcggtttttttttatattatttattaaattaaaatgtatggaactcgatatcaaaatgaactaatagcaatttgtcacgttttgtattttaagatgctcccaaaaacaaaacctttctcataaatattaggtagagcgggctacatgtgtttacactaggggtgttcacaaagtatccgatccaatccaatccgcacgatccaatccaatccaatacgcaaa

SEQ ID NO: 22565 - DNA, 2636 bp, Cannabis sativa
ttcataataagatgataatttatatattcagcaaacgtggggcccaaagacaattatttttgggaaaattacataaactacaatgtttggtaaaaaatttacacttttacgttcaaagtttcttttttatatttttctggtattccaaaggacacaagaaaaccacatgaaagttttaggaaaacaatgataatcaacataaaaaataatatagaaaaataacaaaagtacaacataaaaatacaataaaagaccgtattttatgtaaataaaatcttaaaaactgtaaaaatgtttaaaattccgtacaaccgtatttttataattttttggttgtttttgtgtttttttgaaataatcccgtcatttttttgaaaaagagaaccaggcccaaagacaatcttggtgatgggtgtatttgaatttatatatgaaactgcaatatggtgtgtatgatgaatccgctatatgggtttgtaatgaacttttctgttcatgactgttagactatgtttggaagttaggttttggtgaaaaaagaaaaagagaggataaatgtaggaaaaaaataatcaatttttcaagattgatatagaaaattttgttgaattgagtatttttctatacagtttttctttccataccaaatatgacaatttattattttttattgtccactttttttcatatctttctctttcctcatcaaaatctatcttctaaacatagtcttaattttggaattagtaatattatgtacaataattatgctaaaatgagtgcatttcttctaaattgtccataaactaaatatgtagttgtagtaagcaagaaaaagctttcaaatatcaaagctcaatttagcacatgattacaaaaaagtagaactatggaattgattgagtattacagagttcataataagatgataatttatacattcagcaaacgtgaggcccaaagacaatcttggtgatgggtgtatttgaatttatacatgaatctgctaaatggtgaattttcctgttcaagactttaattttcggattagcatagtatgtatctcctaattaggcccaaagacaagcttttacttctaaagtgttcttaatgcattggtctgtatctcctagtccataaactaaatatgtatgcagttgtagtaagcaagaaaaagctttcaaatttcaaagctcaatttattacatgattaaaaaaaaagtaaagctatggaatttaatttacctgtgaaccaacaaagataagagccagatccaaaggttgctcaacttgatcttctgagcactaatgaaaagaaaaagaaaaaaaaaacttaaaattcaaaatcaacatgtcgaattgtgagtgatgacagtgattaaatccaataaactaactaaccagtaagtgtgaccatccagcttgggagagaagggacttagccagatcctttggagaaagagtctgataatttacagatgacgaagacgacgacgatgatgatggattaaccctgcgaatgtgataatagttcaattgatcatacaattgatagaaagataaaataatgattggtaaggaaaaataccagaggaaagcagggacagttgaggatgatgatccagatggaatcaaagctgaaagaagcaacgagaagagcagcagtgccattgctaccacaggagactgataattcatcttcaattgttgaaaacgaagatcaaactcagatctccaatggtggatggagacagagaagaactgagatgagatttttgatttggcgacgaaggagccaacttccaattggaccaattccattcatttgggccactttcatgggccctttcccaatgcggcccatatttagaagaatccttcttttttttttttactgaaatttgctgtataatcaaagtacaaatcccataataaaataccagtttggaaataaaatgatgacctaatatcagcaaaacaattgaccgtcttgttagcaaatcgtttaacaaaataaatagagatattatttaaagaagaaattagacgtttataattagaaataatcaactcaaatagagaagccatttgaagagtatgaagggttgcataaacaactacttgacaatcaatttcaataataatttgagatagatgccgatgcttgattcagctaaaaacctctttgacacccacaacttttgccatagcccaactcgacaataattttaaatcagcttcaatgacatttcctccatggtcacgagctacccaatcaattccaaaactagtctcattaacaacagaagcatccacattgatcttaatcatatttttaataagtaaaatccaatgttcgttactaacagcagaggaaaaggtagactctcctacaatagtaatctttcttttcataacaaactaagaaatatacacacggaaattgtgttgctatattgggcagggtcggtctaagctttaagcagtttggaccattatacaaagcccctcatttttaaagatctattttttttttgaaagaaaaagcttttttattattatacatacataaaaaaattataaaaaaactagaaatagaattgtggtcttattaaatagatttttttttatttttt

SEQ ID NO: 22566 - DNA, 1361 bp, Cannabis sativa
ttggcaaggaattcatggagttttccaaggaattttttccggatcgaataatggtcaagagctaatttttgatgatctcattagagacagaatatctgttgatgatcagacagagattatgaaatgccctactcatgaagaaattcgtaggactctgtttgctatgccctactcatgaagaaattcatgggatgtccattcttttcttcaagcactactgggaaactatgggtgtagatttctgtgaagcagtctcagatttcttcaggacgggaattatgcacaaaggcgtcaacgcaactaacattggtcttattcccaagatccaaaacccaaaaagaactaatgattatagaccgatctccctatgtaatgtaatgtacaaggtcatctctaaaatcattgccaatagaattaaatcgcaactgccatcccttattttccctacccaggctgcttttgttccagaaaggaatattcaggataataatgtaatcatccaagaaatctttcactccttcaaccggaagaaaggcaaagaaggttgctttgccttaaaatttgatcttatgaaagcttatgacaaactaagctggaatttcataaaccaagtgcttgcggggtttggggcaccgcaaaaattttgaggttggatttcccagtgtatcactactacatctcttaatttatgccttaatgagggtcaagttggtaagatttcaccctcttgcggccttcgttagggtgatcttctgtctccctacttgttcatttgggcgacaaaaattctgtctagacttttgaatgacgcccagtgtaagggccttattaagtgcataaagatcagcaggggtggtcccataattactcacatattctttgcggatgatttaagcatggttggaagggcaaacttggaagaagttaaaggatgttggcaatgcattgagatgttttgtgcctggtcaggccaacaagtaaataaactaaaaacctcgatcttctttagtaaaaatactcccaacggtatgagaagaggtataaattcggtgctgggaatagggtcctctgaaggcaacatcaagtacttagggttacctctctttcgctttagacaaaaggacgccgacttcaatttcataattgaaaatctcacgtcgaaactcttgggatggaaggctaagacgctgtctaaagctggggacgccactctcataaagtttgtgggactatccctgcctatgtatgccatgcaaacgaccaagctctctaaacggcttgtggggaagattgatggtatggttggcgacttctggtgggggtccaaaaaaggtaaccatggatgtatcttaaagcttggg

SEQ ID NO: 22567 - DNA, 2631 bp, Cannabis sativa
ctctctctctctctctcctccactgacacacctcactatcagacttagatgacacctccacccccgcaagcccgcctgacacgagtcgttaacaaggagatctacccagtcaatgtctcagctccaaaaccattcaattaattttttggcataattctggcaccatttctgacggtgagttgtatggttgagctcaggagctattggagaacaaaacccctctaaaagtcgagcttaaagatcatcgaaattagattttgatgttcaccgaaatctatggaatctgagatatttgactctgattaagtggcttctagaccttctattgataagtaggctttaaatctgtgtcccccttggaatgggcttctcaatcccacagttcactatctatttcatcactgtcaaacttgggtagcactgtgcatgtggttcgacagtgattctccaaggatggcctcggcgttgagtaaactctctctctctcaccttccaaatctctggattttctttttttctctttggatctgaaattttttattgtggatttaatttgggtttatttatttttgtaaaatttggatcttagattatggcaggtatttaatgtttagatttttttttattgtgtttggatttcaacaaaatattgaggtggtggtggtggtgggcaattgttgttttgtcgaggctgatggtggtggtagtgtggtaatatttttgaagaatgatgaaaaaaattagaaaaagaaatttgaagagaagatagtggaagaaagaaaaaaaaatattttaatttttttgtggtttatttttttaaaattttaaattaatttatttttatatttttaataattaattacatggaccaataaaattgtgccacgtgtaaattgtgcaatgtggacaatccaacatgtcacttaatagatgaaaatggatggaaaagcttagttgctaacagaacacggattttgaggattttgccatcaaaaaatgagttttggagattaattgctagaaaagtaaaagtattgagagttttaacgcaattaactcatatatataagagagatatgtggcagtgacataacactctaagatttctcttattaacattattaattctctctaatattctctcattttttttattttttattaacttcataaatatacatcgattttgttagatgaatatgtaaatgtgatgctacttaattttttttatcattgctatggtgatttttctttttccttgttttccttctcttgagtattttcttgtttagattttaaattggtggctttcctcatttattctttgggccctaaacaaaagcaatgaatgttattttattgacataagtaatgtacatacagtagcaaagtcacagatatataccagattacagctaaaaatgtgttacctgttctggagcaagtgttgcattattcttgcaagtcctcttaatgtgtccaatttgcttgtatttagtataatacataactgcacccgttcttcttgtctttgtacaatgtggagggggtggatcatcaacatctctccttcactttttctttgatttgcctggcaaaaactcttcagctggaggaaagattggatttgacctgtttgggccacttgtcaaggtttggcacagggtaaactattttttcataacactttttgaaagcctctattttgtactaagggtgcacataagtataagattcatggctgagaaactacattacaactaaggtatgtccacatgggatgcctgtcaactggaatctcctacatgtgcatattttcccctctaaatcgacagtgaaaccacctcttggattcgttttaatttagaacatagttgtatttgtccttgatacgacacattatttagcaacatctgttaggttagtagtaattttaacagtatttttgtgtatagtgcctttctattttgatatactctccattttttgtaaaaatgacatataagctagtacctaaaatgtaacaaacaaaagttaaaacaagtatttttttcatcattgagtaatgtagttaaagttaacataataagcaattacctgatggactctaatagagtaactattagtttgtcccttgcatcaagaattacattgttgaaggtttcacagatattgttcagtagcatatcacatttcacccctctttgaaatgtgattttgtctattctgatgggtgctttgttgccagtcaggtgtatgccttcacattgaccttctttatgttttcctttctcctatcaaaatttgctaaaatggctgatatggatgcattccacaatagttgcttcagtagtagtctagggaactccttcttaaaatttccatgcatatgtcttatacaaaacctgctatcaaggctgttgaaaatattttacactacattctaaagctccttctatccatcactcataaaagtgaatgagtttgactcaatacgactcaagtcatcccttaatatctctaaaaaaataactcaaactattgcttgtcttcccacttaattgtactaccgtgttctcaaaatgtacatatcacccggaccaaaatgtagacttaactaacaaatcaaag

SEQ ID NO: 22568 - DNA, 5742 bp, Cannabis sativa
aattttaaaaaacaaaaaacagttttcaagttatgaagtcaaacaacctctaaatttttctataaaagagctacttataataccattaagaagctaaaacttgataatggtcattttgtctcctctttgaatagtattagcaaagttgtttttaatttctttcactacaagaagatcaacttttgtggcaaaactacttagttgcgctagcaatagtagccctcttatttaggtattgtaaatttttatgctggtgacttacctcgtcggtgtagataatttttcctgacgcatttactgaatttcttcaggaaatgtcttggaggtgaattgccaaacgatgttttttttgcgggttccaacactttttccggtgacattatacgccagcataggtaaaaaaatttagcgggaaaattcccgtgcgatgaaaaagtgtgagggaaagttggtgggaaaaacttttaccactgcacttaattgcaccggcaaaagttcctcctgaaataaaacgcagcgtttcattttaaagttttttgtaaaagttttacctgtaaacctaagtgcgccaacaatataattaatgaaataaaacttgaaaactgaaccttctttcccatttcgcacctctctctctctaggcgttctctctctctgcccttcttcttcatctttgatcactgccaccgatgcccctagaactgccgtccacctccgatctgttaaggtttatgccttgaaaagcctataaaaatattttttaattattaaataaagagttgaacatttgatatatatatatatatatatgaatgactattaatatttattgttgaataatttattaaatactggaaaatttcttattcatatatgaggttgtggcttgtagttgtacaaagaactaagaccacttacctatgaataaaacagtcagcaacatattaaagttatggaatctttaatcaactgttgctagtacggttcactgatgctcgttctttggtgcaagtaatcttggttcggattacggatgtagtttgacatctaagtgaatgtactgtatataatagagattatatatgacaatgaccgatatgaatgaagctacctttattaacatgtcgtttatcataaagacctaattcatatcataacaatgatcaatagtagatcggtctaaattctaagttatcatgaactcatgttcatgttattaatttctttgatttacttgttaaaatttctcagagcagatgattcttacaacttctattttgagaatctaataatatagatgactgggaatgtacaattatagaatcttgactttcctaacggatcgaatattggtttcctttaagtgttaattttagaactagaatgttgtgcacaaaatttatatgtgatctaaattataattctactagtgaattaatggtactagaggataaataagtaattagaaaggtaaaacggtaatttgatcaaaataaattatgaaccaacacatggagagctaattactggaattgattatatcaatggatacagtattaaactcactaaatataattcgataattactaagaatataattctatatttatggtggagtaatcatggaattaataaacaatagaatatttagttgacgagactcaataaataatttagtttattggagcttagcattataggatttgttgagataaaagttgttaggacaaaggactccatccttgtcctaaaagacaagggtaggcgcctagcattgttgctatccctatggggtttgcctttttatttaattaatcatttaattaattcaattaggtaaatatctaatttgaaaagtagttatagatattttaaggttattaagatattatctcaaatggttaagagatttctccataaatatcaataattgaattcgattatagatatttatttatttaaacaattaaatataattaaattaaagagatttaactactataaatagaagcctgatttgagaaattagaacagacttctcactccagaacatcgctatctttgaaatacgtagagagaaaaagaaaattagttttctctcaattgttcttgctcatgtgttgagaactcaataagaacaaaacttatacactttatccaaatagcccgcactattctttttgtgtggtggatcgatttagaagatatttgtgtgagtccaattatcatccttatcatatggattaaaggatacaacatacgagaagttttgaggataccctaatagtcatcaagaggtatattctcatttttatatttttatgttttaatttaatatacacatatctatagatctattgggatatacaatgataatcagataatataaaattcttccactgcatacctaatttagtactataaaaccaacaattggtattaagagcagttccataaacgtgtttacattaaatattgtgtgagttttatacatttatatatatatatatatatgatatgtatgtgaatagatgataattttactgtgaatatatgagaggtgatgaatcgtttaattatatggtataattgggtgtatattttgttgttattatttttaaaaaataatgtaagtcattttggggcataagaatttaatataatttattttataaaattattttacgtaaaaactgtacctatgtaatgttcatagcatgtgaactcaggttctaaacttgaaacccgaccatgcacgttaaaatattattgcatacagctcaggttcatggaggaaccccggccatgcaccatggcaccattgccttgggtaccgtgccccatgcaacatcaacacatgaatgatccccatgcatgcagccatgcagaacgtgtgacgtccttcacgagagaaacaaattggaccttaaaggtgtacatgtaaatgtaacctgtgacctctattaatggtcaatactaaaggagtatagactggcctcgagacggttttgttttcgtcttcttaaggtatgtgtctatactattgctcaaggttgatctcttgactaagataagaggaagtgatgtattttagtgtgacatcgacccttaaggtgacacactaaattaagtcatctaaaataatgagttacactcacaaagtgcaactaagcttcatagtagttagttgttaacttggtcaaaaagcagtactttatattttgaaaagaaaatatgagatatttaagtttcaaaataataaagatgataatcgtctcataggcttaatgaaattgattaaatatcgaccctaaggcgacaatcaattgtcaaagagttttatcgtggaataacttaaacaaaattttatgtgttttacttgtctacactcatgcatcatgtttatagtaattccaaattgatatttattattcatacataatcattatgttactttattaatttaagtcatgtctactatgccaatccccttattactttactagtatttgaaaaattaaatggtgataacttttataaatagaaatcgaatctgaatttaacactggtttgtgaaaaatcacaaaatttattctaactgaggagcatcttgaggagcccactactaatgccccgaaaaatattcaggccaaatatgatgcttggattcaatcccaaattggttgagaaccttctgatatctttctagaaattactcaatggaaggattcctcccagtatgaccgtataacgaccttcttttgttaggcctttgatcttagttgcctcggccataaactttgaatgtaatctttcaaagtttcaccttctctttactttacctcgaaaaggtcttccaattgtgatggtatctgccttgagtatgaaaattgtgtatagaattcttgagagaattcattctaagaattaaacctcccttgtgcgagcttaaaataccattgttaggttgtttcagataaagttgctgggatgatttaacatcgtacatccccagtaatattttggagatttgcttgcatctcaaagtaccttatatgtgctaagggatcttctctgttacatcttccatactgacatcttgaacttaggcaggagtaatgcattaatgtatgctgagaatggagatactcttgaactgtctagttttaggtctgtcagttttgggctggctaggccctttatcatatctctagtttgatccaattgtgcttgcagagatggatctgatgcggtggacacttgtccaaatggcctttcttggtcaggctgaaacccttggttggctagaccttggtcggtcaacccttggctgagtagctagccttggctgaccagccctaggctaggcagtttgccatggccgactagcccttggttggttgctctcccttggacgaccaagcccgcttgtgggttaatgggaggtttatcatactatttggttgggtttggcggatcatcctgcctaaaactattgttcagtggcggaataaagtcacttctattcttgctcctcgagttgatgttgtcttgtgcgtttttccttatcccatgacctagtctgttaaataggccttagaacgaactgttcccaaatactttagggaggggcatcactatactggctgtgcaaaggttggccgattggtgatgcttcttctttaggaatgtctggccatcccctaacacctcttggtgctaggaactggctactccgatcgtatggtctgtttggcaagatttgaccgtctttaggcaagggaaagtctatcctcgtgctcgagggacttggtaagacagtttgcccattatttagctgcccataggtcctgcctgaactattgataagccttccttataaaggatctcttattagatcctggcctcttccgacagttctctttttgaactaccttatcaggtcactgacctccctattacagtggttcaactccgcctgatgggcctaaatgatggcctcctggtcgtccatccagcttagaaatttacgtctctgttggatgaaagcatcgcaaccaacaacatgtgtttcttctatttgggtgacctagcccacaacttctttgagcctggctagcttgatattctctcccagatccacttgaggcttaccaattgttggtttgccaattcctagccctatttcccctgcataatatcggggaacagtcctaactgcactctgtaaaggttgttccgtgttaacatgaccttctgttcgaggtgttgctggtggatctgttctgggcgataagggttgatcattaaaattcatcatcatagcgggatcaacaggattagtggtattggctggctttgcaggattcgtcagattaacggtgtgggttagattaatgagaccttctgtggtgggaggaactcgaacattgggattagccatcatattatcttgaggaagacctgaggaagtgggggtagtggttctcctagataaagatatgatgattgatcaagatgataaataatattagaaagtacaccaaatattgacctcaaatttggtcaactaacagcggagccttatttatgactaacaataaccacatgtaaattgtaaaagaaaataataaaattggcacaacaatttatagaggtttgagggtaatgacctactctctttttatttgtattaattctagagataatatcacgcagattatatgcttttaccttgtaagt

SEQ ID NO: 22569 - DNA, 1686 bp, Cannabis sativa
atttcaaaaaaaaaaaaaaatagcaccataaatacctacatttgactactttttttttgtgtggatatccataccacataatgacaatatataagtttttttttttgagataatgacaatatataagttaatttccaaacttgatagcaatctttccctaagataatgatttcaatatttaagaaattagatttgataaaaaagaattcaaaacagagttttgtcgtgtttggatacattgtgaatattatatatataagttgtttgaatacagacatgactttatacttttaatattcactaattacaacattatgatgataacatctgtttaaaacttgaactttttttaaaataaaattgctaaaaaatattattagtgtgtaacacctttctcattattatactattattagtgtcattaagtatctagtgtcatataattaacttaaaaaaataacttttaaaaaatatagttaacagactctacctttaaaaaaaatattagagtaccgttggtggcccataacaatactctttctaaaatgattaattatcctatatatacattattcaattcaaagtaaaagtgaatagatatgactttgtttactacgtaccaaaaaaaatgtcatcattttattttttaattattaatagtgtttgaatgtcaacatttaatttactatgcaataagcctgacaatgttgaaaattcttagccacaccaaaaccaagtatttatatgcttattatttgctaattttgtaaattagggttaattaaatatataattaacaaagaaacacatagaaaaattaaagatggcagaaactaataatgaagttgttcccaatgttaatggtggaaatgatcgatatagttacagcaaaaactcaagctttcaggtattaattatttgatcaatattttttttaattaaacacaaaataggttacattttttatctaacaaaaaaaaaataatttttttgcttttgtagagaaatgctatacaatctgccaaagaattgattaacaaagcaataattgagaaatttgatttgaaaatccttggatcttcaaatacttttcgggtggcggatttgggttgcgctactggacctaatacatttattgcgatgcaaaatattattgacgctattgagctcaagtgtcaaaatcaaggagtagaagaatcctctcaacttctcgaatttcaagtattttttaatgatcatgtcttgaatgatttcaatgagcttttcaaatcccttccccccgaaaggcggtatttcgctgcaggagtgcccggctctttccacggccgagtatttcctcgcgagtctcttcatttcgtgcactcttcgtatgctgcggtccaaattctttctagtgtcccaaaagaggttatggacaaggattctagggtttggaacaaaggtagaataaattattcccattcttcggatgaagttgtgaagtgttttgaagctcaacatgttaaagatatggagaattttctcaatgctagagctgaagaagttgtccttggaggattaatggccttcatcttcccagctcggcccgacgaaacccttcattcagaatcttttgtgaacaagactactacacttttggggtcttgcctcttggacatggcaaacaaggtatggtatcatgatcac

SEQ ID NO: 22570 - DNA, 1865 bp, Cannabis sativa
aactaactcaacagctcaagccaggtggcgccgctgcactgattaaaagaaaaaaactaaaaagatgacctggaaaatgataaatgaaaccaatctaagtagatgctactaagatcaacttagatgaactacttaataagccaagatagcaaccagaacacaatacacttaaataagtaaaaagcaatataatttgccatacagaaaacatggcacttacaatctccccattggcaaattatgatcaacgtccaggcataatattcaagaagagagacataaaaaaatgccaacaatccaaaagatatatcaagacattttaccaattgacaaggttaagttcaacagacaagaaaataaccagacaaaaactaaacccaaaatatgaataatgtttagtgtatttgtccaaaagtttcttttcttgttcaaaatacactaaatcaagccaaacgagtgcctccagactgtcttcgtctccctctctattcgcatgcacaaactgcacctcttactttctctctatctcgcgttcactttgatcgtctccttatgccaccatcgagccagacaaagcttctacgcacaggtattaacctcctccatctccctctctttcttccttgtcattcatagatcgatctggttcaatcggccaccatcaatgttgttttagatctgtcccccctctctcatgtttacttcatttcactcacttaaatctatgtttttttaagtttagcgttccaaactgcaataacaaaatttaaaaaattaaaaacataaaataaaattacgtagttttatgtatattgtattttgtaagaaataatatttataatttttatgttgaaatatattttatctattcctaattcaagttttgatagacatgataaattaatttggatttattttggtaatgggtagttttcagttaacatttatcattggagctcggttgctcgatggggttgaggtcatgactcatcttcttcaggaccttttaagtggtggaaattaatttttaaagatttttcttctcccaaatatcaagattttttatggaaagctagtcttaattatttggctacttatgctaatctaaataaacatggtatgaatacctctaaggtatgtcttatctgcttccagaataatgaaactacattacatgatttatggtcatgtgtgaggtttggatagtttgaagatatcttcttatttttatgagtttttggctggtgtaatggatattctttccacaagagaagttaaataatttctaactctttgttggaggatttgctatcatattattacctttgtgcatgaaaataagttgattaatgatgatatgataagaagttaggcttttagctttttatggcattatcatgaagtctaatattactttgatctactaatttctgtgagcttgtctctgactaactctagtaacagaaggagggtgtactacaaaaaatatggcatttgtcgaagcattattgcactagtaaaatcatactaaatgtgtcaatgaaagctgtctacgaatatcgatcaataaaagagcttttgccggtgcaattcatatttgcgctggcaaaactaccttgtccaggcactattttgcgttcggataaactaaacaccagtgtaaactatggtcctaaatcttctaatccacagctaaaataactttttctagcacaataatgcactgacaaaacttttgggaagacctttgtcagtgcaaaagtgggccgacaaagtcttcccacccaccacttttaccgcgtggggaattctcccccgcccccttttggtaacttttgcagcgcataattgcaccaaaaaaagta

SEQ ID NO: 22571 - DNA, 3653 bp, Cannabis sativa
atataagggtaactaagtacctttcttgtaactagagagttaatcaattatcataaaagagtaattaaatactgcttttttttcatatattttaattttttttagaaaaaaaattttgtaaatagaaatgtaaatgtaaaatatagcttactttgtcaaaagtttattctaataatgcatcaaattgtgatgtaaaatatctcacataataaaaagtgatctaaatttaaatcacaatataacatattataaaatttatactacaataaatactataattttgtaggtaaaaatgtcacaaaattattatttgtactaaatatagatcaatttttgtatctctcattaataatggaatactctaaaaatgaaaattaacttttttttattttaatgtacatttatttatataatcacgtgtgtgtggttgcagaaacgagtagtagatggtgaggatttatttgtgaacaaggaagaaggcccaatcacgagtgtagctcaagtgtgggaccatgaggactaatctaatctcatattctcatctttggttggttttaatttagattaaaaaaaaaatactattaatccataacattaaatttcctattttagtttccaaaactctacaattaaactattatatatgataagctatgttttctagtgcatactttcaatttcgaaactaattaactatttacaaaaaagttagttgaaatatcattttggtgcagtaaatttgcatttatacactctacaatgtcaaaaatcattaagaaaacacaaaagaaaatatggacatgccaaacaaaacaaaaatgcttattagttgggtcatttttgtatgtataattatcaaactaaacaaaacaatgtatttaattgtccaaaacacaaaatttatgtgcaagtcttttttctttaggggattttcatatgaaagatgatgactaattaagtaattaagaagattgaactgcacgatgattgtgatcggtagtagtagtggaatatttgccaaaactcaagaatcgagggagcctcacgatggaattgactcgattcactccatctagggcaacccattcttgattatgattatcattgtcgttatgatcttgtgatggtggtgagcaaattctaatactactactatgatcaaattcgacttgatcatgacgatgatcttgatcttcaggatcaggatcacagtcattgtctttgtcaggagcagcatcgcaactggcaaaggatttaaagctttgagagagtgaaagacgattgcccttgtggcgagaagtggtagaagaagatgagtaggacttgctaggtaacaaggacggttgttcgttaaggaacaagataacaacggcgcaatcatcaaccttggagccgggatacttgcatctccatgaccggactgctctacacaccaccattttagctgccgccgatctctttttggctgacccaactatcttcaccacttcattgttagacaaagcatcccaaatctgaaaaaaaaaacagaaaaaaatatttcaaattgtacataatttagtaacacatacaatatatatcccaatggatgagcgcaaaaagaaatctttatcatcagtggcggactcaaaattttagttaatcgggacaactctaggacgcattgctatgcttgaaagtcctaaagactaacaatcacttttttttctttaggaactgtccatatccagttcatctttcagaaccatatcatatcacggacctgatgaaataacgaacattcaacaaaaaatgtcttcattcgaatttgtacttcaactgaaggccgagtctaacttttcaaacatagcaaggacagacatgccgcgatcgtctatagttaaagttaagagtgttagaatgattacataccccatcagtggccaaaacaacaaattgatcattgggagtgagtcttctataagagacatcaggaatagagataaggccataatctttgagacaaaaatcaccaaaggctctagccattgcaagaccaggacaatcatcctcaggcatccatattctacacacatctggttcttcatcagctgcaaatactctacctctgcaattctttattctttcagcctcacctattaatattaatttcattttcattgttattatttatttaataataataattaataattaaaactcacttggaatatctggttttaagtctactgttagtggaactggtatgagttgatttttgtctcctcttgtcccaagaattgcacgcgagtcccccaagttggcaataatcaagttctcaccctaaaaatatttacagaacaaggtaacaaacttataaataatgttaaatgtgtcaagtattcatcaaaattattagtaaggccctacttttacttaattttcagtttagaagaatgacaatagattttagtttataatgaaaatgctcgaaatagcataaaaaaaaagtgcttaattcaaattattgtcatttggttgaaatatgtagttagatctttttatgttttaatttgtatataattaacttcttaatttatttttttaggcaatacttcattaattttcaaataaattcgagttatcggtttaattttaagcatttaatgtaaagagaaatgctaaaagatattagtggtgcttaacactttcctatatgtcaatatcgttaatagtctaactaagtatcataacttttagagagtattattagctaatcgcaagacgacatatctagagatgttaggtaccactggtaccagtagaaatgttcttttgtaaagcaccttctataagtcttatagtgtctcatgattattagcgatattctctaaaattatttttttaaattataaactcgataattaattacaccaataaccgtataatatttgtgttaggcactaataatatattttagcaattctcttaaaaaaaaaaaaaaatcaaagagatcaaatgttaattgtatacaaacattgggaatttgccacaaattaccctaattaaattcatagctatattactaaattatgaaatatgaaagcaagtaacattacattacataaataaataaatacctgtttaacaacagtaacagctgtggaaccactgcaaaagctatcaatggaggaatcaagaccaagatcttcatccatttccttaaaagatttaatcaaacaagcttcccaagaagaaagtggcaaaacgacattagagttattgtcgttttccacatctttggagtctatgttgtcatcatctctagtagtattattactattattactcaagtctctaatgtccacgtcatcatacttggtgctattgacctttgactgttcaatggcttttgagagctttgtaggcaaattatcacgaacatgacgtgccaccttgtgaccatagggaccatgcccatcaaatacaccgcacaacaccatatctttctcaccagtaaagttctgataatattaattattataagctctcctaatgtataaattataatagttgttgtgttgcaataaatatttcacagattgggatatcatttatatatctttctctctcttcatttcattttcaacaaagtcaatttcaatttttaaaat

SEQ ID NO: 22572 - DNA, 2449 bp, Cannabis sativa
  modified_base (305)..(308): a, c, t, g, unknown or other
  modified_base (2400)..(2420): a, c, t, g, unknown or other
agttctaatataccaacattgttgatttgccaatttgccaacccctcaacccctttttgcctttttgccaacacatcacaagtaaattctattgttaaaagtgacatttcttgtaattattgtttcacttgtacttaattctccaagtttatatttttacggtaaaaatcttccaaactactgaattgttagcaaatttaatgtatcatctggttaactgctattatagactatgtatgtgtatactcttgtacacgtaaaacgtttatatgtacaatattattatttcaaaattaaataaaatnnnnaaaataaaaaataaaatatttgaaaaataaaaaaatatatattataaatttaaaataataattgttaacgcaaattttcgttaacgattatgagcctattttataataaatcaagcacagatataatgaaaataataacaatgacaccaagatttttacgtagttttgcagttaactatgcatagttcaagagtctatcttattcagatttttctgatacagaattagagttttcacaattagtatacttctttttctctctaaggttttttgtcccttttttttttgtagaatctgcaccaatttatagtaatataggttgctagttaattacattcaaattcgaatcccataacaatatttctcaaaattgtggtctttaattatgctccacgtaaataaatgcagttaatatttaaagatcacacagctgtgatttaaactgtttttaaggaggtcaacgttaatgtggattataggacacattgtcaaatgtatctcgttgaggcatctcgcctagtgcatgaacaacttggtttattcataagctttccaacaatggcatgagcactagtgtactgagcaaacttaagaactgctctttgaccataaggccttacagactggacaatcatgtccttcaagttatcacacttagttattataatatgtattatacactaaatgttctaataactgactcgccttgccaatgccttcttatatgtagcgagatggatgtctcgctatgcgttagctattgccccaacgggattacaccttccgagacaagttggtttcttgtcaaatacagaaattgatagtttgtacatccttatctcacttaagactagaggatgttagttatgcaattgttaacagtccatggggttagtgtgttagtttgctttctaatctcagttactacaagtatctaatcatcatcattgtaactgattccaattcattcaatacaattaagttttacatctttacaacttctcaaaccagtgcaaatctacttctttaattttttttggcaaaatactaacaatcctatttcttacatcattgatcaagctttttacaactattttagttctgttcacttgccccaaccacagagcatcatttcgagccttccataaatgataaattgtggctgctacaacggtagagtatacaaactttcgaaatctgcttagtcgagctcttattgtatccagcaaaacaacctgtttaaagacaattaacttgtcttccaatctagatggtttgtcaccaattccaatctagacaattaacatgcagactacacatcaagcaatttgattcatcaattactttgaatttaaacaatcttgcttttgtcttcaatctatcaagtgtagctaacaacaagatcacactatgcttaggaaaatttaatatctcccaaatttcaggactccaagagacccgagtaatagcaagaatcaaaattgagtaccctttctgaatggagtagtactcattttgcacaaaattttgtgcatcaaggtaaggtttgaaactttattataacttcaactatttttctctaataccaactattattcaccggggctttgtaagcccaccaatcgtcctccttaagatacacattgtggatccatttcatatgtacttaccaattgcaaccatgttccatagaagaatgtttctctaaatctcaaccctcccttcttggggtacaagctttctccgaagacacacttccatgccccataaaatcagcttgccccataaatttacactttaagaattttgcatttttaaattcatctgatggtgtttgtagtgaggactacacaataacctcgggctatgatgccatttcactcaagagtagttgtgatgaatatggtattgtctatggcaggccaacaaaaaatgttcacagcaagcgggtcaatttgcaattatcttcttgttcttttctttcatttggtagtgaaaatttggtgcgcatatcaaatgcgcgtctagagcaggtccacacataggaagcgtttggttggaaggaatgaaaatataggaatgggaatgggannnnnnnnnnnnnnnnnnnnngaatggaataaaatttaaaatggataaaa

SEQ ID NO: 22573 - DNA, 3596 bp, Cannabis sativa
aaggctgtggtaaggtgataattttttcctctctgatctgttttttcattgttcgtctgaactctgaaatgtaatcgtttagattatggaatgtttgagcattttactcatttcaaacgtcaaacttgcaggcgttctcgttggatttcaacttaagatcacacatgaagactcattcacaagagaactatcatatttgcccatatcaagattgtggaaagagatatgctcatgaatacaaattaaaaaaccatatttcatctcaccatgaaaaggttgttaccattttactgatctttttcgataatatacatcttctactaagtaggatgaaatatatttatcatgtgtgttattttacagagtgggactgtggatgtgacaaaatttaccccaactccacctccagaaaagccagctagaacgcccaagccgagcgcaggagtttatggctctgcatcttccgatcgcccttatgcatgtccttacgaagggtgtgataaggcttacattcatgaatacaaactaaaactacatcttagaagagagcatcccgggcatacttctgatgagaatgttgagaaccccgcaatcaacactgctcacgagatagatgaaggaagtgaccaagacgcctatggtggaaaccgtatgcataatggcaaatcccagaaacaaagcaggcccaagcctagtgtgaagttacctcctgcaaaaatcgcgcagaggaagggctcgactccaccaccggctagggtgaacatagtgaagaaaccatggtcggttaaagacgaagtttacgaggaagacagtgaagaaacggaggaagatcgtgataatattgaagatggttggcgatacgctgaacaaaatgaggatgatgatgaagaaactgaatatgaagactaattttttttcttttttctttttggttgaaatttgttttaccataattacttgatcaatgcccttcattttaatttcgttataagtaaagaacatattttgaagtggcaatattattaggcttatattttactctatgcaatttgaaatttaaattatataaataagtaatctaaattaaataaggatagttagaatttatctccaatttttttacaccaaaaatcccctaaataaggatagttggggcaaaacaaaactccatgaatggataacttaattacattgataatgtttatataaaaaacaacttggttcacaaaaaacactaaaaacataacattttgatctacaagtctaaccaaactagagatgagtttagaggtaaactacttcacattcccctaatagaaactagactcttttcatacaaacaaaccgaactataaagcccgatttaacccatatcataatcaacatttctcaacttatgactacaatgttgcaagaaaccaagtgtttttcactcccatcgtcttcgaaaacttccatcaaaatctcatcattcttacataacggtagaaaatgataataatgcttttctagcggtccaagataaaaatgatggtctcatcatgggagatcaaacacaacacaatcgaatcattccacattgcaaattggtaatagtaacctttggaggaccaatctttaaaatatggcaatcttatgtaattgaattcctcattacttaaatcaaaacaaaggattacttcaacatagataccatgcaccattgcatacataagcattcataacatcacacattccttcatcaaacatgtcgatctctctccaagaatcagaacccattgtgtatttattgcttttagaatcaaatccaaatcctatgatgggatcagttacatagcatcatagtcctaagacgattatttactagcaaaatgagtccatcacagtgatgcatggtgtcccatgattcagatccaaatgtggtatgttgagagttgttgtggcagttctaacatgattgttcttactatcttcttcatggattgtagtgagcattgggtatgtgattaagcgatgatcgaccttaaatagggtgtttgaccacaaattttggatggttgatgagagtggaaatacaagaataacaaaacttgttcacagatttaaattgtactagagaatctgcaggtaccaacaacatgattttctctataatttcacttggcaaatcaccaaagctccccatttttgtctgccatgaattgatcaaaataagctattaatcaaaactaataactaaaaaattgcatcactaaataaacttgtatgttcattcataggacaatatatatattatactaaaatatccaacaacaaaaaagatgataaatacaagtgtaactgaccttaattttttccttctcaatctgattttttacccttaaaaaaaataaaataaaaaatgcatgtaatacatattggtatgaagttaaaagcagaaaaggaaagattggttgaaaatggagtagaataaaattcaataattacttacttgtcttgtaatctcaaagttgtatctcatcaagaacaataacaacaagaagaagaagtggtggccaaatgatgaagatgataattttgtacatttaacacttaatccaaagaaaaaaaaaatgatgagtatgatggtggggtacgtggcaaaaaaccatgaagagttaactgatgacttgtaactttaactttatggtttaaagaccacaccccattgtcaaatctaaattgataagaatgtgtaatttatagataattcagtcaattcactatattaaatctaaccaatattatagaattttcaagctcaatcaaatacaaggctccaaagttgtctctcgtagtaatctggagaggacttcactcttttcattttcttttccagtcttctgagatatttcaaactatagaaaaacaaaattctgaaaggcattaatgatgtttaaataataaatttgagcattgatatacaaatatgccactaatatgattctctttttccgtgttgctaaattactgaatttctttttctcagtgtagaaaaaataaaattaagtatattaaggtaatattatattaaataataaataatattaaaaaaatactgtattaattattataattataaattttaatacaatattagtcatattttttaatatataataaatgactcgcattaacttatattaatatttacaaagattttaaggtcaatctcggtcctgaccttagtctcagactaaggacctggatccagacccgatctcgaacaccgtaccagaacttagacccagattcgaaccagaccccaaacttaaacccgaacccaaatttggactcgcaccccgaccatgactccggactgtgatccaatcccgaacccaagtttaggtccagggtttaagtccttgttcgggtttaggtccggtctggggttcgagatttggggtccgagtcccgatctcgatccaggatctaaggtctgggtccgagatcgaatttaagcccagagcatattcgaggttcgagatttgggtccgaactctaggtccaagttcaggctgtgattagggttcgggttgagtttattgtaaagtttt

SEQ ID NO: 22574 - DNA, 6365 bp, Cannabis sativa
tttttcttctaactttgttatgaaaaaatctcacatttcatgtaattttcactatatatgtccttgaacttgctctaaaagggtaaaaatccaataaggatacgcccaaaatcccttataaaggagacaaatttgccacgtggcagctccccatttctccagccagccgcgggtcccaccgaaaatagctcttgtctcctcattgtcccacacgcgcgtttgatgcacaccacttcatcaaaggcgcatgtgcaactcactctccctctccgcaagtggccctcctctcaccgtggtccacaagcatcaaaacggagcttctctcctcttctctcagcccgccaaatgtcaccctattgtccaacttgcttcgtttttcagccattcaacaaatgccatgtggcaccgacttactcaaacacaaatctgagcacgcaacgtggcacttctaaatacttttgggtaattatatttcttaccccatacaatttgaaataagtttaaattgctcattagttattttacctcttataaatagaagctaaaatttttcaaatttcattacaatttcagacagaaaaatctagagaaaacactcaaaacgctcattgttattgtttaccactttttatagttaattttcatatagatttctaagttttcttattactaaggtggacgataaaacctaacgtatttaatcaagtatttattttaatttaaattctcagcacaatatatgcttatgattttcgctttttaaaataatttctttcatctttaatatcacgtattttccatagttagaaattattaatgtttggttttacattttattaaaaataatattatttaattttatctatttacattaaattgtttcacatttaaatttaatggttagaaactataattctaaagcgaaagaaaatctatttttgttaaaaaataattagtttgattattaattaaattgattctgaaaccttaatagttcccccaaataccactaaaaatattagttactgtcacttttattgttaaacactttattttattttgcactgaaaatctcatcattttggtaactagattagagttataatagcttaaattaaaaatgtattttttattctcacgcaattctcatgggtttgacctcgttcttcacaatctttacactacaatgaagattcgtgcacttgcgagttgataaatgtaaaatgtaccatttttagtactaacaatcgtcaatagagaaacttgttgttgttgaaaggctttacttggatagatgcaaaagtcttgtgtttattcggacaaatatttgtaagttgaactatctcactagcctatccatttcatattgttcacaattgaaatgctttccagaaattttggagcctatcgagaatcttgaaaatctttgtttatttggaacaaaagttgaagggttaccgccatcaattgagcgtcttgttaagctttgttaacaatggctttgtagaattggatgagaagttagttagaaaagttgttgtaattgagttgtaacatgagctgtaatgtgtgagtttgttatgacagttgtgctggtttagttgttgtaaaaatgtgtcgatggaaactgttgtataaaagctatgttgagctgttttgtaattcattcaataataataaagatttcattcttttatctcctaaaactaaaatggtatcagagccaagaaattcttgagctccttctctgtttcttctctgttcttctcttcccatctctgcatctattttgtctcagctgccatggcaagaggaggaggagctcagactcgcaatacttcaaatcgtgacaatgatcccggttataacaatcattttttttgcattagatcaaactactcgttatgatgatccacgaagtctgtattatttgtcgcacggagaccatcctagtgccatgcttattgcaaaacttctcactagaggtgagaactatggatcttggaagagatcgatgatggtggctctttctgcgagaaacaaaatgaaatttgttgatggaagattacctgaacctgatgaagacaatgaagatcatgattcttggtgcaaatgtaatagcttgatcatatcctggatattgagagctgtctccaacgagataggagatagcatcatgtatcatgataatgcttctacaatcttgtcagaattgcaagaaagatttaatcaaaagaatgcccctcgtgtttttgaagctaaacgtgcgatgagtctcctcagtcaaggttcgaatagtgttacttcatacttttctaagctaaaaaccttatgggatttaattcaggtgcatagaccaccacctgtgtgtacttgtggagctatgagaattatacacaagtatttagaagaggacaaagtttttaatttttttgttggtttgaatgaatcatcttgaaaggtctcaagttttgatgcaagatcctcttccatggatcaacaaagcttatgcttcaatcatctaagaagaaaaccaaagaggaattactacccttcaaacagaatctcagaactctgattctgatcttactggagaatttgttggaggagtgcaatctcagagatctaaattgacctgcaatcattgtggaattagtggacacaccatgtctagatgctacaaaattcatggatatccatcggcgcttagattgcatgctagatttccaagcaaatgtggtgacactccttaggacggaaccacacaaggcaaaccaacaactatttttttagacacataatgataataatgaaaggaatattggagctaatcaagatcctttggcttgtctttcactcagtcaatgtcaggaaattatggccatgattgcccaaaagttccacactgaaaacacaggaccttcaacttgacctttagtatcaaatttttctggtaagactgattttagtcataaaaacaaatgaattattgatacaggtgcaactcatcatgtttctccttatcttgatttattcacaaacatctgtcataaacttatattgtctactgttactcttcctgatggtacaaagagcaagatttcttgcagtggctctattaagatttcctttcaaattgttcttgttaatgttctatatgtaccaaatttcaagtatagcttgctgtctgctacagccttgatgtcttcagctaattgctcctttgtgtttcatgataattcttgtattattcaggacacccagaagaagaaggtgattgggaagggtgaaagacatggagaccttttcttcttgaaaacatatggcaatcccactgtttttattttttcgattcaacagtaaattttgatactttgtgggattatagacttgttcaccctttttgtatcaaagaatttcctttgaataaagtgttaaattttactgaacctttttctcttaatattcattgctcaacatgtcattatgctaaacaaaagaagcttccctttatttctaaccataatatagccaaaacatgttttgagcttattcatatagatatatgggggtcatatcatgctatgacacatgatggtttcaagtattttctcactattgttgatgattgttttagatacacttggattcatttgcttaaacacaaatttgaagccaaaactgtcataccagcctttattaatcttgttcaaactcaatacaatgccaaaataaaaggcttcaggcctgacaatgctaaggaacttcaatttgtggaattatttaaatccttgggtattattcattatcatgcttgtatgcaaagaccataatagaattctattgtggaaagaaagcatcaacatctcttaaatatctttagagctctcttatttcaatattatattccctgtgtcatgcatttttctaggatatcacatgggaatgaaagcttgttatgaaacttttttcaatgctgttcctatcccttttcccacttttgttgatggatctgcttcatctcaggaacatatccctgctattcctacaccagattaccatcctactcaatcttttagataggtcaatgagcctattttatcttaggattctcccccatccacttctgcacctgatctacaaaattctcgacctgttagatagattaagaaaccctcttatcttaaagagtatcattattttttaactaatcagtctacttatgttagctcatgccataatactgacactactattcattgttaatctcaggttcttgattactccaaattgttcccccacctttaaagccttcatttgttctatatcaagtcattatgagcctcaatattatcatcaagctgctggtatccctgaatgggacaatgctatggacattaagattgaagctcttgaaaagaatggtacatggattattgttagtctaccagcacatcaacatgctattgggtgcaaacgggtatataaaattaagtacaatgccgatggatctgtggaatggtttaaggtacgttggttgccaagggatacaaccaacaagagagtattgactactcagagacttttgcgcctgtcacaaagttggtaacagtcaagctaattttggccttaactgctgtttttggttggcatatgcaccaacttgatgtgaacaatgcattactccttggagatttgcatgaagatgtgtatatgactctccctcaagggtatagtcctaaagggagttacctaacaatgttgtatatatgcaagctcaaaaagtccttgtatggcttaaagcaagcatcaaggcaattgtttgaaaaattctcaaatgctcttgaggaagaaggttttatacactctactactgatcactccttcttcattaaacattcacaaacaagtttcatagctttgcttgtgtatgttgatgatgtgatcatagcaagtaacaatttgaatgaacttgaagatctcaaatcagattggacaacaagttcaagttaaaggatatgggaaaattaaaatatttccttggtttttggaagtggccagatttgagcaaggaatatttgtatcccaaagaccatatgctctacaaattttggaagatctaggatacttcgaatgcaaaccaatgattactcctatggaagctaagctaaagctatgtcaagatgccaaggatgatgccgttgctgatgccactttatacatgaaaatcattggaaaattacaatatcttaccattacctaacctgatctaagtttctcagtcaacaaattgagccaatatttgggaacacctagagcatctcatcttgtggctgctcaaagagttctccaatatgttaaaggcacaccaggtcaagggatcttcttttcaactcaatccaagatcgaattggaggcatatactgattcggattgggctacttgcccagatacaagaagatcaaccacaggtttttatattttccttggaaaatctctgatttcttggaaaagcaaaaagtaacatacaatctctagatcatcagctgaagctgaatatagagctatggcaaataccacatcagaaattatatggctgctgtcaatgcttaaagagctgaaacttgagcacaagggaccagttttgatgcattatgacaacaaggcagcataacacattgctgctaatccggtctttcacaagaggacaaagcatattgaaatttattgtcatcttgttagagaaaaagtacagcaggggttaatcaaaacagttcatatctcaatcaaagagaagattgctgatatactaactaaagctctgtttcctggacagttacaacatgttgttctattacagaaatccaacatgtaaactaaaagtcacaattagttacaaaaaatttatgttgtgactaaaagattgtcactaaaaataacagttttttgtagtgaaatattgtacatttatatgtacatagatatcatgatatgcaccaaacatatatgaaaatatgatatatatatataaaaattgaatataatactatatattatacaatactatttaatacattataccaaacataccctcaattgatttattattcaccattaaactaaaattaccataattattttgttgtactatgtaggagtcaattgtcctcaagcgagtttttgctactccggaactattattcctcatctgtttactcatcaacttgattcttgttcagataattactttggcttcttaggcttgctttatacagggtcggccctgggcctaggcgggctaggcccgtgcctagggcccactccaacctagggcccaaaaccagccatataatgccttttttttt

SEQ ID NO: 22575 - DNA, 1279 bp, Cannabis sativa
tacttttttaaaaggtattttttattttaacacttaaaatgagtgaatcttaagcgcgagtttagtccacctatacctaagaccaaacctgaatactattatagtgtttggcttatctcctaaacaaataaagtactatattgataaaaaaaaaattaatagttttattatttttaatatttaaactttaaataaaagtaccaaaaaaaggcaaaaaattatattttaacaatgcaaccatcgttacatgagtttaataatgtaatatgaattaaaaggtataatgtaatagacaaatgtaaagccattaccgtactttaaaaattaaaacaaacaatataatgacaataataattctattacaatgggtattacattaaaccaaacatgcttaaaacttcaatttttatagatgatataactattcttcccatatataattttttaggtgacccattttatgagagtgcaggggtatgccagagtgtaggaagataagtaaattctaatatattcgttatcaatattgtaccaaggatttaatgagtatggtacatgtataataagttattgttaacagggtacatttatatttcaccaactctatttagagttgaagctcatattaattcgtatgttattatggcaaaatgttaaacaacggcaatagggtaggtgaaagatttatatgtgagattcgaaattggaataaggaaaaatgaaagatgaattgagtgacccacatatatttcatgtattggttttaaaatctctaatacgatcctatctttgttaaaaagtttggtacaatatttattaaacgacataattgtgttactcataataaggggaagtacttcaaattattaataaatgatcaagatacggaggctccaactcactcttaattgggtcaaatagtgagtaattttgaagtttaatacttaaaatattataaaatgaaactttatttgctgtgaggcacttaaaagacttttaattgtttttttttcctacttctcaaatcgcctaataacttctcattaactgttcccttcaatccaaaatttattgattttttcacctgaatcatgaatcctctcattgatataaaatgaaaggaatgatgactcttgctcaagaagatgaatcaacacttatctgatgttaatgtataaactagtaatttagatattgtgctagttgctagagtgctcgttaccaaatttgtaacaccctaactaccttaggcgtaatacgtgatttttaaacgtactgt

SEQ ID NO: 22576 - DNA, 4183 bp, Cannabis sativa
tcactagaaggctttaagtttcaccatgccttaagattttaatttgacacttcaaacaacaaggatgagtatgaagccttgatagttggttcgaaaatagctgaagtgttaagagtcaagaatctggtgtgttatagtgactcgcagttaaaattgaataaagttccaggcgaatactagcctaagggcttaaaatgacaaaatatttagagaaagttcggaagaacttggaaaaatttgaatatttgaaaatcgaacaaatttcaagagaacaaaactcttacgtcgataccttggcaaaacttgcctcgtagaacgaacttgatgaattgaattttgtaccagtggaggtgtgaaacgagccaggtatacgtgaaaaggaagaagtcgagatgattgatagctcgcctacttggatgacacccatagttgactatcttctcaatgggaaacttctagctgacaaaaacgaggcacaaaaactcttgtattcagtgcctcgctacacaatagtagaagccaaattatatcgtaggggttattcaatgcctctcctacagtgtgttttccccacagaagcgagagagataatcagagaaatccacgaggactttacagagatcatgcaggttggtaaagcttgacaaacaaaataattcgacagggatattattggccaactataaataaggacgcgcacgagtttgtcaaaaaatgcgataagtgtcaaagattttcacatatacctcgcgtgccaccaacagaactaagaatgatgaccttgccgtacctatttgtaatatttgggatcaatttgattggggcattccccaaagggcgaggaggagcaaagtacgcagtagtggctatcgatttctttacaaagtggacagaggttgaacctctggtttccataacctacaaaaaagtccttgactttgtcgtcaagaacataatttgtagatttagaatacccattaagatagtattcgataatggaactcagttagatggtgaattatttactgagttctgtgaaaggaacaagattattaagagcttctcgtcggtctaaaggcctcaagaaaattggcaagtaaaaactattaataaaaacttggctatcaaaaagaagttggacgctggaaagggtagatgggtagatgaactactacaagtactttgggcttacagaaggattgagaaaacaacaacgggacatactccattctcactggcatttggctgggaggcaatgatgccagtagaagtcgatattgcgacccatagacgagatttctataatcaagaagagaaaaccaagaacttttgaaaaactatccttggatctacttgaagaaaatcatacttagtcgcaaattactaacgcagcataccaacaccgagttacaagataattcaataagaaggtgaagaaaaggctctttaacatcggttacttcgtactaaggcaagtatttgcaaacacgagagatgcatctgcaggagtatttaacccaaactaggaaggttcttatgtgatcgaggcaatagttagaatcagggtttataaattagctcagcttaacgactcgctaataaagaaccactggaacgtggagcatttacgaccctactactagtaaactaatgttgtaatctctctttttgatgtaatattttaaatttcaattattaataaagttgaattattttccaagtaattacaaagtcttattctttaaaattacttgaggggtatatatctgtgtatgatcaactggaatttatctagaaacacataatatattacaaacccattccattttaaagcttttaaagtttttcaagtaattgattgaagtcatctatggacgacgcaaagttaaaattagcagttgcaaatgatatttaactcataaaaacaacactaagctacatgcgaagctgaatatttaacaacttgcatttcataggaacgtattaaacgaggtaccaagatgccttgaaaaaataattaaatcaaggtgtgaatagaaagcttaactattcctacgagcaatcaaaaacatacaaaacaattcataaggtgaattattcgaagtatgcttaagtttacttaaatcaaattataattgttaacgggaagtagaactaataaactgctcgtgtacataaaacacgacaaacgatgactgctcacttacatagtagattattaactacttaagcaataatacaaaaggaaaagaagatcaggggaaatgcttaaagtattttaaatttgatcaaagtataattgtttaaattatgagtaaaaatgcaagtaaaaaaatatattaagttcaaatgtaaaaatatgagacaatgaataaaagataaaataaaaagcaaagttggccatccaacaatgcaaatttgtctttacaaaatgccacaaggggcaaaccattgtctcggccatgtggccattttcctaaataataaagaaaatgcaacttaaaaaccaagcctaaattgtaggatacttggatggaacttcttgttacacttcaacctcttcttccttgcccagttcttctctcctagtcctctcgcaaaaggcgagcatggcatcagcattgtcacctagaaagctgaaatccaaatcaaggttggctgaccagatttgatagatggtcctcctcccgatgctaataaccctatctttggtttcagcctccatctctttgagttttttctcatgatcagcttggagggactcgagagagtcctcaagttccttgaccttcttttggtcagccacacgttgctttactgcctcttcctttgtgtgagaaacctcagcattggagtcattccactttttggctaaagtatccctatgctccctagtctggtgaagctcaaccttaagcatttcagcctactgagacgactgatgatgagtaacatcggaaaggagagaggcctacaagaagaaggcaaatcaaagttagtaaaaatgatataatgatgaaaagtgagaacaaggagacggggaaattatctgatgcaaaagctcgtaactccttttggcaagatccttagagctacctcgcgtaagaagatcccagttgccaaaccccaaagtcaggatgttatggcaaccattggtagcatgctgcgagcaaagttgcgagccttctgtcccgacatcgaggggtaggggataggagggcttgaggagaaccatctatggaagagaaccagagaatttcacctgatgcactgacccatttggttgctccttggcattcctcacaacagagacctttttccccttctctagagacttggctggcttgatggtaagcaggcttgaggacttcttcttgttggcagtggtcttggtccttttgggttctttgatagaacccgaggcctcaccatcttgggaactctcttcttagacttcttatcgactaagggaggactcttgaacatgcactccaaatccacatccatacctgcgaggtaagagaagtacattaacacttaaacaaaataaataagtgaaaatgggaaaaaaaaactcccacttgagaaggttaccataatcttcagaggatgacgaggatggaccataatattcactaaactcccaaaatcttatgatcataaaaagatcataagggtgtagtggatctaaatcccagtttgaatctatgtgacccgatctatccaatatagttccgtactgctcagcaatatcaactacccacatagattacctcacgatgctccttcatcgtgagtggcagttctctcgagatattgtgcgcgagccacaaattcctaacttttctcttcaacttgaaccaggaccttttgaaacgaagaatacttgggtattttgtaatctcaagtaaattcgtccgatgtaagaaggccaacattcttcagaatcttttcatttattaagaaatctactgctcgcaacccatattgaagacttagcaaaattttgtggcgcttggctatcacaggagtaggaactggtctccgaggaactgctacaatcagacaaaagtttagtaagcaactttaatgatacaaattaatacattttaaagttaagtttctaaggaaaagcacttacgtatgatgtgaaaggtaattgtatttattggagagaggcccg

SEQ ID NO: 22577 - DNA, 3513 bp, Cannabis sativa
actacctgcttctctatcatttgcccgacaatagagatagctatcgtctgcaaatagcatatgagaaatgataggcgctccgttagccactttgcaaccatgtagctcaccaagcctttcgaatctcttaatcagtgatgtaagaccctcagcacataaaagaaacagataaggagacaaagggtctccttgacgaagaccacgagcaggagtaataggacccatctcacggccactattaacaaccatatactgaacagatgtaaccgtggtcaacaccaagttgacaaaacggttttcaaaccccagtctcagcatcatcattcgaagaaattcccactcaattctatcataagctttactaactaagatcaagcttccttcactcaccgccatgtagccttctttcccttttcttcttccgttttaagaaatgcataacctcaaaagcaaccataatgttgtcagaaatcagtcttccaggcacaaatgcactttgagtatcggatataacctgaggaagaatgagtttcatacggttagcaaggactttggtgataatcttgaagagaacattgcaaagggatatgggtcgcagatcacccatggttgtaggattcttcttcttgggaattaagacaatatttgttttacacaaatcattaggaagcatacccgtatgaagaaaatcttgcacctgagtaactacatcctttcccaccacattccagtatttttgaaaaaatcccggtgtcataccatctggtcctggagacttgtctggatgcatttggaaaagagctttgcgaacttcctcttcagttacatcttggattaagtcaacattttgctggggagaaactagaggcactatatcatccattaaatcattagccatagagccactagtggagaagagattagtaaaataatcggtgatgaccgattgcagcccagtatcccagtccacccaactcccaagaacatcttttaacttatgaatcatattatttttccttctagaagtagctttggcgtgaaaaaatttactattttggtctcctgcctctagccacaactgcttcgaacgttggcgccaaaacacttctttttgactgaaaatctcattaagttcctcctgagccttcttgtactgaaccaaagagtcactgtcattggcttgtttcaacagtcggatcttgtttttacaatcagcaattcgagtcttaaagtcccctgtgtaatcttttccccaagctgagagcttctctccacatactgaaagttttgtcaccacaggatcgttctcacatagctcccaacagtcctttaccacttgaagacacattggctctcgaagccaagcattctcaaagcgaaaatgacgtatggactgagaaaaattcatcacaatagtctgaagcaaaagaggacaatggtccgacattgagacttcaaggttgagcaactgagctgaattgaacattcgagaccattccatgttaacaagcaccctatcaagccgcacttcaacccaaccaacggtacccctgcctctctcccaagtatacggataacccgacaagtccatatcgtggagatggcagtcattaagagcttcctgaaaaccatctataagagcttgcggatacggattgccccctcttttatccgcatgagacaaggtgttgtttaagtcaccaataacacaccaaggtaatgtgtgttcagtcgagagtgatcttaaatggttccatgtcttgtaccgaaaggatctattaggttcaccatacaaacccgttaaacgccaagcattaccgtcttcaacccctactttgatatcaacatggcaggcagagtatcctagcacccggacatcatcatcgtgtctccataacattgcaacgccaccactatgacctctcgcatcaaccgaaagagcaccatcaaaccccaaagagacccgaagtctctctaccaactcctttcgacttagagtttcacaaagaaaaacaaaattgggtttcttgtggaccacaaggtccgttaggaattgaaacacccttgggttcccaagcccacggcaattccaacttaagatgctcataatgtacggtgggcctgggaaccagaacccaccatcgacccattttttgagcccaagttcaacatcacagtcgtatcttcagtatccacgttgccacatgtcatttcctcatcatcagtattcatccccatagataattctccactaagtgacaatcttctcctttttaattctgttatggtaagtccttcttcattaatgtcaatcacatctgtagctttggaagcaatattctctccccccaaattagcagctgatgtatcaatcaactttaatggttgtgtatgatggatatggtgaatattgtgaatggcagctgtaaccatatctccttgattaatgggattggtatcaaattgaatggacttactatgatttggtatcccactaattacggtatcagcatccttcccagtacggtgtccgatcgactggttgtgaccaccggactgtggctgcatgggacgttcaacttcaactcgtttatcaaactctgaatcacccagttcagtacgcaaccattttgctccgattagctttgtctgtcttctcagtggtgctttcatgaaggtaccataaggtttagtgatcttctctgcaggagtgtcgaacaaacgcatacagaaacgatctgaatgacccaatagaccacagataaaacagaaaatagggacattttcatatttaaaagtgatccatatgaactctgtctttgttttccacagtttcatctttcgctgcaatggtttatcgagtgacatagatacccgaattcgcatatagtccctccacaatcctaaaaagttcttaggatctgcctccttgaattccccaatataattacccacattagtaagagtacgttcagtcatgtaaccagtttttaaatcatgtacctgaatccataaatcgagtgtgttcagaggtattgttctcgggtcttcaccctccttcagtcttctaagaatcagagctttgcgattgaacgtccatggactgccttctaaaacacgagatatatctatctcatggtggtaaaactgaaacaagtagtatcgaataccaccatcaagttccttaatatagacacccatacctggtttccataatgctgcaagggtctgctgcattgccgggaagtcgactgaaccttcattgaggaaacgacccaccaaacaccaacgtgcatcaaacgctaccctctcttcctcctgtatctcctcgcaaaacagaccaccagaatcctcttcttcaagggtaatatcaaccaaatcttcatgattcctactactggatgccatgaagcccaccagaaaagacaaaaaccagaccagaaaagaacaaagggacaaccttaaaacaaagggacaaccttaaacgaaacaaaccatgtcagaggacaagac

SEQ ID NO: 22578 - DNA, 5834 bp, Cannabis sativa
aaattaatataatattatttaaaaaaaggtaaatagaacatatattttctaaaaattattaattgcaatgataaaatggaccttatatttttaaaaatggtaaaactaagacttgagtttaatttttaacacttttattttttattataactaattttaagacaatttttaacacgaacaaatatacaaaatgtaaccaattttatcataacatctctagataaggttattattaatttttattttgacaaaaaattagtttagggttctatttgtacggtattaaaaaacaaaaagtcaattttatcatttaacaaaacagtatgtctaattactaacttttacaaaatacagaatctaaaataatatttatcaatttaaaaaaatataaataaatactgccaatatacagtattgtaaactttttttcttttaaaaaaatataatattatataaaaaggtaaaataagaaaaagtaaaaatcatttttaatgattaaactaattaacttttcagaaaaaaaaaaactaattaacttatttttagtagtcaaaaaagtaagattttctttctcacagaaaaaagaaattggtaaagaaagttacatttagatttggttacctaaataatatctaacaaaattgacataattacaagaagctccaaaactctacaaaaagctttctcttctaataatttccacaaaactacctatactttgtcaaaaaaaaaaaaaaaaaactacccatactttatattatatttttactttttcttaattattaattaaaataatataatcttctgatgatgattagattattgatgataatgatgaatttaactttgggcccctctctttaacacctcagcagaacaatcaatggttcactcgctcactcaccgattctgactcactacctttgctctctacaaaatatatatatatatatagatttattatatctatatatatatgtatagagtggagaaagaggaggaggagaaggaagaagatgaagaaaactaatattcaaacaaagtctgagtccttatgtttcatttcaaccacattgtgttaaattaccaaattgccataacaaaaaccacctccaatttctctctctatcacgtatcatgatccctatatatactttgccatcaattgaagcaaattatttaattattattattattaataaataaataataatatataaaaaaagacgtcgagcttataatagtaaataagttttgattttcttaactctctctctctttttccgaatctctctaagtttcagagcgttctctctggttcgtcttcaaccccgagactctctctgggtttgttaattttcaggtattattattattgttttccggcattttgattgagaaactattgtgtttttttgggggttgggcagttgttgccatgggtggttgattcaggaactgttcataattttaatttttttaatttgtgtagaattaatatttgggatcggaagaaatgcgagtgaaggagatgcatccattgtgttgtatctccctcgaaagtactacacccgggatcggagaccagtcgccggaggtttcgacgctttccaggactcgtagcttgccggcgagtttagcagcgcttcctggtcgatccggtaacaatgcggggatgaggacgccgggatctgaagccacagtagccggagttctttacaaatggactaattacggtaaaggatggagatctagatggttcatgttgagaaatggagtactatcttatgctaagattcgtcgtccggagagtctaagcctattgacaccacaaaacgacgacgttcgattcataggtgaaatctctaccaatcgtctttcgaggatggaatcctccgcctctgggaggcgtaagcaccacaagaccgtcgcaatcgttcatctcaaggtaaatgggtcaaattaaaaacgatgccgtttttcagttatcaattccgatttgattgattttttttattattgttagacagaatttatatttgggaaattgaaaaagagaaaagagaaatgggtttataaattggaaaattgttattaatgaataattgagaaaaagaaaagggggaaaataaaattgggcaaaaaccgatggtttgtaggattagtcgtcgtttttgaattctgtcattggaactgtgtgtatttttattgtttttaaattcgtagtttaactggttgttagtgtatagtgtgtcacatcagcaggtgggatcagagtaaagataggctacgtcttaggcctaggtattcttctcttgtcacatcatctacgcatcaccattggtccgatttctgattacctctttctttttttgatcatctcttcctttaaacccctcaaaaaataaactcattaaaattctgttaacttcatttggctagagggattgtggtttactagctgtgtttttcattgttaaagtggaagttttttttttttttttattattatataaataaataatttaattttgagttgtttaaggagtgatgattttttatttttatttattagagtatctttatgtttaatttttgaaattttgatcttcaatgaaattaacgaagaagaaacaaggtgtggggacttggtgctattattattattattattttattagtggggtttagacttagaagttagaaccatttcaaagtttggatttttttttcttgtaactttgtctcaaatgggaagaaccaataatgttgcctttgggaagaaaaataatataatttatgtttcaaatggggatattccaaacctaaaatttttgttagatctaaataattcaattatacatctttgaaagtaacaacaggtaatgtttaacaattactcaaaatcatgatttttcttttcttcttttgggttataactactatttagcaagctcaacctggaccttcttcttcttatcttggttaatggtggggctaaatcatgtcatctaaaactgagatgaacttagatattttgtttttttttgtctttgtattcaggacagctgtctttcttgtttgccatgtgaattttgttccatccttgtgtatatatagatagatattgtgaacacagtcgagaaaagaattatcttttataaatatatgtgtgtataatttttatttgcataaagcagatctcttcctttcgaaaaagcaagtccgatgaccggcgtttctacatatttactgctacaaaaacccttcatttgagaactgattcaaagagtgatagggaggcttggatagaagctttgttttcaagtactcgaagttcatttcccattagaacggtacttaacgataacctctccattgtgcctaatgatctctcagtatcgaccgagaagcttaagaaacgattaattgaagaaggagttggggagagtctcgtaaaggattgtgagaaaatcatgctctctgagttctctgatatacaatctcatctcagcgttgtttgtgaagaacgatccaatttactggacaccttgaggcagttagaggtaacctacttggtttattaattagtaaatgtcctctaatttctattccatagtttgattccatgttaaaaagaaatgttgatttgaatgagtggttgggaatgaatcatattttcaattagttgatgtgaaatttgaccaaattgacccaggtaatctctaggtggaaatgactgccctaacttgcaagaattgcatttgcattcagcaaaaaaaaaaaaagtaaagaaaaagaaaaaacaacttgcaagatttgccaaggggtgtccaacactcaatacttttagttgttgtgtaattcagtagtgggttttatgtcttaatttatattattgttgtatatattttaatttaataaataatattataaatcattaactgctaatcaatcataaacaccccaaatagcaagagtcccaaacttgccctttttgattgttttggagacaactcatatggacctaggcttactgagagaaactcattattaagtcacctatgcttaattgttttgttatacagaaatttatgacttttagtactgtctgatctgcaggctgctaatattactgaaacatctggaattaatgatggcgagtaccaattgacaaaacatgacttttccagtttaggacgtggaaaatatagtggtaaactcactgattgtaatctgtatagggttgaagaaatttttcatggctatatcttataaatgtatatgtttttttttttttttgggctcttagaatgcagcacgactgagtctgatgatattgagaaacaagagcttgaagaggtgtctgaagaggatgaattatccttctatgattcaaaagagtactttacagaaccaaccactggtatagggactataaagggagcttcgaataacatggataaacatgggaagatgcagagtcagaaagaagttgtggattctaaatacacttatgttgaaaggcgaaaaaagcttcctgatccggtggagaaggagaaaggagtcagtctatggtctatgatcaaagacaatgttggaaaggatcttacaagagtttgtctccctgtttacttcaatgaaccaatttcatcgctccagaaatgttgtgaagatatggaatactcttatcttttggaccgggcatacgaacatggaagagctgtaagtattagaaataggtccacacattgtaacaatttattatagatagtaggaaagagttacttcattaattagcattaattcattttatgatggaacttcaatcttactggaccgtgagtttgtgatgttgttagggggacagcatccaaagggctctgaatgttgctgcattcgcagtgtctgcatatgcttcgtctgaaggtcggcattgcaagcctttcaatcctttgttaggggaaacttatgaagctgactttcctgataaaggaattcgcttcttctctgagaaggtatatatacaaatctaatttgttaattactgctaatcaatcatgaaatacaggagtattgggatagaataatctctttgcagaatttttcttgaccaagaacaacgatttattgaattaaggggcgtttagtaaaatatagatattaattcgtaatgtcattatataaactgatcttctttttgtagcggtttgattgaacctatttttaccaattacttttgacttacaatatgatagaagtggtgtcaatcttccttttaatgtatgtaagtaacattcctgcattactatataacaggtgagtcaccacccaacactgattgcctgtcactgtgaaggtagaggttggaaattctggggtgacagtaacctccgcacaaaattttggggaaggtcaattcagctggaccctgttggacttctgacagtagaatttgatgatggtgaagttttccagtggagcaaggtgagtgaattatggtcaagttatctctattttctgtgtctttattttaatgggcatgttcaatttattctaataaagttgtgatcatatgctcataggtaacaacaactatatacaaccttatcattggaaaagtgtattgcgatcatcatgggatcatgcacataagtggtaatcgccagttatcctgtaaactcaagtttaaggagcagactattcttgaccgaaatcctcaccaggttagtatatatgtttcagtctagctcttcaattctctaccatatataatagattcgttcatatctgatgatgtaatacaaatgcaggttcatggatttgttgaagat

SEQ ID NO: 22579 - DNA, 6979 bp, Cannabis sativa
cagtgataatcaagaaaaggacatgctaaaaccaactgacaaaatgaagaactagtgtcaccttagctctagccaaacttccccagacaacggataaaccatgatatacaggaggctgacgacccccaaagtcatcaaacacataatcaacatagctgaccagaaaatggtttctttcagcatcatcaactgaatcctgctgcaccctacaaaaaatcctccaaacaatgtcaaatgaatccaaaatcaacaaaaataatttgagcataatacaaacaagaagatataacaatgcatgtatgcacatatttctttccatctcaactacatctgactcagagacttcaatctgtgtcaggcaggtacaccagtattttccttgcagaagaaattaatttgtgtttataatgtgttcggagcaatgcaaaggcataataaaaccaaataacacacctggtaacaataataaccatggttctgaaagatgcaacctgaaaagagtgagaaatttattatagcagtctacaagtacaacacccaatataaataattaaaagaagaagaaaaatgtccttgttgagctcaatcaaacttctaagtaaatgctaatgacaccaacgtcattaaacaactttaaaagcgacccccgaagagtcgaagacttgatatcttcagagatttttgggtagcacttaggctaaaagcattgaagagtaaaaattaacaatttcgaagttcttaggctagactagtttttggtttgttttccttcagatttgtagtctcttaaaatattactaatacaccatttattcgtaactaaaaaaactgagtcctgagacaccctgaatttagtagagcaccgataataacaaacctggagtgtttctccaccaatgactataagatggagaagcatattcaaaataggatgaagaaattgaagcaaagcagtagaatcaacacgctttaaaaagttcatagcctgcaatcaaaattaacatgtgagatgaaatctgcattaattaaaacaagaaaatggattctgagaaatcagcatagtcaacaacttttatggcactcgaattacattgctggagaatactatagtgtaagtctataattaacaagacttatagtctattaactataattaacgtcttgagcagaatattcacaaattttgaaccttgggacctagaactgacctttgttctacagcaaccaaaattcttgaagacagatttttttttctcaatgcggtaaatgttatgaagataaagagtaaagaaaaatggaaaacaatagtttgataaaaaaaatacctcaaggagttcacaaccccacggtggccttgttcgaagagtatacccatcatactcaagaaaaaaatctctaatgcgttcattgatgggatataatgatgaacaaagtcttaagcgtaatctaaagacattccttccatcctccaaataatgaagtctctcctacaatggagaaaatgggtaataaaataaaccaatccagaaactcattaactaaaaacataaaaagtgtaatacatcagaagctcaaacagtatctcaagcataccctgccagtatcctggagataatatggaaccaactcttccataattggcaaagaaatctcagatcgcaacctgaccaaagccataaacattatagtactattgagagatcataaaacagagaaagagagagtcaaacacactaattatttaatcgataggatcccatgcagatttcaacagctatgatcatgccctggtgagtttccagtttcaaacatgtataaactaaagcacatctgactgaagtaaccaaagtggccacttaaagctatacccaccacattgcaaacactcaccacccgtaatgatctaggttgactcttaacaatgataactatctttggcgcaaaatgtatgatagtcaatgttaactcaatgatagaagagggaagaaagtgcatcgtaaacataagtttattttcatgttccagtgttcggaaggaaagaatgaagaacaagaaataaaatcaacaaggtatagacatactgagcgtgtgtggataatggtagcgctgcatatccaattactacctggaaaatgcatgggaaacataaccatttaaatgaaactgaaacaaagttaactgtagaagaaggaagatgaaataacacatagctacaaaaaattatgtaatgctatagatgttgagtcttacaggctttggtgcttccaattttgtttgaaggtccacatggaaaaaagtgaacaaaagatgatgagttggtgtccagatagctgggagggacagtttaatctcatcgtggaaactagccaccctagcactaacagcaacttgagtatgagtgcacctctgaagtgttgccccgtgctcctttggatacatcgcctactcacatgtgttgtaaaactaagttaaatgttgttgaaaggaaaactgatttttgtaaaaacaagtcattatatttacctctaatggttgtctacgaatgtcagcgtcatccgctctaagttcaacccgcacaaacaaattcctcttccaacttaaactaacagtcaagggatatacatagagaaaatgaaaaggctgcaaaaaaggcttgtttcttgttgtagtacaaaagtcgaaagcttggaactgtaagccaaccgatacaatcatttagtttcatgggaatagaaaaacagtacataaaatgtactggagacctaaaatggcattcatcataatagatgtagacacaaagtgttataatcataaataggatgcaaataatagtaataagattgagaatcaaaaataaataagcagatagtagatacacagagatctgtcttatagcaagtgatggtttcagttcaaggggtaaaaaaacagagcaacagcttcatacttacatcatcagcaccaaattcctgatttatttgagcatttgatccatttccagaaatttctttagcttcaaaagaattcctcttagagttgctacaatgaagcccatctgaaccattactgctatgctttccatatgcagaatcagcaacgcgatcaacaggatcatctgtggttagactaccagtttctgatatgatttctaagtcagcatgatcaatgtgatgcttctcgacctccagtctcaaaacaccttttacaggtttgtgtattttgcgtttaggatcctacacatcaaaggaaaaccatacaaaataatgaatattatacattaatacatgggcgaagccacatagagcccaagtaaggcagccgccccatctgaaatttgactcaattctaaatatttttgggcctttatacaaataccaatctgctcaaatagtacttaatataattgtttggtgtagtggtaaaggtatatttaaaggttaaggatgtcacaattgtgtattattttatactttaaatttttatttaattttagtccacataatataaaaataagtattgatattaagtaccatggcttttagtactactatgagtctatgaggtagcaccctataaataattattggttttctataatcattattaaaagtaaaataagtgggattcgatattaaattgcaccaatagcttatgacacttcatagagggcgctaggcaccatagatgccctttagcatttcactataaaactagataatagcttcatttaaattttatttgcccaagctaataagaactaggattacacattacactataataagaaaataaaactacatgagttgatgcctgctgtacctgcagtgagtcctcagtgtagctctctttgactttattaaagtttgatatctccactataacagagcttccagttgaataacccagcttcccatctagtgtgacctttgcactaggctcaaaaacacctgcatgagaacttgatccagacacacttggagcaagttggctgcttggagaggcagacccaccagaagctgcggtaatgttgttatcaaataatggaacaatagcccaggcaaaggactctttgtaaggcattatttgggaccacacctgcaatttttgcttctctctcttagtcatgtgaacctcttggggtggagttaagatgttatttatataaatgaaaccaaattagaacttggatgccatacatgagctgaccccacccaaataaaatatagcataattgtctatttcaactgaaaatgaaagagagttagttttagttgtgtcatacattgtctgtcttcactctccacaatttactattccgatcactcaattttttgtgatagatagcctatcaacattgttagacaaatgaatgatacaacaaagctttctttcttccttagtataattagagaagtttcctgatattggataacaactcaacattataaatgatattttcaagtcttaatgaccattcaagctttgaagataaaaattgcagcaacatgtcttatggcgtcaaattcctttttattggaaagaaaaccttaacatgtgcatagccaaatgccatgcactgagactcgtagggtaataaaaaactaaaagtagaagtacatggacattcacatactggctctttgcgagaatagactgaaggcataaccccatcatcttcagaagcatgcctctctaactgaataagcagacaggctgatgctgatggaacatctaaatgaaagattccacgagactcagatgaagcacttgcctggaaaataccacatcttgattattaagatgttgcagaaatgacaaaaataaatagacgcgggtgaggagagggaataagaataaaagtttttacaacgcccttacaacttacatcttgcatttcactaggtaggacaagaaaatgaaagtcttcagacaacttatctcttctatcccaattgtataagcaaattgtaccggaaaatggctctataaaaagagagaaacagagatcagaatttaccgcatgcaacttaaaacaatatagagccagtacatgagtaaactgcttaccgactagtccagcttggaatgataaagatagaactttcacagaaatcttcaatccactgaaacaacataaagagtggtttgatgaaacagatcagtatggaaaaaagtataaaagaaccaaaatttctattaagcaacaataatttagtaattccatactgagatacaggagtttttggaatcctttcaccaaatatcagtgatctttcattttcccagtcaaaagccggttcgtaagctggtagtggggattgaccaaaatgctgcaaatatatttttttttgtttaacaactaatcaatcctgaagtacactagaatgaagctagacttatgatgattgctacaatgatccagtagaaacaagatctgagccagcaaaacctttaaagtatttgatagtgatgggtcagaagtagtagcctcagcaaactgcagtcctgagctacttggcacatcatcatcagtggcgtcttcaatcttggttcgtcttgcattagcgagacacatttctgtaaaggggttgaaaataatttgtataaaaatcggaagttagaaaattgattcaacacagtggcagaaaaaccattatatttaagttactccatgagttctgcagcagtagcacttactatacatacaccatcattatttaattttgcattagcaaaagtaaaacttctaaaaggtaccaataaattaaacaaatcctaataccatttttgtaaaaaatgcttatggtgtgtttctatttgtattcattactaatttagaactctagaataaaaccatcaactgtataaactcatggagcagaaactatccactctaccttacagcttatcaagtgtactgttaatcacatgttccactagaacactagtgatagtcaagattcttacaatttcatctaaacgaatgaatgttaattaagttaattctttattccttacttactttaacaacaagctaactgtagtaatttagtagagagtcaaagaaggaatctttttacctgtctcattatcagtatcagggccttcataaatctggttctgaaacgacacaggagcaacactctcatagtgaccatacttattctcatccttaacccaatcagcactataacacttaaccaactccttaatatgcggccactgctctaaattctcctcaaactaccaaaaataaaataaaataaaataccacaaacacaaacattgccaaatttaaactcaataaccaaaataaaaccaaatggcatttcttgatgattaaaaaaaaaaggcttatcggaggaaaacccaatcaattaccttgttctgccatttagtggtggcagaagtggaaccccagcgagggcggaggtgcaacattgcaggtctagggtttatttcttggaaaaccataatggggtaaaattttctgcgttgttatcaaactttgatttttataaaggtgagcgtttttccattttctcttttctttttgataaagtataaaggtaagctttttaatatatatattatataaaggaggaagggaaatcgaagttgaaccattataaagataaactcctccaatgaagaagaaacccatttggaaagagagagaagggaataagctcaaagctttaagcttcagactcagactcacaccaaagtgaggtaggaatgatcagaagagcacagggcactagtcaaagtatagtccaaataaaagggaaaaaaatgtgaaatttgcaaaactaactagctatgtggaatactaataaaacaataataatttattttcttttgtacgaaaaaatagagaattgctaaaggacactagattcatataatttaatataatagcttttagagagtatcgctagttaattacaatgcaacatgtcgaaaaggtactaggcac

SEQ ID NO: 22580 - DNA, 1758 bp, Cannabis sativa
tatttacccttgcataaataatgatattaaacatttgaaggtgataaataactttggaaaaggatttgaccattaaatagcaccaatagccaataggaatatctttaattgtagcattctttaaagatgctaaaatctttcgtattatttaaaaatataatattttattttatcactcttttacattattttttatccggttatttctaaaaacactccaataatgtagaacccttcaaaaatactattctaaaaaataagtccacaatccatactgcacatagtaactaatacaaatacaattctttcaaaaaaaaaaaactaatacaaatacaagtgctttctattagaaaataaggagtggctaagagaaaactgcaagtcaaattaaaaggacctcattttgtactaaattgtgcccccgaattttgttacctaccaaattgtcccccgaactttgatatgcactaaattatgctttatgaactttattccatgtcagattttcgtttgtaaaattggacaaaagtccttaaatttaactatctcaataatataggggaaatttttgacggcttaaaaaattcaaagaacatgatttggtacatgtcaaagttttgagtggaaaataactaattagcaaaataaaataataatctatcttaaatactaaaattagcataccttatttcgtcaatatataggggcaggccaccaagctcatttcctttttaaggtactatcacatataaagaaagaaagaaaaagaaaaactgcactgcagagttgcatatggcttgtttgagctaaggtgaggcttgcaggtatcccaattcttattaaaatggcccataatcaaagctatacataacaaaggaaaaataaaaatcagacctatctttaatgctaaaatgaagctacatttaaaatgtactgaaaaaacagcagtttcaatttatagaagagaatctttggttagagtttttatccagtgcttgcaagttgcaactggcttttggtaaaagaaccagtcagaaagtgtctttgtgcatgcattggactttattatgcagactaaaataatgtaccaatcccacactcaatacaaatacaaatgtggggttacatgatattttgtttttggaagagtctaataacttaatcaatctttctgaaatttttattaatgtgtagattagtgtattagtaaatataaacagtgctgcttagaaaaaataaaccaaagtaacaataagacaaactttttatggaagagatgtctattatatcttattaggatgtaaaaagttatttctttcttttttttgctgaagatggaagagaagttttaggggttaataataataataataagagaaaaaaacagcacattttacaaaatggctttatataactttacattggacaaatatatactagaaaacaacaatattaattttacagcataatatataggaaacaagtcttcaaatctaatataagtaactagtcttattcacaactaaccaagcttacacatacattcatttcataggggtctagtttctttacatattggcctctcatgagtctgtttcaattttcaccctcacatctccctttggcttcttcttctcaacttctggcgatttattggctgaacacaatgtagcagttcaatggtttagtactataattcacaggagcacacaaaaactaaacacagtacagaactacatcaatgtttaaaaaaattca

SEQ ID NO: 22581 - DNA, 3311 bp, Cannabis sativa
  modified_base (1835)..(1862): a, c, t, g, unknown or other
tttagtctttacttgtctatggagttgaatattaccaagttgcatctcaactgttcctcatctcttacgtaaagcttacctttttgctaatgttgttgcagggatgttaaagatgaagaaatggaagaatagaaatccacagataatgaaattcactgtcttcgatttcctcgtccccaaaatattgtagggttaggcggggactctagtttcagaaaaaacaaaaaacaaagagtcactgtcttcgattgacacaatcacttgggaaatttcaataacctttgtcaagataatagctatacaaaacttttgtcaatcacttggttggaagttgcatgaagctactgatgccattccgtttgtcacaaaaatgacctcaaaaaagaatgcttcttttactaaacaggtgccaatacttgtagtaagcagagacaaatatcatagaatctttatgatacatagggctaatttttcttgtgcatttgtgtatggtttagctgtctgatcttgttggtacctatgaacacttttttccttggaacattctctcttactgaagaggcttgacaagttggtattctggaaagagagaaaaaattgaatgggagttttgttttaacttgagtgtacagtttacggtatgctctttgtttctgttcagtttatgctcgttggtctagactcttgtatgttatgtaaagggagcacacaaatgaggttttttccttaaatttcagagtgagaatttagaaaaagaaaaaaataagaattaatccacttttacatattttgctaattttatttttgtgaacttgttattttcagttgcactcacccgtaatagattatcattgattcataatatgatttcgtggtctattaaaattagacgtgtaattgaaaggattgagtaaattattgaaaaagttacataaattattaaaaatttgaaaaatattacaaaaatacgttaaatacagacaaaaatttaatttaattttttacttttttatttacaaaaatgtatttttataaaaataataactttttttaatttatttatagttgtattatagttgtggtttggttgtttttttattgtaatatgattgattatagttgtgaagttgatttattgttttttttttttgttaaataaagtatattttttataattttaaaataagtatatttttatagttaaaagttttaggccgtgaaattataaataaaatatttttaaaacctcccctaaatttgtacaacttagaatggaaactttcttttattatatggtaataatcttatgcttcttttagttctctaaatataagagcatttctaattaagtgttataaatatggcatgtatgtattttttaacctatgttataaaattgaactccaaatgtagtgtataatatgatctaaatttgacacatgttaaaagttgcactatatttaggacaaaatatagtatgtgccaaattttataccataataaatataattttttatttatttttttaccactcatataattaataactttttatatttttatttatatattaaatatagtttttatattcttttaataaaaaattaatatttttgttataaaaaaattaatatttttgttgatctttttaccccttttcactaaaataatatttgtaaattttaagacaaatataacacattgactcatttttttaagttcaatttagcacaaaacctattctatctcttttttttgagtgtagcgtaatggtattttacaatcatatatgaacttaatagcttaaggatcctaggttcgaacccatgacctcnnnnnnnnnnnnnnnnnnnnnnnnnnnntaagctagccttagtggcttaacctattctatctcaaactatatatctctctccacctccacttccatctctttccttccacctgctccatccaatcttaaaagacctttatttgttacttatattaaattttagcaccaattcttatttgtatatagaaaaaattctacaatccattttttaaaaggaatccactaggaccattactatcttgaagaattttctagttcattttttttttatctttatctacattataattatttaaaaccttatacaaaattttaaaaaattcaaaaaaaattagcaaaccgaaaaatgtgtataaaaataaaatgaaaaaatctcaggtacaaatgactgtttaaatattatttgttaaataactacaatataaataaccataaaattttttctatcaaataccgaaacagtatgaaaatgcatccataaacctttttttaaaggatgcatggtaaaaacatcctctataatataattatattaatattattgtcaccatttaaatttaatttaagaaatataattgttcacatcaattgacacttctgagctcataccaacacgagtctttggcttcctagtccctccctacccactttgatttctctcattttctcgccaaccaatcaacctaaaaccatgtctccctctcaaaaagattccaaagccaatctatttcagcttcctaattcccaaacctcaacaaacccaccaccactccaatcctcaaacgaaaatccaagacgacgtgaaaatcatcgtcagattcaagtccaggcacaactacattcgccttctggcagtttcgagggcggacccggcggcacatttggttctcaaactgtatgccgaagtgctgattcgtgattggaagatactactagaaatgggttctctggtatttcggttgatttgttttcgaaaatcgaagggttgtgcatccctgagctaaacacttgggcaaagctcagaaaatgtttgagaaaaagtgggagagtaatggtgaaggttggaggtagctgtattgactattgaggctgaggattctcgtagagatggtaaacgagtaatagaggaagcattaaaggcgatgagtcatgcttttgatggaaagcttttcgttttgagccttgggaaaagggatggtatgttttttcttccttcagcattatttttgagttctttactgaagtatctctgcaagtattgatgacttgatgagtttattaatacttttactgatggacttgtttataaagtttattctgtcaagtgtacagagcaattaagttcacttgagccttctaattaagtctgcactcataccaatttggtacttgacagtggattacttaagaccaatgccctgtccttttattacacgtgacaaaattttatagtaaattacaaggcttgtacttcaag

SEQ ID NO: 22582 - DNA, 5965 bp, Cannabis sativa
  modified_base (5909)..(5919): a, c, t, g, unknown or other
ctcttgtggcggcacttgctgatgctgaggctcgatgcgatgaggttgaattgaggatgaaggaggttttggcttctcagattgctgctgaggaagaatgtgcgtctctgctccaccaattcgctcaggtaaatgataatgataatgatagtggtgatgatacttgtttcgactattgtattgggattcttcttagtcttatttgtttccacatgattatgattatgataatgatgatgattatgatacttgtatcgattcttgtattgggattcttctttttagtcttatttgttcccacaagataatgatgatgatgataattgggatacttatttgtatgataattatatgattacatataatgatgatgacacctgtttcgattcttgtattgggattctttcttagtcttatttgtgtttcaacaggatacctcagaaaaagcagaattgggtatcaacacagccgaacaagtttcctcaaagaaattggaggaatggcagtgttcgacggaatcgttggagcttaaaaagatggagttagaaattgagtcaaatatagtaaacgaagctcggactatgttgactagttcaattgagaactcagttgaggatgaccagagagaaaaagagtctctttgcaagaagaagagtgttcttttggacgaacttcaggagctacttgctcttgtaaaacaaaaggaacaagaaatagcagaaaccgattctaacatcaaagcagtcgagaacaggattgcccatgtcgtctctggttttcaggagatgcattccaatatcgactctaaatttggtaacttgcagtcttgtatttcggacatagaattagaaagcaaatccttgtgtgaactgaagaaggaaattgatgatttcgtcgtgaatgagcaagagaaagagagaaagttgagggaacttggaaactcttccaaggaggaagctgaggcataccatcaagtcgttgaacttagaaagaatctgatgacttttgttttgaagtctaaggaagataaggataggcttgcgaagactgagaagaagctttctgatgaagttcaaatgctccatcaagaggtttcgtcttcaagatcttcccttcaggaactatctacaagaaaatctagcatccaacaggatatagcatcgtcaaagcaaaagataattttcatagacaaaagagtcccagagctggaagtagaaaagaaagtggctgcaactgcaagaaattttagagaagctgcacgaatagcagctgaggcaaaatcactgacggttgagaagaatggcattgaggctgagatggaaagaggtttaatagagctggagaagctcgagaaagaaattaatgacactgttgagaaactggaggagacagaggtggccatttcctccaaggaaaaagagttagccatggccagatttgagaggctggttttaacggcgggatatgctgaagcagaaagagcagttgcgttggaatttggagatgctgaagaggctaagcttctccttgctgagaaagaagttgcagaatctgaagccaaagatcttgagccaatatataattttaaggtggaggagttaccaaatattccaaaacacttcatctctatggaacttatagccaaccttgggaagaagcaattagaggaattggcagcatctattggtatttctccaaaggagtgaaataatgagggctctggttctggctctgttattaactcatcatgcatatgtgtaacataggtaatattatatctctcttactcattaattcttttttcgttggggggtatttggtttttgttttgatacttgtttatgcttttttaccttttttttcttcttttatttgtaatttttggttgggattttgatcaaatggaaagagcatacgaattgaaataatctacttagttattattatatgagcattactataaggcatcagtggtctctagcaccacttactgagtgttagacactattgaagttttttagcatttgtcttattattatatatagagagaaaggagatttgcatagatttaccaagttgacatactattcttcttggtaagctaagatacgtatggagataatttggtgtgaaataggacttgctcttacaactccttaaggttaagagttatagaaatttgagtaagttaatgaaagtgttgccaatggtgttatgagtaattgaaggtagcaattcaaacaagttatgggaaaagctttaagaacccaactgataccattttgccaagtgtatttaaaatcagaaacatcttcctcactttattaaaatttaatgaaaaatactaagaagaccctttggtgcctcttaatgaagacccttcttcaagaagaatgttatgctgatgcttcatgttgaaggaatattagttcaatatataattccatatcttatatccattaagtatttttttttttttttgtacaccattcttcatagtggatcttactgatggatccttttcaatgccttacaataacccttttcattgcaggatttgttgtttgcttttctcttagaaaaaaacaatcacaaaacatcaacagaagaatgtttttcagtgaaatgaaacattgtgcagatgagcattgtttatggctgtaaagttcaagagctcttctctaaataaataaataaagttcaagagctcttatcatttttctgaataaaaaaaatattatattctcaaaaaatatcacaataaattaaaaaaaaaaaaattgacaaccaaattgccaaaaatgaactctacactatttttttctattattttagtggaatgactattctatttagaaatagaaaaaaaaaattattctaatgcaatatgagaaaaaaattaataaactttttatcaattattttcatgcattttaaatttgattctattccattcctattattattccctttctcatttttattaagcttaagagattaagtcaagggaaacctcctcttgatcacactatctcatcccccataaagctatattcaccaatgacaatgactaattttggtagctcttctaatgttggcattggatcatccttaagttgggagattcctcaaagatttggagagaattggacttataaatttgagggcagattagtatcaaaggaacaatatctatcttggtggtattagtatcaaaggaaaaaagaagtgattgtgaggagtttagatacttggtacatccaaacattattcagttgtacaaacaagtgattaaaaacacaatccaaaccaaacatattataattttcaataattagtttttccataagaacatacacacttcaatatccaaacattaattattcaattgtacatagaaaaagaaacaagaaagccacacccccacaaaacataattattccaagtaacataaagaagtagaaatcaaacacacacacattccaaacattagttatatgcatcctccaaatgttgattggttgtatgcatagctcaaagattgtcacttgttggtagatctgcaataataattcatgacagaaaatgcaatgagtaaataagaaatcaaaatatctataaatatcaaaaagaacttgtgaataagataggtatgcagttccaaaaaatgtacctctattgcatttgataaatactcgagatgtgatgttcttgactttatagaaatcgtctcctccttcttccatcctttctttgaatttcttaggcatatgaactatcaccatctcgttcagtgtagagatgctgcttaatccatttggaactttcctcaatcggatgcatttatcgatacgcagatggaaaagcctggacaatgcactctcctccacttcccactcttttaagagatatagacgactaagcttaagagattcgagccttcgaaaacctcctcttgagcacaccatcttatccccgataaagctactttcaccaataacaaggactcttaattctggtagcttttctaatgttggcattggatcatcgttaagtgagagtgattgcaactctaacttcataagatttttggagaattggtcggcttgaggtaatcttactatattcgagtgcagtctgagcttataaatgttaggacaagttaatatcaaaggaacaatatctatgcacatgaagacagtccccaatacttgtaaagacaaaagatgaatgagtttgagagattggggattgtgtgaaaatttggcgaaattgctgtccacccgaattgttaatttcttgagattcttcagttgttgcagtaaatcattcagaacaagatccttggtacgaatacctaccaatgtttgtaaatttctcgacttagttgatctcaagaatttaccaatttttatctcatctaaaaagtatagatgcctcaattgttccaacttgaacattgaatttggtattttagcactcttagtgtatactctcaaagtttgtaagcctttgaaattgccaaaagaagatggaatcttttcaattgtatcaggaccactaaataaccttagatgaataagatttccaatttctttaggcaactttaaggaacatttagctcctttgttatcaatgatcaaaactctaagcatcaaaaagcttttgcatatgtgtctgaatgctgctttatcaaacacaattaattcacattgtacaataaggcacctaagagagtcctttatatttggaaccataggaacaaaatcataatcaacacactcagcattatcgatggaaactcttcttgcatttgtttctattggctcttcccctcgattctcaatcgagccaataaaatgtaaaaacatttcatctttggctcgaggcaataagcacaagtctcgcataagatcatgaatgcaaaatgattttattcttcctatcgagctcatttcttttacctgaatcatactcctatccaccaactcgcttaaccaatcataagccacttcctccaaagtgttcctagaattgtttcttattgatataaaaccttctgctacgagcacaaggcataaatcttttacttctatcgtgacatcttcagggtaacgagccaagtacagaaaacaaggctttaagtgagatggtaactcgtcgtaactcaaacctaacacccgcgaaacactacggtattttgagtcttcatcatgtaacaccagcaagcacaatgatggctaatggcaaaccaccacacttttcaaccatctctagtgccaattctttcttcctttcattatcagttgagtctaaatctatatatatagagtaaaaatgccaaaaaaaaaaagaaatataattaattcaactgatggatttaacttggagcaaatgaatattcatattcttaattaagtaggcaaattgagagtaaaatatagggaaattgaaagtaccacaagctatatatttttatttcgtatgtaccaacacatttaagtcttatttaactggaaaattaacggttaatatatctaaacttttacgtacttaaaggtaaataccaaaataagattcaaacattaattttaattttattttgcacatgcgtaacagactattttgaacttcacttttcaggacagtattcaaaaattttcaaaaacaaaaaatatgtctattataattacaatatacaacgttatataataggaaaaaaataataataaaaagtgatgctcccacctaaaaaattaataataaagaaaagtggattaataaacttactggatggatgattcgtcccaactgggaagtacgttttccgaaacagctcccacctctcgtcttcatcgagcaaatgaggttcatggatgagcaggctcggccctgggcataggcgggcnnnnnnnnnnnctagggcccacccagcccaggggcccaaattttttttttcctcttt

SEQ ID NO: 22583 - DNA, 4601 bp, Cannabis sativa
aacttggaattgaaaacaatcaaataaaactctcccactctctccagaaaatcattgttctattgattttttttccaaaaaagtcccctttacaaatacattaaaggacctatttataatgggtctcgtacaattttgaattacatgtggtcccctagtttaaggatgcaaggttgctttcatattaggaagatcagcatgtcagatggtctgacgtttctggcacttttaatatgacataagctctccctaccatttgtacttcgagtgaagtaggctttgtctccattatccgtacttgctgtgtggttgctatcttatctgtggcacccttgctcaaatgaccttgggtcccattgatcgatgtgccctgacaccacttgataggaatatcttagcactttagtacaaatagtagcaaagaaagaaatagtaaagataaaggagcaagtggattgctgggtattcgagagacccaggtctctcccaagagctaaagctcacataacttaaatgattcacacccacaaccctttctaatacactgttatatactatctcaatacactgttatgtactagaaaatttgagagaagtccgatggtaacttgaaatccgctgcctgaaatgaagccactgcaatcacctcttcttcaatgtcttgtgctatctccatggctttatccacatttcttggtcgctgcactcttagttttgttcgaattgtaggtagtaggccatagataaaagtcccaagttgcacttccaaggaaatgttgtctaggggagctaataatctaatgaaaatttcttatattctaggacctaaccttcctgtttcactgccaagaactaatcatatagtgatcccgtttcagtgtcgtggaaatggcataataccaagcatttcatctcttcccaactcagagtggctcgtatcttattctcatattgataccatagaagggcatctcccaaaaatgaaataaacgctgcctctatcttctctccctcatcataattgtaacaaagcaaattattgcgctgctcgcattatccagccagctgggtttctccatgaaaggtgggcatttccagttcttgattcactgctcatgatgctgattgacccccaaatgatatctttccgtcattgaattccccgcgtgcctggtccctctcaaatccgctcctgtggctgctatttgagattctttgtcacggtcagatgtggaaatcctgacatggtcttaattttcttgagtgtctttttgccttttgcagcactttcttggaggttcttgatgttttccttgtcgttgttgattatcaaagaagagctgaagttgttgctgccattaccaacccatgtcttggatggattctctcatggctgtcatgtctcctttcaaagtttcaatgtcgccttccatcatggtagttgcatctgtcttcttaggttccatatccacgctcactgaaccaatttgataaagcttttattagttagaatcttccttattagaacacaagcagtagcataaataaacttgatctttattaatgaaaaacaccaaaatttacacaattgcaagctttcgagaggcttgctctctcctattcccaataatctaagagaaatggggctctccacagtgagtgtaatctctaattattccataaccccaatgaaaactattctcatctatattcttttttttttctttgaaagcaatgaacaatttcattgaaaatataatcatatatatagtcttaggtacacttaatcccagtccactaagctacaattacaatagtacccttcattgaaagaccctaagtggaggtttatcaaaaaggtaaaattttacccttctttcaaatataagtggtttatagttcaatctggaataaaaacacaataaactgcataataaataaaagatgtttagaagcttcagttgttacaaagccatattatacttggtagtctctaaatgttttgcaaacaaatttttatttgaaaaatattttctttgttattgtgtattacagaatagttttgaatttactttcgaacaacatttgtgccttcatgtcaattgttacagaagttattctgtgttaatgtttgtggaaaattaagccaccgtttgattcgagtttgatcttaagaggtgctgatctgtatatttgcttatagtactgtgaacaactgaagcattctggaatccaagttacaagggatgtatacatggcgctcataaatgcatatgcaacttgtggacaatttgaaaaggcaaaacaggtattgcgtagcaattttcttgtattgattaccaatttggtattgtatatgagtaacaggatatctttttaaatgttgggtaccattgaacaatgattttaacatcgttttgtttccttacaatggtaataactacttggttaaagtatttattcggctatactctatcaaataatatacatatgctaatgaccaatgtacaatgtaagctcctttgattgcattgtgtttaatctaatatgaatttagtattaaattcttcctgttcctgccactttgagtagcatcttcctcgagtttttgtgatataaactttacatgaagataagtagacaatgtaagctcctttggtttctagctctttcttgcactcataactattaatgtatgttgtgatattagagttaccttattattttgtagatagcctcagaaaaatgggttccagcaaatcacttgacagaagttaagggtgtgcttgtccaagcacttgcatcacatgggcgaatctccgatgccctcaatatgtatgacaagatgaaacaagctggatgcagtttaggtcccaaagctgttataagtcttattgtgagattctagttaatgttttgtatattttgttttctttttatagcatattgctacaagagatttttggaggtactagtatcttgagactggcttaatattttccacctttcgaccatttgatagcttctcttccatttgttaggagcattatgaatctgatggagggtcaagtacattaattcagttactagaggaattgaatgatcctgaatattggtttgatggttgctgccgagtcattttatattgtgttcgatacaaaaatttaaggtccattgatttcaaactctgtttcaatttatatatatatatatatagatagatatacacacatattgcttaaaatatttatatgtatatatatgtatatataatgatactagctgacacagtttcttttccagtgctgcagttgatttgcttatgcaactcaagcataaagcctgttatgatgatgatatgcttctagaagctttccttgatgaggtttgattttattgtcatcttttattgtagctttgattgtttcactaaggtactagttcatgtgtttaccaaatgcctctcaagttatgtccatatacttcagtcttttcctctttgatcatgaaattgcacaaactatagatcatgaaattgaacagtgtaatgatttgtaggaagtattacattgaacagtgtaatgatatagtaccaatgtgcaggtgttttgcctaattggagacttggagtctacacatttacagataggtctggaattacttaaagttgtcaaggaaaatcttggtctctcgcctccacgaaaatgtctagattttcttctccatgcttgtgctaacgccaaagatttggataatgcccgtttgatttggaaggaatacgatgcagtcggccttccccataacattttaaatttcattaggtaaataaccaattaaattctcacattttatagtttttccttttaacgaattcctttgcttttcctgcatgagcaacgatttttattaacctctatctatgttgatggatttttatcttgaaatacttccaggatgtatcaagctctgttgattgcaggggaccataaggctgcaaagatcttgcttactaaaattcccaaggacgatccccatgttcgacttattatcaaagcatgtcaaacaacgtactcagagtccataaaaacaaaaaccaatacaaagaaaatgaaaacagaaaagagatgatcaaatgcatatgccaagagaatagggggagagcacaaatagcaaaaaaaaaaaataatttggatgctgttttgtcctaattcgtcaacccattgatttaaatggggttatagtacgtttgaatgtagccactgtagttagcaagtgctgttcaaccaattttcagctgaaaaaatttctgttcaaacaatgaggtaccttaatttttcataataaaataatgaggtacccgttttaattcagaagcttaaatccactggtgtcttctcctaccaaacattccagctgaaatttattgtttttttaggtgaaagttgaattttggtgaaaaaagaaaaaggcaaatgtaagaaagaaaaagtagaaataaaaaataataaattctttcgtattaaaaaaattgcatgaaaaatactctattctacaaaatttctatatcaaattttgatttttttttttttttgttctctaca

SEQ ID NO: 22584 - DNA, 3226 bp, Cannabis sativa
tccagtattgacttctgtctctgaaattcgtactccttttttcttctaaaattgcttgacttaaatcaactctagttcaccctttatataggttttgagggactaaaaagatttaaatacgcacatgttaaatacctattcgaattaggaaaccaccaaaacccacgtgagacaaaaatacgattgttatggtgttaattaggggggcgggccgcgggtcgctgtccgtgttggagtttcaccagatggcttcgtttcgatggtaatttgtctactgcgttgactactgatagtattttagccataactcgctcaatattttttggaattggacaattcaagatgttccggaaagataaaagatagatctagaactttcatgttttgactttttccaaaatctaaataaaagatagtctaattcaggcttgaaatttcagctttattgttttacataattttctctattttaaatatcatctttttgagagatattttaatctttttttccatctttttctctgatatttttttaatcttctttcattttaaatctgcaaaaataaaagataagaagcgtaaaaatgctccaaacacgattaaaactcaattaaaaatatactaaacttaatctaaaattaatactacaaataacctaacagttttacgtagttttgaagttaaatcttcattatctacgagtccatttcatttctaggttttttgtttacacagagtacaagtatcatacaagtattgatcgtaaggatctttatattctctcaattcccccttacaccgtaggttttgtccatatttataggatttctgagatatattggcggttatttttttgaatttaaataacttctcgtgaaacgtataattctcacatttcatacaattacaacgtgttgataatatgtgattctaaattaaccatttatttagccttatcctatacacatgtagttattttaccgagatacccgcttttaaagagctgctcgcaattcacttagataaaacttctatggagatttatctcaatctatctcatagtatacttgctcttcgtaatgactcatcatctcgtcttcgtacatatctttgcattttttataaggatgcatttatcctgtatttagttatgccttgtgttgtacgatgacgagacgatatatgtgagacacatgtttggacattcttctcgcattattgatcattcatgatgaagtttgggcaattctttttaagcttttaagtaagctcttcaaattgtatcatttatgcttgctccttaagttgaactcctttatactgtcttgttcgaccaatcaaagttccttgtcttaattttcttgtactctgcttttcccgagttggttgtgattgatcttgttggtctactagtcagctattattttgacttatcctttgtcacctaaggaaagacttcaatttataaccgtcactagtattttttgaggcaatataaataacatattaattcttcaatattctagctggttcatttttcatcttttgtacatgtgtcgtgaccatatttttgctcaaaatatgggcataacataatgagattggggccaaaaattattgcaaagctaaaggtaaacattctatcatctagatcagttgcaattagcatcacaaaagttcttaaattcataatttagaggcttattaagttaaaggccatagttgacagtaccattacatatctcagaatgcgcttgattgcaagccaatgagtttggagtggtttttgcataaacttacatactttgttaatggagattgtttaacattttattttgattttaatatgatttagttttttctcaattttctatgtgcatatttcatttgtacttaattatttttaattttttgatcaccaattaaatgttttatgattttaatataaaacctgataagtgagtattaattatgctatagtgaaatagatataaattttgacataggacgagagtgcatatatggtttgtgtagcatttaggatttttatacgtaatgccacctatgtgtttaaatttatcacgagagtagaaaatttacatataggttgagattaatatgtcttagcccaaatataagtttttttagtaaatctgctataaaatgaaaattggaatttgagaattaaattatataaccatataaagtagatgcaatcaaaataaatcattctaagttttaatcattgtaaatttcaccttaattatttattttctttctttttttagtagaaattaaatatattatcttatttttattgtcaccaaatagaattagaaatttaattgtttggtaattaactatggtccttgtgggattgacctcactcttgtgagcctattacttgtaaaaggtacgtatacttacgtgttggaaaatttattacaagtttttagcgccgttgccagggactattttagttaatattaaatcaattaaattttattctaatttggttctctctttctatttttttgctaacatgtttgtgtcgatttttctcttttctcaagaataagtagcttatgcgtcgtcaaaaaccaactgcaagagtacctgttgatcttgagattaacctgcacacaaaatagaaaaaacaagtggttagaaaaagttgctacaagggttgaattagaagaagtcatggctcataatgggcataatggtgttgtggatcaggataatggccacaatctacctgacagaagtttgagggattatgtgctacccaccatgacagggatccaatcctgtataaggccacctgccattgaagcaaataatttcaaaatcaagccagccattcttcaaatggttcaatccacaatccagtttgggagactttcgtcagaagacctaaacatgcatttagctaacttcgtttagctttgtcaaatattcaagatgaatggagttagtgacgatattattcacttgagattgttcccattctcactgagggaacgaacaaagagttagttgttgtctttatcacctaactcaatcaacacttgggatgaattggccctaaattaagtttctttccaagttctttcctccaactaaagctgtcaggctgagaagggagatcaataatttctaccagctcgaccgtgagtctctttatgatgtttgggagaggttcaaggatcttattagaaagtgt

SEQ ID NO: 22585 - DNA, 3456 bp, Cannabis sativa
tttgttgtgattaaaagtaaaaaattttgtagtgatgttaattgaattctaattttgatagttttaaatatatctaaattataatttttgaaaaaaaaaaattaaacttatgagggtaacctactattatatactagtatatataaacatatgagttatcagaccttatgcaaaaaataaattattaagccttgttgtaaggatctatagtatttttcagaattattaaaaatatttttatatatttttaaaaagaatatttttcttttggctctagactcagtaacttctaattaagtttagaactataacccgcctaaataactttctctgaaatgctcaagaaaatataaatattgagtgttatatatatatttaattaatgtaatttagaatatatgaaacttttttaaatggtaaatatatgaaaattattattaattatcttttagattgtatcaataacaatatatatatgattcgtatatatattatgtaccaaattaaagtacatccttttttcatatttacatcaaaaatcaatttattaaattttcgtatatatcaagtcaaaataaaaatatattattaaatattagttattataataagttgtttaatttattaagtattctgttgattcaataagacaataatagcattgttactgtctggaaaataatcacatgacaaacaacatatatttatacatatatataaaaatatataagcatataatttcctgcatgttgtcgattaaatggccaagtaaatatggttttttgtcaactataataacaaaagagatgaacatttataagaaaaggctgcaaataattaatatcagtgtttcctggtgtttctattaaaacataaaagggtctgaatctacaaataataatgtacaatttatattatattgataatcaattctcaaataatcaatatatatatatatatattcaggggttatgttttgctgttgtctaagcctcaggttttccctgtttcgagcaatatttgtttgtagcaataaccccatgtgattattgttgaccttattttgtaccaaataaatatataaatatatatatttcttttatgttaaggcacatgatcacatgaagctcaaaaaattcaaagaaatattcatatatagaaaaacagagaaagaaaaaaaaataagggaatgtcaacaaaatattctatataatatatataaatgatataaattatcaaaaatgtctaggtgcggcagacacatacatatataaatatatatatatagagagagagagagagacgtatacaagtatataatttataatatatatatatatatatacatggacattttgatcctaattaaagtacatatacagatacatataatatatagtccaatacttgactaaagataaggtggatcacctaattataatataattataaatgggaatgagaatgggatcatgtattgatttattatatatttacattattttggatgatattattaaattgaattactgtatgattggaacataaatttagaaaacaaattacttaagcctaaaaaaagtcatggccatcgttcgtcacctcccataaccatgcatatatatatagtactcataatttgtacgtcaaccgccccactcctatacatcttctttctcctctttctttacctttatacatacatatatatatttatatttatatatttatatatatatgtgtgcagggccggctctaggcataggcggactaggcccgtgcttagggcctacacttgggggctaaaataaaaaaaaataaaaaaaattattaggcttatatttaagtaaaatttaaatgtattataagtaacaaatattcatagcttagtaaaatttaagtgtgattgttacatgaaagataatagtatgatacaattgaacagtgagaaccgaaagaataaaataatctaaaattccttttttttgttctttctttgtaataaaattctaaattcttggtcattttggggacgtaattttcacccactttttcacatataaattaatagtagtgcttggatcgatatatatatatatatatattcatataaaattgtcaatatataattgtaacgaatcaaagcaaaagatatgaaatgaaagtatacgtatatcataattaagttcgtgaacagttacaaaaatatatgtatacatcatgacttgaggaaatacggaggaatacaaataaaaataaatctaagagaactagcacacattagactttagcttcgaaatttttcagcaataaaaaaataagtcaaggcataggcgtctcttataataaaaaaaaaatactctataacttggaaaaaatcgatatcatagggtacaatatgtatcctatgacttcggttatttaaagttatagggtattgcatttgcgcgtgcccaaataactgaaatcgtagggtacgcgcattattaaatgggctttggcttataaccctaatgaaaccctagccctaatatatattattctcaactctctatctctctttttaacttaacaaaatgattctctctctctcatcatttttagctccaaccccaacatcgaaggccaccaccgacggccccaaaccaccgtcaccgtcggtgagccatttctaggtccaaagtttatttttttcgtccttactaatttttttcttgtttgcaggtggttctcttggctgaatcgaatacacactctctctacagtatatatgtatcatttttcagaactgtggtgatttgtgttaatatcaaaaaatgttgtttggttaagttccattttctttgagttaatatcattttggattgttattttcatatttgtgctctcagccaaatcacactatcgatctctatatccatgtcgtccatcagactaaaataaatatatacataaaaaaaaaaaatttatggcttcggttatttgcaaataataaaaatcataggacatttttgcttttagatatatatacatggacacttaaaaccctaatagctagggagtgtaattattagaggattgactctagtaattacactctattttaaaatataagatggtaattatttatgaattcttaatgctttgtttagcaaaatagttaataattacacaagaaataatattttttaatagttaattaatatgtatttaaaattgaaagtttttagtaattacaaagtacaattacacccaattctcatgggagtatgagaatttgacagtgtaattgagacctcaatttcctccaattacacaaacgttacatacagtgttattaaaataaatttctcaatgcctgttagactataatatagtatatgaaatatagcatatatataaacgatatgtaatgcagaaaaactataaacatatcgatattatatatacaatgaa

SEQ ID NO: 22586 - DNA, 2321 bp, Cannabis sativa
ttccgatctaaatctgattatatttaaatgagttttatttagagcacaaaactcaacaacaatcccataaagtgtgtttatattggggaaagtttggggaaagaactaaaatagcaattaatcactattctgaaggcaaaccaagatcagttcgcttggagccactcacacatggtcgggataaacccgaatgtgatttgccaatacctcaatatcaatcctaattatccaacaaagcgtcagaagcaacgaccatagaatcccgagagacaaaacacgctcaaagaagaggttgacaaattgttaaccaataacttcatacgagaagccttctacttctcataaatctctaattcggtccttctaccaaaaccaaatggcacatggagaacttgtatagatttctcatatttgaataaggcatgtcctaaatattgctttccactacgaaggattgaacaattggtagatgcaacagcggagcacaaattgatgactttcatgaatgcatattttggatacaaccaaattaaaatgcacatcccaaactaggaacatacgagcttcgtactaaatatggggctctactgttacaaagtcatgccatttggattaaaaaatgctggagcaacataccaacgtctcgtaaatggtatgtttgaaaaccagattggacaaaacatggaggtttacattgatgacatgttagtgaagtcagtaaaaagcaaggaccatacggaggacctcgcagaatgttttgctatacttagaaagtatgatatgaagcttaaccctaaaaaatattcttttggggtttcctcagggaaatttttaggtttcattgtgaatgcaagagaaattgaagctaatttggagaaaataaaagccttaatcgagatgctttcaccgacaaagccaaaggaggttcaggctttaacaggaagaatagcagcactcaatagattcatctcgaagtcaattgttaagtgcctcccatttttcaatgtcttgcgaggtaataagaaattccaatggaatgaagagtgcgaggaagcatttaaaggaataaagaagcatctttccacacctctagttttggctaaaccaattactggggaaatgctatacctttatcttattgtctaagaacatgccataagtgcaacattagtgcgagaagagggtaaaaaccaccaacatgtttactatgttagtaaaaggttattggggcagattcaagatacctacctctagaaaaactcacactatgcctgattcatgcatctcgcaaattgcggccatattttcaagtgcatcctattaaagtcctgacaaattaactattgctacaaaaactatcaaaacttgatgcatcaggaagattaataaagtggtcgattgagctaggacaatttgaagtaacttaccacccgagaacttcaatcaaaaggcagactttggctgactttctgattgaaggagtaaactcaggagaagactctggaacaggaagtgaagcggaaacatggaaactgtttgttgatggggcttcaaatgacaatggctcggaggtaggagtaatagtgatgtcgccagaaaacttcaaattccactatgcacttaagtttcaatttgaaacttcaaataacgaggcagagtacgagaccttgttagcaggattaagaatagtcaaggcactaaaagtcaagagcattacgtgctttagtaactcgcagctagtaatgaatcaagtcttgggagaataccaagcgaagggcttgaaattggccaaatacttaaagaaagttcagaagaacttaaaaaagtttgattactttaaaatagaacaaattctaagagaacaaaactttaatgcagatgccctagcaaaactggcatctcaatttgatctcgacaagttaaatttggtctcagtagaggtactggacgagccaagcatatgtgaagaggaagatgtcgacatgatagatgcaacgccaacatggatgacaccaatcatcaagtatctattaagtggagaacttcctacagataaaattaaggcacacaaattcttatatttgatccctcgctgaggggtgttcgtggtgcggtttttgaccattttttcaaaccaacccgcatatgcgatttttccaatttcacaaactgcacccgcaatgcgaaactaaaaaactgaaaaaatcgcaccgcaaaaatggtgcagtgtggtttttgtagtttttgcgttttggactatcaccaaataattaaactatcacaaatacaacaaatcttgagcaacacttgtcaaaaatacc

SEQ ID NO: 22587 - DNA, 2134 bp, Cannabis sativa
  modified_base (1892)..(1912): a, c, t, g, unknown or other
aataatttccaacagttctatgagtgttacataaataattacaagggcaacttcacttatatggaagctcctttgcacgaggatatgattgcttggagcaaaaactattttcatccaaagtggtagatgaaggtacttcttcattccctcctatctaggttgacagggtcggccaagcagttgtcgaggcttcttttggccagggctttactggacaggccactaatgtggctgcccatcctggaaatcttgctttagagcctctagttgatcctgctttagagcctcttgttgtcctctctgacgtaactttgaacctgccgactccaaccattattcctaaagacatttgaagactttacttttttcatgcttttattttgcactttttattttattctcgtatgactctaacactttttacatttgaaaagtgaacgaccaagcagtctttaatcttagctttatcttcttttagttttgagcacatagctgattgggcaacttttaatcccgaacttatgcattttatgttcaccttgaagcttgacatttgcaccaacttaaccttcaattttttgcttagaaagcttcaattttcttgcttaagtatttttgtgcttgttcgatgatgtgcggtgtgggtgccccctaagtgatcgagcagacttatgggctcttggtcacttgaaatgaacaacgtactatagatctttgcctatatattttattgggaggacttgtttgaacacatttttaaccaaaaataaaaattaactataaaaaggtaatttgttaacaagttatttggtgcaatttgaaaagataaacttcttatattcatttagaagtcttacaaatgtattgttgcaatgcaatgtacatatatatttggtaataaaggcttacaaatctaatgtctgcttttaaaacataaattttcgctacccttgcctgacattggacctaaaatttaattttgaggttgctggccgagaaaactaaacctaattcttcttgatgacgattgacctacataatcttcctcactatgctgagtattgctttaacatatgttggcaagctctcaacacgaaggagcacaatatttcatgaagaaatccaagagaaaatagcctctaaatttttgaaaattaaagagaaagaagaagtgagcactttagtgttttctagcttagaaagtcatcatctaataaagctctcttgttttccatttacaggcttcacttagggttagatttatatgagattggacttaaaataaagacttgggctgaattacatatgagttgtagagttagatttatgccactttattttatttaaatgaaacaatgtgtcttttccaattttaccacttatctcttctaactatttaaataccagttttattttaagaattataaataattatcaaataaaatacaatttaaatatatttattaattagacccacaaagtgtactaattaacaaataaacccccttttctcttttcttctcaaatatgtccttccttagtaaaattcataaataagacatagtcataatttagaatcctaattgattgagtaaattaattaattgagacttaaaacaatattatcctagtaagtgtggggaccatggacctatgtaacaaagctcccaataagtatttctaaaatttacggagtaaattctctatcttattaattactcataactctacaatagatttagaattacactcctgattacataaaaagctctatataccaaatataggcatgctttgaattatctattgttacaatctaaatgattaatgatcctctatagatggtctacattggatatagactaaattaccgttttacccttcaatgtatnnnnnnnnnnnnnnnnnnnnntacttgtaaatgatatttcagaaaactaatataattactgaaatgaggcatcaatcatttaaacgcgtttagccaagctctaaggaaaccattgtttcacttctattagttacagaagctatatgctcccactcaattgaactactgagttcccaagatgtaagtattgggccgatctattggtcaactttaacgaataagtcaaagaacatgtataataca

SEQ ID NO: 22588 - DNA, 1894 bp, Cannabis sativa
atcccacttgaccttccccaggcggtgtgggattacatagcttacacggttttttcctttacggatcacgggactactgactgtcacaaacagttagattggtcaaagactgcagtgtcagtattcaccttaaatcatttcttcatttagagttcaccattgctcatcacttttgtcagaattcaacaatcctaaggatgtatcttatgttttatcttaagcgctttgccattgattaaggatagtctttgccaacaccacaactttacctccatgcttattttttttattcctaaacagatcacttcgacacatccataaagcccatgataccattgagatcaacctacgttcagagccaccatatctggtatattcatcttgtaaccagtccaaaaatatcccttgaacctttgttgaaacaccaaaatcaagcctattctagcaagcttttgagaatgaacatgtttagttggtaaacaacatgtggatgcacaccataatagattcttgaccttggagggaactttcaaatttcaaagctttctctagaagcctgagttgtcgctggtatgcctatcctcttaatcatcttgcagtaaatcgtaagtgctcttcagtgaatattagcccaacttttccttcctcatataccaagagtcaccttctctattgggtaaaggaatgctcaaaattaaatgtgcatcgcttttaatgaaaatattatttattaactcaatatcccattgagcttggtctagaaccatcaaacatgaaattgttacacccatgaaagaattacttactatatggacgaaagggtcttcctctcacttagtaaccaaagatcatgaagttggatagtattaccaagaccaattcgtaccaaaacacccttcttgattagttgatgggatttgaaaatacttctccaaataaagtttggattaccccagcccgaggacaatatttaggaaagagtcatttggatagtaccttgctttatacacttgctcactagagcatcaagtttcaacaatattctccatccttatttacccaagagagccacattaaaattatggaagttactaaaactcaaactaccttttgtttttggctaacacatcctttcccaactcatccactggataaccttatctttttttttaagaagaatatatgccaccaaaattttaacatcattctttttaaatccttacaagattctattggaagtaataacacattcatgatataattaggaagaacttttgccacaatttttagcaagaactcatttcctgcatttgataagagctttccttcccaactttaaacacgttattgtaccttatctttaagatagcttaagatcactgtcttttttcttccaaaaatgttggacagtcccaaataagtactatggtcattagcttcatggatacttaacaatccacatatttcgtcatgaacttcaactctagtattgtaactataaaaaatagaggaattatcaaaatttatcttctgacatgaagctttcttaaagactttcaaaagtttcatcacatgacttgcctccctttcttcagttttctaaaagatatagttattgtcggtaaaaaaacatatgagttatttgttggattatattttatcaagatctaaatttactaataagtatatttttaacatcttaaatataaatttctaaaacgataaaacttaaacatatataaagtatgagaaactttacattgattgcagtgaaactaaatgactctttccgctcagatctctaacccttattcatttctgccgcagagtataatcaagatctaagcctgacactccttcaattgtttggattccttacagtcttacacactat

SEQ ID NO: 22589 - DNA, 2703 bp, Cannabis sativa
gagagagggagacggacaggaggtggtggtggtggttcgacgtatgcaacggagaggagagagagaccgacgggaggaggggtgggtgaagatcaatggatgagagagacgaaaagaaagggagatcgagagagggaagaagacggcgagagagggaagaaatgggtggtgcgacgtagcatttatgacatgtataaaatgttataacatcattggccttcaaattattttccttcacaaaacgattccaaccccttgtaaagacgaaactttggctactcctccaataacaatatcgaaatttctatgacctcattagcctgtcatagaaaactagttcaatatatatcttcaaccccactttcagtattagtactctccacaataatatttgaattaggatttttatttgtgttatgattactatctaattcactaatgtaaggaaaatactccacaacgtattttttagggatgacgagtctattgagcttaccaacatcgcttggtgttaactccttttgaaatagttgtctacacgaaaattgttcacccccacaaatcctaatttgttggttgaattgacgacgatgatgatgaagattgatcatggtaattagtagtactaacactattaatctccacaacttctttttttccatactcatttttaataaaacgaatttcaattgatataagaaccatcatgttgagaactgcttccacagtgtaatgactttgaaaatcgggctcatggagagtaatattagtccatggaaagtttctatttatgtccccattttggagtttgatggtagcgctatcataagccatggcggccgccttctctgacttaaacgttccaagccaaattctctggtggttggcatagatttgtgcaccccaatttccattttgttgtggcacaacacctttgaatttccccaagggtgagccaatattcataacattgttattatcatcaataatgtcacaaatattagccgtttgatcaacataatggtcatgatgatgatgatgatcatgccttgatctatatagtaattgattcatttttctttatgaagaatgtgtgagatgaaatgagaggaagaaagatatgcaatagatctatcaaaggaatgatatttagtcatttgtaacaatcaaatatttttgtaaataatttgtgttgcaggaagattattgaagctaattgtgcatttgaagggcttactcacatttgattaacttaaacaaatttagtttaagtaacttacatatagtaaatccgaattaacaaatctagaaattaaaaaaaaaaaaaacaagaaaaattatttacatgaacaaatattctttgatctatagtgagtagtgaaaaacaataaaagttcatattagaacaaactttcagtttctttacttattttagacaaatgttatcattacaaaattaattaactcactttgttaagttatttttatcattatatacatataacaccctagtgttagataaatttaacttaggtgcgtacaactcatgatcataattaattaatatattttgatgaacaaaaatacaaacattattaattagagatttatgtaatgtataattcaaatattatacaacaaaaaataccttattttcattcacctaattaataacaacaaatttttttatctaaaaagaaatattactatcatgacacacatgcatgtttatgaaaaaaataatatatttaagaaatattttaattaatttcttaattatacccataaaattataaataagcctcacaaatatttttataacaattaaattatcaaaaataaaataaattttctataataaaaaattttaagtctgcccatgattttaattaatgtcacaatattttcatgtatatatatatctaaaattctatacagttttacataagtaattagtatataatagttttacatatcaaataattaatacaatcatacaaaaaaaaaaataataatataaacacaaatgcagcaaattaacatgatctctctctcaaaaacaaaaacaaaaaaacaaacatgaaaactaattaaaaatgattaggtattaatcatcttatgattaagaggagtgtgtccaatgaacaaagccacatgccccataagtttatccttcctagaaaaagttgtcccacaagaacattgccacttattaaggtccccacaatgcttctcatgagtcctcaaatcagacaacactgaaaattgcttgttactacatctcttacacacatacattttaggacaatggcttctcttgtaatgattcttaacacaaatcattgatttcaatggttggaatttgacatgtttcttgttccatctacacccttcttcaggacaagagtacttcttcttatgattactactactcattttccaatgctcattggtagtagtagtattaatacttaatttattgttgtaattactacacaaggcttcacttgtcttgtattggtctccatgtgctctcatgtgcatcctcaaatttgcatctcttttgaaccctttaccacaaatttgacaatagtgtgtgtattttgctaataaatccctagcttccaactcaattatatcaaaatcatcattatgatcctcatcatgatctttctttgatgattttgttatgatgatatttgt

SEQ ID NO: 22590 - DNA, 5126 bp, Cannabis sativa
tttgttatttgtgttaacaatatataggagcaatgaatcaggtaacaagaaacttagcatgtgaatgggcaaaggacaacattcgtgtaaacactgttgctccaggattcactagaacagacatgttggggagtttttccgtatgtattctactcattttttcaataaatttgttttatttttattttgttcattaagaaatattctttaattaaaataacaattaagaattcataaatataaataacttgggactccatgccccttttaatgtgttagttcaatacttgtagttttatggagactgattcatgaacgggaattagtgttgaatactcgggacgaaccttgagatactggacaaataaatcttcatccatgtctaagtcgagatgaattatggttccaaggttagacaaggacagaggctaacacccactttgttagggagactctggcttgggtcaaccttaggggctactcgacctaagccgaaccctaaggatacttgacctaggccaactctctataaggtgattgtggcttagtccgtctttgagggtctttcatgctaatggtacaacctaagtccataggggttatacccttgtataaggtgaccttacgtcttctttgtgggtttattctattgtaatcccatgccacgtgtcttcatacacaccaggtcatctttgtgaaaatggccccattatagtagtatgacaatacgctaagaacttatcctgttagagttgcgtgctttagctccgtcttgatggcttagtgggccttataccgagaaccccatgcctctactactacaatacatctcaaacttaagaaaaaaaaaataaagtttctttttacataattttacagcataaccccaataataatttccactatacaataaaaaataaattgcgaggaaaaataaatgattacaaggaagataattagtttccttgtgaaaataaaaattagagaagaaaattcaaagttgtggtctgcatgtgagcctcttctttgtatttcttgtggtcttgggttgtaatcttcgtagtgggtaagtaaaatattgacttttgacaaaatcttgttgtttgatgcttgtgatgtgtagtataggctttgggtaacccaatttttgttttgatttcatgaaatttggactagtaataccccaattttgatatagtgactttgggtgttcttacatttatgaaaaacaccaagaacgctatggtcatgagaaacattatttttctattttttattctcataaaattctctaaaaagtgtttttggatgatgtttgtagataaaggatgtagtatgtactttggtaaaactttgtacccacacttgttagggccagaacaaataacctttgggtgcatggcccaacaccactcgaccatggacgagtacctcactaggcaaagaatggcctggccttactcaactaaaggccgagttttttacttagcataatatctcgttgtcacgcgaccttgggcgatcctgaaagaaatggctcaatactactcaattatgactaagtacatcattattatgtggttagaaattccattcagattgggtacacatcaagctaacttagttaccaattcttaaaattctttactcttgagactcagattacgacccatagtactcagcctaagtaccatgttcatatcaataattgtgtgtgatgcttttgtggtgaaaacggtctgaactacacaaattaatcagtttgagctagcccttaggggtacccgacctatgccaaaccttagggggtacttggcctgtgttgcctaaatttgatatattattgaaagatttttccaaggccactagaatcacgtcaatcaaagttatgagtagagagatatgctcaaaacattaaaggttacagtggaagatactctacttgagccgaccaacatgtgtgattgatgcagttgctccatcatctcgatgccttgaagatggctggagtgtcttggagtctcgcagcagtggtaagtgaggaaacaacatgacttgagcttgttgctcccacagatggcgacaaactattgacggttaaaactcattaaccaaattatagttgcaaaattgaaacttggatgcaatacctaagattaagatgaagatttggaaatctgaaaactttcaaagaaatgtgcaaaatagctatggagaaagatataagtgtatatttctctaggtcaagtgttacaatgattttctaatccctttttacatctgagaaaggggtattcataggctataattgcctagggtacactagtgatcccaagggacatggtgacatccatggcctgcaagctacatgttgcaggtggttgtcttgcaccttgtacctttgtttggtgtcaggtggtccttggttgcaggagtagaggctatagtgcacccttagtcgggtttgtcaggccttgcaggtgtggtgtctccactacttgtacctcattgccattagagcatgcagaagacgtagttgtacacacctttcatgcacgccttattcttgtgattgtactcttgtctccttgttattcaacacttaggaaaattcactaagaatatatatgctattgtaggagggcatgtcaaatgttgatgtcgagcaactctcgagaataatagcctagtgactccatgacgagcatgaccgagtgaatttctctaatgcatgaccgagtgacattgtgagaaacatggccgagttgcttctctaaaggatggcctaatgacattgtaagaagcatggcagagagtgacattgtgagaagcatgaccgagttacttctctaatgcatggctgagtgacattgtgagaagcatagccgagtgtccttggtcttaacatggctgagtgaccttgatgctcacatggaggagtgacttcaagccatgcatggtcgagtggcctcttgaatggtcatggccgagtgacttcaagccatgcttggccgagttaccatctaccctactcagcctagtgcctctcaagctatggtttagttgagtggccccaggatacatgcgttgacctagtcattccttggccgattcttaaagtcagtttctttcatttctcaagactaatcgtttactaatctaaaaaattaaactttttaatttttagggttaataagctcgtactgagaaaatggcatgcgtcaacagtgttcatgatgtgcaagtagcttggcaagcttctaatgtaccaaaggcaaaagaatttgacaaggggcccaagttctgaaaacgatatggatgaccatgatcctacttccactaatgttgatcccgataaagacctatcatgaatagttccattggaatggtaggctggacttacacctgaccgagttatttacattggacgcaaggtgttgaatcgggtaggctttgtatttttctcttggaagattaattttcttgtggaacatatatagaattattttcatgggtgtaaagacttatggctatccaagcagcttttattcctgagaccttatcctttttgggacacccttgatgctatgccattgtttttctttgtatggacctatgcgattctattactatattctgctatgtgttaacttgtctggcatgtaccaccctatgcgtaaacatttatttatttatttatagttaatgatgtattgcatacatgtcgctcaagacattgagcaatgcacaagcactttaaaactcaaaatttttaatatttttaaaatccatttaagtgagcgtaaaattttatccttattagtccatgtagagtgtggttaccccctaagtgactaaaaaggtttgccttttggtcacttgctaaataactagggttttcatgtaggaactgacatcatcccttaagtttgccactatgatttcataatgattaccaagaaactgaccctggtgacatggatatcaatgtttgacatgtggaaagaaagaaagcatcccagatttgagtagtcctgagtcatatcagttgacatgggagaggcccctagccctacaccgaggttgaccctaggaactccgaattgggttttcaaaactcgctaagttgtttcaaactcacaatctttaagtattctaaatcaagaagacaagaagaatcatgtccaaggtctgaaaactaaaacgagatgaaaaaacaccctggaagtcaatcgaggtgcctagggtttcacccagcgcccaggtttgacatcccaacaagggtttttatttttgggtctgtcttagtgaaaatggctgaaactttgtactttgacatgaataagacctgtcacaaacatatttaaggcatcaaaattagaattggagcactttcctttttgagcacctgaggcaccatgcgcctcgggcacctaatgcacctagtgctcaggttgacatattgttaacctatggtgcttccaatcacaatattgaagaagtatcctgagcattttatttttttccatctaaaatgaagaatataatgcttttatgaaagaaacaaatcgacttggaggccaaaatggggacccaatgccaaggttaacctaggcattaggcccattgcccaggttgacactttatcaacctcgaccatttatagaaacaaatcagaagaagtcttcatggaatattctctgtttttgccaataataaaatatttgggtgcttttggtaaacaaacagagtcatttgggagtccgaactagcactactacaaaaatgggttttcccgacgtttttaaatagtcgtttaaagtattctcgtcggtttctataactattgcctatacgaccgtcgtaaaacgggcataataggtgacggttcaaaaccgtcgccattgtgggtttcccgacggtttaaaaccgtcgcctataattggatataggcgacggtttataaccctgccctatactataggtgatgatttaaaaccgttgcctatagtataggccacagtttaaaccgtcgcctatagtatagggcaaggtcataaaccgtcgcccatatctagttataggcgacgattttaaaccgtcgagaatgtaaaaaaaaaaaaaaa

SEQ ID NO: 22591 - DNA, 3022 bp, Cannabis sativa
ttaataattatctatccttcaatcactccatccttcttaccaaacaatataaaaggatcattactctcctctgcctcccttatattctccatctttcatcaactctccatccttctaactctccttccttcctaccaaacatagccttaatcttgatcttgtagtgatatacaacaataattgatattaaaatgattaattattaaacatgcataacatgtcatgatatatcatattttcttgttatacataatgaaccaactttgtttcatccactatgcatatgttgaaaaaataggcaaaaaatataattcattataaaattaaacacaaacttacttgaaaaagatctccaatgttgactactaacgctccagggtaaggtggtacgtcaatccaattattattgttgaaaacttggagatcaccggtgttatcttgaagtaacaacgtcatgaaatcagcatcggtatgtgaaactgtaccccaagttaactctggttgcgggcatggagggtagtaatgtcctaaaagacttagcccttcactaagccctatcttgttaaaatagtttgactctaaccctagagcctctgatagcaattccaaaagtaaaatccctaccttcattatttggtttgagtacacaaaaattatgtccctgcaaatttaagtaagtttttcatgttagttgattatttgagtatatattaatttgtataattaaatatgaacataatattaaaataatcttaaaaaaaaacatctattctatgattttagcaaaactagctattattttaacaaggttaattattttttttaatttggtttgtttgatttcaacacctaagtcccctaagccacttgagatagtctaattaaaatagctaattttatccttatttaatttattaagtcattatgtaaaattattatctttttggcaattgtttaacattaaattcaaataacataacatgacataacctaattaatctaacctaacaaataaacaaatttacaataattacataatattatatattaataaaaataatatcaataataaacttatatagaatgagatttatttccaatacaaattacaaaagtttgttttgaaaatttcaaatctatttgatatatataattacaaagtcttggtatatttaataaactctaatatttttcaaaaatacatacctacatattgggggtaaatattgaggatttggaggatgaggagccatagggcaaaaaaaagtgtccctccaattggttgaaattccagtgtaaagatcaaagttggaattatacacaaatggcttggtgtaatctctaccataaaacttcttcttcttctcctcatcatcatcatcttgctcataaaaacgacaaaccccgtttatcatttcctccataactatttcggggattccatggttgatgatttggaagaaaccgcatgtctctgcagcttctccaatttcttttactatagtttctctcgtttttgtgtaatttgcgcccttaagatctataattggaattgtagtagtactaattggtgacgacgatgatgatgataatgaattcttcttatcaattacatgatgatcgttatgatgaaaaatatgagggatcttagtaatcccagcatccacaagtcctttcacaccggctttagtttcatcaaaagcttttagctcgcttagtctgtcgtttttcgaattgtttgtcgtttgagttgcttcatgatgatgaagatttgaagaagtagtagtagtgttactcatgatggtttctataaagaaagaaaattgtatctcatctagatatgatattattgatgcaaatagtcaagaagtgtgggcaagaactagccttttaactaattgtggttcctagttgttttaataattagggtttgaacaagtgataaacaatataaaggtagtccccactaaaattaaatgtcaatataatatttatcacccacaccaatccatgtgcaaataatataataatcaataattgaaactaaagtattattctcaacaacaataacaacaaaaaggataaattatgaaaaatgctaataaagggcattagcagtgcttaattaacattttttttatgtgtaatattgatattggtacaactacatatctagtcctatatatacaattagttttattgttacaattaattattagttctaatataatttaatatattttttattaaatatcactaatcaattgcgattagggacggacccacaagttacaatatgggagctatccactaacaaaaatactgccttttaaaaaattgagtataatttttttaatttaataataattatagaccaaaataatagaaaagccctcataaaattaaataaatctagtaagagtgattataatgtatatataaatattttttaatgataaataagcccccacaagtaaaaattatgggtccgattgcgatgtgccacttttaaatggtgttagcactactaacactttataataaggctcgtaattattgatgaactatagctaggatataactacgaagtatcatatttgtcacgattttttcgagcaaattagtttctaaacactgaagctgttatgtgattcattcaaatccagtattacgttgcatgttcagagatccaccattgggctatatatgcctataagggaaacagtaagtttagttgtcatatttatatctggtttacttgtaagatttactgagtacgccttatatattacttttggacaatcctctcaacaactaaaaaatctattcgaggaacacaaggagtaattgaagtaatgagcctcccaatatcaaattaatatcgggagctattttggagtttctgagaaaacttaatcttatggtcaaagccagagtggtggatcccgagatttaaatatttagagcatgtttgatattgttttctgttttttatttttaaaaaattatttttagaaatgag

SEQ ID NO: 22592 - DNA, 3286 bp, Cannabis sativa
aagttttaaatttaccaaacactcgttcagttttttttttttcacagtttagcgacagttgttttttctcacaagttcagctacagttattttttctcacagcacaactaccgctatttttctctatagtataactgtgccaaactgaccttgaattcgattgcttatctgtaatttttacttttgttaagagattatctctttctaataatcttaattctctttatatttttagtagtgtccaaaatatttttaattaatgttcatcggttggtcaatataaatgctcatgatttagttgtgcagacacttacattacagtgaatgctaaactagtttgaatggaagattattttttttgtatgttcttatttttttcaattaaagtttgttaattgttaaaaaaaatagaatacaaaatatgaatttatggaacaaaaaccagaagaagaatttgtttgtaatccaagtaatcaactcaaaagttaaatgcacagaaaatcgcatcattgggtccctaatcttccctccaaaatagaatagaaaaatggctctcttgggggacgatggtcgcggctacgagctggctaggaagcttgagacttgcggggtatggcggtcatggctcggcgactcttgctacaccaacttcttccattttctcagttccccatcaacatgggaagcatttatgagagtcgacgactccaagtctagggctcagatccaactccaactaagggtccgtgcccttctcttcgataaagccagcatctccctcttcctccgttccgattcttctccttcgtctctcgccatttcgaagctcaatccaacttgtgagtatatttatccttttctgtttgtggtgaaaaattagggtttttgatccatgggatttttgttgttgcagatttgcagttacatggtgacgacgtttacttcactctggagaattcttcctcagatggtatcgctgctgttcctcccaatggggtggcgacctctaaggtccggcacttactttaaccattactctttaaaagtaacaaattgagaatttgaactgatgaaaactcactctaaaatgggttatttattttttattttattcataaactatttctgttgttggatagaatactcttggggacttattttcgcttaactatgattttgatttagttagttttctcgtttgttaataaacacttaaagaacatagttgagagtgcggctagttaagtagtacttagttacttctttaaatttctgccaatgtgagttgagtaattttgttggttaaattatccagatacaatcaaaagcgtttggaattggatcaaggtatggggaatctgataatgataatatgcatcaaagacatagacatgaagaacttcctgaaacatggtacaatcaatttattgagaactatagaattaacagaccctataggttgtcactgggtgaccaagaatcagataaacggacatctgacaatatgtatacttatcttaaatttattgagaagcataagaaaaggtgtatggcgttcaaggaagatcagtatacaggctatgggaatctggtaggagaaaattcatcatatgcgcgtccaagttcagtttcagatggaagtaactcagatgatgaagacttggcttttttccctgaaataatgtttacattcaacagtgttcctgatagtgctctcccagcaacaggtagagtggatgagaaacataaaataaagttctatggagttcttgacaccttgcctcgggctatgactaggagccctgttatgattgagaggtttggtatcaatccttacgacagtgtggaacatggagcaaattcatatcatggaaaaaatggatctggagtaaacaagaaatgtcttggccaagagcaagcatcacaattgtctcaacaggtagtgtcccggatattaaaaaatatggggtttgaaggttccactgaagtttctattgaagtcttctctcagttgatgagctgtcacatcaccaagctaggtgggatcttgaaagttcttgctgatagttacagaaaacagtgctcagctgttgaaattctcaagatgttccttcaaactgtgagatggtgagtttgtattgttgctctgtcatatgctacacttttttcccaaaatttgtttttttttttgatctggagcagtcgtcttagttttatttgtatgtttttccttaacttctaaaagagtgatacaaatttaatgttgtaatatgttgcctgtccacctcttagcattctggttctttagatctgaaaatgtggaatctaattgtttcgtgttattgtttatgtacttgtgctcctaaagctatgccaaagagcgaggtagtgaatggaggattacgagttgtgattagtctaactgtgattttgtcttaattctattaaaactacgccagctctatctaggacatatttgtgcagtgggcttgtatgatagtaatatgtccactgcacaaatgtgttctattgttttattttcatttatgtttattgtgaacatcatacagttgttacacggatcctatcctttttatttatttcctagaatatcttatttctctctgtttaactctctgctagtgattttggatctcttgctgagcatgtcaaggatggttctaggacttctgttcaacaaagtcagcagcaagttcatggtatcccgtcacagatgatgcctcaagctcaggctgcacttcgactacaacagcaagtatgttgatgtactatgatttagtttataacctgttgcctgttgtttttattttcttagtgagttggtattcatgtttcatgcataagcaagatgattagatatttaagtaggggctttgttatgacgtgaatccacaaagctctttggtcccttgaacagattgttagaatacatgttctgttgaattgtactcttctcatggcctgccgttttgtttctagaacagtattaggtagacacattcatttggcttctgtttattatgaaattgttgtaactgtggttcattacattttgtggtgaaactacagatgtccagacaaatgaatccccagatgcagcaaatggtcctcccccaaaacttgggttatcaacagcagcaacatcagctgcagcaacagcagctgcagcaaaaacagctgcagcagcaacagctgcagcttcagcaacagcaacaacaacagcttcagcagcagcagcaacaacagctgcagcagcagcaacaac

SEQ ID NO: 22593 - DNA, 3933 bp, Cannabis sativa
  modified_base (43)..(46): a, c, t, g, unknown or other
ttgatattttgattttttttttcaagtgtaactctatttagtnnnnacctctcaattagaatattattttcttagtctcaagtgtattcttggatagagattctactgtataatttacaatataagaaatattgtttaaatattctttttcacacgcatataaataaaaaaggtacatgtgcaacaaattatttaaaccttaactttggcgtgttgaatttttttaaattttctctaaattttacaatatttcttaaaacaaatttcaaattttacattatatatagtctggctgcataaggattatactaaacatggaccagctagggtttcagaagctctatagctggctaatattataattattttttataataattaaggatatggttttgtacagcttgcaacgttcgaaaaattagaagataagattgcacttgcaactatataatatagtcttataatatatatacaatgtataatcatcatttatacatagtatagattataagaaatatttggtacattggcaatttcttttccataattttttaaatttatttactcccaaaaaaggccaccaattttacataccatttaatctataattaattttagtcaaatgtctccattattttctggaaaatattgtaaaagcctataaaaaatgtccaaaaaaacttttttctttcatgtcatatataacaaatgaataaagaaagttttttttgaattaaaattttctgaaaaagaaaatattattatgtggtttcaccaaattcattggcctattctcttacttattttattttacaccttataaaagagtagcaaagattcataaaatatcactttattttgtaccaaaaccctaacatgttgattttcaacaaccctaattatcatcatcacctttgccaaaagaccattccattatttgttgtagtcattttcttttctttactatcacacaaatcatcattatgcgagggtgacaaacagattacagtgaagacaactaacggtatagtagacacagacctaactcttcactgcaaatcgaaagacgatgatctcggagtccaacttcttcactacaatgactcttttcaattctctttcacacccaatatatgggaaactacactcttctattgtagctttcaatggaaagatgagtttcattggtttgatatcttcaagatgaaaaagagaaaaattctccatcttaatgaatggcttgtaaattcaaatggaccatgtcaatttgaccctgctactaacaggtatagtatttgctatccttggaattagtaaacatggcaacaaaaataatgaagactttaccaatattatattgtatgtattgatttctatttttcagtgtaaagagagttatatttctctcaagtatcttaataataaataagattgtaataacaattttgttaatgatttctatagttgggaggattcttcaatcacaaaaaataaataaataaataaattagggtccacaaatttacggtcatagttgggaagaaaaaaaaatatttttcctataattaatttataattttttgaatgaaaatgcaaagacttaaatcagccccaccaaattaaatatctttcgtatgtatatatttctgttttacaaaagaaattattttacttgccaaataaattcaaacttttatcagtgtataaaacagatatttgttgatttatgtatttttatgtaggattaaaactaaaacctaaagaaaaaaaaatgttacctgatttatgaaattttacataaaaatatcacagttgatagattgactcatcatcaaatagtaagccactatacccaatatctaagatgtgattcgtataatcaattagtataccaatattcaggtgctagggtatttgtgcactgttcgttttcatcgtatcaaattaccaagtttacacaattaaatctctgttatattaaatagtcttgtctactgtgtgttaggttttttcctagtgtgttcgtgtggttcacatgtgttgcgtatgttctaaggttagggtttttgtgtcaaaatatttcgtgggagtcgatggtataaggtttttgtggtggttctgaggtcacgttggttgtgagaattcatgagtgtacgtcctcaattggaactgttgtgggcttggcaactgacaaaatgttccattccttaaagaagtcgttcgtcacaagaggcatgtgctttaattatttggcaatatgttgggaaagcaagggtggtgcttactgacaaaaccaagctctttggtgagtaagttatataaggctcgttattttctcaggagtaattttctttcagcctcctttgggaataatctaagttttgtgtggaagagcgtcttcgaatcacaagagcttctcaagtctacggttcgttgggcaataagttctggtgtgaaggttgctattttgcattagccatggcttcttaatgatgtgtctccttttgttactttagatgcccgatatttggtgggccataattaaggtgagctcgttggtatgtacggataagagggaatgtgatttagatattattaaagatctttctaacgagcacgatcaacaacatattttggcagttccattgagtctgaatgtagttgatgatcgttttttctggtctaaggagcatcatggtttttactcggtgcatagtacatacaagttgatacaagctcagaaaggaaattggattgcagctgatttttctagattctggcgtaagctctggaatttgaaggtaccaccgaaagctctcaatttggtatggtgggttgcttcaaattgtttgcccaccatgactcaattaagtggtaagaggatcccaattcaaatcatgtgtccaattaatcaaaaaggtgaggaaactattttccatgctcttatttcctgttcatttgcataatgctggcagaggcttttggttgtggttggggttaggccgattgttgttgttgattttcgcagctggcttgatcaaattttgcaagggtgtagcaaggacaagtgtggggaggatgttatgttgtgctgggggttatgaaaggctcgaaaggagttggtttggaactaaaagtatgctacgatggatggtgttctaatctcatgtatgagttgtaatgaaagtttaaaggatccgattcgcaaactgtcctatgtacttgccaatgtcccttactatgttagccgatttgaatccagatatcatgccatggagttgaacccaaaaatccaacttattcagaggcataagtctaggattgtctccagttttcagtttttcaaagatcagagggacccgatcgaacgtccatgggctgccttcaataaccctttctatatccatctcatggtaaaattgaaacaaaaatctatcttgccccgaatctttaacaaacataccacaaacaggtctccacagtgatgccattttatgttgaatagcttggaaatcaaaagatctacctgtaagacaccttcccagtagacaccacctatcatcaaaattctctacatcaaccgccccttcctcatacttcaaaaacccctcatcatccctcccccccaattccatatccgcatactgctcctactccaattcccgccataacgaaacgaataacagatcaccaggcacaacgacttacaaacgaatacaaaactcaaaccatgtcgatatagacaagactagtttcgaccgacaagaattagaaatacgatttaatacatatataatcgtggtattaataaaattgaataaaagtgataggaacaaaatactaattattacactgcattacaaaaaaatacttcaaatatcaaaacaagaaaacgtctaaaaaagcaataaatactatatctaaaattaaata

SEQ ID NO: 22594 - DNA, 3186 bp, Cannabis sativa
cagttagatacttactcaatgactagttgccggataactcctggaaggacaccatcgccaataggtgctgtttgaacttcaaaacaatctatactttctttctcgtcaaaggacgttccttcggcaccatctttgtcctgaaaaaacctttacactgaatgtcatgcacaaaatgaaacaagtggaaaggcataacctgcacacttggtataaacacaaataactctaagattcaattcttttatccataaagtcaacagtctgataggaaaaaaaaacaatgaaatggtgtcactaataaagttcttccattactccattaaaaggcctgctagtagataactcgatactataaatcaaagttcattgaagcttaacacagccagaaaatcttacaacttgatcattcttcaccttgcgacaaacaacaaagaaattagtaacactgccttcaagtaaccgattgccgtcatttgacaacaaaagatcagttgccaagggaggtttcaacttctccagagattttctcaccctgtaaagaaaacaccacaactcccatatgagagtaaactatcaaacccaaaataatgagacgtaaagaaactgaagcatagtgtagtgtttccttttctattcatgtgtgtacattgtttgatgagtgttgttaacataattaatgctaaaactaaaaaaggacaaacccaaaataacacaaaacatgttactttcgcacatagaaaaagaaaaggttcagttattgaagatgggaattgtgaaatctactgaacttacctcacccaatccgagtactttgcagacgcaacttccctcccaggaccaaccacagccaaatgagaaccattttctcggatgccaaacacaggaggtacaaaatctccgatatatacaaggacatcaaaaacatctaccacactttcacgtctcacattctccttctcatactcactctgagtctgaatcagtttctcgaaatttccagttactaaagtcgtaattgaaagttcctcaccctcactcctctccttgagcgcaatcggcacaacttttcttacagaatcattaatgagaccacgaatttccgattcccatgtcccagagatcgtcgagaaatgaggcgacgagtctttcgaaaatcttttagcctcgaacagaagctgcggatgcgaatccacaagtatccgtacagattgagagagtcttctcaaatgtctttcccagaacaatacgcaggcaccatcgttgtgagaacgagtagtcgtgtaggcaccttggggagaaagggagtttcgtgttcattgttgaaatggaacaaaatacacacacacagagagaaagagcttacctggatgggtttcgaggaaggttgataagggagggatgtgggtggagtgagagagaacgccattattgaacaagaattttgagtttgacatagctcagatctttggttatagagcgcttattttgtttattagaagaaaaaaaaaacagtatgaactatgaagaagaaaaggaatcgaagagagtttcttgattgaacaaagctctattcacaacaaactaactaactaactaacagatcgattagttagaagacagttaaagagcttaactgacttaactaaaaacttaactaatatcatctacattcctcctaaaactaaatggttagtgttgaaaaattcactgtctcctactaaattcaacaatgtttcctgaaattgatagaacaataaataaattattgctaatagtcaaagagtaattaaaatatgaaaaagaatacatcttcaatagttcattttattctgtcattactaaaggatcaacagaaaatgaaggaaaattattaaagctcaacatacaatctcaagaaaatattatataattttagccaagtataatcagataagatgatttggaactaaacaaactagcaaaatgtatgtagacaagtttcatttgaatatttatatgtaagaagaacaatatgatttcagttcaccctcaactcatcatcaaaaccatacacttactaaaacgtagctatactatattatatatatatgtactcaaaaaagaaaaggaaacagaggaatatcaagtaataataagtagtaactaactagtaaccttctggaaaattagaagggtgagagaatgccagaagtatctctagctgcccatccaaatgtcttctgtgccatttttgtttgttctgaaatgagagagagagagagggtgagactactagagtgaatactcatcacagacaccaaaccaaaagacattgcatattcgatttctaaatattacaagtacttctaaaaataaaatcgacgaaaataaaaacaccaaatccactcaaattgaatacttaagagtggattattaccatacatgatatcagtatttgtaatatatcaagttagagaatgagtacattaaatatcagccacaatatcaataaaaccagaaaatctcatacacccctcccaaaaaatctcatcagtttaaactattctgcagtgaaaccatttgtgatacttgatgagtttatctttaaggagctgatgcttgagaagagatcgactagatttcaaacagacccagactctacaaacattaaacccaattttcttttattatttttggtatattggcaggcactaacaaatcaaatgtgtatataaataacgaaatttgtaacgataagcagaaagattacttcagtgataggcgaagagaagctgttgaccttaacactggtgacaatggtgtcgagattgggatgaaatgataaaaaaaaataattaggggttgggatagatgattctgcaccagttgaacctgtacaaaaaaaatttgtaagtcccccaaactgaataagccgcccatatcaaatcgaaaaaaccgataaaatttacaaacaaataatccgaaaaaataataaaccgcccactctgttaattgggcgggttggaccaaccaacctaaccaatccgattttgcacctttaatttttttttttttaactttttagtttgtattatatagggaaatttgcggcaaaagtccccaaaaagttcacgttgatacagattagtccccaaggtccaaaaatagcggcaatagtcctcaaggtcacattttttatttgtccgt

SEQ ID NO: 22595 - DNA, 2020 bp, Cannabis sativa
aaaaaaaaaaaaaaaaaccttgcaaaacagtaaaatttcgagaagcgtaggataaggtgttaaatgttgttgttttggcaactttatactttgtttggattaatcaaaattgctgtaaatatgagatgaaatgtaattctgcagcttatgttagtagagagattagattagttgttaagcttagatactaagctgtagcagcggggaaaaaaagaaatttaatagctatataattaatgtaatcaataattggtagtgttggctggttgttctattgttgtttgagtttgttatgtatccttgtttgttttgaataaagatccttttcttgttcaaaaaaaaaattctaaaagcaagatttttcaagtttttttttattttcggtaattattttagatttcagtatttgtgctgacgtggcacatcagtatttgtgcaaataattttgttgaaggtatttttataaataaaattaattttaagtataatattgaaaaaactcattatttcttccgaccaaaattcaacttccaaaaatagccaacacatatgtaaatcctaggggctatggtacattgataatcggataatacgaaactcttccgttgtatacttgatttagtactataaaactaacaattggtattagagcagttccatgaatgtgtatacattaaatgttgtgtgggttttatacatttatatatatgtaatatgtatgtgaatggatggtattttattgtgaatctatgagaggtgaaaaatcattaattatatagtataattgggtgtaggttttattgctattattttttagaaaataatgtaagccaattagggcataggaatttttatgtaatttattttttaaattaaattttacgtaaaaattattagttgtaatgttcattgcatgtgagcttagtttctaatcttaaaatctggctatgcatatcgaaaacatcacatgcatgtgagctcgggttcgtggaggaaccccgaccatgcaaaaaagcattgggtatcgtgcccatgcttcgctagggaggagtcaacctagggttgatgtatgcatgggttaacatgcatgcaaagggacgtgagtcccgagaggggccaaggtggttcgaccactgccccatgcacgacggtgcaccactgcccgttcatggcaggacatacaacgtccacttgacccattcgggtctattcaattcttgacccctggttgctcctctcgtgcgtttcctcttcctcgtggccaccatggccaccgccgaccaggtggctgatggtggtggtcgaccctatcctttgtgatacccaactatatatgtatataatatatagtgtatatatagtctatacactataaattatctattaattatttaatgtaaataattaattttattttgagatattaaataaatattatggttattatttgaattttaaatctaaataataattatgctaattattaattaataaatgttaaaataattttattatttttaataattaaatcaaaataaaagagttttgtgagatattaatttttttaaaattcatatttgaattaaataaatataattaattttaggaatatttaaaagagttatgtactataagggagcaagttttagacaattttttcatcttctttttcctgtttaatatgaaattttatatgaaaaatatacattgatactttatttataaaaatactttcataagatgtgtttaataattttgtctttaatgagtttttatttactaaaatatcacttacacatatttattcatgtcagcccaaaccacatttcagtcatttcccttttgaaacccacgttcaaaactcacgaaaatcacctcctagccataaccttcgccatcttcgtcttctaactgcctcatttattagtttttttatatatctttcatttcgtatatataatgactattacttgtggctctgcttctccatctccattgctaaaaaaagcttcaaaaatag

SEQ ID NO: 22596 - DNA, 2582 bp, Cannabis sativa
  modified_base (2536)..(2557): a, c, t, g, unknown or other
ttataaggaaaagagtatatatttggtgcaaatatataaaattacatattaaaaaaaaaaaaaagtataaatagatatattttttcaaaattgggttaatattttttcattacccgccaaaaacgagtgagtgagaaacttttcaaaaatgttctccgccaaaaccaacgcctcagcctccaagaagcgccgccctgaaccggagtccgatcagagaaaacgatcctccaaagatcttcatctcgatctagatctcgacctcgacaggttctaattcatatatatgtattttttttttgaaatttcaatgaagatcgatctgagattgagaataatctgtcgaaattgtgctttgattgtttttcattagcgatattaaaggaatcgtttcagcgcttcaacaaattagggagaaagctcataaggatggccagaagaagaacgaagaaaccatttccaggttattttttttttcgatctttttagttaattcatggttttatggtttggttattaatttgattacggtgatagtgtggctgctgagatcaaatctatgatggatgaattgaagtccaaatttgataaggataggtaagaatttatctattgtattgaagatcgaatgagtttttttgtatcttttagtttgaataagaaataagattggttttgtgtatacagacaaggttttgttaaagcactttcgaagagctcgaaagaggtttgagtatgaaagttttgattgatttcattgtttttagctgttaatgagtgttttgcaatttgtttttgacttattgattctgtgttttcgtgttttttagtttgagaattgtttgaaaagtgaaacttctaagtttcaatcactttgtcagcaattttgtaaggaaaaaacaacccatttgcaggctttgaaaggtattttctgtcttcttttgatttgaattgaaactgatattctatgatcttattctttatgtttgggtaaagagattcattttctggtgtcagatactatttccaagtttgaagaagagaaggaaaggcttttaaagagatatgaacaaatgagtaagttttctttacagggcactactcttttttttatttctcttgtagtgaaatggaattacattactgtttgttgttgtaaacaaatgagatatcagggaagaaagaaaagagtatgatatctgaacatgagaaagcttgctcagagaaaatttctcgattggaggaatccctgaaaaagaaaacccaggtatactaatatacttatcataaacttgaggttttctaagctctaattctgataaccattcctattttggactcttaggatgacaaaactttcagcattttgaggaaaactttgggttccctttttgataatgcctcagatgaggatttcccacctgatgattgaagatttgattcagagtaaaggctaaacttaccactcttttgaatatgacattcaagatatgtcctttaatatcttccttattatatacactatctctagataggagaaaaaacttaaattgtccatagttaatttccattaacgactcgctcgacagtctatattgaatattaagaatctttggctgaacatcataggtacaaaccagctatagttaccacttatggttttacagtcttttcatgtttaaccattatacatatgaatatgacgacaataattggtctagaaaagtttccctttcctgttttttacatagaaaattgcttccaaattttgtttcaagaacttatacagatcatggtgtttgtgtatggcatattgagcttgtgtgcatgagttcaaggcattgtattgaaattgcatagttgttgagcaaccttggctcgaaatagatttcaacttaatttttttgaaatgttgaagcaaaacccattaagggaaacttgtgttttttgctttttgaagttttgcatttactagaggagattataggcatcatatttgggttggaatttgaggagtggatggattctattttcgagagaagaaataagcctaggattggaggttgaggtgcttattgtgaagtctagtaaggttagttatatggtatggaattggaatatgaacataaaaccatatttgtcttttcttagctatgttttgttttagaccaaattgtttggaggaaattacaaattttatgggtttttatgtttttttttttttgtgcaaaaatataatattttttcaaaaaagtttattttatgagaaaattgaagaaaaagttaaaaaaaaaagaagagaaaattaagtaagggtaacaaggtacccttttgctaacgaggggaataaccaattacggtaactaagtaccttttttccataacttttaaagctaccgttttcatctccaaaagtatcgaggccttatcttgaattgggctttcttctcatagcttattgggccttcttttgtactccatatcattggtcttttggacttttatcactatatccattgggaaacttacaaaaatactnnnnnnnnnnnnnnnnnnnnnnaaaatactgtcacacggaaattttt

SEQ ID NO: 22597 - DNA, 1605 bp, Cannabis sativa
aaataaataaacagatactcacagcgctgtacttcttatacaactcttttgaaaggtcattgtcatttacctacacatgagcacaaaactgcatcaaaatgaaaatgtttagacgtggagttagcatgcactaatataatgagtgttttcaacattttctgaagaacctttgtttttctcttttttctttttttctagaaatctctttgtctaatgacctgaaatgtaatcgagtaatgagctgaaaaaaacttaagcaacccctctaaaaagctatgcttacagactacgaaaaacaagaaaatactagtacctgtgatacatatcattaagtgagactggcaagaaaatataattatataactgtggaaagttatttgacaaaagaaactttattacataaacagtatgatatttcaaatagataattttcttgtataatttaagactagtttaagaatgtcaaacttaaattccaatagaaaacataattaccgcagcatcaagaagctcaagcagaaacaattttccagattccaaagcagcaagcccgtcttcattttcttttcccaatccaaccatctcagctgaatcagctaatttggaaaacaatacagcaacagacacccgtgcatacaactcggtgttgataaaagcctgaaaagccccaatgtaaatagtttacactttgaacgaaaaaagcccacaaatccgcatacaataaaaggccattcaagttaaatgacaatgacagagccaccacaagtatttagcaatgaaaaaagcttaaataaacaaattgcttacctcagtcaattcagaatcagcgctttttgccaacaaggagagttcaatccttgtatcatgattatcagctatctcagcttcaaaatcctcatcaaatgcaactggaaaggaaaatttcaaattataattagaacttgaaaaatgaatgtaaagccatgaaaggattaccaaacaagaaaaaagggtgtgtgacgaaccagaaccatagagtgagagaagtttcaactccttcatgtagtactttataaactccgggtttgacaaccacattcctgataagtgtagtgctgcaagacgaattgtacgagggctttttgtaccttcctcaagaattttttcaatgaactatcaacagttgagagagaacaattaattaaacttgaacgattggcttaatacaccatctattaaaaaacactaaggcctaatacagaagagagagagggcggggccacacacccacttgagaggtccagatgcattctcagacatatgcatgctttcatcagtaaacagggcggagtgcagaacagaagataagagtgcagcaatgggtgcaaccttacgcttgttgcagctgacatgcagtatccaggaagagcgaaccaaattccaaatcatctgaacagtcagtttcctcatctcatcagatttatcaactaatcataaattttgtttgaacttgacagcaaaaatctctaaatcataatcaaaccgcatacttatcatatttttaagttattttggattacagtgttaaatacaaaaagaacaaaaaactatatgcccttaatattt

SEQ ID NO: 22598 - DNA, 4466 bp, Cannabis sativa
aaagaccttacatatctttctaaggcctttcttgaattcccagccaggtgtggcctctaatcacaatctcgagcctgcctacaactggtgcagatgggagaggtgcattgccctgagcttcaagtcaaacataccgctgaagagcagcatgtttctgtctcattagggactctatctcatctcgcaactgattacattcatttgtattatgatcgtagtttttatgatagcggcagaacttgttcatgtccctcttccctgattttttgaggggaagagatttgcggtatgatactgttgattgggtgaccatatagatctcctctcttcaagctaagagaatagagtaggtggtgaaatgagtttcatactcctgcataggcttacatccaattttggctttctttccaccagaggagttgccttgttttcccatgttgtttgctctttttcctctgtttgaatctccctttcctcgattgacctacactctagtgtcaggggttgagaagtttggagatttctccttgttactctttgagaccttagctcgagtgataacttcttcaagcttgataaatccatctgctctatcaagaaaggaattcatagtgtaaactgacttgagacaaaggtcgaaccaaagaggactcatctccttgagcccgattgtaagtgccataacccttgcgtcctcgctaagtatttttttcttagcaactgcctctaagaactattgaatgtagttcttgaggggttcatcttcttgttatttaacatctaccaaatcattggttaccaaaagcatccactagatctttccataaatcgatagatgaaaggggaagcttaaggtaccaccgctgagctaagcctatcagcgtggtaggaaaaattatacatcagacgttttctcttaccccttgcaaatcggtctgcattttgaagtaatgtaagacaatgagtcttctttcctggtgtattgatgctaggaaggattcttgaactttgaatggattggtagagctttgattcggtccaagattggtgagcgttactctctgtccagttcgaactctaaaacctttagggtcatgattccttttaccagggctgctagattgtcaaactctatcatgttgacaccatgggtggtggtttgcgtcttagtcaagagttttgttacttgatcatgatcacctctagaagctctcacttccacaaaccatcttctggttagggtgtcacacaggtctttagatcttccaagtcaatcatgaactctagtcgacttatgtctggttgttgtctcctaaccacggggtcgtgaaagtcaatattggtgatttttccaatacaaagtccatgtcttcttgggataatacaatacgggggcagtcatttggagcattgtagtgactacttcccttgaaatattctttagaaggatcacaagtgtgaaaataattgaattgattgctcatgttcaattctcctccatgtacccaagggaattattcatattgctagcctttggggccatgtgcaaagtaatgacaccactcacctctctcatctcggaaatactttcgagtatgaagcagtaggttagtcattacttgttggatctcataacctctagtttcgaagtagagtcttcaattttctcattcagtgtgaatagcaagtccctttccctttgtagggtctcaaggcttggtgtcattaaagcgaaggggagaacctggtggaggaattctgttggttctttcagtagttcgtggtcgctccacattaggtggagggcccattggttatcgtgcttaagcttgagttctttcaaactcttgcccaaagtttgcttccctttggggagtctcagcacctgttctttgcatagtacttcacggttgccagttggccgatgaggaatctctccaaacaactcaaaaaaacccatgtggggtcttctaattccacatgtggttccctagtggaatctgttcactggttttagcgtcaagagcaggtggtggccttgggggacgagttgtggagttggttttgagacctccacttggcatttgaaatgcagttgtagtcccatcaccagcttcaatgactgtcgtgcccctagtctgctagccagttattgtggatcttctttcaacacttaaggagtgcgttgtaactatcttgtaagttatttcttgagttgtgactctcaatgaaagtaccaaaatattgacacagaaaaatatggacatagatatatggccacacctactctctagattggcgagaatgtattatgtgttaattgtaaataagagagataaaataatttatagtagttcactccctgtatcacgacagtaattgagctacatctactttgagtttttattctcatgagatggattataaaaaaatggttaagtctagcaattgaaattttttaagagagaaactagagagagatgctctaaccttatgtgtaattttttgaacttagaaaatgagctagcagagctctccttttatagggaaggaggttctattaaaataataataaaatatggaaaaatatatttaggttgttttgaatcttagatgatggtctaacaatgaaattgactctggaggttggtcgtcaatttttggagcttgagtcgcgttcgcaggacccaccttgggtaagttgtagcttaaatttataactctcttgagggtgaaatttggagtcgataacttcaaaattacaattgaagtgcgatacatggcttgatagagcatttaaatagctttgaaatacaagttgaattgcgccaattagatcaatattgagtgagttatgactattttactgaagactattctgggccaagcgcccaggttgacatcccggtgtcccaggttaacatccaacgcccaagttaacatttgatgtcaacctgaacgctgggtgaataagaaaacgtaccgtggatgtattttttgatgaatatgtgatatttggacattacttagccagaattcgattttggttaaactcgttaccaattctcgaagatgttgttgttttatggaaatgggagacttgaaactacccaatttttgagtaagtcactttgctagaaaagtaaaaatatgaggttgtgaatttgactcttttgacttcatagctcttagttactatgaaaaactagacgaacaatcgagacagaatcagaatcagataagcagaacccagctcaccgggccatacctcaacctgggcattgagtgctctttctagagcttctaggatgtttttttgacacttcccaagttcttgagatctaggacgcggtctcctaccctatttttgaccattttggaaagaatgctagcgacaaaatttgtatttgagtgatcaaaaccattgcatcaagttgattgtcgacttgggcattgagcccaacaccaggtcaacctgggcgctggattcagttttgaagcccctgtaattgttgttttctccctgagtttacttgtatctttgttacattttatgaccgaagaaatgcccgaaagacttttttagaaaactgattggtccagtttcaagcctcttggaaattctgtttgcccccgaaaatagttgaatattaatctttgatgaaaacagaaagtacgcaaggaaaatgtttttggaaaaactctttagaatcatcacaggttgacaaaatatcaacctaggccggttgggcccagcaccaggtgtcaacttgggcactggtcccttgttttggcccccagattggtctacttcgtccccaaaaacacttgtttccttgtttttgatgaagacgaagaagatgcacatgttgaatttttcggtttgatgcttggaaatgacctataggttgggaaattgtcaacttgggcgctgggtgtcccgacaccaggtgcttaaaaataaaatcctttgaatcttattcgaatgcctcaaatatgttcgtggtatatctagttcatgtcccaatgcaaagtttgacccatttgcactaagacggtgcaaaaaactgaaaccctagttgggttgtcaacttgggcactaggtgaaatcctaggcacctaggttgatttctgaggtgatgtttcagctcctggggcctgaacttggatgcttcatgtcttaatggtagagaataccaaaagatggtgagttgaaaacaacttgtcagaatccaaatacctatttcgaagttcccagagttaacctgggcgcaggactagggaccccttccaaattgactataatgattcaggactactcaactcctaaattttaactttcttgccacgtgtcaaatttccacatcacaaaaaaaaagaaaatttccgaatcaacaatatatattaatactctttttctaaatttttgaggcatgaccccatgttagcatatatatatatatata

SEQ ID NO: 22599 - DNA, 1961 bp, Cannabis sativa
cacttgctttttccaatgaaatcaaaatcagaagcaaactccttattctatcaatttaattcctttgttgaaaggcaattttaaactaaaataaaagctgtctaatgtgatcttgggcaagaatttgaacccttgtacaaactctttaaaaatctaggcattacttaaagaaatcttgccctcacactcaccaacagcaaggtcgaattgagagaaagcatagacatgttgtggatactggcctaaccttgctgtcccaagctaccatgcccttaactttttggtgggaagcatttacttctgcagcctatctaataaataggcttccaacaccaatcctaaactatcaaacaccttatgaaagattgtttcatcacaaacctaattacaacttattaaaggtgtttggttgttcttgttttccccttctcaccccatatgccttttgatcctctaaatgtatcttcataggatacagtcctaattttagaggatataggtgtttacacccctcaggtagaatatatgtagctagaagtgtaactttcaatgaacaagaattttcctataatgatctatttcctccaaatcctcccaatcgagatacccctgctcataccagaaactagcaaccatttccaattccttgtcccatacctattattacacaacaaactgacaccatctcacattcccctagtgtctcttcttccaacaatcaaccaccaacacccacaaatcagccaacccaaacacagtaccctactgctaccagtaaccctccctaagtttctcaaaacacacttactgctaccaataaccccactgctacagtgcctgttcccactcacaccacaaaccttcaccctatggtaactagatccaagttaggaatttacaaaccaagaagttttcttgtaaacacacacactgaatatgaaccaacttctttaaaagaagctcttgccaatcctaagtggaatgctgccatgggatctgaaatgactgccttaaagagaaagaaaacttggacccttgttccaagaacaactgatatgattataattcaaaacaaatgggtctacagaattaaattcaatgcagatggtagtgttgaaagactcaaagcaaggcttgttgccaaaggcttccaacaaacagctggtattgacttttttgagacatatagccctgtcatcaaaccttgcacaattcgaattatgttcactttagccatcttcaatggttgggacattcaacaagttgacattaataatgctttcctaaatggccagcttcaagaagatgtttacatggctcaaccacaaggatttgtggacaaagattttccaaatcatgtgtgtaaacttcacacaaagagccataatatggtctcaaaaacaagccccaagagcttggtttgacactctgaaaaatacactggttcaatggggattcaagaatagccaatcggataacagcctcttcttcaccagtaacaatggcaacctacttctgatcttaatatatgttgatgatattttaattactggtactgacactactgttgttcacaatcttattgctcaattaaatcacagtttttctctaaaggctcttggttcagtcacatacttcttgggttttgaggttcgtcgaaccacttcagccatttacttgacaaaacagaagtacactagagatttattggctagaactcaactacttgactccaaaccacaatcaacaccaatgtgttccactacaaagttatctgcaaaatcagggactctattggaaactcctactcactatcgaagcatcataggtgcccatcaataccttacaatgtccagacctgacatctccttttgtgtcaacaaactcagccaatatatgcaagctcccacctctgaacattggggagcctgcaaaagagttctcaggtacttggctggctc

SEQ ID NO: 22600 - DNA, 2886 bp, Cannabis sativa
  modified_base (1161)..(1172): a, c, t, g, unknown or other
attataaaaataaaaatatttaaaaaaataaaaaatattgtaaactttttataattttgaaagagtcatgtagatacataacaccttaaatttgttaacagttcagtaatttagaaagttttaccattaaaattttaatgattaagtacaatttaaatgataattgagagagtttttaagagctctaattaatttttttattataataaagtcaatatttagggtatactatcaaatattttatgaattcttttagaacttatgagtatgacaatgtctcctgattttaatcgatgtgattaacaaaacaatgttcttaaataacatgatacttccacatattgtacaaagtttataaccgactagctcaagtgactatatgtaggtatgtgtatgttggaggtcctggattcgagtcccaaataaaatatgattgtaatatataaacgcttaaataaaaaaaaaaatatgtgatcaaaccatccaaaatctgtaagtaaaactaaatacgttcttgagaatttttttaaaagaatcatattgaaaatatgtgagagctttatatcgtaatgtcaaataatttttagatggaactttatagatcttatcatacattttactttttaaatcacactttcattttaacacacataactttcaaaactttattttaaaataaaaaaaaaacccaatgttagatgaaataaaaatcataaaaaaatgtagatatgttatctcaacatatcttgcaaatctcctacttcctcctgcgtcaatctaaccatgaatattcgcttatcagttaataattaaatacctactgaaattttaaaaatataatttaatatttatttacaactgagaattaactttaaatatttaggatgcaatttttttttcttaaaaaaaaacattttttttaaacaataaactaaatttcattgaaaaaaaaaataagagtgaaatacgccaaaaataaaggacgagaaatccatttaaaatagtttactgttgatcctgagtgcatacacggctaaatcatgtgaatatgaattaaagacgcctcatgaaaattgaaaagtaaactagtacaaaaaataccattttggaccatgtgtttcgcaaaagttataaattggaccttttattttgttaaatgannnnnnnnnnnntgtattttctaaaatggtacaagtatgaccctgaattgattttttgtcaaaataaaatttaattataatccgatctaaaagtgttatgataaaattgtttacattttctgtatttgttcgtattaagaattgttttcaagttgattatattaaaaaaaaaaagttgtcaaaaattaagcttagagtcctatttctactattttggaaaatataagatccattttatcatttaacaaaataagaatcaatcggtaactttcgcaaaacacgttccaaaatagtatttataaagaacggaaagaaaacatttattttaaccatatatttttcctataatttaaaaatatcattttcaaacaataaattaattaaaatatccataaaaatttgcaagagcaaagcttctttcttccatggaaaactaaaaaaaaagctttcaacttcaaactcaacaatggagtctctcactctcagctcctccttcctctacaacaatctcttcacaccatcaccaatctcatccaaacctaaacccaaacccaaacacaaaaccccaatcccaatccactcctccatcacaccagacccatggacactcagctcaggcgacccaaccagacccaaacccaaatccaaaaaccccaaaaacccactttcagacgacaacgctcgccgcataatcaaagccaaagctaggtacttgagtcacctaaggaagaaccagggccctcaagctcaaacacccaaatggattaagagaactcctgaacagatggttcagtacttggaagatgatagaaatggtgggctttatgggaaacatgttgtggctgccattaaaaaggttaggtctttgtctcagaaggttgaaggtgaatatgatatgagattggttatgggttcttttgttgggaagcttagctttagagagatgtgtattgtgttgaaggagcaaaagggttggaagcaagttagggattttttcaattggatgaaattgcaggtttgttttttgtttttctttgtagaaattacactattttttttttttgatttttcaattgatttttttttaatcaaatatgattttttaattgatttaatttagcaaaactgtatgagtagtgtgacttaaatttatagcaaatataatatttgtctaattactaaaaattattatgagattacaccaaactcaacatttaccacctagttaccaaaagttgagttaaggtttagtagctactaagtgtaatataaactcgcatatcacacatatttacttagggactttttcgaaattgtaggtttggtttttgtttttgtttgtagaaattacttcatttttttagttcttttgagatagatttaattatattaaatataatatttatttaattattaaaatggaatgaatatgagtaatgtgaaaccatacacaagcaattttttttttaaagatttagggtgtgtttgtaagtgactgtttaattattaagtgaaatgcacataaaagaattaaactctatttaaaatacaatgtatttggataattaccgtgtaattatactaaattctcattgttggaggccatgagaattggagcataattgagaccccttaattacctctaattatatggttactggttacttggctgaacaaacacgtcgaatcttgtatttactcggaattatactcaattctaattaca

SEQ ID NO: 22601 - DNA, 5712 bp, Cannabis sativa
  modified_base (5647)..(5653): a, c, t, g, unknown or other
gtcccgggtccgggtctgggtccgggtccgagtccaggtcacaagggatttgagtcttgaattaagttttttttaaaataaattgaaatccggtcggatcagatccgatcgagaaaagaattaggcggggtggagtggatctgatccaagatccaataagtatctgaatgttttggatcagaggtgatccgtcgggtcggagctccaacccgctccaactaaatggatctttttgacatgcctacacccatcttggagacaatactagaaaagggagttggtaatagaggcttggtaaaaatgtctgccaagttttgttgagaagagacatggaggagttgaatggagccttgctgaattttttctcgaatgaagtggcaatctttttcaacatgcttcgtacgttcatgatacactgggttttcactgatgtgtattgcagcggtgttgtcgcagtacaaattggcaggttgtttgtgagagacgccaaagtctttgaggagagcaaggagccatgtcaattctgaagtagcattagccattgcaggatattcagcttcagtcgaggagcgagaaaccacttgctattttttttacttccaggatatgagagatttccccaaaaaaatgtagtagccgaaaatggagcgtcaagtatcttggcagctgccccaatctgcatcggcaaagaaggaaacttggacattgtcgcgtgataagctagtttcagtgtaagcttgcagttggggtgctgtatcagatgagaaaaaaagaccttgaccaggggtttgtttgaggtattgcagaattcgatttgtggcctggatatgggggacccgaggacatgaaaggaattggttgagatgattaacatcgtaagtaatgtccggtcgggtgatggtaaggtagattattagtttgcctattaagcttcgataaactgagggatcggggaggagtttgcctttgtctttgctcagtttaagattgagttccataggtgtagaggctggtttaactcctagataacaagtatctttgaggggttgaagggtaaagggcctttgtgaaaccgagatacctttggaagttctaccaacttcaagtccatggaaaaaatgaagtttgcctaagtcttttaacttgatcttggcatcaagatgttgagtaaattgtgatatggccacagtattgttgctggctataatcatatcatcaacatagatgatgatagccatgaaggtagaatttgttttcttgataaacaaagaattgtcggacaaggattgagtaaagccatcctctagcaatgttgaacttagtttggcataccattgatgggatgcttgttttaagccataaatgcttttatttaatttgcaaactgtattgagtggggcattataaccaggaggaattttcatgtaaacttcctcatggacatccccatgtagaaatgcattattgacatcaacataatggattacccaattgttgatggcggctaatgccagaaaaacttttagagtgttgaattttgcaaccggggcataggtttgtgagtaatcaacacctggtttttgactatagcctttagtgataagtcgagctttgaaccttactacttcaccagcttgattgtatttgtgtttatacacccatttgcaaccaatcggtttgtgtccaggaggtagtttggtaatgatccaagttttatttttatctaaagcttgagtttcattgttcattgcttcaagccaatgtctaaattgggaagcctcagcataattttgaggctgatcggtttgtgtgtaggctgcaagaacaacagcccaaaatgttggatgaagcttaatgtagaacaagaattggttaatagggtgattagtggaagccacatgacaaacataaatttttagatgagcgagtttgacaataggtctacctgttttggtggtttgtatgtcatggcgggaagaagtgccaggtatggttgttgttgaatcaacaacaatttgctaatcttgggatgatttggctgccggtgtagctgatgcaggtgcagcagactgttggggagatgaacctggtgcatgtgcgactggtgtagcagtaatatgttgctattgggaggttgtggcatggggtactgttgctggtgcaacaggtttttgacaaggaagaattgtttgagaaaaacaatgatcaatctcagttgaagaaatggtagaaaagtatggaaaaatgtcctcatgaaatataacatctctagatgtgtatatttggtgagattcaatgtcaagtagaacataggctttcatcccggatggataaccaataaaaatagaggcacgactccttggtgaaaatttgtgccgtttagagtttaaagttgaaccataagctaaacacccgaaggatctaagatgatcataagtagggagtttattgtgtaataattcaaaagatgtactgctttttaataaagcagaaggcgtatggttcattaaataggtagccccagcaattaaatgaggccaatagaccagtgggagatgagattggaattctaaggcacaggcaacatttagaatgtgctggtgtttcctttcaacaccagagttttgttgaggtctctcaacacatgaatggtattgtattacacctttggatgcataaaaggatgaaaggtttagttctttggcgttatcagaacggacaaccttgatattttgggccaactgagtggaaatgattgtaaaaaaatctagaatgattttctgtacttcagatttcgttttcagcatatatgtccatgtatatcgagatttatcatcaacaatagttaagaagtgtctataaccttcagtacttattattggaaaaggaccccaaatatccatgtgaactaagtcaaatatatgagatgtaaagttgttattggatacaaaagggagtttcttttgttttgcaatatggcatacatgacaatgagtattgtgaacaatggaagaaccaatttttttattgaatatgtttgaaatgtacaaagatggatgaccaaggcgattatgccattggtctacatttgttttattaaaagctaaactagtagctactatgggagtgtcttgatgtatgatgtacagcttcccttggcgtttagctgtcccaatcaccacactccgagaaggatcctgtataacacaatttttagtgttaatgaaaatgtagtaaggtatttgatcagccaaggcagtaacggataataggttgatatgaaaatctggtatgtagagaacattatcaagagtaaggtatttatttatactcacagtcccaatgttggatacaacaattttgtgtccattgggcaaaatgacatttttttggaaaggaagagtctttaaaagatgtaaaccaagagaaattagagcacatattgtgagtagcaccactatcaagaacccattgaaaagaggaattggaaaaaagattactagcttggttagatgctgcattgttcatggcaggatcagcccgaggaatggactgattaagttgctggctgagcaatgaaatgagttgttggcacagtgaagtgagatcagtagcaagaatgagagtagtgtgtgatcggttgggttgcttgtagaggcttgattgacctgagccttacctttgtcattgcgtttcttgtctccataacctggtgggaagccgtgttggaagaaacacttgtcgactaagtgaccgggcttgccacaatgagaacaagatggtctaggttttttgtttcttggagggttattggatgatggacgaacagaggaggtcaggggaggattttcaaaagaaccaagtgtgcgttgacgttcttcttgaacaatcatagcaaagacccgagaaaggtttggtataggttcattgaggagtatttgggcacgaactgaagcataagattcattgagcccagtaagaaattgaagaacttgattttgattataaaaatcaagaaaaaccttcatagcaccacaagtgcaagttgtattcggctgaaactctttcagctcatcccattgagatttcaattttgtgaagtaggaggtgacgaaatgatcaccttgttgcaaccgagtgagttgcgtttgaagttgaaagattcgaggagcattaccctcattgaatctttcagctaaatcatgccacatatcagtagctaggtcaaagtacattatactttgggtgattttagcagagatggaattcacaagctaagacatgaccatatttttacaacgaagccaagaagggagaagagagttacaagattcaggctttgggagagagccatcaataaaagctgttttgttcttcactgccagagccatggtgattccccttttccatgaccgataattgattccagtgagtacggttgataccagaacaagacctggatggtcaccggagctgaggaagaaggggctagaggcatcttcattggcatgacgattgagaagagagtgagatcgcctttgatgaatctggtgatctttggttcttggagactgatcttcatgaacatcagtagggttctgagatcatgtcctgttggctgtgcgtcgagatgccgccattggagctattgtaggagcaaaagtgacatcagttggaggatctgatgtagtattctcaggaggatgaggaagaattccatcttgagatcttgtggaaggccttgccatggaattgggtagggtaacttctgataccatatgacaggtttaaggctaaaaacagagagaaagaagagaataatttcttattattctcgagctaaaattacagacctatatataggctttattacaatggcattatgtaactgatttaggcaacttggcaagaagtaagtaacagaaaaataaagattccaagacagttggaaataactaactaatcctattctaacacaatatatatgaaaggattttggatttacttatattctttttatagtaattgattatttaatttccatgctcctttaatattttattaactcaaaaattattcgataatgcttcaatagaagtattaaaaataattttatgtagagttatttttttgtaatatgtgttattattttattttatgtctattaaatattattttcttatttattttttacatataattatttgttaaaaatattattattttcttttaaaaaaactatcattcacttctctttttttctcctcttctttctctctaaaagttcttaaaaattgtttatcaaaaaacataaactataaccaaaactaaaaactttgattatttttttaaaagaaaaataaaggttgagattcgaaaattctctaatggcgaagttagaaaagaatgcaaatattttttgtacaacatatctctcttctcaaatcatatccataattttttttttttttttgtgaatataagtatttttaccaaataattataaaacaattaaataaggaaataaaattaaatatgaacataaaatgaaacaatgacacctattaaaaaaaataactttacataaagtcactttcaatacctctattaaagcatatagtctaaaatgctaaagggcaccagtggnnnnnnncaccctcctatgtgtcaatatcgctattggtccaactaagtattgggtcccatataatt

SEQ ID NO: 22602 - DNA, 3849 bp, Cannabis sativa
  modified_base (2580)..(2591): a, c, t, g, unknown or other
  modified_base (2638)..(2646): a, c, t, g, unknown or other
gaggctttccgccgatttgatattgtatccgaggccatgaactagattggcctcttgatattctattgtgagacattgtgggagtgtccaaacctttcgtattctattggtgcgatctacgtgtcaaaaactcattgttgcgtgtgcgtcacgcggtctattgggctcgtggtatctggggttgtgtattgacagttgatcatgttagcatgttactcaaggctaatatcaccataaatacatgtcccatcagttctgaggatcgcattaaatgcaacctttggtattccccgatcgttggatggtaggatttgtgttttcttagatttaacccaataacttggatcataggcttacagatccccaatatacttataaatgcttcacaggcagatcatttagcacttcagctatttttctaagttttcaaatttctagagagagaaaaatcttcccaaacccagaaaagtttctagtgaatgtctaatctcgactccaagcttttcaacagattattacaactttgacagaagctatttctaaacatcaacccgttaattgccgccctagaactacctttagtgggctttctaagggacttcaacaaatcatgaggaggcttcgcgatattcaggcatgcatctcacaggaaaacatgaaactgacaccccaacctcttacatcataagtaagtactcccttcctctaaacttcgctatgtttgttggtctaaataagctttaggggtagagggtcctagttgatgtgacatgattttagggttttttctaggtttttgatgatcggaattgcatgcaccatcgtatagggaaatttattgtctttatttgattgagaacttagagacatgatatctttgatatgagaaccttgccatgcgtagaaaattgaataactaggaagtttcaagtttttttattttttttttatttttgaatgactgtagtaacttgtatattttctttaggatccttctagtgctggaccatagtgcctttgttctctttttcatgctcctgatctatttatctaggaatgatccattcctgggaatcaattctggcagggagctctcaaagcagttgtcagggaagattttcccatactcttactatgtcattttagtttaggtatttaactatttagtgtctattttttcaaattccaccatggaaaaagacaagccttgaagacgatgacgaacgaggtgttttttgtgacatgaatgatccgacatgcaatgttaatgtcgctctagtgctcacggggaaagcccaagtaaagggcactgcataggagatggacaacatccccaataaatttcacacctatcagatgttgttgaagctataggactcatgtggcttctagaatactttgtttttgtttttgtttttttttttgaataggctgacacgaatgaatgagagttggccctagtgaagacaaaatcgacgcttggagtatcgcgcacatagttttcaggagctcatcatcttccactttgggattactttgccaatttcctaacttttttcaagattgcttcattccaaatgatctcgcaaagttacaaacttcttgtgagatgatacatctttaataaggaattgaagatggatgagccttgtcccacctaggtattatacttttataagttggagcctgtgctttgcaagaaggaccacaacaacgatggttttttaccatctcaaaatgcagaataaggttaagtgtcccaatagcttatggagacatcctctggatatgcaaaagtaattgttcttcacttttggcttcccactccaaatgcatccaacattgatgacaaattttcagagagtcggtaagttccatccttctagcatctccagtattggttcttgaccaattatttagttttttcaaaaataaattttaacacttccctttgtcaggcattaggcccatatgtacgaatttctcagtcccagagaataaaggcttacgaggcggtgtatgcggcctcctcaaaggaggatctagacgtagggtcattagtaatactgctaaactctgagatgttagcctaatttccaaccatcaatatattgatctctctagattttgtggtttggcacctaaacctgaagagatccgggaaggggtctttgaaatattagatgaagaggtaatatatgtagtagctcaagacaaagtctagatggtcggtcgagctgggggaagactgcgaggtgctggatgaagatagcgaacttgagaggcgattcagggatattcttcctaatattggcactctgagaaccatcactttcagacaaggtaatacttccttccgtctagttcatgctccccaagcagtatattttagtcatattaaataggatgggtttaacccgtacttccttagcgcgagtccctttcggtatctcgttaggcgcttcctactttgggtggatgaagaagtagagattccttgccacttaattttgccttcctaaatggttatggtagatatgtttactgacgaaattggaagaaaattacaattttacaaannnnnnnnnnnnatgccgctaaaaataaatattggatttatgccgcttacaaacataannnnnnnnntacttatgccactatttacctttttttttttttaataatatacataattaacaaattactgacaagaataacattacacacaaatattaaccttaaatactgtttatatattatgcaaccatctatcctatatattattcaactttacacatgcattctttgcaattttttttaggcttaatatccaaaagagtaactaaatgatttaaataaaacttattatactaaccagttccaaaaattattaaaaaatattttattattttagatctaaaagttacagtgtaatattttaaataagtctattttatacaataactttgataaattattaaagaataacttatacagaacttacaacatagtttattagcaaaatttataaacatattaatttaacaattaattatatatgatgtcgataagataccaatgagttacttttataaaaatatatatcttcttacttttttttttttttttttttacgtaaaagataacattttagttatttttaaaattacatgttttttttagattatattatattattttgctgtttaagaaacgttcatactactttatttttagtaatatttgtggggtactcatatttgtgttacctttaatttttcgagtataaataatgcacaatttttagatcaattggttatgatatcgataagataaccgttggttaccttttataaaataattcacttaagaagaaatatatctcaaacaaatattcaatttttctagttacttttaaaaatatatgtttattttttggattatattatgttatttaaaataattttaagttactatcataaaaaatatatatagttataataaattacatatcttgttagcaaaatttttaaaattctaaattagttaccaattagtatttctaaagttatacttataatttaagatacattttaaaaattttagtttattgtgaaactaattaattatcgtatagtataatataattcaataaattaaattctaaaataaatattaattaagattaaaaattatagaacgctaactaatcactatatgattggtatcacgagtaatcaaatagtttctttaattatggaaatagtaaaaaaatataggaaaattctacaatgcaccccttaaaatagatatattgatgcacccctatctattttagcatccgaaata

SEQ ID NO: 22603 - DNA, 2983 bp, Cannabis sativa
attttctttcactccaattttctttcctctataccaaacatagtgtaaaatcttcaacagcataactcaactggatctcgaggaaaaagaaaaaagatgataccttagatgtgaaattgttaagaatcaaatgaggataagcttgaggcattgttcccatggttttcttgtccttaatgtcatgtcttgtaacctaaatgagaaaagaaaattaatgtccgaaaatcgttagaagagaataaacaaactagtaaacatctcttattcattctcttagcaatatcgaacttttataagactttcttcacaatttaactttaaatttgctaatatctgaatttcttttctgctcttttatcctatatcattttgtcttacacaatttgatcaactcataaaacataactgacttgagtacataccacattgagtaattggaaataagcagttggcccgtaaggcagatgacttataattaagccatctggcactccacgatgctcatggaccaatataacatctgtgaaatccctacgacgacaggattcaatcatttcagaaataacctgcatatggaaacaatttctcaataatcaaatggccgaaacctcacaaactaattttggctgtaatgtaacctcaattacataatcactgattatttacatttcaccttaatcgaatctttaaacatattgccaacaatacatgagaagtaaataggaaaacaaactcaagaaatgagcaaaaattatgatgaaatcatcaaacatattgccaacaatacatgagaatttatcctaatgagaactagtactcttgctaaaatatatgaaaactaagagggggaagatttccgaacctgaccaccacgatttgttcgtaatgaattagggaacacaagacttaactcctggaaaaacaaaccaattcttatcaaattcaattcaagtataagatataacattgcagaatagatcggtaccaaccaatgcaaatgaacaaaaacaaagaaaaatgaaaaagtcaacctgtgcaaactgttttaatggagcacttgggttcctggatgtagttatcataattctaggatccttttctgctgaattggcgtactcatcatctatatgactccttggaactaatatcacaaacaccaaacccaaaaagaaagcattttagtttcaaaccaattactaaagcttactaaagactaaactaaacactaaggtggcatttggttagaggtaatgaaatggaaaggaaataatttttatttctttttttttttttttgcacaaccattttctttcataactagttataactacacaaataaaagaagaaacaaaataaaaagggaaatacatttagtaattagaaggaaacagacaaacttttgtcagtcaccacaatacttagtactctttttttggtttgttttatttattttttcttttaggatttttgcaaggaaagtctctatacacttctctatttcccagaacttccataaccgtatatgaacttagctgatccttcagtgtaaatgtgagtttcattgaaaagaaattttcaaacagctttgctcaaagtagatgcagaagtaaatgtttttccatcaaaatatctgttctctcctttgattttctgctcgattcttatgtccaactcatcagcattaagcacaaaaggcttatccgaagccatgacccaaccccaagtatcagcataggaaggaatatgagctgagtaaggcacaacatatttgaaaacttgtaacacttctgtatggctaaaaatcccagctggaccagtttgtctgacaagagaacagatatgcaagagaacacttctgcatggctaagttaatatgcggctaattttgatttcattcctttgtttggttgcatttcgaatattattctaatggaatgactttttaattgtttcggtagaatgactattccattttgacaaaaaatttaataatttttcatgcattttaaatttaatttcattccattccgttcctattctatgttttcattccaaccaaccaaacgacacctaatatcaatacaaacccatctataaactaaaccaaaacaataagaataagaacataaatcaaagaaatccctaattcaagctatattaacttcaatcaatacctaattttttttcaaatagcaaaacaataaccaaaaccataccagcagtactttcgtcctcaagatcaatttcatgacgaagggcagcctcttcgttcctaagctcagtgggaacttgttttccctctgcaattaagaagaaagaaagttaatttaagcgtgattcgattacaaaaatgtagaaaattgggagttttttgttatttcttcatcaaatttttttttttttaaaaaaaaaggcgaaaccttctttgatttctttgattttgagcttcttttcgtagaggattcgagctttgccttctaagctttttctgtacaagtactccctcctcaaccgaatatttctacgcaacatggttgctcagatggattaacctaacctaacctaatctcaactcaatttctcagactcaaactacagagatggaagtgcagagaagatctcggggtttaggtttagggtttttctttcttttccaacgacgccgttttggggttctctttttgttataaacgatgtcgtttttggtttttctttactcttatgaacgacgccgctttgggatttttgtggtttaatattctttttagatctaaacgactttgagaattctcaggtttttctcttttctgacaatatataaaggttaatttaggtcaaatcatgttttctaaaatttgtaagtcgttaaaaatttctctcaaattattgagattattaggcttaaaaatttttgttcaattttattaaagaaaatttgatgtggataaaaattttaagagtacaatttagtacatgttaaagt

SEQ ID NO: 22604 - DNA, 3602 bp, Cannabis sativa
tttttgtatatacttgaaaaacctcctaagctttttccttttctattctttccattttagaggagaaaaaatttggtagaagaggccccttaaaaatttttcactcaaattttttttactcatttttctcttcttttggaggcaattggagttcgtgaggctcttagctagattaaagataaacgatggcaacaggtggttcttgagacagactgtttggtggtggtacaagctattcgtaatccaactcatatgatctctttatttggtgatgtaattaaagagtgtcaaaacttgcttgtgaatttaaggggtgttactatttcttttgtaaaacggtcagtaaatttagtagctcacacgattgctagagatattatttcttatcctgatcgtattttcagtatgggggatgtcccaactgatttgctactatgttgagtggctgagtttgaaagttaaataaagtttgattactttctaataaaaaaaaaaaaagaagttcactttttgtattctctacttttttcttctataacataattattaagaattaaatattaattgccaatagctatggctaggtagatccccaaagtcaaaatagccaagtaaagaagaatgtccaatcaatagagcaaaacaatccattaggtaacactacaatttaatggttgtcattgtctttaatctactgtcgcatcacaacatcacatctatccacatatgttttatgttttgattaattaataattcaatgtttaattgtatactttagctaaccagaaactatttagtaactcatctcataaactatttagtaactaaaattataaagtattgtagttataaagattaaacaaatgtgtaactagttacaaagctttacactagctattaataaatcatgcaaaaactatatcaattaccatacccaattgcatatacaacataattactatatttaggaacaatattttttaaaaaatatatataaaaaaatatatacatatataagcattagttttccaatccatatacaaatattaaatacactacacttggatttaattatttttttttcatttgggtaagtttcattaactatattgaagactttaatatgactatctcaaaaagattatgtaaaaaatattttttaaactttataaacacattattatacacgatttttatgaataaattctaaaatatttttcggattaaagctagagatatttacttgattttatggaccaccaccacttagtttccgactaccatcatgcatatatatcacaacaaatcttaattatatcattacaaccaacaaaatttacaaagacaaaaacaatgcaatttaacctaaaaatacatttattagaccgctaaaacatcgacaacaccaaatcactccaaattgtcgttgccgatcacaaagccacaaaaactattgcctaaatttcgcttcatttactctcaaagtcctaaaataaattataaaaatagtttattttgtttttttggaatgggaaataaagttttttatttttttaaaaaaaatggactattatggataaaatgggaataggttttcgacaaaaacggggttttccaatgagagaaaagaaagagaagagaagacaaagaagaaagtgatcaagctaaaatctttaaatcaccataataaagtatattattttcggttattatgaaataagcgaaagcatagaacgaaggcatataggcctccgagcctatatgtattcaaatttaatttatgttgacctttttatcttcaattttctaatagaactgaatatatacgtaaatttttattgagcaccaaattgaaagtctttttgaaaaatccgctacatctgaaagcatcccaaagtctacctcagttagtcaccatgaaagtttgggaactattcgtctcaactattaggcaatagagattggatcgagagatgtttgttctaactaaatattatttttgataaggacttctcaacataaaatttaaggaccctttccttgtattggttcattcatgtattaattcaataagataataaatttttatttttcctatatcatttctttaataatagttatgttgagttttataatttactaataaatatctaaattgtaatatgtacttgagcatttttattatgttgtcaacaaataatttagattttaaattgattacatatatgttttttttaatatatataggatttccaatattatatataactttcagaaatcataataattggaaattattttaatgatgatatataaggttacgatcataattattaattatatcaacttgatatttccttgaggaagagataatgatagaaggcacaaattcgaatcttactcacaaatctcaaacttgtcaaagagctttcaaacatcacaaaaatgtaaaaaatatgtgcatatatataggaattgattatatatatataataattatgtcttcatatataatagaaacagtataataataatgtctacagttgataattatttgagatatagatgttttcaatattattattggctgtatataacaaaccaaggtatattattagtttgtcacgaattatatacgtatattagttcgactagaaaatttcaattttgtgttgtggagctattattcgtaagattcttttttaataattaatattttatttggagtgatgacaaatcaaagtgtgatatgttcatcttgtaaaaatattccatgacatatacataatcatttcaatttatttatttaattttataagatatatattgtgattaattgtgttttcttgggctgatgaaaagaatttattagtgcatgcctagtggtaataaaaaaaactatttttagtgacaatcttttagtcataacataatttttttttttgactaaatgtgatttttagtcacaaaaatattacttgtattaacaaactgtgttgaggattacagtcttttgatgttaaaagttcaggctattttttcacttggactaataagcaagaaggaagagccttggtttatgcaaaattggatcgtgttctatataatcaactttggatagatgagttcccttatgtggctgtgaacttttttcctgaaggtgagttcgatcatagtcctgctctcttatctacttattctttgcaaagtggtgaagctaaaccttttcgattctttaatacatgaatcattcaaaattttctgatatggtttaaaaaaattggaagagacatataactggatctactaagccttttcgatttttaaattagtgttgaaggatattagcaagtctagtttcaaagacattgaagctcaaaaaagtcaaaactcgaattaagttgtatgagattcaagaacctatccacatggatcctttgaatactgatttgattgagaaggaaactgagctagaaaatagtatatgtaggtcaataaatctttcaactccttcatgagttagaaagctaaaacatattagactagaaatagtgatgaaaattctaagctctttcacagaagcttgagaatgaggagagctc

SEQ ID NO: 22605 - DNA, 3864 bp, Cannabis sativa
acggcaagctcaaactaataaacaactttcccctgggggaggagtattcacattatacttggattgcaatgttttaaacagccgtgtaagcataaataagaattcaagagtacgggaatgttcgaaggggaaaaaaaaggccagagatgttttcccaaatgtaaaagcttattttcaactgcagtagtataaaagcattaaaaatacaactccattccatggtagtagtgaataccttttcaatgacttcctggtcctttgtactaaaaccactagcagcaagttccttatccagaaaaatagcatcttttgatattgaagaaaagcaaagtctgttactttcatatgtcccaacatcttcgccatcagcatcgacagtgtactcatgaaaagacaaattatacctaacaggaaaaggaaaataaatgtgagagagagactcaaataagtctttgttctcaacaattcgagtgaattatagctagcattctaacagagcaaaataaaggaaaacagagataaagaaaaagtgtaatgtaatataacttatgcaagtttctttctagaagaaaagcagttagccttgagaattatgacctctcaatctgctccatttgcagctcttttgatttgtttaagtaattttgtcttaaactacatttcattgcaattatatcctacatcaatgttcaactcatacttttgtatgtatttaattttctctataacttatgtttcaaagactacaaatcattctaagagagacagagagacatacaatgtatgtcatgaaatgaaatggaacaaggatgttgggtactgagagacagagagacatagtgtttggtgtgggttccttaacattaaaaacgaaaataataccaagtgaaaaagcagcatcaaactagagccacatgaaacactactagctagaacctttggagttataatctttcattggaaaaacaaaaaatcaagaacattaaattcagaagcttctttagcaccaggacaaaagaaaaataactcggaaagatatataagaactatgtacaaatcaataggtttattgatcacaaatgaaaatatggaaatgactaaactaaagttaaacagtaaagaacaataccactacagccaggccgcagcatagaagcataattaaaccaaaaactacagctaaattcttttttttttcgaaaaagaacttcagctaaattcagaataaaaaaatgtgatcatttaaaagttttcggtagactaacattattaggctattaaaccattaaaagcatgctatcaaaatgatgtactcttatcaatggaagaaatgtaagagttcttatacgagtcacaatctcaaataacgattcacttcagtgagtgaagcatatgaaaaagcttccaaacaaaaaaaaaatatcaccaaccttttcctaaagaacttgaagacacattcaacgtctcggtcaaagtacctgaaaatgagggtttatgagcgtaattaaataatatcgtcgcatggaaataagcacaaaatgaatatgattaatattgaaagtctttaataagagagttccttacatctgtgcattacgatgagatacagaaaccatttgaggaaaatcaatcatggtgattttctcatcatcgtcaatctagacagaaaaggcaccaaagagaacacccatattaaataaggagatcaattaatgtttatgatctaataaatgagaattgtcatatttctaaacaaataaaacccccaaaagtaatggctttacaaagtgccaggagccatgtaccataccattaagttaaattcattaaaatcacaatggatgagaccatgttcagccagtcgaacaataaggccaacgattgtctcaaaaactggctctggattttgcaattgcttcacctgcacacttcatcagacaacaatggccactattagatcatttctagctcgctggagcaacataatattagttttcacttaagcatgccacgataattgtaataataataacatatgtgagaaagaaagataggagatagtatgaggacaagcacaacgagctgttatttcggacgaagtcacatttctggctgctgattgttacaaaacagaggtggggttacacattcagacttagagaaggattggagtactacaatgtgtttcctagtaaagccttcaggcaaatgcttgtattgtactttttttttaacttaatgtgtcaaatatataaaattatttacttaatatattaaatataaaataatttaattaaaggggaacacttacagtgggtagccttggacaagagacataatcacacaatgcctattacagtccacagcatttggaacaggaaaaccatgttctcccaaggcctattcaaacaaagacaagtgtcaggtcggtaccacattataaactacccaatagaaattcataaagatcgcatcttacaaccttcataaatgcaaactctttgagtgcagctagtctggacaaatagagccaattaaaattgttacgatgtctcagataatcacgcttagatttaacagccctaaaagaaactctgccaagtcggtgcaacttcattgctagcactgtaccatcctcagtggctacttcaaatatatcttaaaaaagacaaaaagatagtatgttatttaaataattaaacaatgcagttatttttttttctttttttggacatttaaacaatgcagttcaatatatcttagatttaccagactcttttccaacaccaatttgacggccaacagcagcaaaaaccccacgattgaccaaagtcttaattgcgagaaaatcataaccaagataagtgaggcggaatccatcatctaaatatggacaagagcaaaaaaaaaaacttaagaaataattaatggcaatgtaagaattcaacaactgcacaacgaaagtaaatgctgacattttgaagagtcgtggtgcaacaatttatgcttgagcaaattcttcataactttataagtacctccatgcctatggtttaaaagtgtccaaataaatacaacataagtataaaagggcatacattttagtaaacaaagagaaaagcaagaagcgtagaaaaaaaaaaaaaaggtgtacttgagggcagctatgcggctgatgagctcagaaggaactatttcatgctgaaagaaaatcatgacaaggtgcatcattaacacaaataaagagtgaaagcaaagacaaagcaattgacaaaagtaaaatcacaattacatgaagtacatacattcctcattcccatctcaacagcagtgagaaccctgaaatcttctttcgacaaatatctgagcatgttcacatcgagcttcattgttgacttcttattaaagcttaccttttagcactgtacaaaaaaaaaattacaacacagaatagaatactattacttcaaatataatacatatccatgtttccctaacccaatcccattcaaactcactacagctataaacatagaagaaaaagaaaaaaaaacacattctttatcaaattcattgtcgtgaagctaaggcataaattaaactacagcttcagtttcttactcagaaacccaatttcaaactaggtttaaatagcaaggatccaactttacttcctcatgcctggagtaaggtgtttatataagactatctaacgttatttgttgtgcttttaacaaattattactcaaacaataatgaacagttgcataaatttcatgtaaatttcaaaataagaaattcttgtcaattggttcgactgtgaataaaagatgattacatgattacagcataaaagaatcaaat

SEQ ID NO: 22606 - DNA, 3309 bp, Cannabis sativa
  modified_base (2679)..(2690): a, c, t, g, unknown or other
tttttttaaaaaaataaaaaagtaaatttaatctttatatttatctcattatcacaataatttaaatataacaattgaatgtgaaaaaaataaaataaacattagtgttcagtttggacgggttaactcgactaaaccgccaaatttattgggcgggttgaaattttttttttcttaattgggtgggttgcacttaattagatttttataacccgatctttatattggattaaataaaatgtaacgtaaaccgaccaaaccgaccaacgtacacccataaaaataagggggagagggaaaaaaaaaagaaaaatagaataattattgtaatgacaccaacctaataattttttattatttttaacttcgaaaaagtaaaacttttttggtaaaacaaagtatatacacacatatttgatgacacacatatgtacaatatcctatcaaactatctttcattatataataacgaaatgtaatccattaattaccactataattatacttttgttgatatatagtcatgtataattaagtatatatatagttatgtattagtgtgaattaagaggtatacgtgtgtaaagcatgtaagtagaagaccaacaaaaaaaaacttggaattgaaatttcaatgtcaattaatgtgtagtaaatgaagttaaagccaattgaaaactttaaatctaaaggagaggtaccatatattatatgtatgtatgtacatataaatgcactattttggttatagaggaatatataggtaggcttattatttaatgactttacggctagtatgtttgccacttcgcaacaaacattataattgaggtgaacacagcttgcttgctataaataagttgcctcagttttgagacaaagccagactatacatagtttcattttggtacaatgtgcctaaatgacatatatataggtttactatatatgcgtttaatctttgaattcctcaaacaccataacaattatcataactatattggtagtgtaatttaatatccaattacatattttttttttaataaattgacgggtgtattaaaacactaatgaatgtcaatattgtaacagtaatgcccttattttaaataattattataatatatagttttatgataattaattaattcatatatatatgacatcaatctacaataatgaatgtcaatattgtaacagtttttatttttttcttgaagctttccctgttacgatctcatgtcacctatatattgtctcactccaatgtttttcttcattcattaattcatcttgtagtgatgatatcatatataatataatatataatatataatgacgtaagatttaggatttttaaataaatatatatctagcctataaatgaatctcacctatatgtatattacatatttattatatataaatgatgcaattatatcacagaatacaattggaagatgctgcttttacgtcgacgtacaacttataaattatatattggtattatatggcaatagtaataaaaaaactacatagtacaaagtgatcataacgttaatttcttataatttattaactctttcttcctgattggcctcataatcttttcataaatatatcatataggtatgtatatatataggtgttctaattacgagataagcagggttcatgaaccaagtgaaaaagtttttttttttttttttttaattaattgttgaaagaaatgagagataaagcaaatcctagggaaaaaataaaaaatagaaagacaacagtgataaaatacgaacctttccaaaattatggaagagacaaatttaaaaaaatatatatatatatatatatgtggtgaaatataagaagcttttccacatagaacttatgataactagcctcactaaaaacttccaaacaaacttaagataacaaaaacttttaaggaaaaaaaagactttcaacaagatatgatatacatctaaacgaaaacaaccaatctatcacaaaaatcatattggcaacaaattgaaaaaggagataaaaaaatgactattttccaccaaataaagtcttacaatgcatgatatactacaacaaaaattagtttttgtgacggtcaacactactgttcatagggttgatcagctagtgtgcaaaaatagagctgttagttacaaaacgacattaaaaaaatattgattagcattatttaacaaaatgacgctacaaaggaaaccgacgaaaaataaagcaaggaaaaattaaaatagaagaccttattctcgtgagttcgaaaatatcaagtaaaagttgtgtgagcttttataaaacaaacaagaaatgaaatgtctaaattaagttaagaatcgacgaaaacaacatttaaatccctaaacccccaaatatcgatcctactgctcacattcttcttcaaactttgcaaagacataaaagctctgacgattggacattccctctctcttcctctccattattgacaatttgcagtgtgaattttacttctaccaaaatttttaggggttttttcatttttacacttcaaaataggtttttttttttacatatttatggaattctacatagaacccatattgtaactagtgctgcaacctaaattgcaataaaaaatcgtataaaaacccctattgcaactannnnnnnnnnnnctttagaaacccaaaccgtaaataaaaaaaaagtaaaaaagcagtatatgaagtaatttaccaaatttttattaataagatatatatatttattatataagattatttgatatattagatatacatttattattaagttttactccaaaaaaattatctccaacaatatttgttgtaaatattcctttttgttatataattttaaaaaaatgtgttgagagataataacaattttttttttatggaaacatatataaataataatctaataataatttttgtgaatgtataatatgtttgtatatttagtactaataaatttgatttttgctagattaatttaattaaataatattgcttatgactacataatcaatttttgctgattttaataaattaaattgttcttgtagtcttctctgtacaagttctatagctaacttaatgtacctaacctaagtttcatcttggaattgaagcaaagatattttttatacatatgtatttataaattactttatttgtttcaagacttgttgttatagacatttcctgtagcataaaagtttaatatttaaacacctttcaaattgtataattttattagaagcatataaaa

SEQ ID NO: 22607 - DNA, 2973 bp, Cannabis sativa
  modified_base (1910)..(1918): a, c, t, g, unknown or other
actcttcaaactaaaattaaaacacaataacatgcatttacaaattaagtaccccatagtgagtcacattttgttcaaaaagaagtaaattattattattattattattattattattatttaaagtggggttggaacaagttacaaaaatgaatgtacacctaaagtttggcgtacctttcattgaaacaaccgtgggtccaaatgcaattttgtatactctaaaaaggacttcataacaaaatattaaaaacaccattccaacatcacttttcctactttttattttaaataaaaatataatacattcatattaaataattagggtggattggttcaacttaagaaaaggtagttgggtaaatgttaggataggggatgaagttgactttatctaaaatatatatttctcttatattaaatttagctatctagctctcaatctccgtcgaagtccaattgaagcttcaatcttcgtcgacttgaaagaaaagaaagacagatctcaacaaaagagaagatatgtctgaatgataaaaccaagacctctgttgacctttctttgcccttttatgtcgatgagaaagctagagagaaacgaaaaagaaacgagggatcagggagagagatatgacatgagagggagagtgtcattgggggttaaggtttctcggggttagggataataatagtgcggcccatttgggctgaggattgccgacggtaactccttaggaactagggttggttgttgcacaaggagagagaaaaagagggcatcagtttatgtggggttcgtggcctaaaattttatttcagggaaaaaaaataaatgaaaaaaagaaaagaaaaaaaattaatagaatataatatttttttatatagttcatttatttatatacggaagtgtaaattgaagtttttagataaaagtgttaaaagcaaaacgaaatggagttcagtaaattttgccatcaaaattttaatttatatgattaagtattaaaaaaaataaaattcaaataattttactacaaatattaaaaaaaaaattaccaaaaaaaaaccataatcagaaaactttttattgatatttattcctattattatagaacttccaacccatgtcagaaatcaacaattttgaaatagatctcatttgtaataaagagcttaatatatgatcaaatatttgagtaaatgcttggaaaaaacaaaaaggtcaacattaataaaactacatatattaatgtaaatatcatggaaaagatagaaatgagaatgaaaagactggaaaaattaaaataagcaaaatataaaaatgaaaaacagaaagaaaatgagtgagagatatatccaaaccaataagatataaaatatttggttttttttttttttttttttgctcccacacaacacaaccattaattcaaattccatcattggagaccaaaaacacacaactggtcctacctataattattaagctaactaataattaatactttctaaaaataataatgaattttctttttgattgttcttatctttttctcttcttcttctttattctacactccctttaagtttcaccaactacaagttaatttgattttaagaatccaagctaggtttagtttgttctttttctaataaactataattagggttagcaatactaaactatatataaattatcttagataagttattagggaaattaccttactctattttttttttagctttatataatgtactatctttagggaaattaccttactctatttttttaagctttatataatatttttagggaaattatcttacacagattttagtttcaatttaagttgacttagtaattgttataagagtttatgtgaaattctgtaaaaatacaaaaaaannnnnnnnnatatatatatattttaaaatgtaaaatgaaaaatccctttttttttttcagggaaattagcttttttttttttttttttagctttatatagacaagtttacataatgctaattttgtattattgaacatggcttattttttgccttaattaatattgagaattgagaactatatcattgatttttcaacgaaattaattagaggacttcaacaaaagttgaattgtaatcctggttttatttattcaattatatgatgaagatatatgatttgataaaaacaccattttctcattaaaaaaaaacaaaacaaattaaaattgataaagaagttcgatgatcaagttgttactaatattatcaacattgttgggtgctaatggtgcagcttgatctatactagattttattgttgttgatatttggtgatcatgtagggtatatatatatataaatacatttatatataaattatatatatataatcaattgagaatagtgacaaataatgtaggctattgtatataataatagtttggtacagttgtattgtggggaaaaataattgtaattgtaccgtgagaaaaagtaattataataaaattagagaaaaacgttgaactgaatgtttaataacttataaattttaaactactgaaaatagtaaagattttattataataacaataatattataatctaattcattataatcacaaatataatataaacaatatggtatataaacttttttatttttaattattttttccttgtagtataaattttatgcatttgataaaaataatttataatatttttaattatattatatcacttataaaaaaattatagtttataaaaaatgttagttgatattatttgttaataatataaatataattatttaactaataagatagagtattttataacaatcaagcccaagaatatcggcccacctacaagaacgaaggaagcggctacgtctcttgcttcacgaccaggaacgaacacagcaactataggagcgtcgtcttcctcgcctcacgtccg

SEQ ID NO: 22608 - DNA, 3819 bp, Cannabis sativa
aaaaaactataaatgtaactcatagctattggagaaagcaaaagaaattgaaataggtggtcgtatcaatcaaacataatttaattgaaaattggaaaagggtcagccacaacaagtaatgccaaaaatcatatacaacaaattgcatgaacactagagccgaattctttaagcacactctaaagtaatacccaaaaaaagatttaccatatagaacagcagatactatagcgacaaagaaaatagcactgcagtatttactagcaacgtaacgcatgaacgaaggtccaaattaggtttcctacccgcagtaaataatacatgtatactgaaaaccagaaactacaatgcaaaatttatagcaagtgtttcctacctgagtcctgagatgaaaaggagagtgggtgattgctgccttgtcgtgccgatgaggagaatgtgagtttcagcttcgtgacatagagatggagatagaggaagaggattagggttttgaattttctaggttgggtttttacttttttgagttttaaataataattttaatttcatttaatgttttttaaaggcttaattttaaaattttatatatatataattaaaaataaaatacaaaagataaaagacttcttgaagcataatttaaaagactaaattttgtgaggtattatactgtaaactttttagtttaaatttaacgtgtcattaagttaactattattatagactatttatgtgtacatttttatacacgtaatattaataaattaaatatttttattttaaaatttattttaatggttcagctcctttgtatatagataataacatactcttcttttaattgtattatttttgtgagataataccgcagattactaaagagtataaagtgatttttagtttcagctctcaaaatgtttatagagacgatgtttcactaaagtgttcttaaatgtgcaagtacaaataaaagtgtaaaataaagaaataattatgataatgtattttaaaagatatagtaaaaaaattagggtaaatagcggcataaaatatctaaaattttatgtttgtaagcggcataaacccaatatttatttttacccaatgtttataaaactgtaattttcttccaattttgtcagtacatactctgttttaaatttattaaaagaatatttagaagtaattgatactatatatttttatctaaaccagatgatcaaaaatttaagtcttatatgtgccatgtttaaaactgataaaattagagaaaaattacagttttacaaacattaggtactatgcctctaaaaataaacatggggttacttatcccactatttaccaaaaaaaaaaagaaagaaaaaagaaaaaacttagtaggagtggtacgagtaaaatcatagttaagagagtttcaccttttatgctctatttcacagtgcaactctttctcactctccaagcggaggtcttcctcagtcatcgtccacctgaaaggggctgaaaactactcaagtcactccctcacatccaacgccaacaaaggcaggcgctcctctcctctcctccccgcctggaactgagtcccaacccaacggccttcctcactctttctccttctctgccattggtgagttctctacccgcaactcttttcttttcaactcccaatacaaacaatacccatcgttcctatgatagttaacaatacaaaaaacgacttccttattttatgagaaacttacggaaaatttcttgtttgttagtgcccaatgttgcgggatgacaaggttttaggttaagatcgaatgctttcctttgaatttctttatgcagaactggatatagtgatggcgtaatcaatttcatttttgcgttctggtattgtaaatattggtcatatctatgtttctgtcatttttgatctcaaaggaaggtgtttcaactataacctaaaatgagtaaatgatctctattttgtattgtgaaattgtaagctttatataccagattttggaatggcttgacttgactgactcacattgttgaattgtgagttaaacttcagagaaaattcaaaatttgttagttttatatatgtattatataatataatttataaagatgtattgtgactgtaatgaatttgaatttgcatttaaagttggtcagtgcttgctgccttcaactgattttgcttgcacattaagtttaattattgttagtttctacattagtaagttcattttagtgttaactagaaaggctttgacagattcaataatgaccaagtttgatgtgttttctttctctcccaaaggctatattgcaccttttaatcagttgatattccaggtgtaaagagttaaggaccaagaacactaattcgattagggttcttttgcaactcagacagtgagtaagtttaagaggggcaagtacaatggatttctttggggacatggaaaaccaaggttctacaatggcaatggatgtcgacgatgttgatcaacttgaaattctaggtgagagtgtcattgctgacaataagctcactgatgccgacttcttcaactcttttgaagatgacttcgatgattccaacatcaattgagtcgagcaacatgttcatcaatcacaacccacccaccaacccgccatttgttttcaatgttagtttgtaggggttagttatgtggattggatttgatcggatcagatgggctcagctcaatcaagaaaggcactgcaatcaaaatggttttatgggaattcagtttgctttgagtgactatactttgatttcgattgatctattttgttcaactcgattcttggctttctttttctaatttgtgctttgctctgtttttggagtggtaaaatattatggtatgataaatcttctgttactttcttgaattgtgagatctttgggtttgtatgaaatgctagtttctctgtttgtttcttagctttgtgattagaatctcaattctcctttataaattacttataaaagacaaaacacatgtgaaacattattgatataaaagtaaaattccaaaagaaaaaaaaatcaaaattaatttatacgagctccaacataaattgtttacgctcaaagaaacttgagtaagaaaaatgtgatcaagactaaggcctttcaacacaatcgagttaacagtatcagcgagagccttgcaatcttgagctaacttctccactaatccttgaaattcttttgctgagacaactaagcctgattgacacttttctattgaaggattagagatttgaaacgacgactcgttttgttaggtcaatatgctaatgagttgagtgtgctgtaagtagatatcataattttgttttctagatttttaatggcacctttatctcatgttcccgcaacattaataatactgcagtttataatttggttaaacatatttttaagataaacaatgagttatattagtctgaactttgaagaggttcttgcgtcaaatgacaatatcttctcaagattgtcttaatgtgattctgatcactttattaaaagcgaaagaaagagaaaatatgttaaaattaagacaaaagatccaatttaatatatcgtcaaatatgattcaaacttgtttaatttaaacatatattcaaatgttgagatgtgagagttagactttattttagaagaagaagatattataaatcggtaagtgattaaatatctccaaaaatatttataactttaatttcaagagataaaaaaattatttttctgtaaggtgttcaaaagtctctaagaat

SEQ ID NO: 22609 - DNA, 2472 bp, Cannabis sativa
tgagagactctaaaatgctttagtgacacttcactgcgtgtcactaatgtgggtgactggaaaagtagtatatagtgacacttcagtagagtcagtaaatcattttaaaatctcttcattcgcgtcactatagccttttagagttattaaatgttaaactctaaaaataatagcaacccataaagagtgtcactatatcatgtaatttttttttttaagaaaataattaaaatttaaaaggaatattctattttttatttttttaattttattttttaataaaaaataaacttctttttttttgaatttcttaaaatttattttattttttaatttaattattaaatattaatttaatgtacaacacaatcgataaatattagaaaatcaaagtacagtaaataaaacaaattaaaaacttaaatcaaagacaaattccaaacttacacaaatccaaattacactatttaaaattacaaaaataaacatagtgcaaataatttaccagcaacattaaagaattcacaaacataatatacagcataatatacaacaaattagcaaaattaaagaatttacaaacataatatacaacaaacaagctcctgccttggccctagcattctcttgccaaagcgaaaatatgtatcacacaaataaaattccacctttgattgggaagtttgaactcaagaccactctattaaaatgcaattgtaaagacctgaaaaaaaaaaaaaaaaactccagaataatatacaatcccagaaaaagaaaaatcaaaatattataaaaaaaaaatgggtttcttaggtcggctcttcggtcatcgacgagaaacgcataaatgacgagatggagagatgacaactgattaactatagacggcgactgattacctgcactggagagacgaatcggagacgacgaccggtcgaatagagtttcgggagatggggaacgaatggacttattcgatagagaaaatgatggaaactccaaggtatatgctgcgaagcatgaacaaagagaataagaaaccaccattgcctctttacttagagaaatcagccattaccattgaatggtcaccagctgcgcaagaagaagaaagagcagcgatgagatgggggaagaaagagaaaaggcgtattttttagcacctcttttttagcataatgataatagggtttcaagggagagaacccattaattattttttattttttatttatttattatttatttatcaattacataacagttttttttttttttaatttataattatgatatagtgacgcgccaggtgggtcgagatatacttatccaatcgtgcctagcgcgtcactatattctagcatttttcaaataaataaaaattagaaaattttgagttttactctttagtgactctctatatttttagtgacacacattatataagactaacactgaacatatagagtctaattatgcatgtcactaaaaatcactcctaactctttagtgacccgcacttttgtgcgtgtcactaaatcgtgtcactaaaaggctaaattgtagtagtgcactaatgtgggtgtcaggaaaagtaatatatagtgactcttagtatgtgtcacttaatccgtttagactctctcaaagcgcgtcactgtagacttttagaatctcaaagtgtgagactctaaacacaatagccacactctaagcgtgtcactatatctatttttattttttaaaaaattaatttccccaataaaaccacattaacagagtgtcactatatcatatttttgtttaaaaaaattacataatatatcaaatttattttaaatatccccaaatttattttagttctattttcatttttaataaaaaaaaattaaatttaaaacaacaaaataaaataatgtgtatattaacaattaaaacattaggaacaaaattaatgtgtatttgttttcttataattaattgtacctaaaaaaaaagtacataaggtatgaaaaaacttgaatacaaattttaataatttgaatccattatacagattaatcatatacccacaaacccagaaatttacaaacttttaacccaaaacaacaaaaaaaaaaacacaccaatgagtgtaacaaacctagaaatctaacaaaaaagaatacactgggtttattcataaaagtttaagacataaatcaactcagaaaattacaaactaaaatttaacagaaaaatgaaaaggaaatcaaattcttcatgaacgccgatatctaacgatcgagcttcaaacgcaactaaacacgaagcttgacaccatgaacaccgagatgtaatacgagcatcaaactccgtcttcttcgaccaagaactcggacaataagcagagagagagagagagagagagagagagagaaatagataaatgagcaagaacagaggtgaacctttggtttctaggttagaact

SEQ ID NO: 22610 - DNA, 2216 bp, Cannabis sativa
atctaagttctctatagccttaggggtgcaatattgccttcacgcttgcccatttgagtgtctagctagcccttgaggtcaggttggatagcagtgatttagttttgaagattggctgattagttattgattcacctcttaagtggtatccatcattttgggaatttcgtcatgtcagttgtttagatggtcttggagatctggctcgtttctgggaagagctctatttcataggtcgctaaacacacctctcttatttacaattttagcttccacttttgttcgaggtgacttttcatgtagggacctaatcatcgatctttctccctttgggcgaggttggggattggcctgcttttcttagttcccaagtgctagggggccatggttcaccttgggccaattcgcacaacttgttgcttgggcttggggactaagggaaccttgcgaccttggcaagatttagttaatcacatctttcctaaacattattattgtgacaatgatggagcgatgaccaactaaagagaataaataagttataagagagcaaaacatattgagcgtaagtcctatcaattattaaaggaataatacatagagtggatgtaatcatagagaagatcgaatcagcaaacaacaatgtgactcttatacacgggtacgccattttgggtgcttcctagactaatgactgaccctacagaccaaccatagtgtttccagcgtgctttgtccccactcgcacgctttctataaaaacttcttaggaggtcacccatcctgaaattattccaggtcaagtacacttaacggtggagttctttcgtgatgggctaccaaaaaaacaagatgcaccttgtttatagagatagtaccaatcaatctatttaagtcctcttcaactatgtagtcccatacctacacagcctcagaatcaccacacttgaccttcataaggctatgtgggattgcacaacttacccagtattctcccttactaatcacaggactactgactgtcacaatcactccccttacgggttcgatcaattatatgatattatttaagaatacctgaatttaagactctatttatgtgctcgtggcattttagtaattttgacttgaaaggggtgaaatggtaattttgttatatatattgtgctaatggactgcattattatgtagtatgtttcatttattgtgttacaggtgaatttcgacaagttagcgtggcatggtcacaatcaggtattttagctcccttacttgttatttatgttgatttttagctttaagggcaaattggtcctttgactaaaacttagtaaaagagatatatgttttatttctgataactaaaagagaagttctattttctagtttgaaaccctcctcaccaactttctctttctcttcaaattttgcaattttgatcttggaggaggaaattgaagttaacttgttgggtttttggtgtttgagcttggggaaagtatttgaggtagttaaattatctagtatttgcttttcattctaaattttcatatttgttttggaagcttggatgatatggtatttttggtgttctttacatgaatttaaggtgataaatttatggatgataggctagaagctgtatgttgtttgagttttaagtcttttctatttgtgtatttgttgtgagaaatgaactttaattttgagctgaattggatttcttaaagcttagattatatgaattatgatataattgagcttgattgtttatgtgttttaagcatgttgtaattgttgtgtagagtgcttataacactattttggcatgaaaattcaattatatgacttatgtaaagttttgttcgaattggtgtatttttggggttctaaaaataaggatttttaggtttttcaaacccaggcgccgcaaccctcttgaaggtgaaaacagagcattttctcactacctacccagaagcgtcgcggcagccccgcgatgctatttcccaaattttttctcgaatttttttcgtgaacttgttttgaccataacttttgattccgaactctattttggacattctttatatcgttggaaagctcgtgaagagctctattacttggtccagttttagagtcttagttgtgaataattatgttatgagattaggtgtaatgaccgctctagtaatgtggattagaaaaggcaatta

SEQ ID NO: 22611 - DNA, 2458 bp, Cannabis sativa
taattaaaaatatgtatgaatttttgtaaatatgttttcaaatgtgtacatttttaaaattgtatttttttgcacattttttgtaatataattgttcttgttgtacactaatgagaaaaccccttaaattattattagtagttcggataataactagttttttgcgacgggtggggttgttagtagtgcagttacgttgcttacacaataattgaatgctcaagctatgaggttgaacctattgcaataatttctattgttgtgtcttctgagcgggggatgaaacaaaatataaattcttagttaactatgatgctactatctttgtcatctgattttatttttttatttttttttttgtcaaacaatctgaaaattagacgactaattatttgattaattttctaattctaatcctaatcgtatcaccaacatatgagatactcctattaaactctaagctattattttaactaattacttttaataaaattccataatttattaacaaaaaatactttcattcatttaattcaatctcagtcctccacgtgtcatattaggtatactcttattaaagtaaaaattagaaatttaagtcaagtcaactgacaaaacaagtctttccaatattcctatcacaattcaaacaaaaccccaatacgacaccgtttaatagcttcctaatcctaactacttctactgaaaatcgaaagtaagggtttttcaatttcattcgatatgtcgttttaacaaaccctaacccccttttccctcttctctttcccttttctcaaatcactctctttctctctctctacacagtcctagagagagaaaacaggtacagaaggagtggtagtagtggaggactgagtgagtagtacatttttggaggaagttgtagtctgtaacagaagacaatggactcagacgaagggaagttattcattggtggaatagcatgggacacgacggaggagaagctcgccgattactttggtcagtatggtgaagttactcaaactgtaataatgcgtgataagactactggtcgacctaggggtttcgcctttgttgttttctctgatccttctgtacttgataatgttcttagcgaaaaacacacaattgatggtcgagctgtaagtctctctctttctatcaataattcaattctattacttgcattgactcgttctttattgttgttgccattaatttggaacttttgctctgttttattgacttgtcctgttttttttttttttttttgggattttttgttgttgccaattattgatattctgtcttgtttcgtggttttgtcaattgggtttttcttactttttctaatttctttattggacccccccaaaaaaaccaaactttcattactctcctaattgttcgattaggacaaggttttttcgtccaatgtgtaggtaatcaagctttttttgtttcaattaatatgcattgactcttgtttttcctgctggccaattattggtattctgtgtctcgtttgatggtattgtcaatagggttttttgctaattcctttattggcccccacagaaatcaaaattttaatactctggtaatcgtttagttaggtcaaggttggttcgtccactgtagataatcaagcctttttgtttcaattaatatgcattgactcttggtttattgaattttgattttattatgctttttatggctctgtaatctcttgctggttatgtttgctcgatatgatttatgaacataatgtttttggtctccctggctaatatcgtgcatgtgaaacttattattttataaagtcgatttgttggatgtaattacattaagataggcattgtttttgggagaactgatacacttgacacttcttgttttagctatgacatgacataataaggatggcttatcataacatgccatcccctgtttaactgtttttattttgggtgctttagaaggcatttgcccttatgttgtattttattttaataataataatcttttataatgggaattagcattcccgtgggccatggattgtcagacttagcgggacctgacatcaaaacataacaatacaattttgatgtccttttgtgttttggttgatttagttgatgagatattaattacctatagaattcattggagatctcactgaggtgagtcctgaactgagtttggtttctcacaattttatcttaagaggggaaagttgaacaacttgaatgatagatctgctattgctctgaagtatatttttgatgtcttgtaacatatattcttgttatatgtataccaacaaagtcactttttagtgtaggctaatgattaagatattgtcgttatctatacatagtttttctttttctttcccgtgtattatttctcttcatgtgaggaattgttattaaaaattttccttttg

SEQ ID NO: 22612 - DNA, 7795 bp, Cannabis sativa
caccctcattagtgacgcgcgttgaagtgtcactatatagttttagagttacacaatgtgtgtcactaaaactcatttttctagtagtgatatactgactaatctttggactacttattttaaacatacaatcatgattatattctaatgtgactacgtcactataatagatgaatatattaaataaataatcataacaataaacatgtaaacaatatatttaattaaataatcaatttatatttatgttgttgttaaataataatatataagaaacatgaggttttatataggcataaagctataacacctttcacttatcgctccttgctaaagatgtaccatcctgccaggagtaggattgcacataaacaccacaaggacccgtggggaccttcccctaatgaggcggggattccccaacttagcggggatcaaaggtggggacggagctgattttacatacccgagttggaggcggggcggggtcggggaaagtactatctgccccgatatatctccatttatatatatttatatataataattaattattcaaaaaaaaatataataattaattattaactgttatggaaatactttggcttgtttcctcttctcaatattatatcaaaaatttcaaaaaaaaaaaattaatgatatattggacttttaagttttactttcacactataatattgataatttaatatttgtatgataatatattaatgatttaattacattaaatgtaatgactggcgtgtgtaacgtattgattgactgtaatactaatagcctaataggtgcctaggtgaaatgtgatgattggcgggccttgtggctgatttattgattggtaatatatgatatatcgatattttgatatcagtatcacacgctactcacctcaccaatcagcagcaccaagactctaagagtctactcaacggatgatcaaactaaagtaattgtctaattgatattaaatctcaaaatattattttatttattaacttaaaaatatcttagtaatattatatattagtaaattagtaatagtaattgtattgttgtattgtatatgcatatatcatatattatatattagtaatagtagttcttatttttcacacatatatacataccgttttatagttatagtattttcattttcagtttctctcctttgtttaaacttccatttctctcgcatagacaggcacatattgtgaatttgtaattgtgatagtggttctgaaattagaagaaactttgaggtaagcattctattatatttctagtagattttttttttaaatataaaattttatttgtaaaactgatttattcttctttttttttttttttttgttatcattctatattttttgggtagtaaatttatgtttgtcatgtatatataaatttgtctgtatctatttatatatatgtatgtatattttctaagaagttttatcttttgtgtaaacttatatgtgatatgtgtgtgaatgttgttggctaatatgagtatacaactattcataaatttttatttatataattatttttacaatgaattcttagaaagaaaatcccaattaaatttaaaactacatgcaaatgtaaattgatgaaacccaactttagatacagtgaacaatactataactaaaaaaagatagtaaaaaaatagcttggaaatatatgagatgtagatttaatttttgtattttgtattttttatatttttcagttattttttgcagttaatttatataataattgaataaaaatttattttgtatatctttttcaattagatatataaatattgtatacatataaatatatattctaattagtttattgcattaatttttttatgttcatatatattatttattattattttttttgaacaaaaaggatgaaatttttattcaaaagacaaggcaaagcaagctgaaacccagctgctacgcaagaaaaatagctaccagctgttaattacattaataatgtacaactcccttcctttcaaatgttgaaaactacaattcaggattctatatttgatagcattttttatctccctgctcacaaaactaggacccgacaatacatattataccagcagcaatctctattctgccataagaaatacactgtagcagtcatgacagcgtttatcaccctttccagcaagttcttcatcgtcttcgaacaccagtccttccaatgcttgaagtccctcggctagatattcaaaccaaaccagctacctatctcagtcatcaccaatttggagaaatgacactcaaagaaaacatgcttgtgagtctccgaattcatctcaccaacagggcagttcttattagtgatttcttattagtgatctccatcactctactaaggtgatctctagtcaaaaagtagtcatttatagcttgccaacaaataaacctatgcttaggcacacacatcttatgccaaatagtaggcgcatactcagaactttcagtagagatgagagaattataaaacatttttgccttaaatttcccattcttacccacccccaagagagcatctcggttaatgatgtccctgagtctcaagattttcttgaagtaccagctgctaacctgtttaaaagtcagcaaccagaagtcttgactctttagatagatggaattaatccacttaacccaaagattatcttgtttctccgagatagcctaaatatttttggctatcaaagccatattccacttctttccctcttggaagccaattcctccaaactttttcgggagacaaattttttcccaagaaggtaaatggaacttacttcgatttccattgaccccccaaaagaaatccctacaacttttgtcaatggcagctgtcactttcttgggaagaatgaaaaggttcatccaaaagttcctaatccccaaaagaaccgaatgaatcaattacacacgccccgcaaaagaaaggtttttgctagcccaattattaagcttcaaatttacattatccaaaatgcaaccacaatccaaagtcttccattttgtaggacaaagcttcactcccagatatttgagacggaaagagccttcttccatattcaccaagttcaaaatggcccttttagtagcttcattgactcctccaaagtagatagtagacttattcatattagcttttagacctgttgtgtcacaaaataatgagaaagcttcatgaataaatctcagagatttttcattgcccttacaaaagatcacaaggtcatccgcaaaacataagttgacaagcttaagctgtttgcagaaaggatgaaaaccgaagctaacttttccaggatgaaagttcaggattctggtcaagtaatccataacaagaacaaaaattagcggagaaatagggtctccttggcgacgacctttttcacctttaaaagaaccttggagtcttccattcatcattaggttataggaagtaccctttaggcagactaacacccaattgattaatctagatggaaagcataaaccttttagaaaatcagaaactaaggtccagtcaacagtatcttaggctttccttaagtctatcttcattatgcatctggctgagatgttttttctagtgtatcccttgagaagatcttgaaaaatcatgatgttgtgagccaaatgtatcttcttaacaaaagctccttgattatgatgaattatatccggcagaatctcagaaagtctggagcaaatcagcttagatatgcatttgtatagagtattgcagcacgcaataggtctataatcatttgcatctatgggactatctgttttgggaacaagagatattatcgtttcattgagcatggtaggcatcaccccatcttgaaagaactccaacactccttgagtaacatcttccccaatctcattccaaagccccttaaagaaacccgaaccatacccatctggaccaggactcttggaagaatggatatcaaacattgcttttttaacttcagccttcgtgaaaggtcttatgagccttacttgctgctagatgtcaaggatcttaccccgagcaagaattgtctgatctaatcttctggtagctgaactccctttccccataaaatttttaaaatggtttaggaagtgctcaataaccttcgggtagtcttctattacttcttcgttgctgcagtaggataatatcctattttcttgtcttctttttttcaaagaggcatgaaagaagcttgaattctcatcgccaaatttcatccaatttaactttgcatgttgctgcatatagctagtataatcctttttggctgaaatatacacttgttgagtgcttttctcaacaacttgaagactttggttactcgggtttgctgccacattccctttagcagtgttgaattcctctttagccgctttgtaagtgccaattatgtctccctgattgtctctgtgaaatctcttcagcacatgcttggttctcaacaacttttgaacaatacctttgagacccttgctactagtctgattattccagcagcaaagaacagcctctttatacccttctctgttcatccagtaattacaaaatctgaagggaatggtccctaagttcccagcctccacatgttttattatacaatagctatgatctgagatagcatcccatttattcataacaactattttcggaaaaacatctagccacttttcattacagaaaactctatcaaatttagaataaattctgtcccccaagtcatgattgtttgacccggtaaatttgccacccatactgtgaagctcccccacctggccttttgctaaccaatcctaagcatcacgaatatctctgggagtgacctgacgacctccacttctatctccatagctaaacatagcattaaaatccccaaaaacaatccagggatcttttagatgaccaagagccgagagcttgtcccacagtgaaattctttttgtcatggaattacttccatacactgctgtaacataacaactatctttgtccccaaactttctaattttgcaatgaacgaattgaaaatcttccacaagaatctcaacattcacatagctagcttgtcataataacatgattctataagaaataatagggctggagtagaaattccagctcctaaagttattttccatcacatctaacaccatgtcatgatttattttggtttcaaaaagagccaagaaaccaaccttgtttattttacaaacctcgaaaagcacttgatgcttctccttcttattaaaccccctaatattccatcccattaaactaacaccgtccattaactagctgagtcttagttgtttccccgaattcatctccattattctctagcacatcataaccatcactatttgtggccttcggacaagctattttcactactttatgccccttcttcctaggcgtaatccaatcccctgaacctcccgaaactgctatcgacttttccctctatgttttcttcctttcatcattcttcacaatggtatcttaaggttcagctccttcttcaatctcagcatcttttttcacttctgtttcagcctcaataattggtcgttgcttcttactcgatgcactttttttcttccaaacaaaccctttttctttattataattagccatcgtatggcctaacatagtacaagccatacatttagaaggtaaccactcatactctattaattgttctaccatttgcttcttctcattaatgaatcatatagcttttggaggattgtctaaaatctcaatgtccaccagaattctcgcaaatttgatcatcgtcctctcctgagtgaccttatccatcatgattagttttcctatggtgctaacaaaagcacttaggttgttcctaccccaatattgaagacccaagccatttagccttatccaaacagggacagatttaaccatttgggcagtatcaatatcagtagaccatggcctcaatactactaatttttttatcaaaatgtatcacccctgtttcaagcactagatctcttgttgcctcatccctaaagctaacaagagtgaatccagaatgcattctcactatcttctcaattcctaagttcccccacactctcttcacaaaaccttcaaacactctaaaaggtgggttagcaccaagaactatacaaacaatagcatttttccaataggccgcctcaacttcgatttcttccatatctaatttcgtaataacatgatccccaactctcaaaggttctgtaaattcaagtctagtagaaggagttctcacctggtttattttcaaattgctccacatatccttagcattcaattgataatcaacttgctccatctcatctgcccaattctgtaaaacagggttgttcgatggtttctccataactggaactgttcgtaggggtcaagaaaaacctccgcctggttctgttcttccactccatcttggctcgaaggctcttgatcttcatgtacatcgacaatggctggtttagcaggcttcgatacgttcctttttttctctgccattggaagagagagaacgcaccctacgcccaattatatattatttacttttgtttgtgtaagttgcgtgagagtgagtgtgcgccgtcgtaactcttgtaatatatatatatatattaatttttgtattttctatatgtgtatgattgcatatttgtatcatatttaataaaatattattctgtactatctatatttttatgtttaattattttatatattttaccttttagattattatatacagtgtaacaatgagtgagattgagaaaaatactccatcaacatatagacaaatagaaggagcaacaacaccaaatacacctaaggaagtagactcatcaactcctccaaatgatattgattcagaaactcaaactattttggatgatgaaaatattttagggaagagaaagttgacttcttttgtttggaaacatttcaagaaggtaaaaattgaaggagttaacaaggcagtttgcaactattgtcaaaagaaattaggaggatgaagtagaaatggaatgacacatttacatgatcattttaagatttgtcctcgtagaaaaaatcgtgatataaaacaatcgatcttgaatcaaagcaagaagaaggatggaagtacttctcttgctgcccacaactttgaacaagagttgtaaagaaaaaaacttgctaagatgattgttttgcatgagtatccactcaatatggttgcacatgatggatttagaagttttgtcaactctctctagccactattcagacatgtatctcgaactactattaggagggacatattgaagatatatgagaacgaaaagaccaagacaatgaacacaataaatgaaaattgtagtagagttgcaattacaactgacatgtgtggacatcaaataatgaaaattgtagtagagttgcgattacaacttatataaattaggcgactaaagacatctttataaacaatgacacattatattgatgattcttggattttgcgtaatcgaattatcaggtaatataataaattagttagaaaaaatataatttatgccaatatttgatatcaatttatgctaattatttttttttttttgtatgtacattcaggtttatatatgtgtctgcccctcatacaactaagcttctagcaaaagtgttg

SEQ ID NO: 22613 - DNA, 2977 bp, Cannabis sativa
cacatacctatttaagtaaactttgatgttagaattgtcagaggaaagcatttttttaaagaaaaaacaacacaaagagccactaaatcatggtatactagatacacattccaagtagagcagaatcttaaacagcacattgattaatagtttctcttatgataccaatactggttttatatactaaatacacatttcaagtagagcaggaacttaaacagcacatattgattaatagtatctcatacgataacatatactggttctactcatgtctgatagggctttcaattcaatacagtgccttgatggctgttttaaaaggtggttatcataaggaaaattcttggtggcaacacttgtcctaccataaaatatgagggatggaaaaactgtagaaaaatcagttggagaatattgacttcaactggtcacaattggttttctttgtcttatggatctgatttctaggccagatatcttgagtacaatattaactattttattcttgatgaaccttattggcttttgtatataggggtggtatgtcattagtttcaatgagtgaaaaatccatttcaggaagaacttcttcccatttttttctgcggttgatcatacactgattaagtaggagcataccctctaacaggaactgagagctcttttgcagcacgagtaacaacacgataacgatcaagactttcttcaatgctacaattaatgtttgacatcgaaaatgactcagatgctgatgcaaaaactgcgatttctttcgcaccagcttccatggcagctttaaagccctagaggaaatagacgtgtcagaaattccagctacaccaaatatcaaagtttaaaatcttccacttttcataatatcatactcactttcaagttaggtgtcaaaactggcaatctagcaccctccaaattacgaactgcttgcattacatccttagcatctgctagctacagataaaaggaatgtgggaggaaggaaagtgatgttattaaaaactctaaggtgacaggaatatgttaaaatgttatttcaagggaaaaaaatgatgagcaatgaaaagagaaaaatccaaagaattaacataaagacaacagattcattaaatcctttaaaacagccatccctgcattgttttatggctgaagatttaagggaactgtgggataaacaagttacctgaggtacccattttggtgatacaaaacttgtagcctcaacaacaggcaagccagaagatactagcctgtgaatcaattcaatcttaacagctgtaggtacgatattcttctcattttgaagtccatcccttggaccaacttcaacaatcttcacaaacttcggaatacctttcaaaaacttttttcatataagaaaaaagaagaaagaataagaaaatgaggtaacagtgctgcaaaaattcatacttagtcatgaactaggaaaaaattaatagtacaattacacgtgaaaggtttaaaaaaacacagtacactacaaaactgtgagtccatcaagtaccaagtcataactaaggtacagataaataaatatcaaaaaagaaaaaaatatcaagatgcatatattgtacataacaggaaattactattcaataagtcctaaaatagacataattccactaaagaagctactgtgtagaagaagtgcaaaaaaaaaaaaaatcgaaacagatggaagaaaatattaattgtcaacacgctattacagcagttcttcactttgaaaccataatacctaattaccttgtttgatagaccctgtttttctttgtcattatacttgctattatattgatgatctggagtataccatgtatcacaaccatttccaaaaatcttgggattcctgcctaagctcgaagttctccagtttacagtatcgccctgcgagaagtctcttgtgtgtctcacccatggaaatgcctctcttgcagacccttcatattcttcactgcaaaacaacagatattccataattccatgttagataattgattatagttataaacatgtaagaatactaacatgaaatgaaataattgaacctatgacaatacaatgtaaggcaattcagagaaacaaattttggttatttcctagaaatgcaaacagaaagtttaagcagataatttcatcatctaaataaaatcatggagcaaatctaggcagatgtaatgatattttcttataaagaactgttatgcttaactacaagaatcagaccaataatactgtggtgcatctccctttctttcatcttgctcgctgtaacacaaaccccagaataaagggaaaaaaagaataaataaataaataaaaatcaactcgagcaacaacactgtttcaaagtaattcatcagcctcttactaacatttactttcaataccacaaaataaactaaaatgaaatgtgcatgcatgcacaataaatgtaatcaatttatgacttctcattcatttcaatattttccatcacacagttagaaagaagggatcccaaaaagagaaccgctaatctaaaaaagcaattgctgttgcctgttgcaaaagcattaatattgttctgtactggtattgaatgttgattgaggtacacaaaaaaccttaaacaagtgataacagtaagggaatgaaattaatattcatttgtgcaagaaaagctaaagtgaaccatgcaataagaagcattccaaggtctttggtaagtgcattaaatagaaagaaaataccatacattaaaaaaaaaacaaaaacaaagatcacaggggtgtattcattgttcaaataagaaaagatgactcggtatgtaaacacaaatctgtgaaagaacatatagcaaaaatggttgttcatgtacaatgaaaagcagcagcatatcatatgaacaaacaagcagacagagaataattctcattcacctgcaactattggatgt

SEQ ID NO: 22614 - DNA, 1877 bp, Cannabis sativa
atatatatgaagattctttggtacttccatgtgaaaaaaagactaccagtgcattagtttataaatacttataaatctaattttttttatgtgatgatggatactgtagttatatagtaaatattgaataaattttcctattttatttatatgcttgtgaagccgaatgtttagatttttttagtaacaagttcagaattttatgaaaattaatgggatatgtacatccatcgtcacataaaaaagaaaaaaagaaaaattggaattataactatatagtaccaagagcacgaaggagtgtggtggtagtagtcccttattgccttattgacagaggagtatatatcgatatttttagagagagagagttaggcaattaacaatgaattatctgctccaggaaacagaggaggaaaaactgcaattagcacataagttattggctctgtgtaccagtatcttaaaggtaagcccaaatacaaacttatgtgtaatttcaatacatagaaaatgaatcaacctaaccttattcaaaccaatcaatttgcaggcagctggaattacaaagcctgtaaatgagattaacccttctcttgctgaagaagttcttgagcagttaaagaataaaattgcctctatggatagagaagtgcaagatttgaaatacaaggtccctaatatgttaatatcttccatacatattagatataaatatatagttcatcagaatgacagctgtttgttgtgatttgcagagtaagattacatgtgaaagagctcgattgtgtgagctcttgccacaatcttcaccaattaattctagagcagatgaggagaaacgtccaaccccaaaaaaggtgtcccatgctccatactttaattctgatatagatcgttgaattgtaaacaaatggtgtgtaactgtgtatagttaactatctgctaacatgtataatcgacaatttttttgtccaacatatttgaagggcaaaaattatatttgttctctttattttgtactgtaaatatttcaattacttgtgttaaattaataaagaatttaacttattctccctactctgtaacaagctacagaagattacaattttgacgatttggagtacgactcagtttctagattatatttagttcggaaaatttgagggataaataatgaaattgttgagtttgttattaataaatatttaaattttaaaaatgacagaaaaaatactcaaaaagtcaattattagatttctgttacttcccattttaatctcaaaagtcatagtataggaacaaaagcaatgtcactaaaacactaaaacataaaaaataaatacataaaaaagatagaatgagactatcacatagctaatgttttaaaaaaataaattgaaaggattaattttaacaataataattttttaaatattataaaaaagacactaaaacatttaataattacattttagaatcatttgtgagttagaaataaagcaattattcaattctataatttacttaaaattacaataagtcaccaacaacacaaattgtctatattttatgtattttcttactaaaaaaatatttatggcatttaatgtttttttttttcaaatacaaaattaagatctaagggtcataaaaaaatcattacactaattgaaaaatgctctcttgcgagaagagccttcctgaagaaatgcctcttaggcctactactgacatggatgaactgttatcgagaactaaaaatcgcattgttctggatgaagattgatggaagattaataaagatggggaaacagaggtggagaaattgtttgcgattgggcattttttcactaatcggtcaatgaatcgctctttgc

SEQ ID NO: 22615 - DNA, 2394 bp, Cannabis sativa
aatttgttgtgactatatgtatttttagtcacaatacttgttgtgacgaaaattaaactagtgacaatttataactaagtactatgttttaatcacaagtaatattttattgtgactaaaagttacatttagtcacaaaaaaatatattgtgactaaaaagttgtcactaaaaataacagttttttatagtgcgttattgaaacaatccaatgcacaatgaagagttgcttacagcaagtgaaaaggaatgtgaaacaaagaatccaaagtttattaattacaaagattactatagaagaaagggattggattaattctctacaaaattgtatctagattattctggccttttttaggtgatgtttaatttgtaaatttaatatttgtgagcaataaaacctttctaattcaggaaaaaaaagaagaagggtattttctttcttttcatttaccaaataaatgcacttcattatttgatattaatgaataaagaaaagaactatatatatgctatattccttttcttaattttttgaaaggtcaattgtttaatttgttgttcttgctggtaaacaatactacgacataacatgtaacctcatcatacacacgtaatacaacatacatcattattatatatataaatatatatatatatatataaatattcactactaactttattactaaaattaaaaatatatatatatgactaagaaaaatattgaaatgtatataatatatcacacttttgcattggcattaggtatagaatgcatctaaatcgacataatttaagtattgtacatgttatggcgaatcttattttagtttcaaaaattaagaaatataaatattttacaatttttatattgttacaaaccgagtttgaaacaattgatttcatgcaggcattaaaaacagagtatgtgtgcaataagttgtttgaattctaataaaatatttagtttttaaaatatatcatcttaaaaaaattgacattaaagtatttaaattgtattgtgactaaatttatatttatttacaattaatatttgtcaaactaactttatcactaacaagtaacaatttatatccaaatatcatatattaatgacaatttttttttaaaagtatattatttagtcacaaaatgactaaaaattattattaaaagatattttgtttttggtagtaataaatattatttaattaattaagtttaggaagaaaaaaaagttaatttaaggtgatatgatgatgggatgggatgagggccaagaatatgtactactcacactaatcaccattaattttataatggaattgggttttgtggagctttttatctctttaaatattctttccaattaattaaagttcttatctttataatactaataatattcctccaacgttattctcatgcatgtctatatcttagtataaataatatttttatatatatatactactactactagcttaaccaagctaggctagggcatatatatatatatatactaaattactacaaattatttttgtttttgttgggttttgagaagcaaaatatgagtgacacaaaaaatgcttatgtaaacccttcaggtaattttgtttaaaattatagtttggcttttaacttaatttatatatactaatgtaatttacaattactacatttgttttctttataagaatttcatttataaatatttctacataatgtttactgaagaattaaattcaacacaatcaaatatttatatgttattaattaagttgattattgttattaattatttattattatatattttttttgttaaataacatttatttattttttatttaaaaaatggtgatcagaaacttatcaaggagctcccgatataatgtcagctcctcaatatccacctaataatgcggaacctcaaacagaacctggttttcttgaagggtggtaagtccacaaaactttatctataatttcttcttttttttttttatgtatgtaacatttaataaattttcgtaaatttttaagggatttttttattttgacacttcaaaaaatatttttttttttacatttttatggaattctacatagaaacccctattgtaactagtgctgcaacctaaattgcaacaaaaaatcgtataaaaattcctattgcaactagcgctgcagccactttagaaactcaaacagtaaatttgaaaaaaaaaaattaaaaaaacaatatatgggataattcgatccccaaattctaattgaattactgttgaaaaaacaaaacaaaacaacttatagcatgtttggtattgttttctattttttgttttcaaaaaattgtttttaaaaataagaacaaaaaatagttttt

SEQ ID NO: 22616 - DNA, 1468 bp, Cannabis sativa
tattcttgattaacttcaagatttcctcctcctttaacatcaaattaatatttatatatatgcatatcaatgtacataatgtgtgctctttcattgtcaatgacatcgggtgtaaccggtcgctagggtacaaatatggattttcagaacgagaagtgtttgtgtgagctaatttggttttagcttttgcatcattgataaacaaaattgaattattatagcacagttggttacacaccccggtctcatttcactctagaaaactcttcatttcattgttccctttatctgactagtattacttttctcagtattaagttaattgttgtaatgctgttgtgtgaaaatcattgtcatccaatgtgtctattaattatgaggattcaggctacattgtgccatacttctttaaattcttagcctgttcatatacttttatttttcagagatatagtgcagcaatgtgactatccaaacattggagccacagaattaattctatcaaatggcatgcgtgtttgctacaaatgtaaagattctcttgatgaccaggtacttgtgtacttccttgtaattgtattgtatgatttcttaagtatttctttattttatttattgccttccatttggtttattcttgctggattgggttagatacccttgatgagttttagctgctagactgatgaagtgtgctccaaattttctttccttttatcttaaactccattatatatttttcttttgccttattgcaatttattacatggtgctagaaggatttctatatataattattgctttgtcatattatctttaatggtaccttccctttactcaatttccatacgacaatgcataatactcattattgtaatctgagttcaactccctttttaaaagcaataatatttctttacattatattttttcctggattgtttaaatgatttaagacatgatttgatgtgcagcctatatttcttatccatattttgattcaacaggttatgtttacagggttctcgtacggtgatctgtctgaaatccctgaaagcaattacgtttcttgctcaatgggacctaccactgctggagaaattggtgtatgtggttatagaccatcaatgcttctggatatgattgctggttagagagctgaagttggttacaagattggagcatatatgagaacattttctggtgactgttctccctcagacatggaaactgcattgcaggtttgcagcatcacaattctttttaatagttcaaaagtgtattatgctaaataattaaaaagtctatatgtggacatgagtggcatgcaatttcacgtggtttgtaatagtgccatttgggcctacaaatgttcttctttttcttttttcaccactaatctttttttcgttgtcatttgggcccccataatttattagggacacgattttgtcctgtgatgtacttt

SEQ ID NO: 22617 - DNA, 2826 bp, Cannabis sativa
cttcactccattatcttccttttccaatatccatacttcctctgcaacacccttcaggtaactaaactaaacttcataaattcccagatgcccctttttcctctaaattctcagtttttattgttttgtttcctaaatgattgagattgattacagtgtagaaatgaaatttgaataagtttaggcttgaatgtcatgtacccattagttacccactatttcatttgagcctttaaggtggtattgtttgattttacaattatttatttatttatttatttttaataaaaaaagtttctttccttccccagaaatttatagatggatgttttattgtgggggtaatttaatatatatggatgatataaatggagctgaatattagttctttcaaatgatttttctaattttgagtatttctgaaaatattaggaataaaatattatcacagatattaggaaaaaattgtgaatttctcatgttgatgatgacttatctaatgattagatggttgtgaagaattaaaacacaagaatgagaatcgaaatgagaatgaggaatagaattgaatataatcaaaaatgcataaaaagaaataatttcttgtaattctgagtcattccattagaatgagatttctgatactttaaaatataaccaaacaaaagaacggaaagaaaattgatttctttccattctattttattttattacctccaaccaaacgtaacgttaatcttccttcctcattatttgaaaattcaattgaatgttctttcaccttaaactctatgtgattatgtatagctctctacttgtgtgttttcaggtggggatggagaaaacacccaaatgcaaacatggtttcccacagaaccaggggacaagcaattcaagtattggccaatcccaatgtatgcatcaactcaaggcttccattccacataaaaatttatgccaatataaattggtttgaatatgctgaaaagattgtttaggtatgtgattgatggttcaatcaacctaatttagtgtatcatgatggtaacaaaacattaaaactatggaactaaatttcaagtttttgatatcatttctttgaagtatagataatacatatatttggctagcttaaagtgctttgattcagtattttaggaagatactatgtcatttgaacttgtcatccctaccctgctacatccgaacttcatctaacaatgtctttctttcccgccgatgctacaagaacttgtttcgctatgttgtgtatttcttcaattggtgtgtgtacatgggattcttttgtactcacatagtttacattagccttagcttaaagattgcagaaacaaaaacatttagaagagtttgtctaatgatgtattcggtattagagggcgagcaataagtattgagagcttgagtgaaccacctagtaaaagttgctaaagttctgtactttagacaaactcaatgctgtccttttcggttaaattcagaccattgagatcttgagttttagttaaattataaaggttcttcaatggaggtatgatgtttattttttgtatcttgatacactgatgcaggtgtcttcagggaaggagagacctaagaaggaggtgatcatggttgatcctttggaggcgaaacgattagctgccaaacaaatggcaaaaataaaggcaaaagagaagttcaaggtaagggaaactaacccttttcttgctcttttcttaggatcacaaaactgagtcttcctcagaaatatcagctgattttgttcttttatttcggtttgagtttaccttcaattggatgattttctcagttggtttactgaaaactccaatgcaatgcagtactcaaaactcaaaaagtaatgaattttgtgttgttttgattacagaggcaacgccaaatcgaagcaatcaatggagcatgggctatgattggccttacagcgggtttagtcattgaaggtcaaaccgggaaagctatcctagctcaggtctagttactacttctataatttagccttaaataactatgctcatactaactataacacattaaattaagttgattaactgatgatcttttcgattttcagttggctgattattggaatgctgtcgtccatattttcatgccgtagagatttctgttcatcggtaaattgaaggaattcaagattcatttcacttgcatcattcttggaacatttttatgctatgcttaatacatataatatgatataatgtctacatttaactgttaaagaaaattacattctttagacttgagaatgaactttggtccaggtgattcttaatagaaaataattttgttttgagattggattagagttctaagtagtacttgatttttctttttcgaacttcaaattttagtttcccggttcttcatcgagttttatgcctgaaaagcagattgttcaaccatagaagaaattagtgagatacaaaatgattcaaaaaatttatggaaacaagttaaaagtaacatttcgcgtagtttttgcttatacttttaactcgaacactcggtaaaatccttgaaagagcttacttaagccaaatggaatcttatatgagagaagttgagaatatgaagtaccctttggcctttttttcttattcttttttttttctttttgaaaattatcgtttatataaaagatagaattcgacctcatagtcattacatataatgttcgctgaaattattgataaatctatcatactagttaaagttataattcaaaaataaattagatagtttatcacattgatgcatatg

SEQ ID NO: 22618 - DNA, 4601 bp, Cannabis sativa
ctgaacatagaaaatctttgactcgtaattgccttagtcaagccatcagcaatttgatcatatgcgggaacatgcttaatctgaaccatcttgttaagaactttttcacgaacaaaatacaaatcgagttcgatgtgctttgttctagcatgaagaactggattttgtgttaacaataccgtgctcaagttgtcacaccagattgtgggaggttgaggcagctggactttcagttcagaaaatagatagtgcagccatgataattcagcagtaacatttgccacacttctatattctgcttcagtactagaacgtgagactgttggttgctttttactcttccatgtgattaagtttgacccaaagaaaatagcaaagccagtagttgaacgccggtcatcagggtctgatgcccaatcggcatcacagaaggctacaagatcaaaggacttaggtcttttcaggtgaagaccaaagtttgtggtgccactgatgtacctaagaatccgtttaacagccaaccaatgtgtggataatggcttttgcatgaattggcaaacacgattcacactaaaagaaagttcaggccttgtaatagtaagatattgtagagctcccactattgatcgatagtgttgaacgtttgccataggttccccctcataggctgataaacggattgtactgaccattggtgttggagagggctttgcatccaccatttgagctttaacaagaagatctcgagaatattttgcttggcagagatgaagtccttggtcagtatattggacttcaatgcccaagaaataatgcagaacgcccatgtctttgagtgcaaactgagagttgagtgtagaaatgagattagtaacagcagcatcatcacttcctgttataataatatcatctacatataccagaaccaaggtaatagatgtattgctgtgaagaataaacagggagtgatccgaatttgatgaaacaaaaccaagagacaaaaggctgtgttgtagtttgtcaaaccaagctcttggagcttgcttaaggccataaagagatttatgaagtttgcaaactaaatctgattggccaggaatctcaaacccgggtggttgaatcatgtacacttcttcttgcaattctccattgagaaaggcattattcacatctaattgcttaatagtccatcccttggacaaagcaagagttaaaaccactctaattgtgaccggttttaccacatggctaaatgtctctgtaaaatcaaatccgggctgctgatgaaaacctttggcaactaacctggcctttagtttattgacagtgccatcaggattttctttgatgtgatatacccatttacaaccaattgctgtcctaccaggaggcaacttaaccaaggtatatgtcttattccttgttaaggctagaacttcatcagccattgcattattccattgaatctgctacaatgcttcttgaagagttgagggaacttttgtgactaggtaagctttgggcttgtggattccagacttggacctggtcttcatgctatgagtgttcagcttaggaggagcatgaggacagccagccacatctggtggagacacaggcagagacccagcaggaaacaactcggatgaaccagttggagagagattggaatgaggagattgctggtctgttgccacttgctagccaatttcaatttgttaagttgctagagcaatgatctcacacacagctggtgcattaggaggctcaatatcagtaggctttcttgatggttctccatcacagacaatttgttggcttgatggccaactgttaggaagagaaacagaaccatatgcattattattaacagcagcaggttgtggggaattgtcacttaaaacacattgatcaatccttgtgttgttggaaaataaatcagccatggtgtaatgagttttgggatgagaacagacaggaataatagcagatacaacagagttgggttcagacatagtgctgctatttttgacagcagaattttcataaggaaagacaaattcctcaaaaacaacatctttagagatgtatagtcttccatttttttcaaggcatttatagcctttatggtttagactatagccaagaaaagtacatggtgaggatctaaactcaagtttatgtctgttatatggccttatattaggaaagcatttacaaccaaaggttttgaaggatttgtaatcgggttggatgttaaacaatgtttcaagtggagatttgtttcctaatacaggtgtgggtaatctattgtgaatgtacacagtggttcgaaaggcttcatcccaaaacttaagaggtaaggatgcttgagcaagcaaagcaagaccattttcaacaatgtgtctgtatttgcgctcagcaagaccattttgttgatgtgtagtgggacaaggatgcctatggtgtatgccatgttcagcaagatagtttgaaaatgatctaaattcacctccccaatcagtttgcaagactttaaggggtttgccaatttgaagttcaacttcaaatttaaagttttggaatgctttaaaagcatcagatttatttttcagcaaatacaaccaagtgaatctagagaaggcatcaacaaagtggatgtagtatctataaccattgaaagagggtgtgtgagaaggtccccacaaatctgatacaacaagctgtaatggttcagatacaattgtgttggatgtctttgggaagggaaatttatgaattttcccaaggcagcaggcagaacagatagagaactgagaattttttattacttaaagagatattacaagattgcaatacactgtgaacaattttctcagaggggtgacctaatctattatgccacaaagtgaattcattttcaacagcagcattacatttgatacaagctgaaacagtagcacttgagttatttaaagtgacaacaaaggtacttttagaactaaagttatagctggtgtttggcttagattgctggtgtgaagtggattgatgagggattgaggatccaatgctgaactgagttggttcaaaagaatacaggccattcttgtgcctccccatcagcaagatagaatgagtcaatttgtccttaagaagacacatgtcatcatgaaatttaaagaaaacattattgtcatgagcaaactttgagacactaattaaattctttgttatttcagggacatgcaacaaattgttaagaacaagggcctgagatgacaattttggaaaaataagggattgaccaaagtgttttattgacaaacctgaaccatcgccaatgtgcatctgatcttgaccatcatagtcataacaattagctaggttctgaacctatggagtgcagtgatttatggctcctgagtctagataccaattggtgtcacaagttgtgttagctgttgcaatgttggcttgagttgagggttgagtagaggtctgagtgctgctgctagatgaacttagagagggtcctgagaaggctttgtcaaaacgataaaagcaatcttgaacaagatgtccaaatcgtaaacataattgacattgtggcctattattgagattcataccagatctgcctcctctgttcatagaaaaattacctctacctcctccaaaattctgagtaggagctgagtttctgttgctgaattgactttgtccattgttggagaatggatgacctcctcttccagcatactgctgctgcctaaatcgcctgaatgcaagattcacttcagcagctggatcgaactcagtagttgtgaaatttgcactgtaatcgacttctttgctcgatttcttgattcttgactcaaaagccaagagcagagcttctatctccccaacagtatagttttcgatccttgtgttggaggagatgacaaaagtatcgtactcactaggaaggcctttgaaaatggcagctacatggtctcgatcgcttaacacttctcccacagatgctaacagatcaacagtttgtttaacctttagcaaataatcattcagacttagagagccttttttcagattctccagcttggttcgaaactccaagatttttgacgaaaccttcagagtgaagtgtttttctaaggcgttccagatttgatgagaagtgttgcatccaaccattcttgtgagcaagctttctgtcatagacgataataaccacgagaacagtaactgatcttgaacttccgaatcagtataggatggattgacacgattagctgcaccatctccttcattcaagaactcttctggaggtggcttgctgatgaacttcattaaccgatttccttttatagcagcgaggatctgctgttttcagagaaggaaattatgatcgtttaatcgaattgagatgctatgattgaagaacacgggatcttgattggtgcgttgtctgttgagagtttgagctccattgattcctgcaccagcagcattgactccagcagcagcagcaccattgttacccacggtcgccatgttcaccatgagaggcgggaattgctctgataccatgttaa

SEQ ID NO: 22619 - DNA, 2235 bp, Cannabis sativa
aggtatagatttcttggaatttctggactaaatcattttgctaattgttaaataatagtaaaatgttccttctacagaggaacatttgttagatgctagacttgtgagatagaagtacctgtattcttgaggggctacgaacttcaaaagtagcagatgcactgaaagagaaagtcgaaaacgggttggacaatgtggttgagttcgcaatagtgagactcctggtgtcaattgattggcttatctgatctacctttaacaatggtgtcgatcctgctgccaaaagtggcaaaagttctgaaaatccagtgtacctgataagtttgaagtcacaaggaatttgaacaaatcaacaggaaccagggaagtaacggaggttgattaactcttaattcacaatgaaacaaaattaaaaaaaaaactactttactacaactttaaacaagtcactaaaacatttatcgccccggccatgaaataatttgacgacctcaaaaaccccttaagcatacttctaatcaatatgaaggctaagttctgttctgacttttttgtaaatttgacaaacagcataaatcggctcaatttaaaattaaaaaaaaaaaaggcaattaacctggtgtaccaatggtgaaataaaagataggcctactgttggcactagaatttcatcttcacccatgaatatactgttagtttcctcaacatcgttatatgaggtggatgtttattagtgcaagcccaaatatcttcaaatacaaacagaagatccacaaccctttttccacacctcccaccaaactttctatcttcccattactcttttactccatgctccattccaaaaggaccgtgtataacattgtaataaataagaagatgatttattataaccttaggtccttaagtaatatcatctacctattattggacccataatcttaaacttaatcaacttcaaacagtgaaacaacttatcaaaactacgtaactaatagtatcaacacaagcatactatgaatgaagtatgcttttttctcaatcagacacaaacgtaaatactcacagcaaaatccaatttccatcaagaagctcaggcgccgaagtcggtgccggcgtgggatttaaagcttccaattgattcaccaactccaaaatctccgctctctcctccaagctagctcgaaaccccagctcagtgccatatacactgtccaccaagcaccttttgagctccgcaagcttatcattccccaaatcctccgtttccgccccaacactagctgggctaccattatcgacacccacaaaacgatctggtcctccccattcgtcctcatccttgggagggtctgagttagcaagcttcgtggatgaattaagctcctcgggcccggcctccacgccccactcgtcggtgaccttggcgagctcgtcgccggattcggaggggggtttcccaggaataggatcggaattttggtcggagagagatgaatgtaagcggagggagcggaatctatcgactcgggttccaatagggttttggagggaaagagaagaagaagatgatggtgggagtggagagagtaaggagcgtaatgagaatggcttgttagggtttgtggagaagagggaagagtgagcagaagtgaataagagagccattgttgattcttattcactgcctttggctttggctgttggcttggtctcttctctatattcgaagagtgtattttttttttcttttagttttaaatttttgtgttggagcaaaaattattttattatttataagaaaaaaattggaggatcacatatttattcattttttaataattgttgtcccctttgtaaactacaatcttgttcaaacataaatccaaacgtttatgtattttatatagggaaaattagagtaaatttttttaataagtttattttgatgtagataagttctcaactttaaaaatagtagataagtttagtttgaaatttttgtaagtttattggtgctcattttaaaaaatttggtagttgctccaaaatgtcacgtgttgatgatattaaattgaggcataatctctaaaaaatttactttgatgtagataagttcctaatttcaaaaaattgtagtaatagttccaaattcaaaattctccttagtctgtaggcagagccgtcctaagtattttgagagttttgtgtaaaattttaaaatttggctcttta

SEQ ID NO: 22620 - DNA, 2110 bp, Cannabis sativa
ccagtaccctagaccccgaacccggtatcccggaccacggaccccggaccccgacactggaccatggaacccggacatggacacggaccttagacttagacctagaccccgaaccatggactacggacctacacctggatcccggaccatggaccacggatcacggaccccggaccccgagcgtggactcctcggacctgaaccccttggacttggaccccaaacatagacacggacctggacccagacccagaccaagacctgtacccagacttagacccgaacccgaaccccgggcctagacccgaacccggaccccggaccccgagcctagacctgaacctggacaccggacctcgaccccagacccggacctaaccccaaaccccgtgttcggggtctaggtctgagtccgggttcgagtccaggttcgggtctaagtccgaggttggatgagttcatgtcattgtatggtgtagaatattaattttttttaataaaaaaaatctaaaatatttttaaaaaacctgagccaagcaccattaatttttaaaataataaaaaactattttctgttttcacttttgaaaacacaattctaaaaattaaaatctgaaaacacagccaaacagtctcttagattcttgagatggccttgagaacacataaagtgttaagcaccacaaaaagtgatacactactattattagtcatgttattcaactattaactatttacaacatcttatacaatagtgtaaatactttaaaatatttaatagcaatactcatacaaaaatcatgacatgataccctcactaattataaattataatttgttaaaaaatatttatcggtaaatatatatattttttaacataaattatttatgaatttacgatacaaatatctacaatcggtcttagaatcttgtcaaattagaataatttattatttaaccgaataacatgctttgttaaattataaaatttaaaattattgataaataattttaagctggtgagatggtcaaaattacaatccaaactaattaactatgtagtcattttaagtattattaattaatttgatgttgttattaaatatgtatgagaatatataaagcaattttctcgggtcagactcattgacagaatatacattaattaatattaactttgaagcacttctaagcacacactgacttgctaaaaaagatttgttaaaagcaaattatcagtttctttattaattgattttttttaatcccaacatgtatatatataaatatatctcatgcatgaaattataaagattgtgaaaatcgtattgtgtagcctgtataaccaagaacaaagctagaaacaaaatttaagtgaaagcaattatttatattattttttttagtgtgacctaaaattttaatgaaagttacaaaagttaaaacataaattaatacataattgtcttaatataatttttagtgtaatgtcattctacttattttagagcacttaattacgtcagatactttaaaatagagaacctttaaaatgtttaaagaatcaaactaaaaaaacactacatcaaatattttaaattcttttttcatattaaagtttctttaagatttaatatttgtgtgctttatgtttatagaatattattcattgcttgtatatattttattaattgttttgggtttgaataattttttttatatatttgaaataattaaaattttgaaaaatattaggttttagtaataaattttatttggtttaattaaaaaataaataaaatttttgtaatatatttaaaagatagaatataaaaagtcaatttttttttttttttggactagactccaaatagccaaaaactgttcttgagctaaatatatcacattgtaactactcttattttttttctttttgaaagaaagtatgccattaaattaaagcaaatcagctgttacagaaggaccaataaatataagacaagtatctgtccacaactgaactcctaaaggactagtaacagacttagctagtgcatgggccacaccattcgcatcacgcgaaatagcacagcaagaaccaccaccaaca

SEQ ID NO: 22621 - DNA, 3903 bp, Cannabis sativa
cttgtttgtaggtgcttcggttttgtttctttctaaaaatctcggtgggggacctcgcctattaacaaagcacaaaatagaacaagatcaacaagcattttcaagaggcaccaacaaaatttctctactcaaagactcttctatgatcatattaattcataagggaaatagtatatcaagcacaaacctatatcacctgttatcagtgatcaccaatgtagagcaaacattttttgtatgcgtgtatctatatatctatatttatgtgtgcttgtacctttatacatacataaatatagatttaaataaactagactcccgctatatcaatagctacataaacaccctcctggattcaaacctcaaacattgtagaagcagagcaaagcagaccatttgaactaccaagaagtgatacaaccacttgggtagaactcactcccaaaagctagcttaagagaggagggaatccaaatagttatatactactaaccaatcccataattagccaaattgggatcctaacaatacacctccctttagaggcgacatccacggcagcccactctgcggggggccatctgggcttaaatctgcaggtttgtcttttcacaaagtcggcccagactgagattacttgagacaattatttgggtagaattttagaatttgggataaggtaatgaggtttcatttcaaaactaatttacaatgggaggagtaacccattcatcttatatagtctattatctttccacatattagcaatgtgagactctctaaaactcactacaataagctagctctggtgttccagcactattaaccaatcccatacgagaaacattggaaagaaaactaattttaaagaattgaaaagtgttttagccttctgcactccatttttttactctattgttctcatctaaagcaaaatcacacatttaacacataaatttcacttcagctgatattaagctcaattcagaaaagtataaagctatgctcttttgatgtaaatatgctatgaatttcactgacataacaaacattaaagaagaaaaaaataagaacaaccaacaattgtatttcttatttactcatatttcccactaaattttcagaccaaccaaacaaaaacagaaagaaaaaggacagaccttttgcgattacgcttagcagcctcacgattcttgcgcttcttcttctcctgggtgttctcatggtacctcctcctcttacactcttgaataacaccagccctcataacctctctgcgaaacctgttaaggagtctctcctcagactcgttgtcatccactacaacctgcacattgtaagccgatttgaagaaaagggtattcgaataagccaaagaggggcatattacggaggataaggaagacgaagcagagtgagactcttgtgccacaagcgagacccttccatctctggccttttgggattgggttggagaagtagttacagggacttggaatggtggtagttttggctgtggcggtggctttgtgggtaagaggaaggagaagaagttactgagtggggatgaggcagccatggatggatgatttggccaaatgctgtgtctgtgtttcactcactggttttcgtttcggttttatccatttcgcttttctctttctgtttttgggataggattgtgttgggacgggtcgggtcgttgagggcctcaaaaacaggtacgggtataaactgccccacttgaaaataatctttaaaatacatgtcgttttgtcttgtgaaagcgaaaaacggcacccaagtttcttggaactaatgaacgtctttgtcgtttttcaatccgttaagagaaaattatggtgccttaacatacttttaattagttttttatttttaaaattagaaaattaaaaatatttttcaaaaatatattttataaaactattttcacttttaattttgatttttttttaaatttgatttttaattttttttttattatttgcatacccaacaattctctcctcaaacaaagaatcacctcgcctcccctcaaacgatatttcattggtccactctctacttactagtgtacctcatttcaatgcgttggaacaaaaacactttaaatggaattgtgagattaccgtctaactaatgtggaactttagttgcatgctcaacaatcctcccctcaaacaaaaaaccatattacttcccctcaaacaaaagaccacctcgactccccttaaacgaacttccatttgtccactctctaccaactagtgtactttcttccaatgtgttggaacacacgcgttacatagaatcgtgagattatcaaggctcatctcctttgtttggcattctaagaattcattaatatggctgattccagaacctactatgatgccacttgttgggatgttgaacattatctatctttacattggtatgatagtatccgttttgggcctaaaccctctcagatatatttttaggtaccttcctaaaatacttcataccgataaagatattgttcaccctaatgtaaccatgatcttttttatttatagccaatatggaactttaattgcacatcgaatatatataaattaaataaaaaggtcagtaaaaaataatgtatttggaattctattattattattaatattattaataaaaaattcagaaaaaaaaaataaattagaagagaattatctgtcaaaaagttctaccatatataacaagagataatgatgagatagcttaagacacttacaaaaatatgtaaattctattttttatcaaaggtaaaatagtcaaagattatcacactaatatgatacttttatatcagtaagataaattattgtgtgttcatgttatgggatccaatgttttatccctcaagcaatcaaatccaatgataattggatcttttattttacatgggatttgagtttctatgagtaagcgcctatgcaaaaaatttccacctcaggattgccacttttggtaaggacactaagagtaaggcagagaagagtttatacaaaatgagttgtagtataaatgtaaaatcttgcaaaatacaagtagagagcaaatgctactgcactgagtccagcaagcagcccatagtagtagtcaagatgtgcacagttaagattattagaaaaccagctatctcggccattcccaccagttgtttcctcaataattgagataagaaagctgctgagaaaactaccaacaccaaagatacttaggtaaagagcaagtcccacactccttaaatctgatggcacctgatcatagaataattcttgaagaccaaccatggtgaaaacatcagatactccttgtaagaggtactgaggtattaaccaccaaacactcatgggaactgttgcacccggagaatcaactagaccgtagtcttgagcagttttgagccttttgatctcaactagagctgcaataaccatggagagaagagataaaaacataccagttcctattctctgtagcattgttataccagatggtctgcctgtaaaagctctggcaattggaacaataacacggtcataaatggggatgaagaaaaaaatggcaagagaaccgatggattgtagtgaagcaggtggtatgtcaaatcctggcactatggttctctgcattgttgctccttgcttggtgaagaaggtaggcacctgtgcaaatacgatgccatacaccaagcatgttccccatatcggaacaagtcgaagcacggcctttgcttcttcaacatcaaccacacttgatgcttttccatctggtgttagcaatgctttgttaagaaacttgaattgttcatagctttggtgaggcaagttttgctgagaatcctct

SEQ ID NO: 22622 - DNA, 2800 bp, Cannabis sativa
  modified_base (830)..(837): a, c, t, g, unknown or other
tgctttcgtacaagtaccaaacagtttcatgtaatttaacatgtatacatatacatatatatctgggttattttattatttatgttattattactatttactaccataacaataacatttgtgacagtcatatatttgtattaaaataaatatgaatttttgttttcgttgtaaaaattctttccaactatacaaatatttatagagaaatccccactagtcattttactcattttttaaaattttacgtgtgagcatgagctaaacgtataaatacaatacaattgtatacataaatattaactatataaatatttataggtagtgctgtaatatttaaaaattattttctttaatttagatcagattcgatatttaattacaccaatattagtatgacagttaaaatagcgtattttaataattctctaatattaattatgtgacagtcagtagtcctgtgatccacaagagaaaatattgggtaagttgtgcaatcttataccacttggggaaagtcaagtgtgatgattctgagactgtgtatgtatggtatcacacagttgaagaaagcttaaatgcattgattgacactatctatatcaacaaggtgcagcttgttttctagtagctcattataaaagaattccacacttaagcatgcttgatttggagtaattttaggatgggtgacttggtctgtagcgtcagtcgtaagtctatcaagcagccaaagtgatgtactcgtgtataagaggcactatttcatgagtgtaaagacccgatacaagcttgaagtagtgacctacaaattattattattattattnnnnnnnntattattattattatgggaaatgacaggtgttgaaacatgatgagctgttagtagtaaagattgatgagagtgacagtttgaattttggctggttagagcaatagtatcagtattcagtactctagattttcacttctcttttaaccatattagggttttgctgtcctctctattctaaaatatctatctatcaatactattctgcttttggtaataattaactttggttttgattttttttttgaaaaaaatatactaaaaattaatctttaatctttctaataaaaagaaaaataaatactttatttatgtagtgcagtctatttttttaagatatattccaccagtctaaaaattaccccaaaatttaatatatttttttttatctatttacaaaaaaaaataattatgtatatactgtagttatttttttatctctaacaagacacatactcacttttgcttgcccagtttaaatttttggtaataattaagttttgttattattcttttatttttgacattatatggtaattttcttaataactatcacaattaaattagaaatgacaaaaaatagataagacaaataaatttaataaaggtaataaaagagcataagagaaagctttgtcaataatgtcagtgaaattttttaagttctatacttctatatgcttcacaaagagggcattccagctttaaaagctattaaaggaagctaaataaaaataaaaaataaattaaagtttctatatatataccctactttcctagttgctatttatatatatatgacacttttttttaattattattattatttttgagagagaaaaaaaaaagagaaaagcataattaagttgttgactgctctgtattttgtcgtttatatacaaaaggaattattatttggttgaataaagaaatttattaaagaaaaaagagaaataaattagtgaagaagagaaagattccattattagataaaagatgtaaatgttaatgtgtcttctttttatcaggtggttttttctttcctcttttgtgtaattatgagtttgtacctttaatagtactttttgaaaacaagtttaattttttttttctagctccaatatatctagataaaattataatagattttacttacttattgttcaccttcttaaattttaattaatatatatatggttttattagaaataatgattaatgatatttattaatttacaagtgaaattaaactcgatatgcatacattagttttttttttattattcaaatttttacatgataaatcaaaatttttcaaaaaaaattataagaatacgtaacatatagataaattttaatttttattatttacaaaagtataaaattcactaaactgtttgatattattttttattttatactttatttataattgactataatacttgtcatgcagggacggaggtagagagtatatgtgaggagggctagatttcaaaaaaataataataataataataatttgagtgcggggccgttaaataaattttataattgaaaaattgaaaaaaaaaaatattttggaggccaaggctatttaataaattttaatgatacatatttcattaattatagctccattcatgttgtaatgagattaatttttttattattttttgttgttttataattgttgtgaatttgatttcttgtcaaatgcttactttttatgagaaaatcatatttttgtaactgaaattttgaaattatatttttgtaatggaaaaactttgtcgtataattgtataatgtataaccaagagcataaattttgtataattgtaattaattaatctttttttaaattaaaatgcaatatttaatgtatttcctacagtactgaatatctttttctcttatttttattattatatatagactgctcgtaatattttattatatatt

SEQ ID NO: 22623 - DNA, 4941 bp, Cannabis sativa
ttttttttttttatcgttcaacaggtatcttgtaaattttttttaagactataacatggttggaattaaattattataggattatagtggtggctagtacaccttctaatctttatattttttttaattattgtttatatctttaaaattttggtggtaatatcattaaatacatagtataaaaaaaagttaaaataacgtttataaaacttatataaaattagtaatcgattctattaactaattacataataccaaaattgttaataaaaatgatactaaaacttaaaatatgcgataagtgaagtaacattaatgatcttataaatgatatatatatttatatatattaagtttttatacatttgtaggcgtacgttgtaaaattttttaagactataacatggttggaattaaattattataggattagtggtggctagtacaccttctaatctttacactttttaaccactgtttatatctttaaaattttggtagcaatacctcccaaactccactctaattttttaaatttaaggtgttcattaattcttattcttagatgctaacattgattgtccagtgcaatttaattatttaaggtttcatttgatacactgtgttgtattgtattatattgtatactatttaaggacggtgttggatgtgaacccactggccaagaggaattcgaagtctcaagcgacgactatttttttccaaaggcgccaaagggggagtacaaatgggcacgggctgcccaagcccctagccactcctgccgtgctgaaccctaagactaaaagggtaaggagatgctccaattttatcaagacggagtgcttcctgaggtaaacgatcagctggccaagggggaagacatgtccgtggagctgctcatgggaagaaattgaaggagaccacccgagtaagtacttttccttcgatctttttctcatgcttttatccgtgcaaattttaacttttttgctttgtgtaactcaacttgaagatggcttatacttactcccgaggcaagtccgcaaccttgaaagccacaacaaccaccaccaatttgaaaaaaaaaggtggaggaagctaagaaggaggccgaggagaagagtctgaagatgggcgagcttaataagaaacttctggctgccaacaatcgtgtttaggaactgctgcaggagatcaaggatatgccgtccactactcagcttgaagcggacaatgagggtctgaccaaagatgtcaatgctctgaaagatgagagggaaagccttcagaccttttttttctaacttaatcggggagaagaaggttttggaggcgagtctcagctttgggcaggtagagcgggagccgcttctgaaggaggtggacaacctggagacagtcaccctggatgttttctatgagtttggaaggtatattcagaagcaaatattgattacctcaatggaaacaaagaggcctatcggcccaaaaagataatgaggaatccgaggcagtcaacctctctaagctttgaccagccaaagtactgataccccagccactgaagatatcgctgacctgtataaagagccaaggactccaaccgtgtgaagtttattcctttcccccttttttttattttagtttaacccatgggccttttttcagtataatatggccgaccaagcggcttttaaacttggtaatacttcattttgtttcaagacaactagctggtaggacagcttttaatctcagagttatcatgctttgttatcttttgaaatgagtattttcgcttaagcttaagcaattgtacatgcaaatatttttttttgagcttgttatttacctatgctttgtacgggtatagttgtccccaaaatcgagcagacttatgactcttggtcacttgcattgcacaagtttaattttgtctattcgcgactgttgggttctagcagaccctttgtacacatttttaagggtaatttcataacttgctatagaaagaaaaataatagacacaattagaatgataattaatatatttattcatttattggtctgaatgattttgttaccgtagtaacttacatttattgaattatacaagctatgacatgatctaactgatctttagctaattaaaacataaaacaattgttttttctagactgtactttagaggtggtcatctgacctgattgccaatcgttttatccaaacccttaagcgaggtccgctcaaaaggccatctacttaagagtagatgttcgagcattgtgtactttaagggggtcatcagaccttgcacatttattggtagtattttcttaaatgttccccgttctaataccttggtaccagaacaagttttatgttttcattatactgactaaggttgtatgctccagatttgttacttctattacttgatatggtccttcccatttaggtccgagtacgccagctgtgctatcctttgtgtttaacaacactcttctaaggacgatatctctcacgaagaatttcctcgccctcgtgtgcttattgaagtaccgagccaccttttgttgatgaactacttgcattaggtttgctgaggctcttttttcttaaatttcatcaagtgattctcctaggagggcgtgattggcttattgattataggtcagtctcttgtggaatggaggttctaactcaatgggtagaattgcttcgtaaccataagccatggcaaatggtgtctatccggtttctatcctttttattattcggtacgaccacaatacttatggtttttcttctggccagttcactttagctttttcaagcaactttttcatggtgtctttgaatgtcttgttgactgcctcgacctgcccgtttgagggagtgccactgcaaagaaactcttaatgattccatgtgctgtacagaaatatgtgaacatctgactatcaaattacttgccattgtcttagacaatctggcgtgtaagtccaaaccgacatataatgtttgttcctacaaaatctagaacttttttagatgttattgtttctaggggctcaacttctatgcactttgtgaagtaattcacagcgaccactgcatattgtaccccgtccttgcctttgggtaactgcccggtcgggtatattctccttatgacaaagggccatggactttgcatcatgtattagctcattgggggttgcacgggccgggaatttttgaaaatatcttaggtatttatcacatttccttacataggcctttgagtcttctatcatggtcggccaaaaatatctttgccttagtattttttttgataaactctgtcctaccgcatgattaccacataatccttcatgtactttggttaagagccgtgtaacctcttcttttgttacacatctaagcaatggcatggagaagcctcttctatacatcacacctttaactatgatatacctcgcaactattctcatcatcttccgagcctcattgtttttatttggaagttctcaagtgttgagataagctgatatgggtgtcctctagttcaacattatatctatcatttcaacttcttctgcacagttgatgttgggttcttccaagaattagattggtactaagttggacttatctgtcaccgtgctgctcgcaagccgtgccaaggtcagtagttcttcttcccttgggacttgcttgagggtgtaacccttgaattgtgctagtagatcttggatcttacttagataagctatcatcttttctccacgagccatgtactctcctgagactttatttacttctagctgtgaatcactacagactttaatgtatccagcatgtacctcccgagcaagttttagcccagctatgagtgcttcatactttacttcgttattggaggctttaaatccaaatttgattgctccgtgtagagattgcccctaggtgtgatgagagcacttcctgcactagaaagctagtcaatagctgatccgtctacatgtaatttccaggtaggtttgtctttgttcttttctggtagtgactcttgtactggctcggggttatcatttgtattatcttcctctttgcctgtacattccaccacaaaagtccactaaggtatgttctttatatgttgtacgaggttgaaagattatttcatactgtcccaactctatggcccatttgagtaaccatcatgcattaggcttttgtaacacttggcacaagagttggtcgttataaacttgaacagggtgagcttggaaatatggccttgactttcttgtggcgaagattaggcagtaagtgagtttttcaattaggggataccgaccttcttttttaacaagttgtttggtgatatagtagactcgatgctggacattattttcttctctatcaacacgacactcacaatgtattcaatgactgccaagtatattcctaattcttctccgtccaagggttttaagagtacgggaggctttgcgagttgtctttctagttcttggaagcattctcccattcctctgtccattcaaacttcttattatctcgaaagatgttgaagaagagaacacacttgtccatcaatttcgaaacgaatatactgagtgcggctatctcactagttaagctctgtacttcttttgtttttgttggtgacttcatatccatgagggcttgtatttttttgggttggcttctattcatcaagcattaacaataaatccaagaaacttgcttgagctgaccctgaaagaacactttaagggattaagtttcatgttgtactgtaataccctggaattgagaaatggattagcaaaacccaaactagataattatgaataattgaagaattatattattatatagttcaatatatgtgaattaatatgaatt

SEQ ID NO: 22624 - DNA, 1623 bp, Cannabis sativa
  modified_base (55)..(58): a, c, t, g, unknown or other
taaaaacaaaaaaataccatataaattggccaaacttaaatgtgccatatttatnnnnagaacttttaaaatcccatactaaatgtaatttcctcataaattaaaccatttaaatttataatagtataaaaagtttagagagaatatatcacaaggatcgaccatatattggcctaagagcatctctaatggtagtattttttaaaggtgttatatatctccacatcatccaaaaatataaaattttattttatcattcttctacttcatttttggcacttttacttctaaaaatattccaatggtataatacctatcaaatatgctataattatgatatcacacattattatatatataattttttttctttattaaactataatatatattacacttttaattttttattgtaaaaaaaaaaacatagcatcaatgtcattgtgtggcatccatgtaaattttaagaatagcaattttttatctccaatggtataacatccctataattttccacctaagctttccatctcatcatcaggcattctccaaaatattaccatgcatttccaatagtagcatcttttaaggatgttaaaatttacacacattatctaataaaatataatatcttattttatctctcttacgcatcatttttggcactcttacttttaaaaatactccaatgtatagcactctttaaaagtgctataattatgatatcacacattattatttaatatatatcctaatttttagctacaataactttttggtttcaatttttttattaaaaaaaatgaatagcatcaatgccacaacatccatgtaaatttctggaatgacatcttttctctacaatggtataacatctcaatatttttccacataataatatgtccacctcaccaagcatcctttaaaattttactattagagatgctctaagctgacttagacttttgggctctcactctcaaaaatatttataaaaaattattaaaaatgagtgttatgggatttgaacccataacattgtatagtatatcagaaatgctaaaaggcactagtggtgtcaagcaccctcctacgtgttaatatcactattggtctaattaagtaccaggtctcatatagtttaatataatagcttttagggagtatcgctagccaatcgcaaggcgacacgtcttaagagtgctagacaccactggtgcccaatagcaatactcataatatatcatacaccctaatcaattaaactataaacatttattgtatttaatacatttaattttatttaaataaaaacttaataaaaaattttattttttattttacgctcccaaaaactgtgagtcataggcacaggcctagcccgcctatgcctagggcccgccctgtatatcactaaatgtaaaagtttggagaaatgctaaaaagtacaagtagagcgtagcacctttttatgtgttaatatagttattggtctaattaattatgaagtcacgtagtataatataataatttttaaataatattactacacaattacaatactggacatttagaggtgctaagaactagtgatcctcaaataacaatacaaagccaaatcca

SEQ ID NO: 22625 - DNA, 2128 bp, Cannabis sativa
  modified_base (818)..(831): a, c, t, g, unknown or other
  modified_base (911)..(924): a, c, t, g, unknown or other
atgatttatacacatccctaaattagacaaataattaattttagacaataaatttgagtcccctaattattttccctatttaaataacataacctattacatacacaatttaactataaggggatgatgatataagaaattataaattaatttttctatattagtaacataaccatatattaatataagaaattcaaacaacacacaaattttctcatatatcaccacatcacacaaaattttcaaaatataacttatgttcaacatactattattatcgtcaaatataattataatattagaacttacttcactatatgaatatataagatagtaaaattgctttttatttttttaacattaaaaaaaaaaagaagaagaagaagcatatatcctgcattaattttcaatgctcctcactaattccacgtccttaaaaatcaaattaatgcctgcaaaatttataagaaaaaattattatacacattaatatattaattttagatttgataaaaatataaatataattactaagataactagcttataaaaaaccatttataaatataatctattaatctaactaaaaaaattgaacaaatatattattttaattttcagatttattttaaattttgtaaaaaaaatattagtgttgtaatttcagattaataattataataggataaatattattttagattctgtattttgtataagttaccaattggaacatctattttgttaactgacaaaatagatcctatattttctaaaattgtacaaataggattctgaactaattttttgtcaaaatnnnnnnnnnnnnnnatctgatctagagatgttatgacaaaactgattatattttctatatttgttcttattaaaaattatcttaaagttggttnnnnnnnnnnnnnnaaattgttgaaaattgagctcagggtcttaattttactattttagaaaatatagggtctattttgttatttaacaaaacaaaaggtctaattagtaacttttacaaaatacctgatccaaaataatatttacccattataatattctcagataaaaaaaacatacaaattcaattaataaactatataatatgatatttcaaatttaataataaataaactattaaacatacaattataatcatatactataaaacaatatggtacctaaaacctctatttaaaaaaaaattataacttttaagtttttaacaaatttctcatcagaaaatctcctaaaaaaagtaatcatcctcttacacaaaaagcatatataatccacaacaatatataataaaaaccattataaacttcattaatcataccataacctaatatttaaagcttaaaaatatcatatatttttgaaaatatagagaaatatatttagctcaaaacgcacaccttcgttgctctccatttgtcttaagtattgaaatttcgcaaattaatgagaaaagaaagatgagcttgctagggcaaagcttataatgtgcgcttcacatcttccatcgataaatgccaacggtttagtgcctagctaggcatttgacctctttcgaggaaagacgtggaaagcttaattattatacgaattcttcaaagtaaatgtaacaagtccacccgacatattttacatctaacaatgttaaacatagaaatattacttttttctcagaaatgacataatcgacacttattattagttgttgtaataagctttgtgagattatttatgggtgcaaatgcatgacataagataagatagggtcatattaatgtgtgcatattgttgtagtgaaagttcacttatatatgtgtaacccaaatgtatagaaatcacaaaactgaaaaccaacttcttaagcttcatcaaagaaagtcaacttgattaatatattgttaaataataagtttaatttggccactaagagagtagacatacacaacaatatatagattttgtaatattttaaaaagtagaaggtttagtttatcatttaataaaaataaaatgtttaatcaataactcttataaaacacacaatatctaaaatgcactacaaaaaacaattacttttagtgataactttttagtcacaaca

SEQ ID NO: 22626 - DNA, 5214 bp, Cannabis sativa
  modified_base (3786)..(3795): a, c, t, g, unknown or other
  modified_base (4519)..(4524): a, c, t, g, unknown or other
tggtaaaataattccaacaacaacttcttccagttctttaattggctttcactagtttttctcatcttgaattcaaggatccaaatcctcttctttcttcttgctttcctctgttatggccaccattaattgatggttggctcttctattctggagttctacgcgatagcattcgtgagccaacagttggtcgcctcgcactacacctacccctgacggtgtttggaatttcaaagataggtgtttgattaaactgactgcccctagtccaatcaacgcagggcgacccatctatatgttatacactgatggtagatccacaattaggaaattttgcattaatgttgtagattatggtggctcgcctatagtcaatgggagttcaataatgccttggctggcgacactatctccggtaaatccacataaattgaccatataaggttttaactttgcattttgtattcccatcttctttaatgtatccttataaaggatgtttaccgagcttccattatccaccaacaccctttcaatccttttgttggtgagttgtaatgtaatcactggaggatcgacgagtggatacctcacgtgttttgtatcttcctccaagaacacaattggaggttcttctatcttttctttctttgatggttccggagcaaacactaattgcttgttttgacttcattgacatatcatttgggcattactgctttctccagcgaaatgtggccctcccaagataactaatatgccatccccttccacaggaggaggttataactcttggtttcctgggttattgggcagattttgctagttttgttcattacctcgtcgtcttacatactgtccaaaataacctcgcgagataaggctctctttctcgtctttcaactgacgacattcttccgttgtatgccctatgtccttaggaaattgacagaattttgttgaatctcttttgtgtctcgcatgtctcattggttcaggcttgtagaatgcaaccttgtgctcatttgcaggaaagatattttctcgagtttcattaagcttggtatcaatagtgtaaattggcacgtacttatcgtgctttttctgtttctttttatttttagatgattccctagagttttcttttctctttgtgtttgaaccatctggattgtcggcctttgtcgagatggtgcttcctatggcagtactgggtttacttcctgagccattctcaacaatttcatctcattcctcgcttcctctttgtgcccaaacatttgtgctctctcgttgtattcgttgatgctcctcaccaggcgaccttgtaagttatctcacagctccccccagcttttgagaggttggtcgtaatccctgcttaaagagcagtaagttgaataccgttcaagtttctaactttagcagtggtagtactaaatcgacttaggtaacccttgagtgactcacctggttgctgctttatgttagtaagggaggatgcttcaggtcgcctgtcttttgctgcctaaaattatttcttaaaatctatggatggctattcccaagaagttattgaatgatgggtaaaattattgagccagctactcgctgctctagtcagcgaggtgagaaataaaatacaacgtaaattattcgagatattgatggcacgcattatggtattgaaattgttaaggtgagcaacggggtccaaagtccaattgtattgcgagacatgagggtttttaaatccataggggaattcagagttcataatgtctagatggaaaggctcgggctcttcatccaagtcataaccaggtagtttcctgtattccccatcttagtatcttctaaatttatcttccaacttaatgattcgcaattggattggatcctcttgctgtcagttagcattgagttgttggcataaatcaggtgcattctgatttaagcgctcacataaatcgggttgtctccgaatcaaatgttcatgaagatttggttgtcttcgttcatagttactcacgaaccttgtatctgagtaactctcagattgatagctcctcatatttctcactctttttatcagcataacgacgaggtatatctcttccttgcgtatgcctttccgatcaattattatgccctcgagacctttaatatgtcccgagctagaacttgccttgtcctgcacaggccttctccttcagaaaaggttgaatacatgccctctgttgaggtatgtgtatgcctcctccctatcattttgagaaggacgctgggggtgtctcagtggtaacccacttgttctaagttgtgtcccaagatttctcgcattattatgagggatctcctattccctagttctggattgcctatgttctcgtttctacgagaagactctgggatgtcattgttttcattctcctgattcgtaaatccctggggtctttgtggtacttctcgacgaggtgcttgattattctattgttcgtctactggaacatccctagtttccccaggttgctcctcctgggtgatctggggattttcttgatttgtctcctgcctcgtggccttcttactccaggatcaggttggttttgtgcattgtttccttgagtcgccctggctgcggctacctctctttccaactcagcatttcggttgttagattcggccaggcattgccggagttgtcaattttttaattctactaatggtacatccctagtgggatcatatgcatcctcacttctgggtacataaccagtattagtattggtttcctcattccttctttctgggttttgataatgaccaccttggcttcttcttgaacgtgttgttcctcaaatgggtggcctctgtgaacccattggttctttttcaggacaacaattagtcttttcaggatgactattatcgttttgattatgatcagctatggacgaattttttgttggttaggagggatttttttgagttttatcacgtaggctctctatgaaagcacaaaactgctaacacagatttttattaacgaataatgagcctttttcgtaataaattaaacacaggtatacataagaaaattgataagtataataataataatgtcaccaggtattttacgtggtcttgcagttaaatctgcctactccacgagtgtatcttattcaaccgcttatcattcctatcttcaaggcggtcaacactggagtgggtagaggcctctcgctttgtatatagatgacctatagtaacttgggttaattatatgccttccagcaatggcatgagctccagtgtactgagcaaacttaagaactgctctttgaccataaggtctcgcagactggacaatcatgtcctacatgtttctaagttattacacttagttattataatgtagaatatacactaagtgtttcaagagttgattcgtctcatcaatatttccttatatgtagtgaggtggatgtctcgctatacattacccgtaatttccttgggattatgtcgtccgaggcaagacggtctctcgttaatacaggaattagtagtttgagtatccttgtctcacctaagactatacagtcagcgagttatgaatataatctattaattctatataatgagttattttattttgcattaaatgatataatcataattatatctagtacttcatattccacttggttgacacgtgtcactctctgaagtacagtcaaattttgggtataacaattgtcatttaacttatttattaattannnnnnnnnnagtctcttaattaataaaataaaccttaactactcttttcttctcaaatatgcccttgtttagtgaaaaaatcacaaacaagacatagtcttatttagaattctaattagttaattaaaaccaattaattgagtctacaagccaatatcatctcaactagtgtggggaccatgggcctatctaatcaagcttctaataagtagatctagaatttactaagtaaattccctaacctattaatttctcctaactccactatagatttagaattgaactcttaattacatagaacgctctattaccaaaaaatatgtgatttgaattacccattgtttcaatccaaatagttaaagatcctccatagatgatctacatcgattagggataaatttactgttctacccttcaatgtatctcatccttaaaacacttagatagttgtaaatgatatttcagtaaactaatataattactgaaatgatatctccattatttatcgtgttaagccaagctcgaaagaaatcattgtttgacttctaatagttatagaaactatagattccatatctatgattagtgccccactcaattgcactactatgctcctaagatggaagtattgggctgatccaattggtcagcttttacgaacaagtcaaagaacacaaataatatatttaagctaggacctaactatctcaagattaagatctattgacctaannnnnnctaagtgatattgacttagaaaaatataacggtaaatttatgatatcttatccaatgtcaaaatcggtccagtttggtgtaaactttattgttgattatcatgtcagtgtaaatctagtgtactgacaaatcatgggacttaaactttgaaatatataatcatgattgtttttcactgtgtagacaacattataatcatgaacaactatatattttgaatttaatagaatttatacattaaacatataatcataagagaaatcatgttaaccatgtaacataaaatgatttgtgatcttttattaattagtaaatctgattctaatgaaaaaaaatttatttagggcataaaatcctaacagtaacactattttcagctaagggaaagcttggatactcggtggttcgtgatattgctggggatttcactgtagctcagacctagtgcaaatctgggcaagtgcgggctgagttggctgaagctttcggaatcagagaatctttgagttggctcaaggaatacattaatcacgatgcaacagttgaatagaaatgtcaagttgttgttaaagttatgcttagatctcttcgtttgagttcttcttatgacattgtaattgaggattgtcgttctttatttttgtttctagagaatgtttctctttattttggtaagctgtctactaacac

SEQ ID NO: 22627 - DNA, 10016 bp, Cannabis sativa
taaataacttaggttttatcccaataacttaagtaaatatctacgtgactatataggtcatacgtcatgttctactattaccgggcatataatatgaaaatcataaaattttaaatacatcataacacctagaattgtaatatatctccataattgcataaataataaataaaataattctaaaattaaatcttaattatatgctaattctaatattaaaactaagcggtcgttacagagttcatgacattcaaggaaaatgaaacaagacattaagtacttaatggtgactgagtggcaattttacagggctatgaaaaattctatgcagatttaaaggggtcaatagctcaacaatttgtaatattgaaggatcattgcaatgagtcccttgggactcctgaatacactcaattgtgccctcagtgtttttcccaccatattaacataagtggtagcatcatccgttgtaatcatcaggtcatgtgtaatcttggaattcaacccatccagatacttttctttcttactaaagttagacactattctcgaggtcaacttagccagtctatcaaactgtgtcattttctctgtaattgacatattttctttttgtgtcaattgagtaaattcttttctcttgacactacgaactgcctcattgtaatattttgcattaaacaactcttgaaattcttcctaagtaattccggtgacatctcggatgagggataccatgtcccacgaaaccagggcatcttcctagaattggaacgttgcataagccactctgtcatttctagtgactcccataaaattcaaaatcttggtaataataattagccattgcttggctttcataatgttcagacctcctagaaagataggaggtgcttacttacataacctttcatagagtggttccattcgattgacaatggcaactagccccacttacatgacaggggcaagagccatttcaccttaggagtaggcatttcaagaaggcattgcaggagcaccttgctatctcagacgctgaatctcttcatcttgctcatcaatcctggcttgcattttaaaaacctattctctcaatcctgggcagcctgcggtggattgacatcactctgaccgggtgctttacctcttgggcctctgccttgatcgctaacattaggggaaaatttaattccctgactgccacttgattcgatcaaattaccctggcttctcgtgttccgcctcgcgtccattctattagaaaatcctgcgaaacagtgagctagcctggtcaaatcgcgatcaagattaaatttaaattaccgcttacttgagaaaataaaacatgcggctattcagttatcatgctactaatatgcttcttctcaggcttttcttatcacttaataataaaacaaattattaaagcataagaagcttactaaaacatgagtcgagcttatctctaatgacgattatacatatagtgacaatataacctggtggctctgataccaaattataacaccctactagattaggcgtgttatcgtgatttaaatactaactgtgcaatccgttgctaatcaacggtttattgaaaatcgtggataattttcaaaattttcttaattaaactttaaacctaattaattaaacattttacataacatgggatcccatctttaaaatatacaactattttacaaaatatttagttacaaaagttgtcgcctagcgactaccaaaataaagcttgttgctttgaagatcaaacactctaggtctaatcgcctcgatatgtagaatcttcattagctcgagctcactgctatttagctttagccatgtccttacatacacatgcaaataatatttatgagtcgacagactgagtaagaaaagcataatcataacataacataaacaagattataactaggcacccatacacccaattataaccctatctcgcgtcccacgcgtactgagtctagaacgttcatacgatagtactattgaccataatattatcttatacttggtactctagttgtaccaatgtaatagccccaatcagtactttgtcaaacatattcgtcgatatttagtgtaactctatgtacattaatacttccatcactaatatgttatctaacaggcattcataaacatgcacactaaacatgtaattatatatgcatattattattctaatcttaccttgattctgaattcaagtgtgtcggtcaacctgagtgaaaactgctgctcgatgatttacaggcccctaagtcacaacatttgtaaaactgataagtgatacgctaaatcactttttggagacttaaaattaaaactagaagtaaaccacgaaataccctgtcaatagatagcatggcaataccctaaatattgctaaaccacgaaaaactagggttccaaaattgctagaacaagtaaactagattctcaaaatggaaaatcagttcttagggttctgtttggggaaacagtgaaccggttctacatgactgcctgaagcgattaacaagttccctaaaagaaaccctaaaagctttaccatgaactctattttaccccaaatagtgttaaactctccaaaccacctaattaggccataataaacatattttaagcaataaaaatagatataaatctctgaatccaaatctgccattaaagacttaagtttgaacttaaaagctaaaaacttgatctttcaccaaattaacacccaaaccaacttaaaaacaatttaaatcatcaaaaaaatcagcagaaaagaaaacaattcagctcgtacagaagcaaagccctagaaattcagtcatgaactctaactttttctcttaaaaacacaaagataaaaggaagcaaaagccttacctcaactagttgagacaacttgctcataattcatcaagaaaacccctaaatttcttgcctcttgttgcaatcgacccaaagagtgagagaaagtaggttgggtttgatttttcttaagtatgatatttatcctcaaagtgtttgctaaaaaaaccaacttaatatttagcattaactagtaagtaaataacttaggttttatcccaaaaacccattcaaaaagataagtctattttagggtaaaatgacttaattacccatccttaaacatgaagtaatcaacatacataggggtaaaatggtcataatccataaccccgataagatactaaatcatatctacgtgactttatggtcatacgtcatgttctactattaccgggcatataatatgaaaatcataaaattttacatacatcatagttaaaacacttagaattgtaatatatctccataattgcataaataataaataaaagtctaattctgaacttaaatcttaattatttgctaattctaatattaaaactaagcggtcattacagagttcatgacatttaaggaaatgacacaggacattaagtacttaatggtgactggatggaaatttacagggctaaaaaaattctaggcagatttaaaggggtcaatagctcaacaatttgtaatattaaaggatcattgcaacgaggtgttagctacaaatcttggtagcacaactaaccttcagagtgacctagttgatggaaagagaatatacatatgtgtgaaggcctgcaaggattgatttttaagagggtacataccactaataggtttagatgggtgtttcatggaagggtattaaaaaagagtaatgttggcaacagttgggatagatgggactatctacatattttcaatagttgttgttacagaaaaagagacaactaacagctagacatggttctttgagctatggaaggatgatttgacacccactaaccctagcacattcattgtgcagtgattagaaaaatggtctccaaaatgttgtggagtctatcttcaacaccctgggcagtctcttttatgtgagacacatgcatggaaactcaaaaaggactatccaagactcgagttgcaattgctttgggtagcagctggagccactacaccagcagagtttgactctagaatgcaagagtcattaaatgtgacattttaacaactcttgcattctaaatcaccaactagttacttacaaatggttggctgctaaatcaccaatagaatggacaaaaccacattttaaagaggggattaaatgtgatatgttactcaacaacatatgtaaaagtttcaaccatactattatggacgcaagggacaagcctattattactcttttagagagtataaagtttttgttaatgtgtcgatttcgcaagagaaaagaatttgtgctgaagtgaacatgcactgtccacaataattattgtgaagattgtcaaacaacatcaaaaagtttcacgacagtgtttagaaatatgagtcaatgaattaatgtttgaagttaggatgaacataaaaggtggttgtatggttgatttggataaacaaacatgcagttacagagtatttcagttgactataataacttatggacatactttggcgactatttcgtattacggacatcatccatgggattatattcatgcttacaaccaaaagtcagcatttacagctgcttatgaaggcatgattgtttatgcctagcctagacaaatggcccaaaataagtctcaattcaatttgccctccaggagagcacaacttacaaggcatacttagaaagaagagaacgagagcagttgatgagccaccaccaccaactacaactaaaaacaggagattcgtcctggttatgcattgctccaactgcaaacaagctggacacaccaaaacaaaatgtagaaaccaaagaattcggccccacaaccacatgtatttaatttacatattgctatctatttattagactttgcttctatgaataaatgaaactaaagtcataacaactatgtttaggtggagaagaacaaaggaggccgcccacaagaaaaaacccatctaaaaaactttgaagatgaggaagagaaaaaaaaatagttggcaagggaggcaagagagaataggacaggatccatgcacaggtagctccaattgtaaggtcttccaatccaacaacttaatataggagaccattgatttactttttgaattgtaaatgtattttttttattttttattttttgttatgtgagtattggatgtatgaattgtaagtaatatatgctacttcttttttctttttttgaatgctaatttagggagttttaggtgttaggatgcacaatgggattatgtgaaaataaagagctactttttaatgttctcttttgggtttaagtgaacatcaggagcacaatcaaaaaattatttggtaacaaacaattatgcagcattgacaaataaaaaattggagcaaatatttgactttatttcattacattgtaactgatttttacataagttcatgatttcaaccagatgaaaataaaataactacaatacaaatctaaaagtttgattactttattttcaagaacaagaacacttgggttactgtcatcaaaacttttgttgtagtgagctccatctatgtttgtcaaatcaggaatttcatcaactttcgacatagatgacagttcatcttcaagcctccttatttttctcagcatgtctagtttaactacaacagcatgttcacacataagagagttgtaccattctcaaaaattacacccactctcatgctatcaaaataaaactacaaaaaaatattacttcttgtggaaaaatgagaagaaaaatgcaaacttacatgatacgggggggcatatcacgaatttcctgggttcgcactagtctactaggtcttcatcataactctctttgaggtcgacaacaacaattcacaataaggtgaaccattttctttcctcttctcttcttttcttcttcatcttatttgtcattctcttcttctcttcttcatcaatttctagctctaaaaaataagtttttgatttattttgattttgttatttagtttttattttcattttaattatttaattaattagtaaaaatattttttttttttagtattaggtaaaggtagtcatgatggaccttaatagtgatgtgtcgggacgacactttaaaaaataaaacagtagttttgaatgtttttttactaaaatttgaactttaaaattaagtgcaacgaaaataaaaattaagatggttcttttgctaaaatttcttaaattaaaataggagattacataaaattgcacatatatgtttggacacattaatttagcaagttgtaaatatacttattgagagagagagaaaagacacgagttggcatatttgcattggtgaaatgaaatcgagaaaaaaagagaaaaaaacgtttggaatttcataggttccagtcacaaccttagtccacacgcttggaaacaccctataaccatgcaccgctgccacacataatcatacccatctatgttccagttccaactccaactccaagaaacagaaagtctttcaactttgattcactcactcatgtcatgtttctctcttcttctttctttctttcttagttttcctttatatatgccaactcagtttgtacaaattcatccattttatcttaatttttttctagaaaagacccaaaaactgaacagacattgaatcatggcttgggaagttcttatcctgctttcatctaaattatttactattttctcttggtatgtgatcatctttgattaagggttttttttttcttttttctttttctttcttttccatgtgatctgaaaatactttcatgggtttcttcttcttctcatttcttatgaaaagtttcatcttttataatttatttttttggtgtgcaggccttcattttctttggtttatcccttgtaagtaattaattttttttcttccacatgattcttctgaaatgctgattttgcttactgggttttatctattttttttctcttttatatttttagttcataatataacaattatatttttgtaccttccaattcaatgtgattacacaggtatgcttcagttcgagcaatagagagtgagtcagaattcaaaaaccagcagtgccttacttactgggtcctgtttgctttggttaaaatgtcagaatcagtgcttgaaaagcttttgaaatggtaattacagatttggagtttattcttaacacaatgagaaatgcacccaaagaaagaaaggaaaaaacaaattatccattttactttatatcttttctaggtaaacttatttatatattatcattatttaaaaaaaaaaaaaaagaaataattaactagcttgctgattatacctttctttatggaacatggagtagtttaatctttttgacaatttttttttttcaatctgtgtgctgtgtgctatcaaagaatattattttcgctttaaatttaacatgaatatatatatatatatatatatcaatgtaaatggatcaaaacagcatttcttgcattttaatgctgctttaactttgcaagaaaattttctagattttacttctttctggggtttcaaaattgcagattccaggttggttgtaaaaaggctttactttggagattagagcttaattttgcatgttagtgtaatttaaaataagaaagaattgtgtaacaaaaaatggggatatgcttttggctttggaggaaactttcttaaaaagttcttttacagttcattctcggctaataacattttcttcaagttcaaactagttatgtttgaatgtgaaagtgtgatggagaaagtaaaataaagtgagctgtatggtaagatgcatggggttctatctcaaaactaattgacaatgagagaagtaactcatgcatcttacatatgctattatattcctacacattatcaatgtgactctaacaaataacgactaatatgtatttcgaagaagatagagtgtgtgtgtgtgtgtattatgaaagattattcttaattcgggtgtgtgtcacatactgatcaaacatttttgcttctttgcattacaggcttcctttctggccttatgccaagggtattattactgttttcctagttgtacaatgttttgctggtgcttgttacatttacaatcacctcattagatcaacttttttggggaattctctgatatggaagtttgaagaaaaaagagaggaaccttatgtttcaagtgaaccagagcactttgttcccgtggtcgaagaagatatcacgaatggtggactccacaaccccgacaagtttattgctgagcaggtaggcttttctgagcttatagagtttgatttattcttttagtaaatgaaattgtaatctatttgatttgtgttgttttcttacaagtaaagatgaaccaaatttgaagcctcagcaccaaggagtgtgcaaaatagtattcaagagtaattagtacacaattaactacctcatacatactgcttgatgaaaatatttttgtgttttgtctttggcagaaaaagcttgtgtctgattatgctttgcctgttattccaatcattcagaaggaatggtgctgtgccctttgtctgataagaacttcaaacgaaaataatttaatccaacacctcaaggggcggaagcataaggccaaagaagacgacctagcgctctacaaacagatcaaaaggaatggcaggtcttcaataatgatcaagaaaacttgtgttattgagaatcttaaccattttgcggtcaagttgctaaatccagttgcaagaccaatattttgtaaatggaaaaaaccgaattctggttggacaaaactaaatactgatggatccttagacaggacaactgctggtattggcggtttgcttcgtgatcacaatgggcaaccactttgtgcttttgtctctaaagctccaggaaatgatgttttctcagttgaattatgggctatatggagaggtcttgttcttgccgcgggacttggaattaaagttatttgggttgagtctgattcaatgagtgcagtgaataccattaatagacatcaatcctgtagtagtcagaaggttatcccctgtttgaaccaaatatgggagcttctaaagaaatttaacaagtataagatatctcactcatggcgcgaaactaatactgcagctgattatcttgcaaagatgaatcttatgggacatgacgtcgtttttcggccagttgacttcccagaaaagcttcacaacataatcaataatgatgctcaaggaaggatatatgttagaaataactggtaatctcctggatatagaaaaaggaaggtaaatggttaattttatggttgttgctaaagggcttgtgtatcatctacaaccatttaaagtttcttttctgaaatgttattgtactcacagaggagaggagtaagcagagagtactagcaggcattgaatttgaaacccttctgactttcattcttcttttttggatatggaaatggccatgtccatttggtgtatgatgagctaactgaaatgagcacaattacctcaacacactgaaatcaccaacattcttattttggtatgtaactaattaaactgcacttttgcttaggtttttaaataaccagctgagctgagctattagacttaataaattgtaccttagctatatactttgctagagtagtgaggccaaatgattatgagcaattgaacatcaatatcacctctcttttgaaaataatatatgaagaagatggtattaaaagaccaaatcaaaaattagagaacaataccttttgaatcttatcaagtgctatatatggatcggcggagcaaagtcggtaagactccaacttgactcgccaaagcagggcattggagcaaaactatatcttacgagccacaagtgatttaactattgggctactt

SEQ ID NO: 22628 - DNA, 4830 bp, Cannabis sativa
aaatacatacacctaaaatatttgatggatctaatccaaaaaatactaggcctacaatattgaataaacctaaattaaaccaataaatatatatgaagtacatccaacggatagaaccgatccaatccaacatccaatagatgttggatcaattggatgactgaaattaattggatcggatcggatggcaatatcttgagtcatcatctgcttctcattcttctaggaaaatcactgacaatccactctttcaacatcttaatcttattaaagagccattacagtctgatcatgatcacgattttgactttaacgattcaatcaattttcataagacaatggcttaaaataggatgatgaaagagttggccacaccagattttgaccaacaaccattgtgcatccactatccacccttagatgttaactttgaattgaaatcgggcctcgcccacttattgtctctttccatgggttgcgcaatgaagatcccaacaagcatttaaaggagtttcatattgtctgttctagtatgaaacctccttcagtgtctgaagaacaaattaagttgtggactttccctttctccttaaaggatgcaactaaagagtcccaccaggtactattaaaacatggaatggtataaatattgtattcttggagtgttactttacagcctctaaagttagaagcattaggaaagaaatttatggtattaggcaagttacaggggagtcattgtatgagtattgggagcggtacaagcatttatgtgctacctaccctcaccatcaaataagtgaacaactcctcatctattactcttatgaaggcttactatgtatggataggagtatgattgatgcatctagtggaggtacactagtagacaagactcatgcagtagccaagagcttaatttcaaatatggtgccaattcacaatagtttggcattcatggagaccttattccatcatcacgctgggttaatgaagtgagaaatcccgttgagaaccaacttagtcaataattagctcaattaacattcgtgatacaataacttgctttaggctaacaagtgaggccatgtaaaatttgtcaaattgtggggaattcaactaatacttgtcctacactatttgagggagcgaatgaggatgtgaatgttgtaggtgattttcctggtcaactatgttagatgtactatgaacctttttcacaaacttataatcctagttggtgagatcatccaaatcttcgttatggcaatcaaaaaatgctccacagtctacacctataaaacttggtttctacattcaaaagcagtctcaacataattttgtatgtaggtcaactcaagcaccataagttgcatcaccaccaaatgctaaaccctttactaaaatttaattaatgccttagccacgaatactctacaattttagtcgacaactaaagcctcattgaaaagcttggagaatcaagtgggctaactagcatcatcatataatatattggaagctcatatttctaataaactgccttcaaaaccttagaggaatcgcaaggagaatgcaagtgtggtaactttgagaagtggaaagaaatacgatccacccacccctctaacacaaaatattgtggcacctgagacataagttgatagctcaattgatgaagatgtgtctccaaagccaactaaccctccacaactaaagcctatttttgtcacttcactgccattccccaagcaaattgaagaaaactaaaatagaagaggttaacaaggaaattcttgatacattatgtaaagtggaggtgaatattcctcttcttgacactattaaacaagtgccacactatgcaaaaattttgaaagaattatgcactaataagtataagttgaggggtaataaaaaggttactgtgggggagaaagtttctactattcatcaaaagaagcttccaccacagtgaaggatcctggtactttcactattccttgcactattggtaataaaaggattgagaactgtatgttggatttgagatcgtccataaatggcattcctttttccatctacaatcattttaatctcggtccactttatgaaacttgaataattattcatcttgatgataggtcaaatgcttatcctagaggtgtcataatatatgtgctagtaaaaggcaaggaattggtgtttccagcttacttttatgttcttgatagggaagatgaacccattccatgctccactctaatctttttgtgaagaccattcatgaaaactataaggaccaagattgatgtgcatgaagttactttgactatagaatttgatgggaagataatctaattcaacatctttgatgaatattgcttagaatttgatgggaagataatctaattcaacatctgtgcgtgtcttagattttcataatgaagattgcttagaagttgtaataagagagtatcttgtgtttaatgatgaatatttttttagatgtcataatcgcactcaatagtggtttggacaagatttataaaaaggtttcattctttgaattatcaatttaaattgagaaattacaaccatttattctacaagctcctatatttgaattgaagacactcccagagcatcttaaatatgtttacttggggaagaacgggagactatcagttataattgttagagatctaaaccaagtgtaagaggaaagtttacaagagttcttcgaaattacaaaactgctatcggtggtctatcactggtattaagggaattagtccttctacgttcatgcaccaaatttttcttgacgaaggatctaaattgaaacatgaggcacaacaaagactaaatcctcctatgatggaaatggtgataaatgagatactgaagcttcttggtgtgggcattatttaccaaattttacatagtcaatgggtgagtcccatcaggtagtgccaaagaattggtattacagtagtgaggaatgaagacaatgagttagcaccaataacaatgtaaatcaggtggcaagtttgtatagactaccacaagctgaacgtggtgacacgtaaagattcccattagcattcattgatcagattctttaacggttaacagcccatccttattattgcttccttgatgtttattcaatatataatcagattattattactcccaaaggtcaagagaagacaacatttacatgcccttttggaacattttcttttaggcgtgtgtcatttgtactatgcaatgctcctataattttttagtgatgtatgatgaacatattttctgaatacataaagaacatcattgtagtctttgttgatgattttagtatttatggtgactcgtttgacaagtgtcttcacaatctcattgtcctacgtggcagtgcatgcaattttgatcaacagaaaaccccaaaaaaacctaaaatcatgacatgtgaactataaccctctacctcgaagtctttttagacgagtaaaattgtaaagttctttaaatggggtacttacttgtggtattagaggttggggtgtcagtttttgggtcgctggtgagatgcttgcatgaatgttgcaaagcttccttgtaagctcgtcgaagtccctttgaaaatccattgaaggtggttctagagtggaaataagcggactggcgctctgaaatagcttctgtcaaaattgtaacaatttgttgaagagctccgagccaagattagacattcaccggcaagtttctgggtttgggcggaatttttatctcttggagatttctgaaatttttttgaataaatcactaaacacgccaaacgatctatttgtggagtatttataacaaagttggcgatctgcgtgacacaaatctaagggctcaaattctgagaaaacacaaattctaccatccaaaggtctaggaatatcaaggtcacattcaatgcgatccttagaaccgttgggacatatttttatggtgatattcagctccagtaacacactaatatgatccatcgtcagtacaaaacttgaggcatcacgcgccgcatcagacttcgtgattaacacataccaacaattgtttgagacgtggatcgtgctaacgaaataagaaaagtttggaattcccacaatacctcacaatagaataccaagaggccagtccatctcatgtcgtttaatacgatttcaaatccagacgaaggtagcaagcctctgtgactctcgagttgagcttggggtaaatgttatccatgttatcgaatagctggcacgagggccattattgatgcccattagggataccaggcccattaactgggtctataagggtcaactactcggcccatctggtttcataatcgcttttcaataacaagtatggacacgaagtctaggatagcaattaacacttaacagaaaaaatgttatgaaatcaagaaagatatcctcaagcgccatccgagaatagaatacgaaagggagttcagaatcacttattatcctggaagtcgccccacctgacactcctttaacacgatcctaatgaatcaagcggcttgtcccttgcgtcagaccttggaaaggctcacaacaaaaaggaaatcacctttttgggcgaacaccaactattctaacattctttattccccacaatcactcacgttaacctatcactgtcaacagtacgatcgtgtatggaaggcaattcaattcaaattgggcctgacctacctggcccaatagctttgtatatgttttaaatgaccccatcaatgggattttagcactaaaaagaacc

SEQ ID NO: 22629 - DNA, 2418 bp, Cannabis sativa
  modified_base (156)..(159): a, c, t, g, unknown or other
  modified_base (350)..(380): a, c, t, g, unknown or other
cactgatgaatcatgggacattaatttttgaagcatacaatcacaattaccttctattgtgttgacatcactataattgtgaataactatatgttcaggatctaacagaaattgtatattaatccataaacatgaataatacatgtaaacataaannnnttctaatcttctattgataataaataagattatattgaaatgagttttatttaaggcataaaatctcaacataatctagtttattagagcttagaattataggcccatggtcccgaatcgtcaccttgaaacactattcagggaagggacaaaaagttgtataatattgttcaaaaaaatctattttgaannnnnnnnnnnnnnnnnnnnnnnnnnnnnnntaaataaataattttttcaaatagggaaaagaaaaaagttgttaagacaaaatttatcaagacagtatttattgagataaagttctgaggacaaaagacaccatccttttcctaaatgatacaaggtagacgcctagagtgtcctattaattttgtctttttggtttaattacttatttaattaattcaattagataaatatttaaatttaaaaagtggttaaagatatttcaaagtagttgagagattccctcataaataatagtaaccgaactcagtatggatatttatttaaatagttaagtgtgatttaattaataagctttaactactataaatagaagcttgatttgagaaattatgagatgcttttcacgtagtaatttttgaaattcactgtgagaaaacaaaaacaattttttctctcaaataattcttgctcatgtgttaagaatgtccacactattctttgtgtgcggtggttcaatttggaagactacggtgtgagtttctaaacaaccaaaaggatacaacatacgagaagtttggagggtacctgatagtcatcaagaggtacatattcttatcttgtaatttatttaatttattgtatacacatctagagatccattaagttatggtacaatgataatcagataatacaaaatcttctattgcgtacttgatttagtaccataaaaactaacatgtacacccttcaaagtgctgtatgggcatgacccaccatccttggtttgctattcaacaggatctaccttggtattggctgttgatcgctggctgaaagagtaggattccttgatgacttgaaggtgcatttcttgcgtgctcagcaaaatatgaaggaggtggctgagagttctcacaggcaggtggagtttattgtcggggattaaggtctttgcaaattgagaccttacggccaaaaatctttagctgctcgaaagaatgagaagttggcagcaaggtactacgatacttttttgattctaaagcatattggtaatgtggcttatcatttggacacttcttctttggctgccatacatctcgtgtttcatgtgtcacaactctgcgttgccattggtagtgctcactcttccaccaccctccccctactttgactgccgatttaaagctcattgtggagccatatgagctattgaatgttcgctgaattccaacttctccagatcgagtgtagaggtattgattcattggaaggatctgtcattgtttgaggctacttgggagaagtttaatgtcatccaagagaaattcctagccttcaaccttgaggacaaggttaatttttcttaggcctaatataagatttacttaaactagaagagggccaacaaaacatgggttgtattggttattggtggctaagctggaggagttggttaaggggtagtttgggtattgtttaggctatacaatgccttgagaagctattgttgggtgatgcgagaattagagtaaactctctgtttggagagagctttttctctttgcatgagaccttgtctccttcttttgaattcaataaagtttctgagaattattctacttgtgctactgtttttattgagattcttgcttgttaccataactctgctattgctgcaactaacctctcatctaagggcttttcacaagaaaaggtaagagacaaaatctttgaagtttgtgaaaagaaagaacctagttatgaagctacaagcagggttggccctaggcataggcgggctaggcccacatctaggacccacttattttaggggtccaaataaaaattatacatatttttttaataatttttaaaaataccatttaactttatagtaagggcctgaaatttttttttgggaaatttacatgctttactgtttttttttttatttcggcagtatgctgccttggttcaaattgtatatgttattattttgttttttttttactgattgggacatgggctgtcacaaaagtgacaagttttttttttttttatttt

SEQ ID NO: 22630 - DNA, 4364 bp, Cannabis sativa
agagctcgtcccaagcttcaaaacggtatatagaacgtccaaaacggacaaccgagtcaaaagttatgacaaaaatacgatttcttatcttctaagaatttctaagaagtatgaaactcgaaaattctaatttttgcactcaccgaaacactactaaaacttatccaaatcactccaaacttcacagggcgcataaataccataaatattaccattcttgcgtaatagaaattaaaattaagccttgaaacgaaaaacgccattaacatttggactaagctttaaaaagttcaaaactcgatttctaactcaaaatcacttcaaatttaacaagtaaacattgatactagtcccataggtaccaaagaacaattctacgaagtcagaatctccatagctattctaattcacaaaattcctatacgaaaccaattattttttaaacttaaaacgaaattaaaccataccttaagcttttcttctttaaggattcgctattctgctactaccggagcttagatcgctaggtttcggattaaaaatcgaagaaaatagatataaaaagagaattttttgtcaaaagggggagaacgagggttcgttcgttcattcttcattgttacatatattaaacttaatatatatatatattatataaacatatgaactgaaactgataagtttcaattaatatattataataataatattaattgttgcctttaatttttcccaaaatacgtggacttggataaaggtgacacgtggatctggaagaaccatcattcatgaaaatcagctaagtcttagataaaaaaagaacacctcaaggaagattcctcccggaggagggcataagacacatctttactcttcgggaggctagagccttgctaaggcagtttcgggaggtatagagattacttgaacaatcacttcgcatttaatgtcgcgtggaggaagacgtattgaaacctccataaaggacatgacagatggcttaagccccctttcactgcgattacactataatcaatgagtctagtgacggctacattatgagaaatcacatagttaagaggggataaaagattatatccacctaactcctaagatacctacgatatagggaatttatttcctattttgtatctattgggaatatgtgcccctatgaagctaacacagaaggacaagtgatccattcatagggatcctcccagaaaaaaatactataaataccccacaaacagattgaaattaaaaggggtcgaacaatttggtttaaggaatcaaagagagaaaataggacaaaaatccaccaagaacattgtctataataaatactctcattaataccaaagactcgtggactaaggctcattaacgccccaaccacataaaaatcttctgcattaaactttctatagctcttcttatatattacttaatttgttgctgaaaacttcggtcaacattttggtgctttcattgagagctgaagaaagtatctttaacacacaacaatctgaaaggttaaatcagcaatggtggaaactcgcaacaatacacgtcagccccgtcctcctcaggatgctcaaagcccaaagaatgaggaagtggcctcaagagtgaacgtgggctccgaggagcgagatgaggccaacgacgaagagtacaaagaaaactttgatgagtatgatgcttacaacgagggtagctatacggagttgttgatcttgaggcaaaaggttactgatcatgaagccgagatcgcagcctaaaaagagaaaaatagaaaaatgcaagaggtgatggttgccatgcaaaacgccatggagacagcagggattcatatacaccgtaaggccatcccaacaggactccaggaaacaccggaagagtcctcaccaagcactcgaaacccaaggccagagaaccaagtcctatacggtacccttccgaagaaaaccatgggaaaaacccgacttccattcccggaagaaagaaaaaggtgcaggatctgcgaaatgtccgctaagatttcccaaaagggaaaggtccccaggggggcaagctcccaaaagtgagtcttggccctcaggatcgagaggaccgaaagagtgtatccgtacaccactagcccagagagagaggaaggaaaaaccagagataccctccagttgacttaagacgaaaaatcaacgaaaaacacggtgatctacgagatcacctaaacaagaagaaacatgtaccagcggtctccgcggggacactaaatgaaggaattgtggctgagttggcaacactgcgcaaggacattgctcgagtctcccggaggcaaaaaggggacgactcagattctgattgcgaggatcgagagccatgcgcccggcacatattggaggcagagctccccaagaattttaaaatgcctgagatgacagcatacaccagggactcggacccaagtgatcatttatcccgtttcaactgggtaagtcatgagggtcagcaatgatgccaagtgtttatgctttccattaacattaagcggttccgctgaggaatggttcaaaaagttggaaccaggatcagtggactgctggaacaaactacaagtaaacttccagaggcagtttattgctgcaaggaagattaacctcgaagtcagcaccctgactaacatgaagcaattacccatggaatccttaaagaacttcataaaaaggtttaaagaggaagcttcaaataccaagaaggtggatgacgaacgacagcttgcacttcttcaagctgggatccgtacggggaccccattctggaacgaattacaataggagggagcaaccaacctccaagatttccaaaagagggtccaaaagtacatcaatctggaggaatcccagatagtggcctacgggggatactatcccactggggtatcaagatatatacccggagcttagctctcgggagccatacccccggccactcctcaaatgagcggcacaaaattctccgctacaccaggatataatcagagcctagagttggctcccgcatcatcatattttgggaatcccataagcaacccctcgaggatgagcggtcaagccccgtctcactccgctcctaccgtaagcctgacaggacctcctcaaaactcccgaagcaagaggtccttaaagggtagtaaccagacggaggataagtgacaacgaagggggtacacccctcaatatactcaatacacggagctcacggacacgcaggagcgagtgtattttgccacaaggcaaaatacacactaccgaaagcctcctcccctgtacagggacagtttgcgaagggatcccaagagatgtgaatatcataacgacattggtaattgtaccaatgagtgcaagaacttgaaggacgagatcgaaaacttaatccgattgggtcatttgtatgaatggattaagaaccagctaccccatctcaacccggtcccagtagggggcccatcgcctcaaggggcatcagagggtgcacccggagcaccaacaccccttgcaccccccgggggagcaatccctcagcaagttcctgagctcccaccaagacccaataggagagtggccatgatctccggtggaccccatattgggggaaccaccagaaaaaaaaaagttaaaacgctatgttggagccttaaaacacgacgaagtgtgggaagtcacccaacttccagcacaaaggccccgactcattaatcaacccattactttcacggaagaggatgccaaactggtgcattttccccaccatgaccctttggtcatagagacccccattgccaacaaaattgtggcaagggtattggtcgataatgggagcttcgtgaacttgttgttcaaagaggccttcacagccataggcctcacagatagggatttgtcacccagcgactcccaactcacaagattcaatgggaccacacttatcccaatgggaaaagtgagattgccagtcaccctgtgcccggataccccttagagtacttttaagtactgcacattcgtggtggtagactgcccaatcgcatacaatgccatccttggccgaccagctttggttgaattcgggcgatcacatccatccgacacttgtgcttaaaattccccatttaggaggctggagtagggaccgtaaggggcaattagggagaggccaggtagtgttataacgttgcaacacatttgccagtactgatggtttgtgagggtatcgagccagagttggcagaagaagatgagttagatccccatgtgggatccgaaaaaactgtagaacctatggaggacatcgaagaagta

SEQ ID NO: 22631 - DNA, 5055 bp, Cannabis sativa
  modified_base (3992)..(4011): a, c, t, g, unknown or other
tttcctaaaaaaaacaccaaggtcgcagattcctcttttctttactaatttttgtagttttccatttttagtttcctattgtgatgaccgatagtattttggtcataactctcttaatataacttagaattggacgattaaagttgttttggaaagatgacagagagatctagaactttattttgaaaagtttttcccaaaagtgaatggataatagtcaaaaattggcttgaagcttcagactttactttcaaacataaacagagcgtgttgaacatccaaaacttagagtttttcaatttatttttggaaaatgatcactcttgactctagagcatgaattttggagctaaaaatgcaatctttgacccattttaggcaataagaaatcaatccaagctaaaagaagtttattttctgtattatattttctcatttttgctcaaaaaggcttgtagaacaccaaaataaccaaaattgaggatctccaaatacttttcctaaaaaaaataaaaaataacacgaaccataattttgcacaataaaataataaaaatactaaaacacacactaaaatgaactctaaaaatgtataaaaataaacctaactctcttctttggcttctattgtgtctttaacctcaataccgatttacttgtcccccatcaagtactatgccactcctcagtgagatagcattacgttgttcttttggattgacaactatatcactagggaaattactctttttctgtacaacactcacaacattggccaattatcccacttgcaccgttatgttcttcatggaagcaataatattagacaagtaagtctccatgttatccaaccttgtttcattcttgttaaacctcttgttggtctttatcatgaaagtacccaaaatgtcttctaaggacttcttctcttcttattgttttttattaaactcatgaggaagttgcaagtcatttttagtgttaccataagaaaagttctcatgatttcataaccccagatgctagtagttaggaattagagcacccctgtagttgttattatgaagtctattggccatgtactgtgcttattctatactcatctcaggcccttgtgatgcggatgcagcagcaacattctctacaacaaatgtatttttctcagcaactaggcatccacttgatcaaataaagcgaaaatttgggctgctatatttatcataggatccacttcatataaaccagccacctttcttggagtatttttttttttccattaggccaattctagctatatgtggccatcttttatagtaaattaatggcttcagttgcagccttagacaatactgctcctccataaacaacatcaataatagtcctagttggactattcaacctattgtagaaaattaaaacttgcatccagttctcatagccatgttgtgggcagtgacgtaataagtctttgaattgctctcatgcttcatatagttgttttgaatcaaactgcctgaactttccaatctcactcctcaactgtgcagactttgatggagaaaagaatgtcaccatgaactttctagtaatttcgtcccttgtagtaatagaacgtggctgcagagattgcaaccaacttcttgctctcccttaaaggggaaggaaagagtcgtagtcttatgacgtcatcagtaacacaattcatcttcagcataacacatacctctagaaatatggctagatgaatattaagatcttcagtaactatttttggccttgaacaatccttgacagactcaatctttcctggatcaaccatgacccatcctcactaacaatgtgccctaaaaaggacactcgagacagcaaaactcacatttcttaaatttggtgtaaagcttatgttctcgtaattgttgtagatgttgctcatgttctgcttatgactgagagtacacaagaatatcattgataaaactataacacatatatcgagaaaatccttgaataccctattcatcaaatccataaaagctactggtgcattggttagtccaaaagacataaccaggaatttgtagtgaccatacctagtacgaaaagcgatctttggaatttcttcctctcagattctcaactaatgatagctcgagcggagatcaattttggagaagactgtttgtaacgtcctactcaaaggaatgccacgtgtcataattacaatctattaatcccgttaatgggggcctataagccagatgatttgaagtaaataaataataaacttaattaaataaataacttgcaattaacatacacattttactttaaaccaaaataatttaaagttacataactaggattctgtaaaattgttttcaaaatattacaagttattttgtacaagccgacctaagcagcaaaatagaatttctatacaattcttgttggacccaaccctcgtggtctagcttggcaagaacatgtacaagtcattcgcaaactcctcgatctcatgcctgacccaacactgctctacccttgcctgcacaatagagcatccgtgagccaaggcccagaaaataaaaaaaataatacaagatgaataattataaataataattacatttcatacagtacgacattgcatacatattgtgccatcgtactaaattacattattctatataataatatcactataattaatgtttatgtagcatagacgtaagtgttacgctcacacgtctcttttaaatttaaggccttactagggtttgtctcggttataatcatcgagtataacctagttatgtcttacacacataactctgctcacatattcaattaataaattattgcacacttataacaatatgcacttagggtaataaccttaggtctcaaattcacattaacaatcaaatatcgtaatattgcgccactacgcttattctatgtgcttagttcactatcttaccttatttccaatgtatgtagagaaatcccgatcttcttgtgattctgaccaagcactgataatcctagtcataatttctaggttttacaaactagggttaatccccctgaaatcacattcataatattcaaaattaagtctccaatattggaacaaataatagagctcaaaacaagctttctgacgatatatagaatgtccaaaatggagttcaaaatcaagagttatgtataaaacaaaatagcaaagaaataattaaactaccattgccatggtcatgaccagacttgtggtagtcgcgaccagagcctaaacagggctcaccctctctggttttgagccaggtcatgaccaccataaattggtcgagactactggctttaaaaaccttgaaaatgccaagaatatcatatttaacccaatgtgaacattaaccaaatcaaacccaaacttgttacttaggcaattgatttttcaaatcaaagtgtttctaagcatcacaaacaccaaaatacatgctcaaatactttaaacaaacaagattcaattacaccaaaacatactctttaaaagctcaagaacacacagctagaatcttcatgctcatctaatatagtgaggtctcttttagttaatattgtgaggtcttttctttcaatactgcgagtactataatattgtgagccactttaaataccgcgagttctctatagccaagtccttctcgcatggaggataaattttttctaataacacctttaatccagatgctcgcatgtcgtccaacccaagtggagaaatattcccgatgatcttagcactcaaacttttcttcttcaaagattaccgcccagcttctactagggcttagaatacaagtttttaggctgaagattgaagaaaaaaatagtggtggtgagagtttttgtcacacgaaagagaggaagggagaaggttatatttttttcttttaagtttatatataatctgattaaaataataataataatannnnnnnnnnnnnnnnnnnnaataataataataataatgacaacattaataataataaaaataattattttattattctatagtcattaaaaatctttaatcctagggtatttggtcaaccccgagtatcctgaaataccccgataagtctataagtaacttatcttaattattccattaatattactagctaaactcgttgtgatatttttggcctttgatcgggtgtctaggatcgatgaacctgaaaatatttttattttgcgaatagcttatattatacccacatgctctaaatatatctctgcaattaataaattacacttatttatctacttatggcaaaatttataatttatgctaaaatacgttagcacgatcataatcctactcattactctctaattaactcataatatataataaattctaattattcataattagatttccgggctattataagtaaggattcaacaaaaccaagggtaatgctcgaagaaagagagtcaaatatttgagaaggaacgcctggattatccataaaaagaatagaacttatcttggattaggtcaaggagggtcgtagctcggccaaaatcaagatgaattataagttagacagttttgagaaagatcatgtctaaaactatgctgagataagatttaatcaagtgataaccgagatacaattacctcaaattcactcaaagttaagagtaattgtattcaccattatctaagatagactagtttgataccatgccaagataaaacctatctagttatcagctgagacacaaataccttagaattaacagatgtcatatgtaccccgactcaggcagagataagttatgtaccaggacagtcccaaaaaaaccacgaaccaagctaaagtcaaagcctgactatgacttggcgtaataagtttggacactgctgagatataagataaaaatactatcaagccgaaataaatcacatcctagactcatataaaacaaaactaggttaaataatttaaaattaatccaaagaaagataatcataacctaaaaatt

SEQ ID NO: 22632 - DNA, 4143 bp, Cannabis sativa
catttgtctacatttgtaataatttataaattcaatgtaattaaatattttttacaataaaaaaattagaaattataaatataactatatgatgaaacttaataaaaagataaatttataatgtgggcaactcattaagaatggatttgataaatatacattatactccgttagggatatggccttaataccatattgagaatcatagggttccatctcaaaaccaattggcaatgagtggagtatcccatgttcttatatatgactcaatacttttacatttaatccatgtgggacaatgttctccaatatagtgacacgcatgaatggattaacgagatttctactgtcctgtctactatccagtgaaaccacaatcaattggttttgaaatggaaccccgtaattctcaacaataacaactcaagagcttagaaaaatatctctttaaagctagatggcattcacatttcatcattcttctctattctttatgaaaaaaaaaattctccaaaaccatcccatcttattactcatttcttaattcttacacacaaccattcaatgaaatatattttcttctccaatagtttaaatcacaccatgcatgtaccttcactaagcttataaccatcatttcacaagccttattccaccgtgctaataaatcacaccacttttactaagctaattataacattgacaagtctcattctgcatgataaatattaagctcgtaattcattaagatctttcaccagcttatctaatcataagatcttatattcaaacatccaaatttacaccatctaatatatctgatttatttactaaatactcacaaaaaactaacttaatctatgttatcacatttgcctaagattgattctcctgtacagaaatagatattatttactcttgattttcgtaatcgtctccccttaataaaaataaaaattgacttcttgttattgtagacgtatgtaaatttaatttgctaaactaagtaaattcgtgttatagtatatatgtaagtatttattatattcacatatatattgttgatatatatttatgaaatatgtcataatagttatatcaaatatgtaatcgtgatgattacattgttaaacggttaagattaatttaaaattaactaaaataattaataaattacctgtactataatagcaacttgattgtatatttattttcttataataaaaaaatatatttataaatattaattaaaaatatatatttataaatattaatttttatcaaaatcttattaaatattaatttattctaagttaattgtaattactttaagtcttaaaacataatttttacatgttagtaatttgttatagcatgatataagaaatataattatcatagttatatttttaatgtactctattattaaatgtttaggtaaaacttgaatatgattaaatatttaggtagaactcttaaacagaaatcattaattttctttttccattttctttcttaaaatctaaatttcaaacaaagttgaacatagattgttggatgagaatggaatcatcaacataattattaccaaaatattatcataatcttttactttggatataatttatgaactagctttcatttggaatgacattaacattatttaaagggttaaaataattttggtctgttgtgtttaagcaaaattcaatttaggcagtaataaaaaaaatctaattaattgaaaaaatttcaaatgttttccttttttttaagcattatgcaaatgtttttattgtttgtaatccggtaaaaaaaattagactataaacataaatttaatcaaaaatggttgttcttagtttcagctaattagactataaactgaggtttgaaaatgagtgagaagaaaaatgatgaaatagtgcgctttagcacttggactgaatttgagattgatcttagattggcccttgaatgttaataatgaggtagaaccctctttgttcctatactattgcttctggtctttaactctcctctcaaacttagattgtgaaaagattggccatcgttaatataattttccggtggtccggtggatagaagggctaacatgtttttcttttcctctgtccacagtctgtattcatacttagtatcaccattatgcacaaatcctaaaattcaaatacttaaacaaaccaaatccaacataaattcattttttttttattacgaacaaagcaccactttggaaattgcatttgcacaaacgatactaggttaaagcattttgattgcattactgtccaattttataacattactccaataaaacggcactgtgataaattcttaatacttggcatcttttcacaatttagtgtctttgccacaaacataaaaagtcaaaataaatgatcataacaagtttgctttgctgaggctaaagctgtagggtgtctctcatatgggtcatgagagttggcctatatttttctttttaagtcaaaatgcatccacaatagtacattacaattatacatacatatatattacagttttttttgccacttagtttcaattatgtcttatatgcatttggttttactataagtattactaatattgtatctaatctaatgtgtcttacattattggaaaatttgtccttaccaattgaatatgataatctatattagatatacaaatttggtatccataaatcacgtaaattattcagttgaagattttgtaatgagaaagttgtggacactaccagtaatccaattgggtttcacagcataataagcaactttgataacaaatgcataagccactgattttagacatgaaacactgataaatatataaaggaaagctttatagacatgaacaaagaacaccctttccttggaatgtaatgtaatcagtatacgaataaggtttggagtgactaaacataatctactatgagttgcaatttgaatgtacaattcctacaccaatctgactgatgcaataaacaaatttggttacttgagggagcatggtaaaaaaatagtgcgcacctacctggtttttcgccaacattatctgatatcatcgcggattttgtaaacttgaactccatcttttcttgatctggaaactttgtcatagtgtagcagcctctattggattgctttctttcttatattgctaatattcagggagaggagttttgtatgatgattctgaagtttaagaggaccgtctacgaattatcacgtataacagggaaagtgaggccatctttcagatggcttactgcggtggggcaccaccattttagcatgtttgggcctaagacctgatcaaacagatgaaaggaaatgatcagtttttaaatgctgacagtgtgctggaataacacaaagaccaacaatttattttaaacggtgaagaaaaagcaaaacaaaaagaagatggatcaacacacaaacaaataaatgtaataaacattcatggggagagaaagaaaccaaggtaatgtttttgtatgcattaagatcaaacggatgacgatagttttgcccagatttcttagccatccatgctgagcgtattccttcataatactggcaaagatccattccttagatcatgagcaaccaaaaaacagaggagaagaaaggaaaaacagaaaaaaggtgtgtccaatatgggaaacttattacgtacctctatggttgtcatgttatggataatgaggtagatatgccaaccgaatagtgtaccaagcgtcaagctcagggcagacatcataactccacaagtaacctgaaaatctcaaggttttaagcatatataagataattgatgaaagttttcagtttagctaacatgcaatatgagaatatacaaggtcaagtacttgggcattatttaatcgagcaggcagcaaactcctagaatcttgactcataatcaagtgacatagcttaatgttgtacagcagcatgcgaaaaatgaaatccgaataagttcaaaatttaagttagtttaacaaactttacaaaaaggtcacgtcatatgggcttctctaagggaaaaatggacaaaaaactcaatcatgccaaatgcacaaatcttgcattc

SEQ ID NO: 22633 - DNA, 3584 bp, Cannabis sativa
gccacatcgtggatagcatttcctatattatgaaggaaagcctgaaagacaaggtagctaaaatatagcttatgattatgttatgtgcagaagtagagaattcgaatcagcacaagaccgtcaataagcacataatttatctttgtgaaaagaatttatcaaacaaacataaaaaaaaaaagataaccatatatatctgttagtatatatctacacattttcacatatatggtaaagaaagaaaaaaaaaataatggttatgaaacaaaccttgtcctgacccccgacatcccaaacggtaaagctaatgttcttatattcaacagtctccacattgaatcctgggtaacaagaaggttgtcatgtttagtctccacaatacaaataaaaaacaccaaagaaataatgatggctataagtacactgtgactactctaattataaaattaaaataagcataatgaccaaatataaaattaagaaaagtgaaatggcataccaattgtaggaatggtcgtgacaatctctcccaacttgagcttgtacaagatggtagtcttaccagcggcatcgagaccaaccattagaattctcatctcctttttggcaaaaagccgactgaagagcttggtgaaagacaaccccatctcttaaactcggctgtaaccaatacacaagcattagaaactcaaacaagtaaacaacacgttaacagctagcagatctatatgcatttgaaaagccaatatcctaattatcatatgattcatatcaccaaataaaagtgtaaagtatcagatctgttcatcaaacacagtagagaacaaaccattattcaaaacctaaaaaaagatataatatttcacatgcttgatttctttctcattacatatttcgtaacaaatcattctatacatctcaaattacaaactcatttccaacagatctaaaaacccagacccagatctagtttgcaatgacatgaaaaacgcaacactcaaacaaagagattcaactaaaccaagatccattccactctaaaatcataccgatctacttacatgataggaatccattacatatatacatataaaaatatacaaaaaagagagggagagagagaagttacatggttcaagcgaagaagacgattaggagagaagatgatgatgagaaaaggggcagatctgcgaagctgcccaggagagaaatgaggcacaaattaaacagagattacacactcacatatttatatagacataaaataacggccatttgacgacgttggtgacgtggaagaagggtgagtatcagacgttatctaccgttagggtttgaatgggtttgagtttgagttagcgatccaaggagtagtttctatgagcgggaaggcatatggaaacaacgctggactacaacttcatttttttttatttactagtaattaataattagatttgtctgtaattttttttaaaaagatttgtgtgtaattaaaattaattatacagtttgatatatttatctcactaattgtataattaaaagtaattaaatggtttcaatttatatatctatataattctcttgctaagcaagatgacatagcatcctaattattttcatatgatagtgtgtaattttctattttaaaaactttctattttaaatattaattactaaaaaattattttctaattactaataattatgccaaataaaatatataaatttatatgtaattaccacaccatattcaaacacatcttttatttttaaatatagtgtaattaataatctatgtaattaccagtttaataattacactacctagtgattgagtgtaattacattataattactaaaaaatattccaatttaaacattaaatatttaaaaaaaatgattctttcgtgtaattattaattattttgttaaacaagattttaaaaaattatatgtaattaccatctcatattcaagtaatattgtatttaaataaaatgtaattactagactagactgtgtattatcaccctagctagtaattacactgttacttccaaacatactcttagaaaaagttttagtggaactcccaaaaaaaattcgaattgttgggggtagacttctgatctgatatggcatgtttaaatttttttgatcaaatttcttttatgatagtgtacgttgtagttatttgagattatttctaaattaatttactcaaaataaagttcaaacagatgtagttatttatttttaatattgtaaactattctaaatttttcatatgtgattctaaacgattatgaaataaaagatagactaaaaacccttcctgaacgtcgaacaagttagaagatctatcaaaatattcatttaatagagtgtacgtaagtgaaacacgtctttaatatattaggaaaattttatagtatacttttttaagaaatgttgtaaatgattatcgtatctgtttcgacattaaagaaaatttttagtctaattttttttatcattacgatagtttttaaaaccattgtataatttaccaaaaataaaatttaattagttataaatcattaataaaagtaaaactagctttttattattattattattagtatttcttttttttttttagagagaaactcgttgatagatcaactcaacatcactccttttgagttaagagaaaacaaaaaaacatctccttctgtatttatcttttctcaaatgactaaataatatatttttttgaaaagtaatgattaaataatattattatttacttggctcttcttttgctttatcttctaaaaaaataaaatgaaaaacattgaatggtttctagaaaaaaaaaatatatatatgagctaaaacttcagctaccacacacacggtggacctcactcactgccggccatctccgagaatttgaaaccacgcgccaccatggcttgtaagccatttttggtcgcatcttgtttgtgacttccgtcagttaggtactttcatttactttgtttgattttcgtttcttcttcacttggctctgttgtatgctgaaaatgaaaacttcaggattttttctctttcctatttttgtggggagattgaaaatttgaaactgttggttaatttgatgttgggtattgaattattaggatttttagtttggctatgtgattcagttgagaagattgcatttcatacaatttggtccctgaattctaataatggtgtgatttttgtaagattctattaggtctcttacactcccttttcaatggtatttcttttaagaatctcttcctctacatgacattactatagctatatattgtttatatttgtagttgggatgatttgttatatctctagtttaatcaaattgatcaacctatgcagcacaagcttgtgccaatcatgagtcagggcactagtatatgacatagtaaacaagcactaaatacgtttatagattgaaaagaaaatcagagaaaataagaagaggaaagatgagtaataagaaaagatcaaaggcaataatagttggaggtagcatagcaggagtggcc

SEQ ID NO: 22634 - DNA, 1078 bp, Cannabis sativa
tatatatatatagggacatgatttcactcaaaaaaaaaaaatatagggacatgattttgtcccgtagtgtatttttacggaatgtattccgtgaattcgttaagtgatgtacagtagtctttatatgagtttcagagtacgtaataatgggtgatagggtacattaccattttttaactctaattacctctagatcaatctcaaccctcagatcaaataactaccacatctaacggctaccgtacattacgaaatacatttcatgaaagtacactaatggaagaaaatcgtgtccctatatatataacattattatttgtacaatattattcctaaattatttcaatataatataatataatacttacaatatgcaaccagaaaaaactaaaaatggaactatatactatctcaattatatatcaagttagaataaagtttgtcatttcccatgttatacattaatgttatattttgtgcaagttggtgcaaggaattttggcatttttttcttttcttctatcctaggtctgattctgacgtgggtaatacgcaaatataggaagaataatatatatataatataaagcacctaatcttgtcaccaccatgcaccatcatcaaccatcaatgcttgcttgtagagggacaacacaacacaactcaatttccaaatgaaatttgactttttatatttaaaatgctaccaaataataaaaagttctaaatttacactcatcaaaattatgagtattaaatctctttcccaaattctttgtgccattttaaatttttgtgtggttatctataataagttaatatatgggcttataaattaagattatttattgaactaagatgtaaaatagtcttcaatttataaattaagttagtaaatatttattttttgaaaaaaattaagataatgactaaatataataaattagctaataaaaattataaaaataaattttttacatattattttttaaaaagaatatataataattaaattaagttacataattcttatactattacatattattatattttaacaaaaataaataaatatatt

SEQ ID NO: 22635 - DNA, 3234 bp, Cannabis sativa
aaaaagaaaactcgttttgaagacttaattaatttattttgtttacgtaaataagattattagatttaaggactttgtctaattttagtaaaaaaattctaatatagatgaaagttcagggatcatgatttagtacatatcaaaagtatgagagacataatttaataaaaagatgtatgtttcaattaaataaaaactaatgatacatttaattaattaattatataaaatatatttttcaacataccccaatattagatgtgttaatgcctaaatatatatagctcttctattataaaataagtggatggacatgaatataattgttgatgcactaatagcggttcacattattacttcttctccatgctacgtttcttcacactctttacaaaatccatcttcatcatttaatgtcatcatatctttttcatctttatataatttactcattgcttcaactacttcaccttctaaatttaaatgctccaccttttttttttcacacatttagttgatatatgcattactaaatgtcttaatttatatacattggctgaatataaaacttcattagtttattaaaatatttaatatatatcataatattaataactatatttatagtttccattcaaaaaaaaaaaaactatatttataaaaaatgctttaacttataataaaatactattactatgcatatatacttatttttcttcttctgttaatgcatatcaacatgacacacatgatgtgtttaaagtttattaactagttcaatcactaagtttaaaaatttacagttataaaaagtacttgtggtgtacttaatttttgtaaaataactactaaccatcgacaagtaatttttcaccatcatataaaaaatcaattatctgatttttcaagtctggtctcttgacctgtgttctctctgtctagtcagcagtaaagtgtgtcttgttttttcttgttacattctggtacgtgagccatggcagatcaggatttaatggatttggagaaggagtgtgatcatatcacgctaacgggaggagacgatgacgatggggggttgttatatgatacgaatgaaaaagaattgtccgagtttgatgatcgatggtgtctagtgggaaggtttcttactgaacgaacactggatttcatggcgatgcaacacaagatggcttctttgtggcgaccagggagaggcttatttgtgaaggaattggaggagaacttatacttgtttcagttttatcatccgattgatatcgacagggtggtggagggtagtccctggacatttgatagagtaccattggttttttcaagacttaaggaaggtgagataccacgatcggtgatgccgaacaaactggatttttggattcaattacacggtatgtcaaccggttttatgtctgcaaaagtggtcaaggatattgggaattatgtgggtacctttgtagaggcagataagaataatttcatgggaatatggcgtgattaccttagagttcgtgttgcggttcgggtggatttaccattaaaacgcagaatgaagttagagaagaagggaggcgaaatgtgttatgctaattttaaatatgaggatcttccaacgttctgctttatttgcggaatccttggacactctgaaaaattctgtccaaagttatttgatactccgcctcatctgattaagaaaccatatagtttggagttgaaagccatgccaaggaggagacaacacactatcggttcgaggtggctcagacaaggtttaatggcgagagtggaagattccggcgactgtggtggtgaagcttcaggggtgaaaggagcaacatcaggaggcgtaattggtggcttcaatcaagggattaatatggcaattccacgatctgggggattggaaggtggtcataatggtgttgatatgagtatcaatgctgacaaatcaccaatcaatgaccaaggaaaacctgctaattatattcctagggagattggcatggacgaggctattaatgaggatatggatggggatttaattgttattgattctaaaaggaaaaggttagctaataccttacttgatgggccgattgaagctaatggggagagtacaattgtaagtagttcattggagacaaaaaacttcgttggggcgggctctgtatcacaggcccgccaagaattatgaatgttctgagctggaattgccgtgggcttgggaaccaacggacttttcaattccttaaagagattgttactcaaaagaaacccaactttattttcttgtgtgaaacaaagtgtaataaagctagagttgagtatgtgggccgacttttgggctttgaagggattttttctgtagaagcccaaggaaggagtgggggactagctctattttggaaaaataacattgatggtagaattgttggcttttctcaaaatcatattgatttttttgtggaaattaatggtgaacaaaactggagactgactgggatctatggagaaccgcagagaacacaacgggaggatacttggaatttaatcaagtccctggtgagtccttcgaatgacccttggtgtattattggagacctaaacaacgtcctaagtcaaagcgacaagaaggaggccttccctacccgaactggttaataacgggttttgaacagactctcagcgattgcgatttggtggatatggaacttgttgggtacccttttacttgggaaaaagggcggggaacttcaagatggatcgaagtccgactggaccgtgcactagtttctttaggttggtatcaatacttttctcattctcggttattgaatattgaaacctctccttcagatcataatcccattctccttgagtttgttcttcctgaaaaagtcattcctaaccgtcgttttcgattcgagaatgcatggctcaaagagcctatgtgtttagagatagtaaaggattgctggaatgatactggccgaatatctgtggctggaaaaattgctctttgtgctgaaaaattatccaaatgggggtcgaatatcacaggaaatttcaagttgagaattaataagtgcaaaaccgaactgaagaggttgaagaatcatcgtgatgatctatctgtccaacggtacagtgagattaaaaaggaacttttcttagtgttagatcaaaaagaagctttttggaaacaacgggcaaagc

SEQ ID NO: 22636 - DNA, 1429 bp, Cannabis sativa
  modified_base (1371)..(1387): a, c, t, g, unknown or other
actcaaaaattgaaaccctagttggaatgtcaacctgggcactaggtgaaatactaaaagatggtgagttggaagctacttggcgggatctaaacacccgttttggaggtccataatcaatctgggtgcagggctagggacccctcccaagtcgactgctatgactcgggactactcaactctgagatattttctttcttcccacatgtaaaatattgatatccacgtcaccagaatcagtttctaggcaaacataattcatatcaatatttattattattgttattattatatgagtatttaagtgtaacaaatgatacaatttaagtagtttaaccgttagaaaaaggatatttaaatgtaacaaatgttgtagtttgtgtagctttcagttaaaaataagtttagaaatctagtctaacaaaccataaaggtaagtagtttaaccataattaatcgttcttttttatcgatgatatatttgtttagaactctttttcaattgagattttttcactcagtttgttattagaattttaacgacgctaatttttttttctgtaaacaaaaacataaaattgaaatatttatttaaagaagttttggttagaagaagaacaattagtggggaaaggggcaaattcgatctttatttgagcaaaaaataaaaatagagtcaagatatgtaggaatgaataaatttaattttaattcatgatgcatcccttttttattcacttgtcaaatttttttgttgccattgtgacattgttagagaataagttcattgtggtcagctgacactcatttttcttcttcttctttttttttttttttgttttttggaaaggaaacacacattttgcttctaaacacaactttgttgacattttaactaaacctctctttccagcttagtttaaagaccaagatgagtgaatatgtatcagctcaatagagcaaaaacagagagagaaaaacagggaaagagataaagaagaagatcaattgtattatttctcaatgaatgaattgaatacaatgaaagcaaactacttatagtagcagagtacaatggactcgatcactaacagaaccaacaaccaacactcactgttcattacaccaataacagaaataactaacacctaaccgaaacctaatcaacattaaccaacttgatataatgtgtattgtacatcttaagggaaagtcttaaaaatagttaggattgttaatttattttgttatcactatttctatatatactgtaaagtcagcctttagcacttcacattttgacctattatcaataaaaacatttttttttatttattattaacattagctttcaatatatatatatatatnnnnnnnnnnnnnnnnngtgcctatctaacggcatttcttgtttaacagaatatactta

SEQ ID NO: 22637 - DNA, 2288 bp, Cannabis sativa
  modified_base (2220)..(2234): a, c, t, g, unknown or other
tctcatatttagaggacaaagtaataacatactctaaaaatgactcgaggaaaggaataaaaacccaaaaatgtcaaattcgaatatgaaaagagtgatgtattattcataaacttacttcttttgaggggacgtatacatagggaatttcagcttcttcacacaaaattggaacatgagtgatgacatcaataggagaaatatttccagctataacacacactctacatccataggaaaagagaaaaagaaaaatcatcaacaacatccattaatgcaataacattgtattaagcaatcttctaacaaggcaaccacatcagtgttgtttacatattagttagagcagaatataaatatgcctacatacattagttgtcataaacaaatatgactatataactacaaggcggataactttgcaatatgttttgccaccttgtaacgctaaacaaatcaaccattatttctcatagaaacaaataagcagtaaaactgaccccttttggccacgtcttatacttttgaccacctcttttactcctctcttcaagcatttgtgctcagcagctgtaagaacagagagccaatttaaccattatcacaaactacatcatcattgagtcatataaaccatattgaacatttttttaataaggaaaatagacccttctatcaaacatctcacatgcaattggaactcgaaaatatcaaagcgcaaaataatccatgaatcgatgggttttctcagaaactagacagactgataaagagaacggaatcaaaagagggcaaaaaaaaaaaaaatacctctacggactagctttagggttcgcttgcaaagcttcttgccagctagaggtttggcaatgggagcgagagcttgcatcttcttcttttctttctccttctgatgagacttctctacttcgctatcgcttcccattttcttcttctgttcacacacagtgtccttcgatgagttatggcagaagagaatgagactagggtttctctgttttctagggtttaagcggcttaagtgtcagccttaacacgtgcaaccctcccgcacgtattgggttcaactgaccagaccagccttaacttctggactgggccatcactgatgctgggcctaacactttgtttggtaagatggaagacaaatggtaaaaatagattaaatataggtattatttcataaatacacaaaaataataaaaaaaaattacaaaaaaaaacggttatacaaaattttaaatatttttatgatttttataatttattacagaaaataaggtcttttatgcattttaatgttacactcttgtttatttgttgttgattttttattctttatacgttattttttttgttgttattttgatattctttgaatattattatcctgctaattttatgtagttttcttattgttttgctattgtttttataaaacaccgtataaatacaaaaaaaatctttgaaagtaaaattataatttttttttacaaaaaatattactctatgtaattattccttaaatataagaaaatttacaaatttatatactttatattaatttattatattatatgtgaaaatttatataatttatattaattaattatattatatgtaaaaaaaattaaaatttattatatatctaattaacatgagaacatatatttacttttatattattaacattgcttttagccaatgatgctgagtcaattaaaatgataaaaatcaataataattaagcaataagaacatagagatttatagaggttcggcctcgtgatagtggtaatagcctactctcattttacttgtattatttgtgagaagataagtgattgagtttcttgatctctctcgaaagtttacaattttacagcataagagctctcttgaataatataattcgaatccctgaataatgaaatgaattcactatttatagggaagaaatacatcaattaggtttaaaaaaataatgagaaataataagggaaaataggaatgtttcctattttacaataataacgtgtggaattccctttaaaatatgaattcaattaataaaataaataaggaaagtatctctaaagatttcagacgcatttatcttagcgggtacaagcaagctagctgcgagatcgacactggttggacagtgttatttatctttgttgaccgaggttttcggcnnnnnnnnnnnnnnnattataataaagagctgtaagaaagtgagatgaagattttttacgtggttgggg

SEQ ID NO: 22638 - DNA, 1953 bp, Cannabis sativa
attaatagtataaatacataagtttatgcatgttttgcacttaaataatttgattatttttttcttttaatattgggggagggatattttaacttaagatctatttgtgaggagaagtgtaaaactactcggttatgtttatgatcatacttaattttttatttacatggcattaaaatctaacttttaatttttgttgtaattaacccttaattttttaattaaggatattgacatcatatatacttttttttttgatggggacatcatatatacctaaatttatacaaatgttgcacttaaataaactaaaggtcaaatatttaagtataatacatgcataaagttagatacttatacttcctaacattctaatttattattcacacacatatatatatatatcatcttattatatgtgtgtaggtgagcatgatgaagatattaaacctactgatgaagaacttgaaaaagttggagaaaatttttcaaatgaagaagaatatggtgatgttaaaactaatactacaactcctcctagtaatagtattagtagtaaccttcactttttgactattatcaatgataatacaagaaaaaaagtggtaaatattcttttcctcattcatttctcttttatatttatggctatttacgagctttgctctcgaattatgacatatgcatcattgagcctcctaaattttctaatctgttaaaaataatttctgaaatatttacagtatcgtaataacttatattttatttagtaataataataatatgtctagatatatttttgcagaaaattcctagtggtgtggtgagtaaggtaaagttggaggaaaaaataatacttcattgtaagaataatgagttgtttggagttggaataacatatgataaagatggtcaagcttttatatcaagtaaatggagtcattttctcaagaggaagaatctcaacaacaatgacaagtgtttgtttgaatttctcatcaatcccaaatccaacatttgtagggaaatgaaagtttatatcatccatacatggtgaagatggtgatcatcacataatatatatacataatagtacttttatctctacttaattaacattattataattatgatattattaatgggtttcttttgttatgtttaactagtgtgaaatgaactaagtatgtatgaacatgttggagtaccaatgacttttaatgattaatgaaataggtattattaacatatcttattgtctccaaaaaatatccattttgtttgggtgtgaatacaaatgataattattgaaatgaaattgattgtgtagactacatttcatcaccaagttttagattgtaaaatcaagttttagaattttgtaactaattgtatttgttctttttaagaaaatattagatcaaaattaaactaatattattaggaaaatgccattttatctataccataaaattcactacttttctccttaaacttagtaagtaccaaaaaagaagaatataatatgaatctatatattaggatatttaatttccataacatccataaaaatgagatacaacttcaaaaactcaaagatcaaattgaaaatttaagactaaaggaagaatcctaatctctccaatctctaataaatcaaatagggttcattccatatttcaattcaaaattaatgatcatcatcatctagagtaaaatttggctatataaggcatttgaaggaaccaataaaaagatatgtacaacaaaattgagaatatttcttactcattctttccgaattagttgctcgaaaatcaggctgtggcgctattacttagctggaggctcatttttatgttcatagcggctaactctgcagccaaataccgaaaaacaaagggcattgcgactgtctccatccctttactcgattgacacgaatggcatatg

SEQ ID NO: 22639 - DNA, 1806 bp, Cannabis sativa
aaaaatttccgtgtgacagtatttttataaaaattaacctaaatttagtatttttgtaaatttcactaaatctatttgtatctcataaaataataagtaaccagtgttaataaaattttccatctttaaattacttttacagaaaaaaaaaataatcttaaattacatataatatgcatcgagatcgtttaataacattcctatataatcaaaattaatttatgtataacaaattcaaattaaatatatttttagttcatatatttaattaatataataatattacttatatatgtttttctcttatagcgtaatctagctatttgtttatacttatgataatttgaaatgagcttaattatgggtctaaaagaaattcccgtgtcgtgtaggatctatttcaaataaggattgtgctatgttagctcatatttgggagcttagtcgcgtctcgttcgtgttgtttgttgtgctggatatttaagttcaatttatagttgctaaaacaaagaaggtagaagtgtggatttgaggttagactttttatttggatttacattaacttttattgcttctaataaaatatgagttaatttgatagttatttgttgtgttaactcatattattagtgatctataattaataggcttaatatcagtataaagtttagttgaaacagaagtgtgaatttttctagttaattaattggagtctttgataagcagacccaattcaactagggttatgtagctaagtctcctcttctataaatacatattattttattacaattgcatatttttgataatcagataaagtaaatctgcgtctgatttagagatataggaagaaagacttagttggtagtattgcactatcaaattaaggtaattaatatggatcgatcaggtatatgtatacttaattataatctattattattttgttctaaattatatataaatttgtatcttgggattattaattttctaacatgtggtatcagattgtttattgtatataatttaagatctacaatttgtctaactattgataagtatatgttaattatctctaattacatattaatttcttaattattatatgttaaatttttcatttttcaatcataaagctttggagttatattcctcataaaattctttttctattgatatattatttgcataaaattatttagtaatttacaaaaatttcaagtttaaaattttagagtttatatgactaaattgtgaaattaattttgtgattttttaattctattgtttatgttctaaaattgattgtgaatatattactatcctttattatataatgtttatataatatttaatttcattttcattaagcaatcaatccgatctatacaagtttttttttgttcttcatgttttcagattgagcaatctgatctttgattagttagccgttttcaaatttgtatctagggattattaattttctaacatttaaatcctccttcacttagtctaaattatgattttagttacttttatatgtttaccaacaatattttacacgcaactatgttacaagtcttaattaacgtatgtcaataaaaaaaaaggtcttaattaacgtattatgctattatgttagtttattcatgtttttatgttgtgctttcgaatttttcgtatcttaacgtacttaaatttatatcgtgtcaaattataatatcatgccatgtttaattttaactcatttttctttttctattttggtatcatgttcgtagtttttacaggattatgttaagctaa

SEQ ID NO: 22640 - DNA, 3125 bp, Cannabis sativa
tatatatatgcaatatatatagtatatatatgtgtattgtaacatatatttaatcaatctcttattttagtccttgtattattttacaatagagttgtatatatcttagtttgtcttccattgtaataatatctctaacagagaattgttaccaattaaaaattgagaagagaatgactaataagattttgaggaagttgaatgtttagatatgatagcgagaagtggcaaaaattgatagtctctagaatgacgaaacttgatggagttgagttaggttttaacttttatgggccaaaaaaaaaaattattatttttgaataaaaaactttaaaaaaaaaatacccaataatttctcataaacttagaattttgttatatagccacattttatatagaatagatatatatattgttttttcatttctttcttgggcttcaaattgaatttgtacatatatatatatatatattagtagggaggcacgtgcgttgcaagtgctcccacataattacttaaaaaatggataaaaaagatttaaagttagtaaagtatattattagtgaaatagcaaaagtaattctttattaatgaattgagagtatttatacaaaagtagctgatccaaacaccagctaaccgactaagagaattagttatagaaataactaattgtaactaacatagcagctatacaacaaaactactaacagtatctaagactccccctcaagatgaagtgtagatgtttgagacactcatcttggacaataatgtgtggaattgagttgggaagatagccttggtcattatatcagcaatgttgtgtcgagaagggacataggagagcttgatgcgatttttgttgacttgttcgcaaactatgtggcagtcgatatcaacatgtttggtacgctcgtggaagaccgcattctcagagatgtggattgctgcttggttgtcacaatgaatggtggtctgtgtggataaggggatgccaaagtcagtcaatatgttatggatccagagtatctcacatgtggtgttggcaagagaacgatattcagcttctgtagaagatttggagacagtagattgcttctttgatttccaggagatgagggactggccaaaaaaaatgcagaaaccagtaattgaacgtcttgtatctgggcaggttccccaatctgcatcggagaaagcttgaagttgaagaagttggtttgcaggcagctgtgaaaggttactagacggaacatgagtccttggccaggggttcccttgagatactggacaattctgtatgcagccttgagatgtggttgtcggggatcattgatgtattgactgaggcggttgacagcataggaaatgtcaggctgtgtgattgtaaggaataacagtttgccaatgagactgcggtaagaggtggcatcacttacgggaggcccaacatctttgttgagagaaagattggcatccataggtgttgatacagcctttgaaccaagtaggcatgtttcattgagaagttgtaatgtaaatggtctttgagaaacagagattccagctttggaccttgcaatttcaagaccaagaaaaaaccttaagtggccaaggtctttgagtttgaattttgagttgagaaatgccttaaaagctgtggcctccgaattatctgtgcttgcaataactatgtcatccacatagactaatagagcaaggaaacttgtggaggattttttgataaaaagtgagtggtcataggcagattggtgaaaaccatgctcaatcaaagttgtgcttaatttagcaaaccattgtcgagaggcttgcttaaggccataaaggcttttatgtaataaacaacaggattggggggcagctccccctcatggacatagcctttagggagggtcatgtagactttttcatgaagatctccatgtaaaaaggcattgtcaatgtccatttgatgaagggtccagttgtttatggcagccaaagctagaaatagtttaagggtattgaattttgcaacaggggcaaatgtttcaatgtaatcaatgccatgctgttgagaataccctttggcaacaaggtgtgctttgtatctatcaatttcgcattgttcattgtatttgattttataaacccatttgtttccaatgggttgacaacctggtggtaaagaaacaaccgaccaagttttgtttttcttgagtgcaaaaaattcattatccatggcattcaaccattgtgagaattttgaagcttgtttgtaagtagatggttcaagttcagtataggcatgaaatattgcatttctaaaggcaacacttaatctgtgaaagttaagatatttgactagagggtgattagtggaagagttacagatgtaatcttttaaatgagttggaggtacagtttgtcgacctgattttgttgttgtgggaatatgagtctgctgtgttgatgaaacagcagtaggagctgctgttgattttgttgcagcagaagttgttgctggtgttgcagtaggagctgctgagattttaggggcagcaggagctgttgatgggtgtgatgtagcaggtgcaactgctggtgatggtgcagcaggtgctgctgatgttttgggtgcagcaggtgagactactggttgtgttgcaacaggtactgctgttgtttttggtgcagcagggactgttatgacaggttgtgttggggagtttttaaatgcagtagaaaagaaattatccaggtgttgggtgcttagagaccctttaagtggaaaatttttctcataaaaaacaacatctcgagaatgaaaaattttgttagtagctaagtcaagaagtgtgtaagctttcatgccattagggtaacctatgaatatgcaagcattggctctaggagagaacttgtgtctagtaatgacaagagttgaagcatatgctagacaaccaaagttcctcaaatgttcataagctgggggttttttgtgtaacaattggtaaggtgtcaagtgttgtaataatggagtaggtgttcaataccctagaaaggacataacacttatccaaggtgtaagtatacttatcgctgattatcatgccagcct

SEQ ID NO: 22641 - DNA, 2174 bp, Cannabis sativa
tgagttgagagatgtttctcttatttttgctaagcaattaatgtgcaaatgtattggctcataatgttacatcatacaagtcatgagtaattctcattagttaaataaatatttactcttactactactaatcataaagaggtgcagcaagcttctcaattgtaatggtttcgaatggctcagagatgatggaagcccgagcactctttgttgacaattcttgtgaaatcaaatgcatggtgggacgtaactctggtctacttctagtacatgacaatgccaagctcactattaacaccacatccattgataatcgcccagtactaggaggtaacaaccgttgatctaacacatctttcaatagtatattctctaataataatgttttcgaacgagctgatgataaagattccaacagttctcccgggtgttttcccatcataatttctaaagctactactccaaaactgtagacatcacatttctctgtcacacgcatggttaaagctagctctgcagacaaaaaatatatataaggtcacaagtattgtctagtaccatgatgatgttgggaacactactcgtgcctaatagaaatgcttaattaataataattaaaatagtaatacctggcgccatgtagccatacgatccagccacagttgtccaaatggacaagttagggatcaacaaacgtgcaatgccaaaatctgacaatatgggaacaaaatcagagccaagtagtacattgtttaaggacacgtcacgatgaataattggtggagaacattcatggtgtaagtatgagattgcatgagccaatccttgaactattttcacccttgaatcccaatcaagatctgttgaatcgtataatactttggcaagactacccttgtttgcatacttatacaccaagtaaaaccattgtttcttgaacaaaatccataaagctttatgatgtttcgatgtcggacttctgttagagtttgaatctcattttcgaaacttatgcgactaacttctggaatatcactcgtgtctgacatgtgtaaccgcttaactgcaagaaccaactcatgtgatctcaatatagccttgtaaacagtgccaaagcctcctttcccaatgcaatacttgtcatcaaagttttctgttgcctctacaatttctccaaaagtgaattttgcttccttctcccatatcatcaatgattggcgagtgtcattttggttagaagttttcctttgtttatctaacactttgaatttatggcacaatatgagaacgattacaatggtagtaacaaaaactaggccacaaacgagactaataattaaaattagagcacttttacttctgctggtatgagttttgcatggcttaagtcctgtagagtttccacatagaccaacatttccataataataagcatttgttcttgcattttggaaaattcctccagttgggattgaacccgtcaagttgttgaatgaaaaatcgatgtaacttatacttattaggttggaaaatgtgtgtggaatattacctgacaagtggttatgagatatgttgagaatttccaactttgtaagccttgagaggcttgaggaaatctttccaatgagtaaattgctactgagatccaatacatattgcaaagacaccaaatttccaagctctgttggtatctcactagttagcatattatgactaaggtttaagctcaccaatcctttataattacctaaccagtgtggtatttcacctgataaattgtttgctgaaaaatcaagaacctctagctcactcaaacctgataagcttgtagggattttgcctgtcaaatgattattgctgagattaagctggtacaaaacttttagatttcctaattgagttggaatttccccactcaacgcgttggaatctaagctcaaaactttcaactttgtcaaactcccgagttctgaagggatccttccaaagattttattttgacccaactgtaatctggtgagattctgacattgtccccatgtacttgaaacatgaccaatgaattggttgttgtttaagaacatggaaataaggcgtgggtgaacaccaaatgcattggttatgtcacctttgaatcgatttccatcaagccttactcttcttaattttgtgca

SEQ ID NO: 22642 - DNA, 1303 bp, Cannabis sativa
aaactatcttagagtttatctaagtacttttgtacaaattattttacaacaaacatgcatgtaacactacaagaaaacttctttttgtcggcgcattagtaaactaaatgtaccgacaaagctttgctggcgtaataatacgctagcaaaaaatgtcagggaatcttggtcggtaaagaagtttttaccggcacaaaagtgaaatgcgccggtaaaattatgtttgaccaaatgcgcaaataaaagtaggttttcttgtagtgtaaccacaaaacaatatgtgcatttacttactcatcatcaaacacctacaattaaagttgtttattagatcatatctaattaatttagactaacccattccaatatttattggatgttgaattttgtcaactgatccaatccaatcaaattgagtcaactaatctaataggtgtatcaaattagattagttccaacctttaaatttcttaactgttttttctattaagttatattggatccatcaaatatttttagctatcatcaaggctgaataataaatttaagtaaaaatatatataaatataaaaacataatttaaaatttaattctcatattaataaaacacaaatctaacatacataataagcattaattagtttagtccaacttaattttggtgatgtcataatcaaaatataacaacagaacacaaatccaatcaacctaataatattaagcataaaaaatatatatgataaaaaatataatgaccaaaaatttgttgtaaatacattattataattatttttttaattttataataaaatgattctaaattagataaatatatttaaataataaatttatttgaaaaacaataattgatcgatatagataattaaagaaaatatataattttaaataaaaaaaatatatatgatatatataattaataattttacgataattatttataaaattaaattggtacgtaatactttttatgaaaatgttgccatatgtattttttaattaacaacatgtagcaatagtacttttataagtgttgtcttattgcttttggatttttagttaaaaaaagtcttcctaattgtgttatttctagtagtgtgctatttttcattcaaaaaaaaaaaaagaagaaaatataatttttgttgtgttaggattttttacttttattgttatgcatctatagctatttttcaataagaagcaatggagtagtaactacgtgtatttttccttttcatttatctaccaaattggcattatcattttcattaatttagtaatg

SEQ ID NO: 22643 - DNA, 3260 bp, Cannabis sativa
  modified_base (3101)..(3106): a, c, t, g, unknown or other
gcttatccgcatgaatgaatgacaggtaccattttatacaattttcaaattacagatgactattattgagaatatagggaaccattttgcactgatttacaaattagaaggtacctgatgatcattatcaacaacataggtaccaaagttgtatttacttaaagcttaagtaccaaatgactatatcccatatatattaaaacaaaaaaccaagatatgcttaaactttggctaaatacgggcttataacttttgatagggatcaagaagtaatactagattttggttgttttattacctctggaggctcccacaagttatctcccatctcctcaatcacttctgctgacaaattatcatcaatcacatcccgtcgacgctgaatgtgccgagtttgaattaaagaatggaaatgctgatcaacagattcttcaagaatgttatcaagcatgcttttatcaaaaaagtagggagtatacctgattacataaacaaaaatcaaataagcaacagataccctgaaattaacttcaatttaataggcaaaaaccttcaatgataatttggaaggacttcataatacagctactcactgatcgagcaaacaattaaccagaaaataaagtaaatctaacataacctagaaaatagcagagaagaaacacaccatttaatcccatctgtagttgctattgcaatatctaaattttgagcagtgaaaactggaactccatcaacctttttgcatccagaattctgaggtattgttttaagaattttgtttgccgccttgatctgaaggaacaacatattttaaagataagtttgatatatgttacaagacaaacactgtatagtttcattttatacctgtttctcatttggaacaaactggaacaagtgtggtttttcctgcataaaacaaagaaaatttaaaaataatccaaagagcataacatgtaatgatacacaaagaaacaacagttgcttcttctagaaatttagaaaagcaaaatgtactagagataataatgagaaaatgaaaatgcccatcattcaaacattagagacaactatggttttcaaatagttcctccttgcataaatatcatacaactagcagtgtcagtatgagcactaataccaccaaaataataagtggaaaatgaaaaaacaaacaaacaagatgagctgccaaatgtgcaaatgaaaacgacaatgaatgataagaaaatatttgagaccaatataatccagctatcagacatatacaaaatatcaagagaagtcatcaacaatcaataccttgaaatgctcatatgctaaatcaagacgacaggcacccaccacgccacttggaatattcagccgtttgacatatgaaactagaaaatgtaaagtcaaaactccaaatcattatactacaattacaaggaagaatcagcagctccctgagagtctataaaaggggaaaacaggggaaacaagagataactattttatcttacattgccactaaaatattatcgcgaaaaatgtttatcgaatgaactcaaaatttagtttcggcaataattagtacttagttctcatgtgatacaatgggacttgaaatcctccccccctccacacacactcacacacccaaccacttgtgctagccccaagtggcattagtacatctcattgttgtctatcaaattacagataaaattaatagaatattttgtttagaaatgtaagtcttatagaaatggatacaactagagaaggagaaccataggagacttcatcgaatcatacctgcatcacctaaatccaagaaaaacctgaacacgggaccctttctctcactcctagtaattgttgcaaacatcttcttaagccactcgggagttctacatgtcaaaagtatcattcaaaacaagttagaacaaaattgagcacaattcagctattacctcaaattcacattcatgctacgtagttttaattttaaatattacaaactcggaacacataaattgctatccagtctagatactaagccaaaaaaaaaaaaaaacatgactacttgcaaaagcaaagataatgttatacaataaagcacatagtagcattaaagaaaatgaaaaagtataatttgcccatatgagctaacaccattatactaccatatacaaagttcaaactttaagacaaaattgtttctgcttttttttttcaattattatttaaaagaaaaaaaaaataataaagaagattaggataacgaacctttgggaaataaagggtatgtcgaagtgggtcgagacagccatgagaccagttccagagaggtcacacatactgaagacctgacccacaaaggcaggtcctccacctttggatttagacttgagcccagaaatcctaaccgaggaagggaacgccgaagtggactccggcgccgagggaacgcctttgagagtcgatttggagggtggtgccgagtcgagcggagatgattcgaaggcgagtgacttgggcgtgtcagggataagaataggaacgcagagcctagaaggagcagacggagtcgatttcttggggttgaaaacagagagaagattggaggtggttgagtggagaatttgagataagggattcggagggcgggttggttccgtttgggaggccatgaatgaccgagagaagaaggtgtgtgttattgttttcttcttcttcttcttctggttgtgtacgtgaggcaaacgaggcgacagagagtgtgattgtgttgagaaataaaatgagggcttttttgtctttagtccttaatctttatcttatttggcaatttagtcctcaaattatctttcttcacaaattagtcccctaatctatttgttgtgaaaacacaagagtgttcatcaaacatctcaaactgtccgcatcacaccgcaccgtaaaaaaaatatggtttgaaattatttgcggtgcagtcgcggtttgaatttttcttaaattatgcagtgtggtgcagtttatggttttaaattgttaatatgcagttcaaaccgcaccgcactgcacattataaaatactaatttttatattnnnnnnggtccaatatgtgaatgttcaacccaaagcccactaattattatacggttgaaacttatattttttttttcatatttattttaagccttatggtttttttgacaagtgttgctcaagttttgttgtatttgtgattaatcaaaaccaattaaat

SEQ ID NO: 22644 - DNA, 2359 bp, Cannabis sativa
ttatctcgttttgttttttgtttaaattattagaatgtgcacaaaagctttgttgattggattttttgtacaaattagtgaaattgttcagatgtagccgtatctaaatatgactttgttgtatatgtgttgcagttattccaagccacattacaaattctttgtttcaatgctgtatgcgatcgtattaaatgcagtctagcgtttattataatggaaacagagaaactaattcaagttgcaacataattaataaaaccaatcatcactttttcccttactatattataatatccgaaaactgagatctcccaaagctctttttacagatcacaatagtggtaatcaaactataaaaaaaaaaacaatcaaaatatgaaataaccccctccaaaggaaacaaaagaagaaaaaaaattgaatgaagtagaatcaatcatcaatcaaaatcacaacccaaatgacaaattgacgaattttattaaaacgctctgtacgccaaaacagtttgtctgccacctctgtgaatagctctgttctcgccattgatggcattagacgccgccgaagaaagccctttcaactcctcaagactcgcatagctctttctcgtcattaaactcttcttatccccaccattcgctgacttgctccctctcgaattcgtcagaaccttactcccaaccttagaccaagtcttccctggaggagtcatttccatcgtcggcggaagatttgatggcttccggttctctttcctcaagacggcagagaaatccggcaccgattgagccacaaaagaggacccttttcggctacctgtagtagtggtagtggaactagtctgaaacctgacttgtttcttttgtggggtgagtttgaattctggctcatcgagttcttgctggggtggcctcgcgttcttcattctgagcctcgattctctgagctccgcgtaggccgtgtatcgtggtcctctctccatgatgtagctctctgttgtgagtttcagtgaaacgggctgttctgagtgagaattctgagagagtatgagagagatggggtcgagagaatggagaagagaatgaaggggtgcagggtctgcatgatgatggtgggtttgtagtagtaaagagccgttggtgtctgccattgctgaggaattcgaggtcgggctccgttttcagtattgattgcagagttttggttgagattattaattgtttctctagtttatctggttcagcttttctctactttgaaaatattaaatgatttcggattgtaacggtctaaaaaaaatgagaagagagagagagaagtgagagaagggaaagaaaagcccttttgctttctttgtttaatttattattccttttccttcctcccccaacgttctactctacgagggtcccactgaaacccaaaagatttggggccggctttagattctatatcggccgttcgatttcaccaaaatgcaaatgtaacatgtttagttgaattgcaaaatgcaactgtaacatgtttagccattaatcattaaaatttatttttttttgcagtaaaatttctaaaatttgttaatctttttacggctaaacttttcgaacaatcttttcatatatttaatctctaaattaataaattgttagcaaatttaagaaatcatccgattaagggccactacagactaattatatatacacgtggcacgtttataatggtatacctaatattattatttcaaaatttattttgaaattaaatattaggtgtaccaattaatataaatgtataacatgtacaaaagtgtacacataaacagtccatattgacagttaactgtaaaaaatagatgacatcttaaatttgttaacaactaaataatttagaggacaagctcacgaaacacaagagcaatggtggtatgggatttcgagatttaagggacttcaacttagctctattagctaagcaaggttggaggcttttgacttgtggggatagcttgatggggcaaatttacaaggctagatacttttcgttaaggtcttttctcacatcaaccttggggtgtaatccgagttttatttggagaagtgtgtttgaggctaaggagttagttcgggctggggttcaacgattggtgggtaatggttctaccgttaatatcttgtctgagccttggcttcctgatgagatgaaccctttcattaaatctgtccatccgggtcttgtgggaaagtcagtcgaatctttaatgaaagtcgggctggttgaatgggatggggaagtattagctgatgtgctcactgctagagatcaagctttggtgtggaaaattccgctcagtagt

SEQ ID NO: 22645 - DNA, 2735 bp, Cannabis sativa
  modified_base (107)..(107): a, c, t, g, unknown or other
  modified_base (176)..(176): a, c, t, g, unknown or other
  modified_base (241)..(245): a, c, t, g, unknown or other
tttattgtatttatgttttttattgatttaaatattatattcaatgtacaaacagattgataatgaaatcaatctctgtgtaatcaaaggacacttgctttgtatanaaaggagtgatccaacatgaaatgcagaggacacgaaaacccttacaacagtggactaagcagaccgtnatctgactgaaccactatactctctttgtgttccttatatttccagtacgtctgtgtatccatannnnnaacactcgccattctaggttgagtactcgcacaattctatttatattttaaataatattatttatttggtgttgtctaaatttctccaacaatagtaagatttatgagaagagggagagaagattgaagagggcagtaagattggtttcatctttttccttaaataggagaagaagataaacatagaagaatatgaacgagggagagagaaagagataaacaaaaattgttttaattttataatttttagttataaaattattttattgaaaatatgatgtgaatcattaacatattgacatgggtcaatttattttttttagttaaatttaacataataatagtaacaaaagaggtgaaatgtaacgtttagattttttttttttaatataataattgattttattgctgagagtcaaataatacattagttattaaacaatgagtaatttcttccaatgctgaaaccttgttttctatctgttgtgaatatcataatcaccatgctacgatattaccattttgtataacatattgaagacatacacctggaaagacagataacaagaacctaaaagatctaacaacagccccacttggagacactctcataaaaagaatggaaagacatcacaacatcttcataattactctctaaacaagaaacaaaaacctagtgacgaacaattctagatgggccggaggggatggtccaatcaacatggaggtgagaggttgtgctcatgagaatttactccctcgaagagaaaaaaattttaactgcaaataaacaaaatatacattagtgaggaaaaaaataaaataataatcataataaataaataaatattattaacaattttacaatatatatttcactacaaattaataatcatattgaaaattattaacaatattctatctatataaaaatagaaaacttatcttgtcaattccagttgatgtcgtcatttaatcctagacactacagcctactacaaacaatttaataacttgaataactcaataactttataactctattaataaccaaaaaacaaaattctctaataactaatactattgatagtcataataaaatctaccttatgtataattaataattaatacaatttagtatgagaatttaaaattagcataataagctaatataacaaaaattaacaccattaggaataataataatattttttaaaaaaaaaactcctaaaaatatcaacataactctcatcattttagttaatacaataatattacttttaaaataataatcatgaaaattaaataataaaaaatatgaaagtaaaataacagctcaaaaattaattacagtttaattaaaaatagtaataataataataaaaaatactaaccaccttttcaacaaataaaaataaaattaaataataattaaaaagtaatatataactgtcaccaatttttacaggaggcgtcaataaacggccatccgacaaccgatccctcaccagtccaccccgcatcgtccctgtccaatggatttgtaagatagaaagcatgaggatatggattagatcccctcctttgacgttgatcggcaatggttgtatccctcgtacataattgtgatatttaccacaaataataaaggaacaataaaacgtttctaactgtgcaatgtagccgtcgagacccatgccttcaaaaatctgatgaaacgcaagtgcaacaaccaaaggtttaatggtgcactgattctaagacattcccgtggttaccccaataatcacagagtgatatataatcccaatctccaaaacttgagacactaatctctgcttcatcctcaccagagagagatgggaaatgtctgccatggcttccaagagtcaacgtcttctcttgtccattctactgatttggatctctatcgtctccacctccgcaaggccctgcaaaaccctattcatttcctcttacacattctccctccgccaaccccaattccactcctcatcgggattcgtcaccattttcgccgaggttacccaattctatcgcgtcaaaggtgaggcttggatcatagaagaagagcaccaagaacaagaacaagaacaacgacgacaataccaagaagaagcctcacgccaagtctaatccttacggaagatgcccctttttcccttgtcctcctccacctatccctacgatctcacctccctccgcgatcacaccaaggatatcctcagcgttgtcgtcgctctcctcttcgatgttgcctgcggctcactcactgtcgccatcgtgtacttggcctggtcgctcttctccactcgctaccaggacgacgccgatgagacaaccaacgccatgtaacatttagaatttaatctgcaagaaaagatatatgatttttttttttaaatcaacatatgatatttaagtgtataaaattgaaggcataaagtatttttgctgtaaatatctctt

SEQ ID NO: 22646 - DNA, 3271 bp, Cannabis sativa
  modified_base (3119)..(3122): a, c, t, g, unknown or other
gagctgattctttaacaggtttgttgttgaatgagctacaaagacaataaaatcactcatgagttaatgtttgaaataaagatttagttgtgaacaattcacataaacaacacattctagaagcttgaacatagggcagtgatctatttctttttgcgctatacaagttcaagcacacaatgataagttttgttgtaaataattggtaagcaatatataagaaaagatatacatgattttggaaataagggagagaaattttgtggcacaaataaactatgtgaaatgaaattacagcatggaagctaggcagggagtggaataacatacccaatataaacacgcgaaacttctggtacgtgtattcagaacttttccaagtaactacatcaaaactccatatactctaatgaactaactataaattataatgtaattaatgatgtcaaagtagacaagtgcaatcattaaaagacgtcaaagatatgtaggagaagaaatattcaatagagtatctgttgcgggtcaacgaaattagacgtttgaattcgtcagtaatatcaagtttatggggatcaaagagaataagatcacattttgcaacaaaccaggatataacaccagttaaatcatagcttcgtttcttttcttcagatcagatagtacactaactaggactaggagtatccacgaatgtacgtaatttcatcaagcaatgatcaattatagaagaaaaagattagcatacgtaataagaacatacacaagaaaaatgtaggtaataaaatataaactcacagaatgtactggcatttgatttggttacactctaaaacaactattgtgttcctaggaatacttctctcatcaaacaacaaagagatatcaaaaacagccttaatagaagcatcaagataaagagatcttcaaatattgatttaagaaaacttttgatatataagcaaaactcatgaatgtgttaaaacatacaacatcgtggaaagatgacaaattatcataccattaattacaacaacaaatctatctgttgtaggctttggcccaataaaagctcctgtgacaaaaagaagaaaaaataaatcaacatcatatattattgcatattgaaaatagaataaagggaataaaaaaatttatccaacctgggtagtcacacattttaacatatgctttataatattaatgttgttttcccagtagttgaatactgacccaatagcatgaccgtgggtttagcatcaaagtcactactagtctgagaagacaagtcagcgagttacaagttggttaatgaaaacacaatatatgtacacctgtaaaatacaacttattacatcataagaatgagttacctaaaacttaccatttatcaatccaaattacgagtcaagtcaacttaccagtaaaggcgatacaaaattattaaaacgataggcaacttcaaatggctttagcttttcagtatacaatctttttaagccatcaattatagatgtaactgcaacaaaaaagaaagaagtagatatatcatacgaatataagaaaataaaaatgtcatgataatatggaccaatttgactaactgtaattcttttcctcttttacataaaattaatgtcaaagatgtattcgttaattttaaagttactcagtacaaaaagacactaccttaaacacatgtttaaacatctcacacgatgtctaccacacaaaaaaaatctacagttgactgatacccaatcatctaagataaccaagctatttaagcaaaattgattggaaggagaaaaaatctaccaaatcaatagttataaaaatagttctactgcaatttcagccaaaaaaaagaaaaaagaagaaagttctacaattcattatattgaaaagatccaagtataatatgattacatatgtttttaagtgttttataatttaataattaacaactaaaatacggttgaaaaacctgtatgtttttatctaaactggtctattataattacttaagtagtcatatttggattgtattgtattttttcattttatcctcaaaaactagtttcttgcaaagaagactcattggagatggatgaatttgttatattgcagtgatcttatggtatgatacactgctacagtatgcatttctttcttgtttttcaatttttgttaaatttatagtttggttgctcgaaaatgttaaaatacaaatgttaaagggttttattgggttcgcaattttgagtttttcctgcaaaaatgaaaattatgtatacattggttttaatttgttgtcattgttatgacattttcaatttaaaatttggttcttcttttagggcaaaacaaattaagagaacaagcttttaacgttcttgtatattatgattgtgttaattatataatcaatcataattttatattttatgatgggattgctccattttatgatgtcattgtatattttttattttaaatttctttttatttttttattaggttcgaaattggttttcacacatatatttttttaaagattttattgggcattgtgtgttgttttgattatatttgtggacagatgaaaattgattcaattatcttcatcgtttatcatttatgttatgttatgatggttcataggttccaaactggcttcacaggactcacaagttcgaaactggtttgttgttttacgtaattgaagtttaaatttcatttttcttttgttattttagaaaattggtttcacaatgtgaaatttttaactagttgataaatgtaaccgctttgtgtgagtgggatccaacctctaactctggtgacaacgacaactacgacgacaatagtgatcaatttctatttattttgcatgttctaacaagtgttcacttagtatatttttttttctccatatacaatagcaaccgattttagaattcagacatcctccaataaaaattatcaaaatggggtgtctttaaaagatttaggggtgtagataattttttttatagagtcgagactgttaaataaatgttatatgattttatagggttgaaattcgtttcacagattttgaaagttttgtaatgggnnnncttcattttatgattttttttttattttgagtttctttatattatttttttttctaaatttaaaagaggaagttacacttagtatgagattttaaaagttcttatgataaatatggcacatttaagtttggccaatttatatggtattt

SEQ ID NO: 22647 - DNA, 1600 bp, Cannabis sativa
acaaacctataatatcaaataattatcaaataatttataacgagtcatctataatatcaaataattattttaatttttgataaatttatcaaaagttataatcatagtgatcctcttatttaattactttaaccattttagtttgaacactcgaattcattttcaaagtgattgaaggtaccagagtcatcatcagataaatgctaaaaagcactcacataacatcctagatgaatattagtgtaaataaataccatatttcatatatttaaattttaactaattttaaattaagatatatgaaactactatggaattatattaatatcactaaagcaataatcgtatactcaaaatataccaatttatttaactaatcaatgttattatagacgaaactcactattaaaaattagaaacaacattacattactaaatattatatttttatacatactttaagtgcaaatatcattactcatatcgaattgagtactctatacaaacacaacacaagaagaaataaaaagatgttaggaataagggataagaaaaagaagcataataaaccaatcaagcaaagttgtttctactcaaccacttcttgtttttgcacaagtcacattatgatgggaatttttctccaaccttttttctccataaccactcatcatgtcatctaaaccaaaacaaaaaccaaacacactttcagttaaaaacaagtttataaaactgttctattcacttttcctaatcttgtgtttttccctattaaatggtacatgtgtggaccctaattgatgtgtactaatgtcatctcatgataatgatatacatataatttcatcttgtaattatcataataaatccaaatagtattcttgcaaaaaaaaaaaaaaaatagaaaatgcccctctttcctaatatattcataaatatctaaaaataataaaaaatatacgaatatataattttttcagtaattttttacagacttaatttaaacctttttttttttttttgaaaaatacatattattatttttattaggctatgtgaaattataattaaaaataattcctaaaaagtaaaatatagttcgtaaaaattatatatttattttaatattgttattagatatcttaaggtgatcagcaccatactaaagtgacaaataataaatagttagtgatttttatattatttattaaattaaaatgtgtaagatttgatggtgaattacatcaaaatgtcccttaatatttcttgcttttttttagggtttaaaagaattgtggtgttaataatatttggattataaaaaataaaaaatggtccacaatgtccttattgcaagaaacctttcaacacggcaaagacaataaatatcacttgtctttggtgactttgtcttttatttattttttgccttagaaaatagttcaactttgtttcaagtatataaacatgataacatgtaaagaataaatatatatatataaatcttaattatgtattattatgtgtaatagtgattaactaacccacttactccaaatattttatgtgtataaacaattaaacaattatattttgtcat

SEQ ID NO: 22648 - DNA, 5339 bp, Cannabis sativa
gtacttagattacaaaataataactatgcatattcactcaatttcatagggtttttccttcccaaaataatcgatcccttttcccttagattttttccatatttatatgaattcaaggaataatagttattctcctttgataagtattctttcatgaaacatgattaatttctatgtttcatgtttagaacatgtggataaataaaataagtgatgataattattaacgcagattttcgttaacgataataagcctatttcgtgataggatcagcaaaatattagttgaaatctaagaaagaatagtaaaacaaaaacaacactaagcttttacgtggttttccagttaactttgcatagtccacgagtcaatcttattcagattattctaatacaaactagggatcttttctctcaagaatttttccgtccactttttctgtacattctgcccctatttatagtgacatagggtggtggttaattacaattagatacgaatcccataataatattttcctgaaattgtgggtcttaattacgctccatgtaaattaaatacggtttttatttgaaaatcatacagctgtgatttaatctgtttttaatgggtcaacgctgatgtggatttagatacgctgcaaagtgtatctcctcggggcatctcgctaggtacatgaacacacaatcaataaccctggcaacaagctggagcttttcccatatctttccgaggttgataatgtaaatctcgttgtttctgcatgtgaagacattacgcttcatattgtagttcttcgtgacaaggtgaacttcaatagccaacatcatttgaatgtcagcttctttctgagagagctgacgcgatgtaccagtggatctcattgaaagatatctgggctgattagtgacgatactaggagtatgtcttcctataacgagatgatgtctcgctaaccgttattcaggtccttcgagctgttatacttagctagtataatgtatataatacgctaagtgtcctaacagccaacacgcctcgttaacacctttttacacatagcaaggttaatgcctcgctatgtattatcgcgaaatagtttctcgtcaatatgtgaatcaatagtttgtacatctttgtctcgctaaagactatatagtcagcgagttatagatatgctttattaactatgcatttaatgagttattccatttaatatcttttaatatcattgcaattatatttgctgatttgtattctccagggttgacacgcgtcatttgctgatatgtctccctacctaacatatctcacctgatgccaatataccaaacagaatcccctcacctaaatgcaatacaaccactactgcccctatattacctattgtacctgaccatgctatacctcaacaccaaaatgttgcacctaattctttgtctcccatatgagatcaacctcccggacccactacatctccacctcccacacaaacaactaccaacactcccttcatgtccatacatgctcctgtctcaagtagcatcccttaggaaaatgcagcaaggacacaccatatgcaaacacgatcgaggagtgggattgtcaaaataaaggcatatcttgccatcaagcaccctttacccaagtctcttcttccatctgaacctacttcgcttaaaaaggaactgcatcatctcaaatggctacaatcaatggatgaagagatcacagctctcaaggcagcaaaacttggagtctagtcccatatcaacctggaatgcacataatcagcaacaaatgggttcacaaattgaaattaaatgctgatggctcaacaggttcaagtcaagactggttgcaaaaggattttcacaacaacctaaaattgactatgtagagacattttcacctgttgtaaaaccagtaacagttcgaactgttctcagtcttgttgtcttctttgactggtgagttaagcaacttgatgatagtaatggcttcttaaatggcatgctaacagagactgtctatatgcaacatccccaggctttgtagatcagtccaagccaaacaatgtttgcctcttgcatagttatctatggactcaaacaagaccctcgtgcttggaatgacacactgaaggactgcctacttcaatggggttttcatgtctctaaatctaatacatcattgttgtttgtgtatggaagtggacagacactaataattctacttgtatatgtcaatcacatattaataattctacttcatcattgtttgaaggatcttggagaagtgcattatttcttgggaatagaggttcatagagactccacgggtatatatttaactcaaactaaatataacggatctgttggtaaaattacacatggaatgggccaagtcatgttccaatccaattagtacttctacaaaactttcccttcataaaggagagttgtttgaggatcctacactctatagaagcacaattggtgctctgcagtatttaaagctcactcgacctgagattggctttgttataaacaagttaagtcaatttttataaactcctactatgcttcattgggaggcttgcaaatgacttcctcgatctctcaaagccaccattggtgctgagttcatcttaaacatttactttgatgcagatttggcatcatgtgtggatgacagacgatccatggatggctagctatgtcatctttcgtggcagcaatcttatctcatggtttgcaaaaaagcagcaggtggttactcgctcaagtattgaaagtgagatttactcacttgcaaacacaattgcagaacttagatggatcactttcctttacactgagctacacatcacattgaaccactgtccagtaatatgggttgataaccagagtgctgctgcacttgctgcaaacctagtgtttcatgcacgctcaaaacacatcgaaatagacttgcactttatgagagatcaaatccttatcatgcaattatcagtcagatatgtgcctactcatgatcaagttgctgatattctcaaaaaatcgttgcctacagatcgatttaactatcttaaagccaaactttaaatggcttcctccccttttgtttgagggaggatgttaacacctctgctattacttagttagttgatttggtgttagctagttagttaattttttttttctgttataaatgttttctttaaccgtttgatcttgtaataatcatgtatgtaaactgtggttcacatcaataatatgcaagtctttttgtcttattttctttctttgttcaactctgtgctctacacttttattgctttacaccttcctcctccttctgacctattttttacaacaaggtggtggaacactatgttgaatttacatgtcttcaaaaataaaacactttttttttttggaaatcttttatcatattctccctgtatcttctaacacttgctctgaaaaaaaatcatcttttctcctttatgctcttgttgttctgcaagttgtgagattgtgactcatgctctcttagggtgtttcgaggttaaatttatttagaaacattcacattttagtaagttatttaatcacaataagtattgtaataatgactttattttatgagcttatgataatttatctaaagatgatcttactttactgcttgctgttctttggggtatttggggatatagaaatgatgtttcatttgggaaagttcatttaaaaaattgtaatgtggtttcttgagttagatcttatcttcttggatacaaggaagtgcaaaattgatagggacgtacaatattcaaagaaaatcagagtaggccaatggaagttgcctccactaggtagtttcaagcttaatgtggatgcaacaattgggaaaaactggaagaaagttggcgtaggtgtttttgggcgaaatagttctaacaaagttgtagcaggttgtttagtacaactttcaggagtcgcaaattctgttattgcggaggatttggcggctttggcataacattggtctttggaatggtgtaggataatgaggttattaccctagctattactgaagttgaagttgattcaaaaatagttgtaattgacaaagtaaattctagttatataaggataactcacttctttctaatttattaggatctatttgtatatctttatcttttctctcatgtgtctctcttacttatgtgtatagagagttaccttttgtagctcataatttagtcaagagagcactaaggcttgataaagaaattgagtggaatggtaatgctccattttgttttttaatgtaaaacagtttattcataatgaagttacttcttttgtaaagaaaaaatataagtaaagaaaaaaaagaaaaagaactgagctctgtacttagagaggagccgttctaatttttttatttatattgttgttctttttttcaaacaattaagttgtaatatatacatttagtcttttctttttaaccctaaaaaagtaataaattttctttatcctatcccctttacaggttccaaccatatcgatatccacgaagaaatgtgaaaaaaactttggagtttccatacaaattagtgaaggaaaatgatatattatgatatttataatattttattaaggtgacatgttataattaattattattttattaatttatcttttatttattggatatatatttttaatatcaatttatgatttgccgaggagggtttattcagggcaggttcattgggcataatatcatgatttgccaggacttggtgaggcattatggaaggaagtcaagcaaggctaattgcatgattaagcttgatctccagaaagcgtatgatacaattgactaggatttcttagaggtgatgctgagaggtctccaatttccttctaagttcattcagactgtgatgaattgtgtgaggacacctagattctccattatgtttaatggctccactcatgggttctttgaggcaaaaagaggtttgagacacggagatcccatgtctccttttctgtttgtgctaggaatggaatatctatcgagaattcttaaagtggtgggtgacaaaagtggctttcactttcatgagagatgctcaacattgaagattaatcatctggcgtttgcagatgatgtaatgttattctgtaatggggatttcaaaagcatcctatatatgcttcagggtttaaaattgttttctgtatcatctggtttgcaccctaacccgcagaagtcagcgatatattgcagtaacatggcccaggaggaggta

SEQ ID NO: 22649 - DNA, 3832 bp, Cannabis sativa
tctttttggctatgacacaggtaattataacatatatatatattatatatatgtatacactctctctctctctctatatatatataaatgaattattttggaatgagcaggagtgatatcaggagctcttctctacattagagatgattttaagtcagtggacagagagaccgttttgcaggtataaaatattattatgatgttaatcatattcgttaattatacatacaattatatatatctttatatatacttgcttaattaccaaaatacccctgctcaccctcatccctatattgataagtacgtatagattgttttcttgtgctctctctagtgtattcttcttcagtcttcatcatcttcgtccatatagttggtaattaattaatttctacctcatgttttttcattttcatggatgtaaattgaccataatgcccttcatctctacaagcttttatttttgtacgtaaccaatctaatgaccttttggtcattttcttttggctgtggtataacgtgattatatagttagttagagcttctcaaactatatttcattttcccttgcaaacaatacaaaaggaaaagcttatttcatttttcttgggtgctaattgactataatgccctttttaagtaccaatgtattttttttttttggccaccttcacctctttgttattaacttattattattattattaattattttgaaagggcctcacctctcttattattttgatggttataattagagcttaaagcatgtatattttttagaggtaaaattaactatttcattattcattcatatgtttactcatttaagctcaaagagtatatgttgttgtacacttttttattttaacaaattagactttggagttaggggtccttttcttcttgtagtcataaatttgactagctttttttttattattttttttagtaattaaagtaaatatacatttccaataagtccaagactttatactatttgcatacatcactttaacataaaggttttctctatggacccctttaatgcttaatttcagcaagtctatatgtacaaaattattataatttttcttgactcttgcaaagaagtaaattataatagtttgtatgaattcatgaattataaatatattggagatgttgactcaaattttgtcaagtattcaatattttatttgggaacactcttttattttaatttttatatgtgacatattttatgttttttttttttgaagcctgattgatctctttgacatccaaataactaagataaaaaaataatatactagttaggatttttgtccttctgaattttgacatgtaccaaatcatattttttaaatttttttaggttgttaaaaattctttccgaactattgaaagggtttctgtttaagttcattcaattttattaacgtgacgattatctttgtactaaatcgtattttccgaactttaacatgtactaaattgtaacttcgaattttaacacgtaccaaatggtgtcctctgagcttttatctacgtcagtacgttttattagtaaaacaagataaaagttcttaaatctaataaatttaatagttcaagaatattttttaataacctgaaaattttaaaaggcataatttattatattaccccaacataaaaataatacttacttttttattattattattttgtattcatttgagattattatagtcctacttcacatgcatgagtctcaaggaattaaaatattacaaaatgtcattattttgttggacatagcctagcatgggtcatagggaaatggaatatgataggataagaattgggccaaaaatcaaatttgtcaaaactatttttcaaaaattatattaaaatattgaacaattaccagttatgggggccataataaaatattgtgattaaatttgtaaatatgtaaaataataataattataattgtaaattacttactttaattagaaataactggacttttatataaatatatttttttttaaaaaaaaagaataacaatgtgagtgaatgtttgtaaaaaaaaaaaataataaagtaaaaaaaactaattttaataactatatattattttatttcttagcataaaaaaaattatattacataagttacaatattcattaactaataaatttgatttaaacattatatatgcacacaatttatgtaaaatcatatttttataagataataatttttttatctaaaaaaataatttaattttcatggattttgatatattttgcaggagagcatagtaagcatggctgtggctggtgccataataggagctgccattggaggatggcttaatgaccgttacgggaggagaactgctcttctcgtagcggatttcctctttttcgttggagcagtggtgatggcctctgctccaaacccgacccttcttattgtgggtcgggttttcgtaggtcttggggtaggtatggcatccatgacagctcccttgtacatttcagaggcctctcctgctaagattagaggtgcccttgttagtaccaatgcatttctcataactggtggccagttcttgtcttacctcatcaatttgggattcacaaatgtaagattaattattattataattatatcattttttaacttttttttcttcttcacatttatggttttaattgtttcagtgatttcaggtagtttttatacgagttgttacatgattttagttgtgatctaagttgctacgtgaacttccactaaagtaaaaaaaaaaactataaagtgtagaaataattaaaaaaaaaaatcttattttaaaaattgttttggtatatcatattagattgcattattatattatattttatgtaaaattacatatagtaataactttattaaataatattttagtataaataaaaggggagtttttttatatttccacctcaaaacagcttttttttttttttggaattctacgtagaaactcctattgcaactaaagctgcaacttaaattgcaataaaaaatcgtatagaaactcttattgcaactatcgctgtaactactttggaaaatcaaaccgtaaccgtaaattaaaaaaaaaaaaaattaaagaaacagtatataaaataattctctatataatatattattatataaaaaaaaaatatgatatataacttaatttaatagtaatgatattgatttctgtttaatttaattgttaaataggttcctgggacatggaggtggatgcttggagttgctgggctaccagctttggtgcaatttttcttgatggtttttcttcctgaatcacctcgttggctttaccgtgaggtaataatatttcagtaatatattaaattatacataaaatttatataaatataataattataaataaaaaaaaaaaaagaggaattttcgtaaatataggaattgatggtatggtttacttttttatggcataaataaataacactataagattatgggttttttaattttttgacatttatatgggtttttttatgctatatttttgtaaaaaaaagtagaaatcccatatttctaaaacaacaataagtttttccagaaaagttgccggcaccgaataaatcaccggaaaagtcaccggcaccggaaaagttaccggaaaaatcacggccacaggaaaagtcgacggaaaagtcaccggaaaatcaatggaaaagtcaacgtcgccagaaaagtcaacgtcgctggaaaagtcaccaaagtaaatatctcagatataactaaaaatata

SEQ ID NO: 22650 - DNA, 2315 bp, Cannabis sativa
gtgagtgagtgtgagaaaaggggccttggaaacaagttctgactctcacacacatacaaacacatgcaccatttcctcctttgtgattgtaattatgggttcacataattccatgccatgcatgtgtccatcattattcaatactacatctcttccctactttttttttcttctgtgtccatcccaaaatgggtccccttatttctttccatgtatgctttgtcccaataaatgcccatcaaattggtcctactttttttcccactgcctttcttttcctagtggctcatcatggccaatccaagatttgtggtcactttgtttcacttacatacaatacaactatgctgactctgtggtgatgagattatagggaaagaaatagtcacttttttttatttttgttcccaactattatgaaatccatgacactatttagttcttattcaattttccaaataccactttttgttttatagacaaaaatcttgaagaaacaaaatcatattagattaggtggaacaaatgaatgttttttttatatatgttgtttaggagggtgtgtgtgtcatcaaataaattattgccattttcacatgctttggatcacaatgaaactctagtctagactctctctatagagtatctatttatgaatttaataatgtctattccaaggtatctttacactatcatattatataaaactttattttttattttcaaaaataaaattacacatttggccaaattttagttgaaaattttattttttctgttgaagtaagaaagacaaatacacccatactattttggtcttatccattaaagccaaacatggaatttcctctcatacaccaaaagtgacctaagataatagtgaataaataaagaataaaaaaacaatgtacttgggaaaatgggatttagttgaactaaactattataggtcagttaaaataaccttatctactagttttgtacttcacatgggtacggataggaagtaatgaagaaaaagaaatataaaaatgttgtgtatatatgaatgaagtgaaaatgaaagataaaaggtgtgtggtggtgggatttgatccaagaaaaaatgtatttttttaagtatagatagatagataatagatataagatgggtaaagggaatataattaaaatagattagagaaaggaaaggagtgaggagagagtagtttgcatagtgcattgcatgtgtgacagaaacaagagagtctggtgtggtgtggtgtgtggtgttgtggctgtgatgaaagagagccccaaatgcccaacacataaaatctttcatacaatcccaatgaccaaatcaccggctggtttccctcttggaaacaccaccaccctcctcaccctttccttcctcccccaccatcttattaaatattatttttactttattatatatatatttacattttcttttcttttagatccacctcactcactttcataaacaacaccttttctttttagtattattattttacactataataaagaaatactaaaagacattattgatgcctagtactttctttagtgtcatactaatattggtgtaattaagtattgaatctagtataaattttaaagaatattactaatcaattataaggtgtcacgtataaaaagtgttggacaccacactactggtgtctaataataataattttctagtaatatttattaaatcaaaatatataaaattcgatattaaaatgcattaataacaatttatatgtgccacttaatatttgtctatttttttatgtagagaattgataaagggtgttgttataacaccattaattataagattacattaaatacactaacaataatataaaaattttggaaaaattttgtaatatatgaacatattgtagttgtttagaattatctataaatttacaaaaaatttataattttaaaaataaagttcaaacagttgttcatcacgtgttaaagaaaaataattagatgtgtaacaaaatatttgaattatatttttaatattgtaaaatattcaaaatttttaaaaattataataatagtactaaataattacaaaatacacaatcatacaaaaatattagattaaagactcatgaatattaaaacatattgaagaggtctctaaaaaatctttttaaaggagtgtattataaattataattttaaatggaattgggatttgatcaaagaacactaataatactcatgaaattattaggattattgtatcatagtaaaatttaataatatcttttttttttttt

SEQ ID NO: 22651 - DNA, 2456 bp, Cannabis sativa
tatcaaaaaagaaaagagaaaaaaagttgaaagaataaagttgtaacaacaaattttatggaaaaaagaataatgtaatagtataaaaagataaatcatattttcaaaactaaataaataaaattgtaatacaaaaatatatttcggtgttgatattgttttgcttattgtaattaggttaatgttttattatttattttttgttgttttgtagtgttttttttttagttgtttcgatattgtttgttaagttgtttaagggttgttttcatacattatttgtaattttgaaactttaatacattatttttgttaactcaatacaaaaatgtaaaaatttccgtgtcctaatattttggtaaattttctcccatcttacattatatttgttagtaggctattttcaatctaaactagttgttttcataagataatattataatcttgttgatttatttaatggcagaaaattatgggaaaagtttgcaagtaagggattttattggggcagtggctttcaacaatataacaaggctagtgtttggaaaacggtttagaaattcggagggagagttagacgagcaaggaaaggagttcaaaggaatagtgacaaacgggattaaggtaggtgcgtccttgagtatggccgaacacatccattgggtgcgttggatgttcccaatagaggaagaggcttttgccaaacacgtttctaggagagacaaactcacctctaacatcatggatgactatactcaagctcgccgggaaattggttcttccaaacaccattttgtcgactccttgctcacctttaaggacaactatgatcttacccacgataccgttattggactcctttgggtaagtaccttcatctttatctcataatcatacatcattgcatccttatttattaatttatcagttaatttttttttttcattgttattgttatgtacgctatatttatttaagatattctgtattttttttttttaaattaacatgtcaaaaataaaatttaaacattgtgttgcacgtgcgaaatatacaattttctatattgtaaattattttgaattacttaacattttttaggataacttaaataattataacgtacacgaatattaaaaaaaaatagactaaattttttttctttgatacattcattttaagagaatacattataaaaacactctatatatatttgcattttgtataggttttcttaactgaatgtgactggtagtgtgcaataattatagtaaccatgtagtttattgattttgaaaaagaataataattagaacactctttaagttgtttcactcttaatggtgcattgtagaattctatgatatatatttagagtagaataattaatattgttgcctcctaaactttcagccctacctcatcgtgcctctgaaatatatagcttgttaaaatttttccttaaaatataacaattacatacgcatgcacttctgttagattctgtttcttttgccattaaaaattactatttttatgcccgaattttaactatactaattttttttcctcttttattaaaaaatattattttttaaaatgataatttctattaaatctaaaataataataaaaaattattaaaaaaactgataaaaatattaaattaataataaaaaaatattaaattacttacaaaacttaattgctccaaaaaatatttttaagttttattttaattataaacacatatcttaaaaaattaaatcaaaattattaaaaatccaataattaatttatataaactaagattttgtgaaaaaaaaaattaaaattttttatatttacaaactcatatcttaaaatataaaaaaataattagaaattcaataaaaatataaaattatttttaaaaaaatagaaattaaactaaaaaattattatgtttacttaaacagatatagatttttggataaaaaactagacttcaacttgttcctataaaatttagttttaacacaaaattgaatttttcaatatacattttttttatatataaagggattttttaataaaaaataaattttttaaactgcttaattggttttaaaatttttatttattttttaatttttttaataatttaaaattatttttttaagatttaccaacgaaaataaatgttgaatctctttttatttttgggaggaggggtacaattttatagtcgtcgaagcttaggggggcaaagttactaatttacaaagacatgctcgtatttaaatagaataatgagaaataacctaacagaaggactgtaaatgtaaaaggaaattttttaacaagctttatattttagggacaggatcaagtagtgtcgaaggatgaggggccaaattttttaattattctttagagtaatgttagacatgcatttaaattacacacacttatta

SEQ ID NO: 22652 - DNA, 3262 bp, Cannabis sativa
acatgtttgacatcataactaaatctttttaaaaaaaaaacagaaaattgttttttgtaaacaattagccttgtttggccttattttttgaaaacagatttcagaaaataaagttacaaaaaataagaattttaaaaacaacaaaattttgttttctgttttaaaaaccaattcacttttggttaattttatttttagaaaacactaaccaaacgcaatttgtatttttaaaacttcaaaaactatttttggttctcatttctaaaaacacttttttgaaaacaaaaaacaaaaaataataccgaacatgttcttcatctcctacgctctctttttctactacaaacctatcatcaatagcttagccaataaatccttcatgaccttcactctctacactcttcttttgtccatcagtgataactaataataattagttaattacttagttgttagttaggtaattagttagttaacactgtttgttagttggtctgtactctgttttcttgtaacagattctttaactgaatctttccttttgtaaaacactggctataaataaagttctgatgctaaaggagaatgctaatgttttctaagcactactcctaaaggctcttttgatttctctctctgctgtaattcttcatggtatccgagctcctctgactcacgtccatggcgtcctccggtgacaactcgtctcctgtggatgtaaccgatcctcggcctacaccttcagttactcaacaacaacaatggaatcccttctctcattcacttacatcttcgctcacaataaagctcgatcgagcaaattacttttcttggaaatcgcaagttgtccctactgttatagggcacgatctcgatgaaattttgttctctaatgttactcctccagaaaaactactcaatggcgacaccaacactgcttttcttcaatggagacgaaaagattaactcttgttatcttggctgtgatcttccatgtctgaaagtattcttggacctgttgccaactacaacacattgtatactctgtggaaagctcttgaacaatgattctccagtcagtctaaggctcgacttctccagctaaaaagtcagctcaccaatctccagaaaggctccttaagcatctcggattatgttgacaaaatcaaatcgatctgtgattctcttgccattgctggtcatcacttaacagatcttgatatgattttgcatctcctaaatggtcttggtcaagaatatgattccgttgtagctaatatcacttctcgcagtgatgatctctctcttgaagatgtgcaagcattgcttctggcacatgaaacacgactcgaaaggcatcactccacgcttgatttgtccaccaaaatgtctgccaatctcacttttgggttacgcaatggcccctatcgcccacccccttactacaccaaaaactccaacattgagcattcatctaaaccaccttccaaaaaccctcctcgacctcaaaaccataatcgccccctatgtcaagtctgtctaaagtttggccatactgaaccaaatcctcctttttgtcattatcaatttgacagaaattgggtgacacctaaaccaaatcctcccaatctcaagcccaccttactgaactacaacttgagtatgatcctcaggttcacatcactcagtccttgcctgattttggtgatgatgtaggttggttcgtggacacaggtgctactaatcatatcacctgcaacatggaaaatctggattcagcaaacacatactctggccaagaaaccgtggctgttggagatggtaagagacttgttatatcccatgttggtaaagcaactctttcctctaattctgttgctcctttgcatttaaattctgtattacaagtccctgccatgacaaaaaacttagttagtgtctctacgttaactcatgataatgatgtgtttcttgaatttcacaaatcttgttgttttgtcaaggacaaacaaacgggggttgttctactcaaagggaagcttaaagatggcttgtaccttctaggagatgatgactccaatttgtccaaacattgtttacagtgtaatcttgttactgttccagtttcatcttgtactgattttcatagtgcttcagattgtatatctgctattgcagataaatcttgtaatcaattttcaataaataacagtaacacttttccttacactgatgtctcttctccatgtgcctactcaattacaacacaatctaatataaatacatggcatctaaagttaggacaccctgcatcagccaccttaaagactatcctaactcatgctaatattccacactcactcaaaaatcttaagttttgcaatgcttgccaattaggaaaaagtcataggcttccttttcctttgtccacaaaaagagcatcccaacctcttgaacttgtccacacagatatttgggttccatctcatgttgtgtctattgataattttcaatattatattatctttattgatgattacagcaggttttcttggatcttcccaatggtccttagatcttaagcctttgaaatctttatacagttcaaaagccttgtggtaaaacaattcaacttgctcattaaaaagattcaagctgatggaggtggtgagtataggccttttgaaaaatttctaaaagatcaaggcatcaaatttcaattaccatgtcctgggcatgtcacagaaacagggtcaacccttcttgcacaatttggacttgagatgtcctattggtggcatgctttcctatgtgctgtgtattctgtcaatagaatgcctacccatgtaatttgtaatataagccgatttgagtgtttgtttcatgaaaaacctgattataacattttaaaagtatttggttgtgcttgctttcctcatttaaggccttaccataatcacaaattggagtttcgttctgaattatgcacttttctgggctattctcctaaacacaagggctacttgtgtctgaagtcatctggtcgaatctttgttgctctaaatgttatcttcaatgaggctcacttcccagctcacaagacttcctcacctatacaagtatctactgaacatcaccatcaatttccaacagcaaaatttgttacagatatacatactgctatcactcaccctattgtttcctctgctgcaaccgagtcctcaaatgcaaggctaaagttgccccaccacctggtggttca

SEQ ID NO: 22653 - DNA, 2852 bp, Cannabis sativa
attattagttaaaaaaaaaagttataagtaaaaaatatatattttttaatatcttgtacaattattttcttaaagtaatttttacaaaatatctacaactcaaaaagtatgcatagggtatctaattatttaataatcaaataatataaataatgttaaaaaataatttggataaataccctatcactttaggtaggcataatattaaaatgaattataatttaaagagctccatttttatatacaataatatgatatgatgcatacaaatatatatatatatatatatattaggttaataggttaatgttatgttcaatgcttttttatttaattaggtctgtacaatatatgtatatttaattttttaattaaataatatatttttttattaatttttaaaattagatttgagattttaatttttgagaatttttttaactatatattgcggctactagtgtatatatgcctcctattaataattaatacttcatataatcatgatatatcaaatttaacttaccttacaaatatagtttgacttaaaatacttttgattttgatattagaaaataatttatataaattatatttcaagatcatgtgcctttaaatatcatgtgaaatgcatcgatcgataaaatcataaaaataattaagtcactccacttatatattgatcgaattaaaagaaagaaaaaacgaaaaaaaaaataatataagcacactaaatattaccataagtctaatataaaatatttacaattaagattttctgatataaaatatttacaatattttaagtatattaaatttattaaattaaaattttcttatataaagtatgtacataatttttattttttaaatatatataataatattataaaataaataacgaatattttgttaagtaataagatattttattaaagttaatataggaaatcgaaaaatactgttaaaccagaaattttattacatagccacattagatatttgaaaaaaaatgtgttataatattatttcagctaggataataaaaacttaagattaaattattaaattttcattatctaatataaaatagtaaaagaaaattataacataattataaaaaaggatacacattttctttatctttttatgaatatttttgttgagtttccttcttcaaaattatattttctttttcttttttgaaaaactactcaaattatagtaaatattgccaatgaattccttaattatattttattatgttttatatagttttctaataatgtagaactcatttggtaccatttgaaagttcttgcaaaaaacacagatgtataaaatgtgtctcctaatatgtctggtaactcctctcagatgcctcaattctttcaacaacattaataaaattctcccaacatatctctggctcttcaaagtcgtctcaattacattacatgttcgagcatccctcacagtctcctcctatatattttttggattccacaggaggatcagacacaacaacctatagttggccattttggaggctcatcgcagcaacaacagtaccctatgtatggtcaatttgggtaatcacaacaacaatctgtgtacggtcaatttgggtcattgttgcagcaacaacctatgtatggtcaaataggagaatctccacgtacaacatcctatgtattgtcaatttttcactccacaaagttagcaacaataacaacctattttggttcgtccgcagactcgataatttgtggagatcttacctatgcaataatttgttcaaccttattatcctaccccgccggctcttcaatctcgtgataatcgtgacagttcaagacttgactctaataatgcagataattttatggaacttactgatctaaacaatgataattatattttttaattaagaaaaattttatgttttaaagtttttttaagataattttataattttatttaagaccatagtattttgtattgttatggataaattaatattataaataattattattaatgtttgatttattaaatttaaatactaattaataatattttttaaaaataattattatatataatattataattatttttattatataaatattgaaaattaaaaaaaccttttttatataaaaatattaatatcggtagaatgttaaagttagcccgccgatattaatgtgtcagcgtatataaggatagacattaataccagcggaacctttgctattaatccgctggtattaataatatgattactagcggaaatatattttggtcgctaattttaatattagcgaccaattattaccgacagataaccgccaataatacttaataccagcaatttttgaaattagtattagcgaagatttctaccagtactactcttaaatattgtagtgttagtttttcttaaaattgaaacaagctctaataaaatacaatcaaatctaatacaatacaatatatcagagtatatcaaacgagacctttaagttgtcatataataataataatacaaaaaaatcattaaaaaaaaagacaaaaaaacaacttgtcaatatatacatttttattatatagtaaaagatatataataaagacaaaattctattattttcttgtccctatctaataagtgagtttcctatagtcataatataataattttaattttaatttatattaatatatattgagttaatatatatggctacagaagtttgaacaagaaaatataagtcttaattgattaatttacaccatgtatcatactaatcgttttctattcagtctacgtataacctttttaattatta

SEQ ID NO: 22654 - DNA, 2214 bp, Cannabis sativa
gaaacaatatttccattgttttcactcacatccccttctgaagttaacaaaatcctttctgataatgtccttcccaccataaaaccagtcactcaacacattcatgctcctaccgatgtgttgttacctttttctaccaaaaattccatttcacaacagcaccacattgttggcatgccatctacacatccccgtgtcactccaactggtgttttaacaccagatttatcaccaaaacatgttccagcagctgttttatcaccagctctggttacaaaacaacacccagccaatggttgcacatcaaattcagatgcaacatcaaccccagcagatgattgcacaccacaacctgctgcactaacgcctgatgcatcagcacagaccacacccgatccaccacctgctggactcataccagcacccacttcatcacatctcacaacagatggtttcatccctcctaaaccatcttccataaataccacaaggactggcagagcattaaacaagccaaaacatttgcaagactatgtctgccatgcctcttcaactgctcatcctattgagcaatatctctcctacattaaattacatcccacttttcgagcagctgtccttgcagcctattcccaagttgaacctcaatcttatgctgaggcatctcaatttaaacattggctattagcaatggacaaagaaactgatgcccttgaaaaaaacaatacttgggttgtcactaaactaccccctggccataaagccattggatgcaagtgggtgtacaaagtcaaatataatgaaagtggggctgttgaaaggttcaaagctcgactagttgccaagggctttactcaaagacatggcattgattactctcaaacttatgctcccgtggctaaattcaacactctcaaaatttttttagcccttgcagcaatgaacaattggaatgttcaccaattggacatcaacaatgcctttctacatggggaccttcatgaggaagtttacatgaaaattcccccgggttacaaggctcctcccaacacggtatgcaaattgaataaaagcatctatggcctaaaacaagcctctaggcaatggtttagcaaattgagccaaactctcatttctgatggtttttcccaatcactttcagataactctttattcacaaaacgaaccaacaccttttttcttgccatcttgatatatgtggatgacatcatcgttgctagcaacaatgacaatgccatctccttttttaaaacatatcttcacgacaagttcaaacttaaagaccttggcaccattcgattcttccttggccttgaagttgggagaacaaaacaaggcatctcggtctcccaacgaccatttaccatccaattactcaaagacacgggatatataggtgccaaaccggcttctactcccatggagaccaacttaaaactaagtaaggacaaaggaaacattcttcccgatcctactgtttttcgaagtctaattggcaaactaatatacttaaccataacacggccagacatctcttatgccgtcaatcatcttagccaatacttgacttgccctcgaatcccccatgtccaagctgcacatcgcatcttgcaatacctcaaaactacacctggacaaggattgttttttccttcaaacaccacaccatctatttcagcatatgctgaaactagcttatcaccctcaaacgttcagatctcctttttttctgacgctgattggggggcttgccaagacacaaggcgatccatttcaggttatattgtgtctcttcttccttggcagctctcttgtattatcatggaaatcaaaaaaacaacaaaccgtctctcgatcttctgctgaagctgaatatcgagctatggccaatgccacttccgaactcacatggatcctcgctctcctcaaagactttggcatcaaccactccactcccgctcgcttcactctatttattgtgacgacaacaacactgctgccattcacatcagcgaaaaccccgtctatcatgaacgcaccaaacacgtggagattgactgccacttcatccgagagaaggtccaagatggctccatcaaactaatgcatgtttcttctcaacacaacctcgctgacatttttaccaaagctttattgcctactcatttttccaatattgtatccaagatgggt

SEQ ID NO: 22655 - DNA, 1646 bp, Cannabis sativa
aattcataaatgaatatataatctaagattcccaatctagtacagccatcagggaacagatgctatttaggaaaatcatggtagtcatccagagaccttccggtcttcgcaagaccacacatacttctgttgtgttccagacaacccagaaataacattagttagctccccaacgcccaaaatcttggacaaaggataacatacttgcgatccaccacttctacagtgaagttattaataaagtgtttatctctagtccaagcaatacaatccatttcaaattggtaacaaaacccaaaaaagaaatcccaaaaaattttcataggtatccaaatgagatgttaaaacttgaaacgcaatgtatgctatcaatttcctttcttcctattagtaaatataagttaaaataaaagggagaaacatgaacctttttttccctctctccaaaataaaaagtacaaaattttccattaaaccttcacacaacacatcatttttcagtttcaaagtaagggaaaaaaaaccaggacaaattaaagtttacataacaatttttaagaaaacataccatgaaacaagtaattcaatgataaaatacacatataatgctcaataaaaatcacaaacaacaacaaggagaaaatatatacatgcaaagacgtgataaaagagagagaaggaaggaaattaccagagtcagggaagacaaggttgaaatctaattgaaatgggacattggcgaatctgaggtacaagtaaagaggcaaggaagaggggcaagcagttgggagaccgaaacaaggcttcctcaccacgagagtgtaactttctccttcgcccactacaccttccatcctaagttcgggaatcacaaaattgagaagaacattaaaccctaggtggtagggtaagtagggttttgggtttgggaaactcgacaactgtttatgactctctaaaaagactctagtcctctacacaaacaaatcaattctccacaaaagcaaaaaatgagcagcgatgtaaagatcacatgggattcgggttctctaattcttcttcttcttctttttttcggtattttgtcaaagggttactatgttatgtctatctattcgtccaagtcaaaacatttttttttttttctgaaaatgagaacaattttacaaagagcattgctattgggcaccagtggtgcctaacactttctcgacatgtcgcgttgcgattagctagcgatactttttaaaagctattatattaaattatatgagacccgatacttagttggactaatagcgatattcacacgtatgagggtgctaggcaccattggtaccctttagcatttctcttttacaaatatagtgttgatctcttttttaggcggaattagtaaagtgttttgataacaaatcacttactcccttttatttgtatatattgagaataataagatcagataaatctcgtcaaataagttttttgttatctctaaaagttacaaatattttggtaatgtaatagttctcttgagaatataaaaaccactcctaaatagtactatttataggaaaaggaatgtcaaatatttatacttaattatagaataaataatgaaccaatcccataaaatcctctcattt

SEQ ID NO: 22656 - DNA, 5137 bp, Cannabis sativa
agtaaattgatagttattgatagttggaggggttttgccgcaaattactctatatattttgaaaataaaattaaaacttaataaaaaaattacttaaataatatgaataattataaattctacttaaatcacggtttcgaatcaaacttaatggtttggtttttaatattcaaaaatcgttatactggtttggttcaaaaaactataaaaatcgggaccaaactaattcgtgaacacccctatcgttacccatgttaatgctctgcattcaagatgaggtgaaagttagaattttatcaattttgcctaaaaaatgaaataaaaagacttggaatggtttgagtaattgtaaatttacaatacaattaattttacagattctacaagttgtatagattataaaggccgtaatggtgctgttaagttgtaaatttgagtttatgcaatgctaactattaatttttctttttgaaatgtgtcataaaatgctctttttcttgctaaattaactaaatattttttatgtttaaataaaatacattacattaattttataaaaatattaataattgtttaaggtaagaatttattagctcaactttagttaaaaaatcaaaaacaacattaacactacaacaaatttaggtattaagggtgatttttgtcgcccctaatagtactgaaaatcactccttataattattaggtgtggcttatcgccttaaaaaagtcacctctaataatttactataaattagtagcaaaagtacttaagtaattgattttgctataattaactattagtatattaacaaatattcgtaagtaaaactattttatgaaaataaatacatatgtaaatataatttaaattaattcttaaaataataataatttaaatgaaaaattaatatttttattaattattaatattattttagtttttaaaataaatatataattaactattattataatatgtataaaattttaattgtatacaagcagtcctatcgtaatagtatacaccttatattttaataatcacatgatctgaaatcaatggtaaaatttttttcctaccgttaagaaatttatgtcaagtcctaccattatcttgccctatatatataatactagcattgaaattaagtaattaataacttttagatacatgtacattacattttgtgaatattacaaattaagatatagctcaaataattgataaacacataatattaaagctatcacacaaagtacttaatcatggtaaatgcatgcaacatttaatatgcattaattaaattttaactagaatatatctaagtgattactaagacattctgaatgataggccagaatcactcaatttttctgcaactatttgattcacacgctctgccatagatggagtaagatgattaatccaatcaccaatttgaccttttctaaagaaaagtttattgtgcaacttaggcttaaattcaccgtgtttattcacatccaaattcttcaatttgtttaagctacacatatccattatttgctcaacaactccctcactctcttcctcttgggaaaaaggaagacctatgaactccgcaacccttttaagttgacaaacactcttctcttttaggtcttcgtattttaaaaacaacactttctcaggtctgtccaagcttgctttccaaaaccctaaaacatggtcccaataactcccgaattcagtctctcccttacaaaacttgtccacaaaatattcaatagtccactcgtccgagagacggtcgggatgaccacttgcataataccataaagacacgattacatcaagagggtttcgactgatgtaaataattcgagacttagaaactttcaaaatagaatcgggaagagatgcgtaaggaatgtgtgtggacaccaaacgaggacttggcatagtagtgaagttgtggagattgtgtggataattggcataaatttggaactcgaaaaaggacacgaggtggtgagggacagtggtgagtagcggattattgttgttatagtttcggcggttgagaatggaaaacacaagggatttaagccaagtcgtgcctgatttaggaaaagaagtcataattatatcgtcgtctttgggtataaaatttttttggaaggcaagaacattgggaaggacatggaatgggaaccaacaattttggtataaaattaaaccatcttttctccaaccattcgatttaggcagatcggaaataactatttctagtattgatccacctctgtcatcgtcgttgttgttctcatcatcatcatcatcgacattttggccacaagaaaaatgttgtgatgccatgttttagcgtaactggatagacagtttaattaagtacaatattaatcatgagtagttaattctaatagtaataatacacattataaaatctgaaagacaaagagatcaaataatgatataccttggaaaacgattagagatattaatcgatgtgtataaaagctttgacaattatttacaaactttggttatgatcatttatttgttttttttttttgttaaatatacaatagctaccatatacatatatacaaaccttacatcacatgttatcactttacaataaaatatgaaatttgtagccattcattgagaaaatatatgatacggaatattgtatattattattgtgtgttaggtgaagaaatatacctaacgtagtgtgtgtatcaattacatagtaattaatattccttgcatgtattattacaacttcatattataattttttaattaatttttacttttgaaattaaatatcacaattttttttttcataacagtactcgttataattataatatcattcttgtaatttttttaaaaattctaaatagtttacaataccaaaaatagagttcttgatatattccaattactacgcgtgtatttaaaaattttaaatgtatttttgacattgtaaactatttaaatttttttaaaatttacaggaatgatgttataagcacaacgaacaccaccgccagtgaaaaaaatattaaacaaaaaaattcctgcatctatttttaggtataaaaattgacattttcactcttaaataaaatatagtataaataaatgtaaagtgggtaaattgatatccactaatattgagaaaatccaaggattatattatttattaatattcgtgcgttaggtacagaattaaaatacataggaggatgaatatcattacttaaaaaattattttatatgaccatataatatatattgttttgaataagtggaaataaataacaaataaggttattgatggcagtactattatgctatttacttattttattttggtaattatattaggtttttgaaattttatatataagtagctaaatattttaaagataaaatacattgaattaatggtaaaatgataatttagtccttactcgatgtagctagaccatctatagaagatcctttattgtttaaattcaaataatagataacttataatgtatttattcttggtaaatagagcattctatgtaaccaagaatgcaattccaaatctatagtggagttaggaaaaattaataagataaagaatttactaagtaaattctaaaactgcttattggcagtttgattatataggcccggtcgtcacactacctgagatgatattgttttgtagactgaattaattagtttaattaatcaattagaattttaagtaaaattatgtcttatttatgagttttattaaacaagggcgaatttgagaagaaaaagaaaacttagagtatatttttttaattaagagactttagaagtttaattgataaataagttatataataatttatttgataattaattataattattaaattgataaaattaacatttaaacagttagaatgaaacaagtgatattcttaagaattttttttttttaataaaatgacaaaattgaaactcataggtttctctataagatttcggctataggttttaattaagctattctttttatcttctttaatccgttttaattctaaacctaaccctaaagttacaatataaatataacatgatagctagaacaaatgtgactctccttttatcaaacaaagagaaattaagaggtattatatatattatatacagatatataacttgaaattctttcattattcttcattaaatttcttgtattaattagagctttgagtatttgtccacacatttcaaggtaatactcaggttagtgtagaagactctgtaatgttttacaacttgaaaagagaatccatgttcaattcttgatcatactctctccagcagaaatgatcaatggataaattagagaaataaactaattaaagaaatcaattaattaattaattctactagtactataactaatgtaaggatttcttgattccttatgtgtttattttattgttttaggatttccatattaggatgttagtttagtattaattcaacatacttgaatagtaaataaatcttgcttaaataattttcaataactggtatcaaagtcatgttaatcatttataattcatgtaatatggaattgaaacgattttgtatgtttttatgtgagatttggatgattcatgattgatttatatattttgatgaatgtatgtgatgataattttattttagttctaaaattattttagaatgatagttggttaaaaattatgcaatttagaattttacaaaactcaatttcttagatcaaaatttttcttagtattgtcgatagtttttcaatgtcgagaaaaactttttacgaagtttttccatcgatacctattctacctaattttgcgacagtagaatactaagaccgacgggaaaattatacccgactgtcaaaaacagtcaagaaattccaattttctagtagtgaaagaaagccctacaaaactcttttgatttgatcaatagtgtgctttagtgctacaaaaactgctacttttagtgacaatattttagttacaacataatttttttgtgactaaatgtgactttttttttgataaatcagcaagt

SEQ ID NO: 22657 - DNA, 2031 bp, Cannabis sativa
gtaaaataatttccaacatgtcccactcccaagaaataggacacctcctgtcgacaccatcaacggcggtgtggggtggacaaacataacccagctcaatttttcctcaaaattgctgctccgtcggggaaacatcgacgccagcagccacagtgggggccatttccgcctatcatgcctgttgtggtgtccgaaggcattgttcaattgactactgatcactacacgacgatataggaccaaatgcgggccttgcaggccaaaatcgatggacggagcaggtttcaacgtcttcctcaagtacccaccacccactcgaataatccgcaggtaaatacttttagacgatgaactatctgtactcacagggaatgaaggacaggtcaagaagggtttgatttttatcagccaacctcgagtgatcagttcgcgcggaaccttaaccatgaggtgcaaccagaagaggacccgtaacaacttgatctacgtagtataccccaaccgcggaatgaggagaatgacgctgagtctggctcttcatcttcgcaaaatcgcaccttgagtatgtacaccaggtcgtattcggtggaaacacaaggttcataggggtgatcttcgcgatcaccttaacgcagttttcagggcacgttctcagacgccccgtaacgatgaagagcctcgtggtccctgtttgagcaatcagggcataaataatctcaccaacccgcctcccgcaccatctgcgactactggggtggttatcctagccaatatagccgccgcaacaactgcacccgcgacgactctgagcaatgatgcctttcaagggagtatcgatcagagtattcttttgcaggctttaaagataattgagcaacaaagaaagcccatatacaaattccacgggacttctccttttatcgcggaagtgtgacaagctcggttgcctaagggattcaggctgtccgatcattaaaatataaaggtaccactaaccttatagattatctgaagaaatttaatattattatggaagtggaccaggtaccctagcttgtgaaatgtcgcattcttgtggcaaccctggaggacaatgcttacgattggttcggccatttgcctgaagcatctgtctcgacgtgggaaacctttgtcgaccttttcctaacacatttcgaagccacaatgacgtatagatcgccttatactactctggataacattaagcaaaaggtcggtgagtcattacaagactattttaaatgttttaatgccgaagtaaccaaagtagagaaggccctcgagtcttcgttagttgcaggctcgaaggctcgagtcgttagtcaagttctttgctatagctgagtcgcagaaaaggattgaaaattctctagccgagctagagaaaggaaagaataaacacgagtcacccatatcgcgatcaaaaacttgcagtcccagaggaaaaaattccagagggagaagccctagaagacgcagtccccaaagacagcggagtccaaagttggccaaatcccctctgaagaaaaagtcatctcctaagagaaaaggcggcccacgttttgtgaactatatagaattatcagtcccgcgggaccacatctacgtgattgaggagaagaaaggagtcttcacaaagcctcccccaatcaggggaaattgcgacaagagagacccaaagaaatgctttaagtatcataaaaatattggccatacaactttggaatgttggtttttgcaagatgagatcgaggaactgatcagacgaggaaagtttggcaagtacaagaatgatgaggaacgtcatgcttgagtgaatgataaggaacgtgagcggttcaagaacgcctcgcaacctcacatcataggggaatccagaaagtcacaggaatgatatgccatggacgcaagggatgggccactcactaatgtaaataatttgagtgagcagccagaaaaacaattcaagaaggagtgcgatgatatcacattcatggaaagtgacgccag

SEQ ID NO: 22658 - DNA, 2793 bp, Cannabis sativa
  modified_base (2706)..(2741): a, c, t, g, unknown or other
aaaaaggaatgtctacctattaataacctatttttacaggtcaaagaaaaatgtaatcatataattataataaaaatgtaattattaaatagtcacccatatatataatgttgttcttgaatcaaaacaagcaaacactaaacgagttgtaatgattttgttaaaacattattcacagaccataataatattctatcactaacaatccgagagttcttactgattaaaaactaatattaattacataattaaatataatttgtataatataaaaaaaaaagtaactatatatgaatgaagggtcatgagttgtattcggaatttaaaaataatggaacaagactttagcaagctagagagaccttgggattatcaatttataatgtcaatttttttttggacaaattataatgtcaaattcgacacaacaaaaaataatataattattagtcaaattgtttcttgatataattctatttgatcaattaattatttattcaaaattcacttccaataattatgtataatgattaaaatattgttaactttttagtaaaacttagttttaaacataataactttacataaaatatgatattacaaaactactcataccattttaattatatatcaagatatataagttgtaatgtatatagtattttcttcttttttttctcaaataataaagaaaaatattggtgttgtggacatgaatcatgataaaaataacctaagaatatcacacgtaccaatatctctgaaaatgaaatcattttaattggactttttcaaacaattacgtaattgagattcgttacagcacacgtgttaacccatttcacgtctctgtatatcactttattttatctacttctatatagctagctgtactgttaatgttgaaacctccatgcaattgtatttttggtttttttggttattaattaattaaaaaattaataataaataataaatagataagaaaaaaagaacattaaataaaacgcgtagttctgaggattaattaaaataatatacgtattgtgtcccaaacagaggtattaaagtcttttctcatattctccccttaccgtcgaccatgccaaacattatggccaaaaccaaccacgtaatacagccaaattaaaataacgtaaaaagtgacccctctctcatgtgtttgataattatatatattcatattacgcataacgtgatatatcaatatcaatatcatcatcttgatggcaaattggcttaattatatcaaaactgaaaactatgtcgttttggtacatggctaaatactctcagcgtcacctttattcatatgaaaaccaccctcattgttttcttttcatcttataagacttatatataaaaataaaatatttttttggaagttatcatgtgtatacactaaaaagcattaatagttttattttacataaaatatatatattcttaattatatatattttaatttcttccttctaatttatattcttaaaaaatatacctgttaaacaaaaataaattatatttttataaatattaattataacaaaaaaatttaaataaaaaattatgtaaaattttatttaaaaaaattataaaaataaaattaaaatatgtattgaatttaatataatataatgtgaaagaaaaaaaattaaaaaatattaagaattattttttaaaaaaattcctcattttttataaatttaaatttcttttttattattcgtccattagatcaaaatctaatactttaatatttttaaaattaatatttatagttaaattttttcaataattataaaaatattaattaaaaaatattctatatatatttgtaaatatttaatatctatctactacaacacctaataagttactaaatgaccctgccaatgcgtgtatttaatcttaattatgcagttagaacttagcagtgattttctcatatataaatagggataggattttgtcccattattgtacttttggatatacaattagtgattagattgtaatattaataaaatattaattgtttggtattttaaaaaaaataaaaaggtgacatgacatgattaatgtgtgataatactctctactttttaataacttgtcaaattatattgattatattatactttttttttaaaaaaaaatactttaaatcttaatttcaactcttattcattaacttttcaatagattttttataaaggttaaaatactaaagttaataataaaaaaattattagtgctataaaataaaaaaaaactttatagtgtaaacttatttgttatgtaaaaaaataaataataattcagcctatatttttaactatgtattttcataataattaattaaagtattgtaaataaagtatccatctcaaatatttctaatacttattgattttatttaattttaattttatgttatagttatactttattttatatacaactttagttattactaatttaaaatattagggtgacttcagagaattactataaaaaattgctacttttagtgacaattttttagcataatataatttttttgtgactaaatgtgagttttagtcataacaaattaaatattatttgtgactaaaatatagtctttagttacaagttgtcactaatttaggtttagttacaacaagtattatgactaaaaannnnnnnnnnnnnnnnnnnnnnnnnnnnnnnnnnnnaatacttttagtcacggacttttatttgtaaataattatttatatttaattt

SEQ ID NO: 22659 - DNA, 3340 bp, Cannabis sativa
cacactaaattggtgtagatacaaaatcaacactatttaatggtgtataatttagtgcacaccaaattggtgcataaattggtgtattattagagtgaaatgttgtgaagattttacaccaatttaaagaaatagtgtaagagaaactaacaacttttgttaagtgaaaaattagaaaaactaaaaatcaaaataattattcaacatgccttaaataaaattaaattatataagactatatacttaaataaaattaaattaagactgtgagcatatgcacataacacaattaattaaataggacacattatatctccaaattaaacaacgaatcgatttcttcatgaattccaccaaaaactgtgtatacgtaacaaatgtataaaccaaaatttagatgtaacaaaaaagtaatacaataaaaaggattatgaaattcgtgagcaaaagaatcaaatactagtagtttatgttgtcatgtagacacatgtgacaactttattcataaattattctattaagaagaattaaatattgacaggaacataaaaccaacttcaagaaataattttggttttctgtttcaaagtttatcggatacattcttcatcaaatcgggatgggcacattggaaggcaaacaattcatcaaatgagatgaagccatcgttgtctccgtctatctccttcattcggtctcgtacttcctcttcagaagagcctaagccgagcgccttaagagccttggccagctcctcccatgagatctttccatccttattcgaatcgaaatgattgaaaactttttcacattgaatcctctcttcgtttttaagttcagccattcttttttcaagaattattacaatattggatttgagttgataaagtgaaaaataatcaaatttgtttttgtggttaaagagtgcaaacatgtgtatttatacattttttttcttctccaaattttggatttggcaatatttcctgcttaaaaatcggatctcaccttaaaccaaaaatggagatttaaattcaccaatatttaatggaatattgatgataatattagttgttcactcctctccattgaaaatttcaaatttttgtttactaattcaggcttatatagatgtatgtatacattttgtttactaattctttaatatatcatcgttttgatccatgtacactttgtgagaaataattgtgaatcgtgacattacttaacgagcatatcacacattagtatgtaacaaaaagtgtgttactaggataataactatataacatatagtaattatattttattttaaaattaaatgattattttaaaatataaaaagtgtgttagataccaaataataattgcataagcataatatagtgtaattaaacatatactataagaaaagggatcttttttcccaccttttacacttggaaaaaaaaaaaattaaaaagaaaaaagataaaaagacatcttcaaaacttttaatctcactttattttcgacgcctagaaaaaatgtgatttgaaattctggaacaagaacgtcgtttggcaaacacacacaaaaaatcgtgttgggagggtcattttgtgtgtttacaaattacaatctatgaattttcagtaagactttttaacgtggttcttaccaaaaaattgggattaaaaccaactttattcccctttttaggtgagaacttggataaaatcgtctccctatacatgacacatgcataggatcaaagcccaaaacacacattgtacttccttcatcttttttcaccattttctcttcatttttcatcttttcttcaacattttcacattagaaactcaaatacattttccaaatcttccattccttcctcatttcttctgtcaagattaccatcaattgatggcttgcccttatattcttcaattgcacgctatagcattaccgagctaataattggttgcctttcacagtctctacccctaaatgagtgaagagttttagggataaatgcttgatcgagcttattgcctccattcttgttaatgtttggtgacccatcagaatgttgtaaatagaagggatgtcaacaactataaattcttgcatctggattgtggataatggtggttctcccatggtgagcgggagttcaattgtgcctaaactcgtgacactattgcttgtgagcccgcataggttaaccatacatggcttaaaccatacttcttctaagcccattttctttaaagttttttttagagaatattgacagaactctcgttatctataagaaccctctttatcctcgtattagcgagttgaactgttattactagaggatccgtgtggggaaaactcacatgcaatgcatcttcatcagtaaagatgataggaagttcatcagagctcgttttaggagttctgaagcaaaagctaatttttcgttcttcacattatttatatatctttttcgagcattatttttgtttcctactaggtgtagccctccagaaataactaagatatcctcaccctcaactgggggaggttgtaatctttagttattctagttgttgggcagattttgtttatttccttgaggtcttacatattgccttaggaacctcgtgagataagattttcaatcttatcttttagttgatggaaatcttcagtggtatgtctgatgtctctatggaaatggtaatactttttaggatcttgcttatttctgcatgtctcattagatcgggtctctgaaatgcgaccctattttcattcgttagataaatattttcaggagtttcatttaatttcgtatataccgagtatataagaatatatatgtctcgtgcttcttttcttttttcttaccttttgacaagtctctcgacccatattttttcttggtaattgggccatttaggtttgaatttcttgctttggttgtcacagttctcgctattgtggtactcgtgctgggtttgtctcccgagcaaaactttagcaacgtcattttatttggtgcttcttccttctgcacgaaaatttgtgctctttcattgaactcataaatgtttcttacaggttgaccttgcaaatcatcccatagttcacctcatgtatctgacaagtcagttgttatcctagcttgaagatgttaattgaatactatcattcaaatttttcactttggctgcagatgtactaaaacagcttaagtatgcttttagagactcctttggttgttccttagcattggttagtgaatatgcttctggtcttcaatcccttttagcttgaaattattttttaaagtcctttgatagtt

SEQ ID NO: 22660 - DNA, 2786 bp, Cannabis sativa
  modified_base (777)..(778): a, c, t, g, unknown or other
tgagtttgccaaattggatttcaatatggtgcaatcaacatatcaagaggagctcaaagtactctctaggtaaactatacattataaagataatgttttacgaatgatcatcattgctatttggtaccagtactgcaggtatgcttggcaccaccttgaggtggcgctttgcgattagtttagtaataatattccataaaagttattgcattaaattatatgacactttatacactggtgccttttagcatttctccttacgaatgattatcactagtatgacatcatagcggtgttctgagcaccactaatgattattttaagtggttttgatcatatatttgtgtagatcatagaaattcaagagacagccacaaacacgttttcacaaatattcctaaaataatctctaatttgtagtaacaagattgaaaactatagtggtagattgggctgaattaggaaacttttcaaatcgattcaagatcacaatttaaacttttcaaataaaaggtctattttttttcttatttatttattttacatttaaatccaatttgttatttttatgtggaaattccccttgttttatacacaccaaaattttcaaaattctcttccatttattgtttgcacattttttgggggctaatttttaacattagaacatggtctctaaaatatttataatcaccctgcttgattactgatgagaattatgagttccatctcagaactaactggtgatgagtggagtaacccatgttcttatatatnnctcaatacttttacatttaattcatgtgggataatgttctccaatacttaccaccactttgaggtggtaccttgcgattggtttataatattctataaaagttatatgacaacttttagtatttttctttacgaatgattattatgagcagtatgacatctcgtagcggtgttatgagcaccactagctactgaatattttcaagtggttttgatcatatatttgtctatatatataaatatatatatttaaaggtggtggaaggattctaaacttggagagaaattgcctttcgttagagatagattggtggagtgtttcttatggcaagttggagtaagatttgagccacaattcagttactttagaataatggatacaaaactctatgttctattaacaataattgatgatatgcatgacatttatggaacattggaggaactacaacttttcactaatgctcttcaaaggtaattacctaatacctaattaattagtatattataatgatatcacattttttattacctgttataacagattactaattagtaaaaatttaatttttagatttcaattaattatatgcttaaaataaatttcttttttttaattttaataaaacttttttatttttatttataagaaaatagataaactaaggaaaaagtatcagattgaaagtaattcattaattatttttatttattttataaattaatcgcaagtgtataacaataatatcaaaagactaaaagtaaatgtaaccatcatggttaaatatttgtatgtaatcatggaaacctcctctctttctatatatatatatatgtatgtatattaaacaaaattaaacttatatttgtgtaaaaattcaattggttttcagatgggatttgaaagaattagataagttaccagattatatgaagacagctttctactttacatacaatttcacaaatgaattggcatttgatgtattacaagaacatggttttgttcacattgaatacttcaagaaactggtaagtttgtattgggctttttagttgtaatatattggatggtttctttagttgtaatatgttggaaacgccaagtattaatctgtatttatacacacacacaggaactccaatagaacatgcacgaaagtatctcacagaaccaagcacaaccataagaaaattgagttgaatgaattactattttattgattaatctgtaagtattacaagttgagaaaagtattcttttctatgtattaaaaagaacaaaagctaaggctatttatagaagacttaagtgctaaagggtaccaactgtcataactgtcaagaaggcagttatgacagttggatatacaaccgaaaaccaggaacaagaatacctaactaactgatccacttatcaggacacaacttctaacataatgtattgcatgtttaatactattatctttttttatctttaatatatatgcatgtagatggtagagttgtgtaaacatcatttgcaagaggcaaaatggttttatagtggatacaaaccaacattgcaagaatatgttgagaatggatggttgtctgtgggaggacaagttattcttatgcatgcatatttcgcttttacaaatcctgttaccaaagaggcattggaatgtctaaaagacggtcatcctaacatagttcgccatgcatcgataatattacgacttgcagatgatctaggaacattgtcggtaagctagaatatatatttacaatgtggaaattattattattattattattattattatttaactttattaattgattaggatgaaatgaaaagaggcgatgttcctaaatcaattcaatgttatatgcacgatactggtgcttctgaagatgaagctcgtgagcacataaaatatttaataagtgaatcatggaaggagatgaataatgaagatggaaatattaactcttttttctcaaatgaatttgttcaagtttgc

SEQ ID NO: 22661 - DNA, 2874 bp, Cannabis sativa
ttttgttattttataattgatttacagtttttataaggttggttttctctgaggttgattctcgatgttttttttagttgtttttttttctttttgttaaaattatcgtatttttgtaattttgaaatttttaaatcatatttttttaaataaaaattttaggttgtaaaattataaataaaacataaaaaaaaaaaattttgaattttctttttttttttattgagaatatgaatgaatcactgttgacacatattaacttagtctgttttaatatgatttaacagaactggtagtaataagaacaggaaaaacgttaatgttagtatttataccgtcaaaaaagaagaataagtatatgtgtaaacccgaaagcattagatatttataccgtaaataccttttttagtatcggttaaaatttgatgaatggaaattgttgcatgggtgcaggctgatggatatgtatgccctcaatgtagagcacccaaaaagaggtttgcacgttatgatgtgaacacaggtaaggctattggtggtggattgcctcccattggtgtcattattggcttgcttgttggtgttggtggtgttgcagcattgcttttgtatggccttcaataagacaacaataatatgtatatattatgctaaagaaaaaaaatcatttcattaatctaagatgattaattgttgtattaaattaagaagaaaagtacaatacttttcatatcatttttctcaacaagaatgcttttacactttgatgattgagttgtcacatgtagaggtgataattcatgtttatggatcatgtttgtgtctgaaattcaaaaaaatgacaaattcgaaactaacacttgtttattaatcgtagtgaaaattaaaactcaaatctaaattattgataaatgaattcagttgatacatgattcgtttaacttgtttatataaaaaaaattattagcgatgaaacatttttatgttttgattttttatatttagcttctttaatttttttagcaaagttcctttatatttatttttctttataaatttaaggtgtttttttttttgaaggattataaatttaaggtgttagttggatatcatcgttaaatattgactaaattattctattgatttcgaagttttactttcacatatacacagatgtacacaattgtcattcagttgctttttaacagtgatatttaaccatatctcaaattttaaaaaaaaaagtaaacttaaagaaattttgctctaaataaaaaagaaattaagtgtataaaaatttaaacataagtgtttttctatcactgtaaaaccagagttcttgagctgacaaagatgagatgaaatggaggagaaaggaaggaaagacagatggaatgaaactgtaaagctcaatccatgactggcctttgatctctttatttatacaggtgatttaatacaaaggagttagttacaatcacagctaaaccagctgaaagaaacagtagaaaataactaacttactaacagtaagatcggttagttataaacagtattaactaactaaccgaccgattaactacccacctacatctccaatatcctccaaaaaaatcatggttacaagttaaaaacatatcaaattgattataaatatgttacctgtgacagtcttgataatagtaggctgctacttggtaacttgttactttactctcaaagaatgtgaattatcattttgtttaattttctggaaattttaatttttattatgaaagccaatttatgaatttggttcagcaaatatcaaatatgtaatagttaacaatttcattattttaattatacaaatttctataattctcaccctggattacctcagttgcaaaaacaactatatttaaaatcataaagagaatataaatatttaaacaaacaaaaaaaaaaatatgattatatgttcattacttgcaaaagacatgtatattgtatcataatttagtacaaaattaaatataataaagaacaagaaagaagaagaaacaatataagataatcatcttaatttctacacaagaaattacattaaaaaaagattaatacataaagtgagtaaaactcaacaaaacaaaagaaagatcttcatttggttacagaggaatgtgatattaattaatctatatatacctattttatatctattgcaaagcatttgaaatagaataaataaagtccaaaaagcctgtgcctttaagaatacctttaccagttaatagctcaaaatccaacaaaagtaagaacccaattacagctgcctttccatttataatctcattcttcccagtgaaaccaaaccctcctgaactctcatcaaccaccattcttacctgtatcaaaaatatgtttagtgatcggtcatatgactcgatgtagtgttttggtacatattttatgtgcatgtatcgttactctaaaagcaataaaaataagtattttctcatcgattgatcaaaattggatttgagctaagacagagtaggcgcgggcctaaagcccacccacaaggaccaaataattttattgctacctaaagtgtaattagtttcagggtcggcccagtaattgactactcgttactaaaagtaaatcatgtaaataaattatcgaaaatatttaaagagtaatgatatgtgcatactaaaatattacaccgagtaatgtaacattgcttgttcgccttaactaaatatgattcgttgaattataatgtcgcgttttggtgcatattttgtgtgaaaaaataccgaaaaaataaacatgtcgtgttgaagaattaggtatagtaaaaacagagtgaaaatccaagtgaagtga

SEQ ID NO: 22662 - DNA, 2063 bp, Cannabis sativa
ctaaatattatcttttagttacaagtaacattttgttgcgactaaaagtcacatttaattacaaaaaaattatgttgtgactaaaatgttatcactaaaagtgacaattgtttgtagtgagttaatgtgtagaaataaattattatatataagatgaatatactattctttttattatcaattaattttgagatcaaatctcattcatcttaacctcctttattcatttttattctaaattttaacatggatatgatatatttttgctacattttgagttgacttttgtgacgtttgagaatacataatgcaagcaattttttctttgattaactaatgcaaataaatgatagtgtgacgtcacttgcacaaacaaaacaaaacaaaaacattatagatacctatctttttttctttctaaccaaatactataatgggaagataattaaaatatataaacacacaagatcttttactttgctccgtcttccacgtattgtgtagtagaatatatacccatgatcacacattgtaaaatccacttaatttgaatatctccctagctacataaaatatcacctttgcatacgcatttttgtatcgacaaaaataagtatattgtgctggtaaaacttgtccacgaaaccctgtcattaaaaactttttactgttgcaaatggcatctacccagtaaaaatggattctactggcgccatattgtgctgagaaaaatctaacgtcggtctaaactaggatcctaaatccgtcattcgacgggtaaaatatattttatcgacacatatatgtgccgacaaaagttttgtccgtttttttatttggcgagtaaaggttttgccgggacaacaatgcgccggcaaaatctttacttgccaaatggattttggtaggatagacctatactgacgcacttatgcatcaaaaaaagtcttaagtttgcaagtttaggatttgttttgtcgtcggtgcaaaaatgtgtcagtaaaagcctttcttttattattatttttttaccaatatatttggaaaataaatatttaagagcttaagaaataataaaatgcagaaataaatgagatggatatttttacgtggttcaggtgttaattaaccttagttcacgagttagactattagcctcaaagggcgtgtttaatgattttatagtgttttagcatgaaaccctaactcggtattctgattgtctcttgaataagaggaaagcttagaatgctattagtagagcttcggtgatctaggttgtgatcccttctttgtatgaaaatagaaggatatttataggctaagggcgtgtatggacattaccatgaagcctagggtttctacaaaaagcccactaaaagggtaaaacacatgcaaaaaagagctgattgttgggcctcttgaaaagatttgtgctcatgcgttgaagcagcttaacaataggggaccactgtacgtaatggttgcatatcaccaaaaggttaaaccttgaaaagtgaattattggaataagcatctggcaaaaaggtgtgtgaggtgcgcgcactaccatgtcctggcgaaggggacaagatctgatcctgtgcaaaaaaagcataatcatcgttgggtgattggtgtttgtatacaaggtagacgtttacgacccttttgggttgtaagtgtccgtgataggcccttcgagtacctgtctgggtatcgtttgtgtagacattgagtttgggccactccgggttctgaattggtaatatgtcttcagtgtttgggaagtaaaataaggcaaggtggacctctgcatatctctcagtattgacctgttcctggatcaatgaaacttctctattattgtgttttactgagggattttaattagtgagattatgagactatgtctccacttttatgccacgtgtgacctgctcaaaaacacagataaaatttacctgcaagcttctaagactcttcaaattgtgagagcttaattggtgtctgcttctacctcttggatacttgtttacgacacgtggtgattgttgggatca

SEQ ID NO: 22663 - DNA, 3474 bp, Cannabis sativa
taaaaaaaattatatatatataattcgatgctttctaatttctctttatatatataataactacattacattgtcactcaattatctgtttttatctattgccgtgtctttaggtaacgttgatttaggtgcactataatttatatattatattgtttagactattgctaatatctaatattttttttcggtatatgctgttaaactacaatttagaaagaaaatccaacattttcaaaattaataagctctccccaatatattaaatattatactaaacattttcaaacttttaacaattttggtatacctaaaagcattattattattatgcacgtgttgtcttacaattagctagtaatattttttaaaaattattacattaaattagatgagactcgatatttagttaaacaaataacgatattgatacataaatttgtgttaagcattagtggtgtcatttagtatttctcatatataaataataataggcactatacgttattgatgatgatttcaaagagcgtaattaaatatcaagtactatataacttaaaaaaataatttttaaaaaatatcactaattaattataagacactatataaaaagtattagacaggaccggaagcaatactttattgtttctattttgtttttttgtttgtatacaaattaaatattaataattaaaaaaaccataataatacacgtcgtgataatgaagagaaggaattgatgactttgttatatttacatttatttatataaggacgagtggttcactgaccatacatatattaatattattactgtctcatctcgtctcatctcttccaccaaccgcaacaacttaatggcaacccaatcccaatttgttgttgtattttcttttttaggaagcaataaaggcagcaaacatgatctacaaacaaataataaaaaaaatcattgtacttgtatttgaagatatacaattatatatggaggattttatttttttcgtttttaaagtataaatttacaataatatggtttttgtcaaaaaaaaaatatattattttatgaaaaaattaaaaaaaatatataaaaatatagaaaaaaaattataaggtacttgattacccttttatgataactagatatctttgtactatgagtatgttactcttatatgattttctcatatttttcaatttttctataaaataatctttctgaaagaaaaaaaaccatatttttacacaaaaagtaaaagaaactaataaaatttataattttttcatcatataatttaaatttttttaagagagagaaagatagaaatttctattaatagataaatcaaataatagtctattacattatgatatatcactcaaagaatagaattaacaagatagaaaagtcataccatttacaaaaataggaaaaaagaatcaacaagatagaaaaatcacaccatttacaaaaataggaaagaaaaccctgatagcacctttaaataaaataattttgatattttaacaattaaattttatgttttccaattaaattgatattttgtttggtaaaataattattttctatgcttacttaagttttgaggatttttttagtgcaaattatacttttttatttttgttcaatttttcaaaaatattggctttttttttcaaaaaaaaaaaaaattattatgtgagaaaaattcaaaaataaaaattgggaaaaacagtaaaaagtaactagttactctaaggaggtaactgattatcccttttgttaccctaaactatttttctcatactttttaacattttttttttatttttcctataaaataatcttttggaaaatctatatttttgtaaactttcccaaaaaaaaaaataaataataatttgtgaaaatacttaagtttaacttttggttgcagataaatacataagtttaattttgacggtaatcatatatatgttatatttctagagcttatgtaagtacctaattgttaagtgataaatcactatccacgtattatttttaaataaaaaataaaaatttaatgacttagaccaatgaaggactgccacatggccattgacttgatacttaaatgttacgtatttacagaagttctagaaatacaacttaaacattattactgttaaaaattaaactaaattatttatttacaaataaaaattaaactgaagtatttgcaccgcaaataaatcaaactgaaaattcttcttctctttttatatccatgcatatgattataaataatcacaattatataaggttgcaactagtgggggagccagctataaatattaggtggcaaacaaaattaattaaaatggtcataaacaaatatatatatataagggacaaaaataaatatataaaaatatgtaaagataaaaataaaaaatataaatttataaagacaaataaaaatatgtgatgacaaagctaaaatgaaaatatataaaaacttcatgcaaaaaattaacttattaaaaatgaaatgaaatcatgtgaccctatataaatctcaaactatatcacattaatttcctcttaaatttggaaaacacctcgttgtatgatacaaatttataaatctttaatcaagttgtaatatgtcacagcaaatgcatacatttacataaatctattctatttttaatatttagttactgaaaatttcgatcaaataggcgatcccaatcctcaatatttttaaattagatggtggaagaagtttgcaaaagcagaagcaatgaataaatgatcgatgaccatgacctaaaaaccactatcacaagcatataacagcaacttaatttattatagtattattggctgtcgttcagttttgaattagctatggttgttagttacttgttaggattgtgaagttgtacaagtaagccccacatacatggttgttttagtagtttgaactgataatgagtcttggtatggtagcctcccaaaactgactgttgaccaaactaaaacaagataacaaagttggctaacactaaactaaacactgtgtaataattaaccactacaatacatatatagaatttaattaacctaccgtttagactctcactattttcaattacacattgaataatcttcccaatgactaatgacttttcacatgtacttaactccaatgagtgatgatgtgttgtatagtgtctcaaaagtcaaagcaggtccatttaaggattaaattaagagaattgctaaaagcattactaatacctattactattctcagtattatattgttattggtataattaaaatattaagtctcatataacttaaaaaattaatttttaaataatattactaactaatcgtagagcgtcactatagaaagtgttaagcattactaatatctaataacaatgttttttaattaattaacaaagaaaaaaaaaaga

SEQ ID NO: 22664 - DNA, 2762 bp, Cannabis sativa
ctcttttgaaattgatacgcatctttggacgaacagttttaagcaatccttcgaagaattcttgtaaaacctgttctcgttccttttttttttttaggagtcatgtcttctaacaccttcctttccatcatgccctccaagttcaatctactcgcaagttttaagttagaattcctaagattgaaattctatgccaatatagtaattagtccaacgtataaatatctgacccattaaagaattttcacaacccaccttcagatttgttaaactcaaaagagtattaatgtgaccaagaaaactctggcctaccaaattcgggcccattagatttaagttttcctttattgcgggcacacacgtgccaataatatttcgaaaggcactcatctcaagattttttaccacatgtgggacattaaaactatttaatagcagcttgaaaatagactgaagactaaccgccttccttacttctcgtgtctctgttttggagaacgtttttaccagtgaatcataaatagtaggtcagctatcattcttaaaagtaaaaatctcatctacaaacagtaaatgctcctctaaatccggtccagcagcaagaacgccagcctcctcaattgtctgactctctatatgaaatagccgcccttcctccaggctccagcaccgactcctccctgatttctagagacacttgggaatttatttaagtcgatatctttgtttcactaccgaccacgactgggggcccttcttcacgcctctctccttcattcacaacctccaacacttcaccatctcacttgtaatggtttctacttctccattgatcctttgttcctttgccaatacactatcttgataacaacatgtgttaaagtatccatggaacttataacttagatcattaagtttaaatagcttatgatcaataacaaagtcttcatgttataaagctagtgattcagggacaaaaccatattcatcgcccattaattggagtctaagatgggaaagagcatttgatttaagagtgtctttgtccacatcaagtaacccgccacaaagagcaccgattttcctgaacgttctcacatcacaaagattcaagggtaaaccttgaacaccaatccaagagccacgacattcgatcttaatatcttttctttgaagatcccaactccattgagaaaaagttacttcagattgagcccctgggactgccatactttggatattagtctgttcatctctttcattcccaaatctacaccaaataattaatctatcgtcaaaaaaattgactgaccactgacctcaagctactttccaactctcttgataaattataaaatatcacattccaagtcgcatgagtgttatcccttgtaaatccttgttgtactccaatctcttggttgccccttagagtgcatgtattcgaataactttagcaaattgaatctctttgtcgggaattggttttttggttttaaggcagggttaatctttggaaagaacaccattgttttctccttcttatgcttacactttgggactggtttagtcgattgtttgactacgtcagcccacaagttttgtttcgatgtaccccctccattaaccttcttattctgctgccccttgatgccatgagacgtactagaattcctcttcatcaccccgttgagacaatctagaaggtttgaccaactatttgccttttcatcttctggtataatcaccatgttcatcttgttatccttcaaaacaaaaagtttcaaaaaagctcccttaatgttagttagtaaaccactccatgaaactcccagagttgttcctaaaggaccttttgaaacaaagcctttggtgcccgtctttcttcatcagttcctccatagcgttgatcatccaatccactgcatcaatgattactgaaattttgtatccaaaatgtctagctctttcacatattctaactgagccatcgtcccttgacaaagtgaacataaacaccttgtattcaattcaaaggctccaatatttatggagtccctagtccacaaaaggaccaaaaacaattttccagctagaaccagtgggctagtgaccttttttcttcctaaaaccagggggttttggtgcaatccatgaccaaaagggtcgtggaatcccctcgtgtgcatggccatctctcaaaaagaggaaagagaagagagcatacgaaaggactttctttgtttctgttgttcataggaaatctttgctattatgtgtggacaatctaccaaacatatatctactgaaaaggatatcaacttatttaaaaacatatattttatagaaatgaaataacacttgtatatagaggttaaataacatataaatggaccattggacttaatagtataaacagatttcctttaccaggaggataatgagttccaccattaggtactaagaattcaaggcgacccttcaagggctttacaatcttttgaagaagctcgtgtcgttccttcaagctctgatgaattacactagtatcgccgacataaagaatatcaaatgcaacatctagtcatactcatgtcaaggtcccaaaaagactagtataagtattcttttatcatacagtccacctcatatacacatttaacaatgaaagtagagtaagatcctcaataactcatacgttgaggatacaacataactgcattcaaagaaaagtaacaattataagaattaattataacagg

SEQ ID NO: 22665 - DNA, 3955 bp, Cannabis sativa
ttttttttttttttttttatatcgcattgaattttgtattcggagtgttaaaaatgtagtgtactgttatattttagcagacttaaaaataatattgcttcaattgtattttaaaaagtatctcaaatttgtaacttgttaaatgttgtgctaaatttaactgtaaatataacattgtgtgaaatttagcagacaataaatgtcacgtttttatttattattatgtcactaattattataatttattgacttttacgaaatttggcttactttatttaccatattattattatttaaacaattaaaaaataaataataataatttttatatatatttttttaaagaaatttttatatattttcaatacatattaaataatatttaatattttttttacttattatatattttatattttgtgaattgaagcataattataacacaaatttattttttatgtcaaatttaatacaaattttaaatcttccactggagatagtgtaatataacattaaaaaactgtaacatttaggaaaatgtgtgttgtattcaacttaatttttgcgtttgaaatcacatgtcagaatattttgttaatagccgtattcgttataattacaataccatccttgtaaattgttaaaaaaaaattttaaatatagtttacagtaccaaaaataaaatttatgatattctaatttactacacatattcaaaaaaatttcaattctattttcgaaactataaattattcaaaaatttataaaaaaaattgataatccattttccttttttatttttatgttttcgaaataaatgaattgtaaaccattaagtggtggtggggctaactatgtgaatgtgtgaatatgttggaagttatattatttggagtacatattccaaggtgtagtgagccgcgtagtgtaaaccaccatatcgcatttagtacactacagctaattaaatatatattggcaaaattgattttggtccacgaacacaatacgaattttatgagagcattgttattaacactagtgatattcaacttttttttataagttgtactctatgattagttaacgatatttttaaaaattattttcttaagagtatcttcacgacaaaaatatttatagttatcaaaatacatatatcatcctaaaatattagttgaaaactgtgaaagttgtctaccatgatctaacatcacattaaattaataattctttaagtaaaaaataattttttttctaataaataaaattaaaaaaagaaaaaaaatgtcatgcgaccattattaatattgagccacacttcacgtaaaattaattttgaaaattgaatcatattgaatatgtggcaagaccactccaatagacaactcctattagagatgttctaaattatataggatctgatagctaattacatcaacaatggtatggcatcgaaaagtgtgttagacacgaataataacttttagtaattctcttaatttaataagagcatttttattaggcaccagtgatatttaacactttctaaacctgatacttagttggatgaataatgatattgaattttaagttaacctttctcatttaataactattgtaaaaattacaaatttgagaataatatatagcatcattagttgaggaatagcaacagatttgttttgaaacaaaacattaaatttaaaagtaaattagggcgctttgatccttttggtgtgatgtatatgtttactctttttttgaaaagcagtgccttgtacaggatatgaggaagaaaagagaaaagagaaaagagaaaagaggaaagaggaaagagaaggtaaaaggaatatattgttatgtatgtgacattatttagatgatgaagaaacacctcatgtgatttgatgcagtagtagtcctatatataaatataattttaggggtaaagcgttttaaggtttcgtgttcgtgttatagtttatgaaatttatttttattttttgtcagatgtattgacctattatttcactcgtgtttaattttttcaatcttaactgacccataataaattatattgtgttcatattaatctactttgatctattttgctattaataaaaaagttaaaagtattaaagaaaaataataaatttaataaattctattaaaaaccttatatacaagtatatatatagtttctttataaatataataaaattattaattttaaaatattctcaattatatttaaaaaaaataaatttaaaatattttcacttaaaattaaatcactaaatatataatttcttacataattatattattaataataattttttattttattttatttaaaaaaaatcgtgccaaatgtgttaattcatgttaaaacggtcatgtcgtgtttgatctgttttcattttgtgtcaatccattttcgacctgtatttaatttttctgatcctaacctgtaaaatgagaaatgctaatactcatattactattggtataattaaattgtttttaaaaaatatcactaactaattataaaaatccacttatactggtactcagtgacggacccagaaattttactttgtgggggtttatttatcattcaaaaatatttatacctatattataattgttcttactaaatttatttaattttgtgggaactttttttacgattttgatctataattatcaaatttaaaaaattacatttaattttttaaaatgctacatttttgctagtggggctatagcccccaaactaatacacttgggtccgtccctgctcgtactaaataacaatgctaatattactaatacctattacctaatatcaatgctcaagaatctttactagtgttagctttcatggatccaagggtaaggtaaggaacaaaaaaaggctggttttcacaacacaaaagagctatataactacttccaaccgcataccccatcttttctttttcttttcttttcttttctcacacttgtctcttactctattatataaagtataaactcaaacacttctccatgtaaataaaaccaccaaaacatctcaaaaacaacaacaaaaaaacactatcaataatggcattgagcaacaacgtgataggagccataaacttcgtggcggtgctcctatcgatcccggtcataggagccgggatctggctggcctcagagccggacaactcttgtatcaagatcctccaatggcccgtgattatactcggaatcttgatattagtggtcgctttagccgggtttgtgggagcattttggagaattccatggttgcttataggataccttgtagccatgcttggactcataatcttgttgggttgtttggttgtgtttgtttacatggttactgcgcgtggctcgggccacattgagccgagccgagcttacttggagtatcggcttgacgatttttcgggttggcttcggcgtagggttcatagctcttacaagtgggatcgtattaggaattgtcttagctcaactaatatgtgtgctgagttgaaccagagttatcgtatggctcaggatttctttaatgcaaggcttaatcctatacaggtaaatattaattatatataatgtttttttttaaaaaaaaaatctattattcttgctatatttgtaattgattaattttgtagggtaataataatattttttttatttagtttttagggtttttagtaattaaatatattaagtatatgatatgttgagataattctgaagtggtagataaatatgtttattattttcaaatactttttttttttattaataattatatacatttattgaaaaagaagatatagtgaaggtaggtagatgtgacatgtatccttaattagtagatataaataaccaacatcaatcaaggtttttcaaaaagaagaaaaaaaaa

SEQ ID NO: 22666 - DNA, 2148 bp, Cannabis sativa
tctctcctatgaataaccatgtaacttgtccatttctaatgggaatgtttatccactcctatcctatctattatagtattctacagttcaatttatgtgttaaacataaagaaataacatcaatcaacaacccttttgaaattttctgtcaaatagctttgatattttatgttttgatacttgagtcacattccttttcacacaacttgacagttacaaaagagcttttctgggcagccaaacaagacttttataagtttctaacacacaaaaacagtttcatttcactccagagtgaggagaggggaaaatacttaagcaaacaaaccatttacatatataatcatcgtaactactatgcagccaacattagtacacagagagaaggcagcagaaaagagtatcagagattcgaaaacatcctggaaaaactctaaaattacatatctggccctactaggttgtttcattttgttacactaaacacaaaatatttaatatggagaaatcatacacatgaataatatgaaacaggggaggcttgatcatgatgagccattgaagcttttgtgcatttcggtccatccatggcgtcctcaagcactagttcagatttttgcacttctccatggcccttggggctgtaaaaagaaatgaaaaagacccaacaagggattcatatatttacatagaagaaagtagaattgtaaaggtaaaatcatgaagccttgatgagttgggcagtactacgtaccaagaccaatagcctctgaactcttcattatcctcagcctcttacatgactcggtaaacatcctgcaaacaaacaaaacagtaaaaagtaaatatgtaaacagtctttgagctgtcattactggtttgctttggttttgatatgttttcttaagtctgaattttattttttcactgctttaactgcatagttacaggggaagaatattcacagcaggtacatcaatcaacatgttaaccaagacaacctagcaagagttgcattttaccaaaatttaccaagttaaaattataccaacccaactcattctcatctacatctaatcaggctatcacgtgcaccaataaaaataaataaagaaaagaaaaagaaaaagataagtgagaatgacaggtgttacttggtagaccttaatttccacttgaaatgctcctcctgtgaatttttataccatcttcttatagaaactccctaaaagttacttgctttaatacagtttaggggttataacctatagcattagcagcataacacattgtcaatgctgaagaaacctcctcttatatatcaagtcaagtcaagtggactaagttcagtttcaatctaaccatcttaagacttgataagataataagttaattacaaaagaaataaatgttgaaagaatagtaacacttactcccatggaacatcacccactagcatccaatctccatccttgtcttcataggtgagtacatattctgagccatgaaggagatccattaaccggctcttactaaatccattagagccacattgacctgaacaagttttatgaatatcttgctatagctgctattaaattaattaacattttgtatttaatatgtaaatggttggattgaacatatataagataggtttccaaagaatttacctattgtaaagcaggtgaacattttttccagtgctgaagatagatccatataactaacataagttttaagatcaactttccttaggtatggtgcaccatccatgctgaccttaacataaagacaaccagatcctgcattagcttctgcatcatcatcattctttggagggtgagaagaagccatcgaattcttccggaaagatcggattggtggccatcccacaacctgtgctctgtcagacatgtttcgaaaaaaagaaacatttttatttgtagatctctctcaacttgcttactatcaacttgcttactatgaaattcagaaatagattcaacctccaatgaaaagtttaattagtactcattacatgattatttcttacatgaaaacatattgatgaaaaagaggcctagctagaagaagacaatttctatgacaagcttacaaagcttgagtggttgatatcatcatcaa

SEQ ID NO: 22667 - DNA, 2442 bp, Cannabis sativa
aagccattgtttcttgtccagaagtggcgaaagagaacaagcatcagatagtggagaccgaacatctaatgaaggcccttttggagcagaagaatggtcttgcccgtaggattttctcaaaagttggggtcgacaatactcgtcttcttgagaccactgataaattcatccaacgccagcccaaggtagccattaatgcgttttgagttaatcctttcagatttatttatagccattcatatttgtgttgatacttacatttttcaatcactcgaaattgatgtaagaacctgattagttagttttgagttaatcctttcaggtttatttataaccattcatatttgtgttgatacttacatttttcaatcactctaaattgatgtaagaacatgattagttaaagctttgtttgtttgtgttatgtgtacaatccatttaggttctgggtgagtctgcgggttcaatgttaggtcgtgatttggaggccttaattcaacgtgccagagattacaagaaagagtatggtgactcatttgtgtctgtggagcatttggttcttggttttattcaagaccaacggtttgggaagcaattgctgaaagattttcaggtgtctactcaaagtttgaaaactgcaattgagtccataaggggtcgccaaacagtaatcgaccaaggtagtaatttgatctttcactacttttatggcaatctaatgcagctgcataaccatcttacctggcttactagatgcttcttaatgtataattctcaatgtttaactcttgtgactgagcattgcataaacacttcctgactttattctattcatttatttgtgtgtacgttgttaggttgtgttatttgtttcctagttgtaaggaatgagcttttcttttttatttttaataattttatattttttgcagatcctgaagggaagtatgaagcattggaaaagtatggaaaagacttgacggccatggctaaagcaggaaaacttgatcctgtaataggaagagatgacgaaatacgcaggtgcattcagattctctctagaagaacaaagaacaatcctgttctcattggtgagccaggtgttggtaaaacagctatttctgaagggtaagttactccattttattctgaaggtgtagttgaattatctaatgattgtttgggacttcaaactttgttttgctaagtttggtttggtttctccaatttttactttgattctgactatatcttttctacaggctagctcaaagaattgtgcaaggtgatgtgccacaagctttaatgaaccgtaaggtgtgtgctatactagctaaagaatgtctgtcctttactatttacgtttgtttatggttgcccttgttaggttcattgccatgttgtggtcatacaattttaattgaatttttggtgttgatccaactctgctttctctttgcagcttatatcccttgacatgggtgcactaattgctggagcaaaatacaggggtgaatttgaagataggctaaaggcggttctcaaggaagtaacagattcagagggccagattgttctttttattgatgagatccacacagttgttggtgcaggtatgatttgccttgtctctcttattttgatgaaatgaattacaattttaaagaataatttgtgtactgggaccattccattgtttagtttgtcaaatgaatgaaatgataataattctaatagaatacgattccattattcagtagaaataagtttccaatcctccaccattagacatctttctccattcctaaagtaactaaaaattaaatacacttactttctaacctttttgttttacgttctcaaattaaagtgcaaggtctgtgaaaggagatattgtttttgtcaatacaacacttgttttattttattcttacatcaaaccaaataacacaattttcatttcaatatcgattccaaattttttcctgaaattccaaatattattcccttttcatttcttattccatttcgttaatatatttaatttatttcaccaaatcgaaagcaactctagttatatgtttggtgttaagctgtcattttctgtttcaggtgccacaaatggtgcaatggatgcgggcaatctcttgaagcctatgcttggacgaggggaattgcggtgcattggtgcaacaacactagatgaatatcggaagtacattgagaaggatcctgcattggagcgtcgtttccagcaagtttatgtagatcaacctacagttgaagatacaatatcaatcctcaggggattacgtgagagatatgagttgcatcatggagtccgaatatctgatggtgcccttgttgaagctgctattctatcagatcgctatatcagtgggagatttttacctgacaaaggtaacacagtccactagagca

SEQ ID NO: 22668 - DNA, 2633 bp, Cannabis sativa
aaattctaaaactactttttgggagcttgattatataggcacatggtcccacactacttgagataatattgtcttgtagactcaattaattgatttatttaatcaattaatgctgacgacttagaaatttggacgactagatttctaagccacactcgctcgctagatggcaagaataagaaaagtaattaagtaatttagagagacacatccaatctatattagttcaccccctatatcgcgatagtaatggggctacgtctacttcgatttttttttctcacgagatggtaattacagcaatagactaagtattagaaactccaaactctagagagagaagctatgaccttgtgggtagttttttgaatgtgaaaaatgagctaagagaactctccttttataggagaaggaggcccacaaaaataggaaataattacaaataagttgttttccaccgttgatgatgatctaactgtaaaattagctttcggtggtgatggccaatttttggtgctcgacgagtctcgctgcaggttacccaaagcttatttttgtaactcccttagggtaaattttgacgataatagcttcaaaattacgtttgggtgtgagacatgacttgatagagaatttaatagctttcaaactcaagttgaatcgtgtcaattgtataaaaattgagtgagttatggctgttttactgaaggaagttcaagtcccaacgcctaggttgacattgagtgcccatgttgacatcctagtacccaggttgacatctaacgtcaacctggacgatgggaaagtgtataaatgtccaagggatatcctttaatatgcctaagtgatcttttgacaccacttagtccatttatatgttctggcaaagctggtcaccagttctcggaaatgttgctgttttgcaaaaatgggtgactcaaaactctttacttttgggtgtgctggaaatgagaaatccaaagttgtgaatttgatttctctaacttcatatatcattttatttgtgaaaaactagatggatggtcgaagcaaaattaaattaggataagtaaaacccagcaaaccaggccatttgttgacctgggcattgggccctttttaagcacctgagattacgtttttgatactttcaaggtttttgaacttaaggaagaggtctcctcccccatttttgaccattttagattcaatggtcgcattggatttggcatttgagcaattgaaggtagtgtcccaagttgattgtcaacctgggcgctaggcgtagccctaggtcaacctgagtgttggaccctgtttttagggactcaagtttgtggttttctcccttagtttacttaaatctttgttatttttgatgatgaaaagaatgcctgacatactttttgctgaaatggattgaaaacaacccaggttgacaaaatgttaacctaggcgctacgctcacccccaagtatcaacctaagcgttgggacccaatttttccccttcaaaaattttgttcgatcccaaaaaatatttgaatctcaatattttctgaagacagagaagatgcttgaaagaaatcctgaaaaactccattttaatggcctaggttgacaaaatgtcaacctaggcgctgtgccctgctatttgtgcccaagaattgttgtttttcctccaaaaggacctatttcaaagtttttgatgaagaaggattcattgcaaaatttggatcttcaatcaaacacttggatggtgcccagatggacagggtgttgggtactcgaggccccgggtgctcaaaaattaacttgctccaattttgattctgatgcctcaaatatgtttgtggtatttctagttgatgtccgaatacaattttttaccactttgcactacaaccccaaaaaatgaaaccctagttgagaatgtcaacttagacgccgagtgaaatcctaggtgcccaggttggcttccgggccataggttcgtataatttcagctcccgaggcttggataaggttgttccatgtcttcatggtacaaaatactgaaaaatagtgggttggatttaagttattgaagtccaaacttccatcctgaagatcccggagtcaacctaggcgtagggctagggtcccctcccaggttgactgctatgactcgggtctactcgactccatgacatcatccttcatcccacatgtcaaacattgatgtccacgtcactagggattgttttcgagttaacatttccccccaagtcaattttacacttgtctggagttgacttgatgatgtgaaccgagaccgtttaacttgaaactaccaaatgggcatcaattttgacatgattaggtacttgtatctgttcttcaagcattccaattgaattaggactttgaacactttttattagtccttgggaatttttaaaattcattaataaataaaaagagagaaaatcttatcttttttttttttttcacttatcttttgtctctttcttataaaatttgaaaatttcttattttttattatggaattaggattaattggattggaatcctaatccttgttggagatgccattcgaaattagagagagaaaggaagaagagaaaagacttt

SEQ ID NO: 22669 - DNA, 2306 bp, Cannabis sativa
aaaaaaaaaacggtaaaatgaatattatttttattaataggtatattaatgtaccattttgcttaaatactcacttgcacacatgtatttggtatttttggaaagaaaattttattttaaaaagtttgaatagatcaattatttttaagtaaaataaaagaaaatacaaatgttttttttaatcaaaaaaatacaaatgttttaaaagttacttttctatttatcacattttaataataatatttatgttaaatagtaatttattatttttgttttaattaaataaattattgctaatattttcacaatatcattgtctaattagaattgttaaaaaatatggagatgtaaataaatatttgttagataatatcacattgaaaatgtataaaacattaatactatttataaaattataaataaataccattgtcatttaattttaagatgaaaccttatatttcttaccatactcattattttattctaaaactaatattttttaatatggtatcggagctaaaaaaaactctggtaactaattgtaaattaatatatatcttctactattgttattagaaaccaattgacttttgcggagaacggttgttatgggccgggttcagatacttctcgacgagtgggctgggagaaaaaattaagtcaatcggctctcaacaatatgattagtgaaagcttcattgataatgaaggttggcttcactctatgccattctaattcaaattcacttttgtaataaaaaagtggtttaattttataaaatattatttaattttcttattaatctattcttgaatcaaaaaaaataattgtgataatgacattgattgttaaatgtaaaaaatttacttgtaaaaagttaataaagatgtatagcaagataaataattgtttggactatttgtttcgaaaaatatttttgtgaacttcacatgttatacatttgatcaaaatagtcgcatgttaatgtaacaattaacaatatgcttttatttagggagttatcatcaattgggaaaaatgtagtgtgaaagaaaaaaaaatgatattcaaaaatattttcactaaagttagtttcatgaaactatttttaattttatctaatttaaagaaataaaatatggggtaaaaaaaacttcaaaacaaaaaggtaactagtcttaggaaaaattattagacagtaccaatatagtattagaaatttatgtagtaaactccctaaagtggtattctcgtagactccctttcgatatccatgagattagtctaatttttttttatgatcgcatatattgtagctatttaagaccactctgaatgtcgaaaataaaattaaacagttatttaccatatgtataaaaaaaatagtcgtgtatccaacaaaatatgtaaattttattttcaatattataaactactcaaaattctttcaaaattattcctttagttttatatatcaatatttttagaacttttttgagaaaaaaaatgttttaaattttttttataagttaaaaactaaattaaaattttaataactaaatatttttccaatttagcaaattatggacttcaccacaaattatcctgataaaaacattattgaaaaaggtattgctctacaataaggtggcgtcgtacaaataattaacgttattttataatatctaattacgctaataacaatacgagaattcgttacaataccttcttagcatttctctattgacaatcataaccttatggatataactaaaaggaaaattaagcatataacatatttggctatgctaagaccattagacaaaaattaaaactaacaaaactctaaattgcttaaaggttcctccatatcaaaggacctgtttttccaaatatacaaaccacttttgatacaaaatcataaaaagataatacatctacaacaactacacaattagaagaacaaaaaaaaatgttttacattgctaaaaggagagttgattctaatttcaaccaatattggtcatccattctacttcttgcctcatgtttccctcaaatggcatgagatctccattcccgtaaaagggtctcggtcttttcttgaacacggcggcctgtgattccatactcattgaagaaacgggcaagccttccaccatagagatgttgccaagacgagccagcatggtgttagcggttttgttttctagagcaatgttttctgacatgttagagatctttattgcctcgttcgggtctatttcttgacagtcactagtgactttaatggctaattcgg

SEQ ID NO: 22670 - DNA, 1738 bp, Cannabis sativa
aattctaacaatctcaataattcagaagaatttttaacaatctaaaaaatttaaatggtacgatttggcacctgtcaaaattcagagacaaaaatattaataagctaaaagtaaaataacactatgttagtttccttttagtttcacatgatcatatgtacacattagcaaataaaataggcataccaagagcttactttcaagctctcaccatggaaagcaaaattagcaagttttctcatttttgtccatttttcaccttgagacatggcaaggccatctcctagaattttcttcacatataggctccaattttgtttgatataagctccctctttgttgatcaatatctctttcaccaactcaggctccaaaatcaccaatagtgctcgagtgccataccattgaagataaacttttcctatttgattcaacataccaaaagtttacaacaactccaagaaatttaaatcccataatagagttttgataattaaataaatattttatgtataattaaatatatatatataaaactaatttgaaaggaaaaaataatcattttatggtttttaaagcaatagtttgcaaaaatatgaccctttttttcttataacttctttaaaagtgttaaaaaatatgaaaaaaaaagtagaagataactggttatctaaccattaattggacaattacccctacctattttcccatatttctttttcacttgttcttgattttttttttttttttgaaaaaaaaaaggttttatttttgtactcatcataaaaaaacttaaaaaatttacaaattttttataaaaacataaaataaagtagtctaaccatataagttggcccaataatgaatattaggctgaagtttaggaaagatgatatttgacaactccgatataggtttggtcttggccgccttcatcatagttaatatttctttagtgttgccctggatgaacttataaggaggaccattgactccttgcaaagacaaaaatttctgaaatcgagttggaacccaccatagattgtggaagatcttgatcaaagccaaaagaagaaatacaaacacaaagatcaaaactatggttgtaaaatctcccactcctttcatgttcatcttattttcttctaagtaatggtttcaaggtttgaggtttttaataaagaatttgaggctattagcattagaattcaataatataggacatgacattattgccatattatactatatcttattactatatactattatagtgttacaaaacaaagattgttgttgatgatgatgtgaagggtgttattttattattcttattttggggaaagagattggaactttgacttcatggaaaaatgtagtgctaatgaactattataatacattaaaataaataaataaaaagatttaacacttatatgattttacctactgaattattattattttttaagaaaattgataaaaattatttattgaataatatagtaaaacttcccattaattaataaatatttgagcaagattatattccacatcccataaaatattatatgacattttattttgtagtggtgcacccaagatttaaggtgagacttgagaggactttttttttttgtttttggtaagacatgagggcaaaagtaattttttcttagtttgaactcttatactaaatgctatctagcttaactattatactaaaactaatattata

SEQ ID NO: 22671 - DNA, 4708 bp, Cannabis sativa
atatattacgacaaattaccaaagggccatttcatttgtgtaataacaacataatgtgcacataataatgatataatcaatctgaaacagtgcctacgtagctataaaatcatctaaagaatttattttttcttgacataataatttaatatatatatagttggtgctacaactctctctatatatacatagttattttattaagtaatggggacactagtgactaattataaaagaagaagaaacagtttttctgaggtttcagctgtagtggaaatgacaacccatgtttatgttaatgagaatgagaatgtcgatgatggtgatgatgatgacgacgacaacgatgataatatacctgacgtggcaccagcggcttagggttttctgtctgatattcattttaatggtgttttagatcagtatgtatatatactattctttctttatatggacatgaatatatgtagctgtatttattccaaaatatattttgaaaagtaactacaaagtgacatgtaagttatttgagtactacaccttggagttggagtttctcaattatgttaatcaactgaaactactgatctaaccatagctagtgcatgtggtattaattaaaagtgcagctgtgatactccttttattagtaattaacttaatgtcaaattttatacaattaaatttaataattatttaaaaaaatttgttaattcttttagtgtgtgctctattatgtagtaggagaattgttaaatgatattattagttctaaatatttttgttagtattagtataattaagtattgtgtcttgtataattttaaaaaaataatttttagagaatccattattatgccacatgttatatatacatcacttttattatgatgtattaagatttgttaattaattaagtatgatgtacaaccgctactttctaataagattagcaatcatcacctctttttaataaaattgagtacgtactcatgtactcatttgtagggttttagtaattaaataaataatatatatttttctattttgatgtgattaaattaataaaaaaaaataactttgatggtgtacgtatgatgtgtaagttatttgtgaaatttatattactaaataaatatcaacttggtatatataattgatgtgatataattaaatgcaactttggtgattaaatttatgaatttatatataccaattaatcaatctaagaaaaatttagtataaaacaaaaaaaaaataattagcatatatataagaaaaataccaatataccaatataaaatgaatgttgtatatatacgtacgtaccatcttgatctatatcttgaataaaaataatatatacatcatctaagtagcaatttagaagaaaagagtgttactatatcaatttcttattacaatttatcagttaatttttatgcctaaaaatacatattagaattttttttttcaaatttttttcatgacagtgtttattataattggccacgacctaagtctactaccaaagttaaaaatttcttagggttagctgggtattacagaagatttgtaaaaagatttgttaggatttctatgcctttgacttaattgacacgaaagaattgtaaatttggaaggactaacaaatgcgagaatagcttccaagagttgaaagaaaaattgatcatgacaccagttttgagcttagcaacctctgatgaaaaatttgtagtgtattgtgacgcttcgaagcagggtttaggttgtgttctaataaaatctagaaaggtcatcgcttatacgtctaggcaactaaagaattatgaacagtattaccctactcatgacttagagttggcagcaatagtatttaccttgaagattatttgtatggtgagaagtgtgagatatatacagaccacaaaaatttaaaatacttctttacacaaaaagatttgaatatgaaacaacgtcagtggctagagttggtcaaggattataactgtaaaatcatataccaccttgggaaggcaaacatgatggcagatgcattaagttcgagaggtccaagtcaagtgtatgaattgaaataaacctctctgaagttagttaaggatatgattagatcaaaaattgagtttgtggttggatagctacccaatattacattacaatcagatttgttagaaatgattaaggttgcctaacaaattgatccaaaattgattgaatgttggagggaagttcgaagctggtacaacgaagaatttttcagtgacatcgaatggactgttacagtataaaggtaggttttgtgttccatatgaggataagatcagccaagagatacttgatgagttccatattactctgtattctctacacctgagaagaataaagatgtatgatgttatggtactatactggtggccaggaatgaaaggagatgtggtcaaatatatgtgtctaagtgtttaacctgtcagcaagtagaagcagagcattagaggccattagggttacttcaacctttgaagattcctgaatggaaatgagaagatattttcatgaattttgtggtgggtttatcaaagactacatgaatgtacgtacgactctatctgggtaataatggaccagttcaccaagtcagtgaacttcccaccaacgcgaacaatatataccatggatcaatatgctgatttatacatcaagaaaatagtttgacttcacggagctctaaaattgatagcttcagatcctggtcccaagttcacttctaaattttgggaaaatttacaaagggccatgggaccaaattaaaatttagtacaacgtttcatcctcagacgtatggtcagtttgagaggactatacaaatgttggaagatatgttatgagcatgtgtgatagactttgagggttcctagaataaattcttacctctaattgagttttcgtataataacaactaccatagtactttcaacatggcaccctatgtgatgttggatgaagccggtgagaggaggtatcttggaccagaggggatccaaaggactagtgaggctatcgagaagaaccatgctcgtatgcttgcctcacaaagtagacatgaaagctgtgcctattagtggagaattactttgaagggtacctattagtatagtggtgcctagaaacacttaagtgtatcatatcgcaatttgtataattaattaatatcaaatcccatatatatgttttaactaaataattatataataaaataaaaatatataacctacttgtgtcacttaatagtagacactaataatgttagacaacatgatgccaatgctcaaatacttaagccaaatcatttaattaattatatcctttgacaagaatatttacatctctgcgaagtagtagcaacattaatcaatgatgatcgattatagcattttatactttaatgtccattgacatgctcaaaataatgcacaaaatagtctctctgcaattttaattatttaaactttatattgaaatcaaaatattacgtaagttattgcactatcttaatttcacatcagattcttcattcttgtgtctccatttttagtttaatatttcccaagcaatttgacccatggctagggaatttagaatctagacacactcaaattacatacattaacatatttcattactattatttaaaataatatattagcaaaaaagtgagagtataatatatatagctccaacctctatattattcataatataataattatagagtataaacgctagctttcctttctctcacactaaagagagagaatgagaaactaattaatggcacacatgccatgtattatatataaacccaacacatttatgtaagaaccctagaaaacccaaaactttcagagcagctactacattacatgcataaccaaccaattaaaagtcgtttcaagccgcaggtgccactgtaacccgatcctcgtcatcatcgtcgtcgtcgtcatattcttcgtaagaaaccgaggagaagagcgattcgtgttccttcctaacttggagcattgaaaacctaggcttctcgctattaagaatcaccatattatatattcacaattagaaaatattatagaataaaatgaactctctctctctaattagtgattagaattaatattatatgtttttggtttactttgattgaaactactagagtgcttgtcatcttatttatagaaaggggaagctaattactagggcaaaaagaaaaagaaaaaaaaagttgaaaaatattcttttggttgattgatatttggagtttgcaaattgatgaaaggttgtggatgttttgagtgtccactaggagaagagggcccgcacgtgagcttaacttatgggaacacattctatacatgaggagaacaactgaagccacactctaacctcacgctcatgcaactaacacacacactcactcacacccaatggtgatggtgtttgaataaggaaccgtgatgagaattatgagaattatgaggttttatcttaaaattaattggtgagtggagtagctcatgttcttatatatggctcaatacttttacatttaattcatgtggaacaatgttctccaatattcctcctcaagatggtagttagaatcttgaatcaccttatcacaagtcatgtc

SEQ ID NO: 22672 - DNA, 2045 bp, Cannabis sativa
catatgttattcgcgaatgatagttacctgtattgatgggccaatgagagtgacactttgaatgtgattaagtcacttaaagtatttgagatgacttcagggccagtagttaattttgcaaaatcttcagtgttttttagtttgaatactcaagcaaatatgcgattaagtcacttaaagtattagagattgttggtgaatgattcttcctttgttagcaaagtctataaagctaaatatttttcccaaggttcttttctgactgcctgtttaggcgataatccaagttacatatggtgaaatatcttcgaacctaaagatcttatcaaggtcggtgctaggagatgtattggaatggaattctaactagtatcactagcgatctttggctcccttatgataattatgataattctccttatgtttactctattcatccaggattggagggccactcggttgcaagtcttttgtgtgtggataataaagactgagatattgatgtagtccaagaattttttgaagaaagagaccatcatttgattcttagtatcttgttgtcttcgactgtccaagatgatcactggacttggggtaatgagattgccatattttgtacagttaaaagtgcatataggtatcttcagcatgattttgatccggtggcaatgaagactgattttcggaagctcaaatagttccacctaaggtacttcattttggctggagagttattattggggttcttgcaactaaagagcagctgaacatgaaacaggtgaatgtaaatcaactttgttcgttttgtgctattacatatgagtcaataataatacatgttttagttgtttgctcttttgctacttcatgttggagccgttcatgattggttccgatctttaatgagcataaacaatggagatcaaattgaagaggcttctttaatggttgtttcatctatttggaatgcaagaaacaacctgctttggaatcaaaaatttgtgacaactgcagaagtaattctttcagcacatttaaatttttaccaatggaagtgtggtcaaaaagatagaatagaacctctcttagttcacaactagccaaccctacatttaatatggtaaagatatatgttgaaggagttacttttggagcgacttgttcttttggcttaggtttcattgttaagaacaactctgaagatatcattgaagttgtatgttcaagtaaaaatggtcaagtctctcctaagattgcacacttgaattgaaccacttagttggattaaaggtaaagcatggaaaggtatccttttcaaaattgattgccttgttgcattggattgctggtgcagaattgctaacatcttcttgctgagttgagtcatgttaaattgagttttgttaagcaatatactaacaaggcaacacattttttcttttttttttttgcatgtagttctaatctctcgtcagtttgtatttttaatgtaaataattcttccactgaattgttgaatattctaataaatcatttgattcattcataaaatgacatttttccattcaaaaaattaagaggaaatataataataaattaataactaggatgaatacttctttgttgtattttcataatataaaatccatacatatctacataattaaatttaaattttcagtaaaattttatgaatatgactaaactgccaattttaagaatatgactaaattgtatcaattcaattgatttaaaatacttaatttacatataattaatgccagtttaagtataagtttaattggaagaaataaaaacataaaaataaaaataaaaatagaaaaaatatgaaatatgaaatgtataaaaaaatagtaataaaaattattaaattttttttcattttacattctattttaaacgaaatattcattccatcaaaataaataagtctcattttaatattttaaagggtaaatactattttggaccctgtattttgcaaaagttacagattggacactgtgttttgttaaatgacaaaa

SEQ ID NO: 22673 - DNA, 3158 bp, Cannabis sativa
cttagcaagacattgctatttcttcaaagagaaattaaaactagaaagattttcttcaaatgatgcctttcatattcaaacctagcttcttgttgttgtatggccagttccgctccaataatatttgcctcctttgtcttcaaattttcaaaggcctttgtcttgtttgagatggatatagacacacgatttgtagttgtcgaattattctcatcacgacgaaaaaagtcactgataagagattcatcaagattaaagacactttcaacaatttgagtaagcgacaaatttttcttttactttaaacgaatcattgacagagtcagtaaaccatataacctctgttaagccacatttataattctcacaaatggtactcaatatgccgagtttcatgttcacgtcagcacaattttttgaaatgtcttatgttattaaatgagaagataacaaatgaagaatatctttcatgcattcaatcacaaacctcttggtatactcatttaaatcaaaattggtgattgctgaagttgacattatcaatacaagatttgataaagaaatatgtggacctgagagaactattaatagtggaacaacagtctttggtgaaacttttgaactagctgtaaaatgtaatgtcttaaaacttttctttgctctagctattgtaaacaactggaatttacacaaaatggacatcaacaacacttttttaatgacgatttacacgaacatgtctatatgtccatttgccaaagattatgtggatgatggggagctacccccaaatacagtttgtaaactcaacaagagtctgtatggtttaaaacagtctttctaagcaatagtttgccaagctaagctccattctccttagcattagattcaaatagtcacctaatgatcattctctattcataaggtcatctcctaatgttttcctagccctcttaatttatgtcgatagcataataattaccaacaataatgacaaagatggctctccatttaaacttttcttgcactcaaaaattcaccttaaataccttagctatcaagagtacataaataaaattaagaaaatcataaaaaatatttaaaatcccgtataaccgtatatgtatatttgtaatatttgtaatttttttatttatatttgtaaataattccaataaataactcacacagatcccattaagcagattatccaaacattgaaggagtattaaactagacaaattcatacccctcctcataattaggggtttctttaaaaggtaataaaagaaacaaccgctatgcacttggtaaaaaaaaaaagaaaaagagaagaaaggaaaggaaaattggtgtggtgtggcacagaaagaaacagctacgtatatatttggttagaataatcctaattcgttatatattttaatataaataaatcattatagttttcctttctgattttggtttttcagaaaagtcagaagttttgatttcatatttgtcggtttgatttggagtctgtattgaccttctcaaaccaaaccataataaccatggtgatggagaccatgtcccactcttccaccttcctccttcccacaatcccgccctccctcgacccacgtcctcctctatcctacgcactcatcgtccttaaccagcgccttcccaaatttgctcccctcttatgggagcacggtacttttcctgaactcttgcttctttttcttcttctcttgcattttattaatgggtttattatggctgtgtgcgtgtttgtatagagcagcaaagcttcgtttatgcgctgatggaggtgcgaaccgcctttatgatgatttccctctcttcttccctcaccaatgtccttccgaagttcgaaacaggtctgctcctctttttcttattctttgaatgaaatacttgtttctggttttgttgctgctaaatctactgtgatttttgttgatggaattggtgaattccttcactttccttttattttttttgcctcatgatcacgcttttctttcccccccgaatattttgaatttcttttgttcttatgattcgtttgattggaggtcgcctacctcttttcagtggtccaagtttggatatttatgagtggaagtggaatatataagggggcactttacacggctgttttttttttttttttttctttataagattcatatcccatggaatttattagttttattttattttttgtttttattattgtcaaattttaaaatggatggtttattgtttggagtcaaaagcctgcatgattactgttcatttacttgttcaatcattgaagaagctaaagctgtacggtttaagtctaacataatagttctgagattgatactttttcatagtatgtgggggtagtggtcttgtttggatcagattagtgttccattctgtgattacatttttcgattgttggtgttggatattaatatttctcctaatttgctctcataagatatctatttgataaagaatgaactgtgcactaatttcctagagttgaaccaggtacaagcctgatgtaattaaaggggatatggattcagtccgaggtgatgtcctagatttttataagaacatggtaagtaagtgtttatttaattttttgggacattgcaattatgctttggaaggccattaacttagcactgtttgatttaaattttgtatcttttgaatatggtccatggccttctttttggcatttgctgagtgctgtgttaaaccttacttagaatatctgtgtttgatttctgaattcaggggaccaagatattaaataaatctgaagaccaagacactacagatctacataagtgtgttacatatattaaagactccgcactgggccaagagaagtctaatgtaagttatttaatttattgttatttcctttcttatgctttctatatagtaagcgttagcttcatgtaattcttttgggtactttagtcaaaaaggcattcccatgctttttcttctctttttcaaatagttgtattgttctattaaatttcattcttgaacagggaattgacaaattgcttgtagttgtactgaagaggctcaccttttcaagttttggcctagtttattataatatcatcataatc

SEQ ID NO: 22674 - DNA, 4134 bp, Cannabis sativa
cttagtaatcaaaatgaataaaagcaagaaaagataaaagataagaatacaaccaattttacttaatttagatctgagtcaatgcgactggtcctactccaaggctaaggcagtgccttgaatcgaattcactatatggaaatgtagataaaaaaatgatcctcctcactcaagcttccgttacagatttatctctttgatacaaattctctctatgaacttctctttagaaatctcactatacaattaatatctcaactcttagttgatcaggagtctaaatatatatcgcatgagaaagagagtagatgagctaaattaagttgtaacaaaattaatagatttcgttacaaaccgttgagttgagtcttgagtcttgaccttagattgactggtgcaactagcaagtcttcagatgcaacaagagtctgaatagatgagtccatcaaaggtctagataaatagggaccaatcctccacaattctccaccttggttgtatttcctttgagtgtaacatacaagtgaattagaaactaccttggaaaagctacatgaatcaagtcttgataccaagcaagtccaatgcagcattgaacttgctaaatggtatcgctttagttaacatatcagcaagattgatctctgtggcaatttttaccaccttgatgagttcgttgttagctatgtcccttagttcgttgttaactaattgtatagcactttgagagtcacagaacacacttacatccttttgatcaaaccccaactcattcatggttccctttaaccatagagcttcattttcagtttcaatgagggtaatatacactgcttaattctttagtggataatggcactacatattgtaaatttgatttccaactaactatattctctctaacagtgagtatgtagcatgtcaatgatcttcttttattaaggtcatcagcataatcagagtcacataacaagtaattgtgcagtccatatgatcatgtttgttaatcttcaaacttgaggttcccttcatgtatttgagcagcaatttcactgcttgccagtattcagaacccaatttgctcatttatctactcactaaacgtattccatatgcaagatcatggtcttatagaaatcatagcatacattatgcttcccacaacattggagtaagacactccaagcatctttttttctttaaatgcagcttgttcatctgttagtgccttgagttttaagtgagcacttattggagtgttgacagtccttacatccttcttgtcaaaaatctccaccactttcttgacatttgcagcttgtgtcaagtataagatgttgtttttcttatctctggttatttatatacctaggatcttagtagcctatcctagatatttcatgtcaaattcagtgtcaagcatcttccttagcttgtctatctattggagaatattgttccacatggattaaatgtaaaagtattgagccatttataagaacatgagctactccactcatcaccaattggttttaagatggaacaccccatgattcttaacatggtattagagctatatccctagcggactttcgatccacacctatccagatggttagccagccgcacgagattcaaatagtgcaaagatacttgagatccgaacaaaaataagcgagcaaatgacatggcttgtgataaggtgatttaagatggtgagcaaaaatagccaccatcttaagagagaatattggagaatattgttccacatggattaaatgtaaaagtattgagttatatataagaacatgggttactccactcatcaccaattggttttagatgctatccccatgtcagctacataaatcaaaagatatatgtaactcgtcttctagcaccttgtagtatacataaatgttaaattttgatcttgtgaacttctgtttgagcatatgaattcatcaaatagtaacttgttttctcctaatttttattgttaataacaaatgactataataatgttcatgtcattattaagtttaattattataagcgacctgataatgttgtagcttatagtcttgcaaaattagttctatttttacattgttatagtttggtggttgggtttaccaaatcgtataattgagttgtttatgactcaccaattatttaatgaagatttcattttattgataaaaaaaaggttatatataagtgctcattcattattcttttatcatttttttctaatattatatatttttctaatcaaatcaaatctaatcctatctaagtctcatggccatctaaacaatgatcattatatatagactaaatccaacttagaaataaattaataataagtagttgaaaaccatgtcacaacagtgtacgtaatttcttttgtgtactaatattattcgttataaatctttctctagatatgcatgcaatattagagataatttttttattaaaagaaaatggtagttccttacccacttataaaatgtttgtatttatagggcaatataaatatactcatgaatgataatttatcactcaaaaacaatacaaaattaacatgttaatttgtatttagcataaacatgtatgagttagaataacaggttatacggaattataattcaggtcaaaaacatttcaaccatcacactaaacttgaaattgacttatttaatatgatgtcagtttgacacatctatgctatgggaaaaagtaaccgtgttgtaacatgacagtgaaaaaaaattgagttaagtgtttggtaaattataaattttaaaatattatgagtaatgttaagatttttattataatattataatttagttcattataattgcaaacttataaaaatttatgttatataaaatatttattttatatatatatatattagtttttaattatttttttcagagtataaatttatatgtatttaataaaaataaattacatttttaaattatatttttattacaagtaaaaattattagaaactaaaatatataagaatgtgttttgttaacattaaaaatataaattataaaatatttttaaaacaaaataaaagaaataagagattaattaatatattttaaatatttttttaatatataataaataagtaaatatattttaggacaaataaatttatcgtcatcttttaatcaataactttttgtaaagttggattatactagctttaacttttaactgtaatttctctataaattctttaataaactgtctttgaactatgtactaagggtctgtttggaaacaactgtgtaattactacattaataattacactgcatagtaattacattgtattttaaaatacaaggtatgtttggatgtcaagtagtgattacatgtgaattcctaatatcatgtttgacatgatagttagtaattacacaataaattaattaaacacttttttgtcacaactttttcaaaaaatagattttaatttttctaaaaattgtagcaaacggatataaattatatatattaatcatgcacatattaacctaaaattaaccaaatcattaaccaatttataaaatgtttacaataatataaatatttatttgtggtatttgatattgcttatgtataggttaaagttttagttaacttatttcattgatataggtgttaaaataatatgtttgaacatatattttttttaattaaaaaaaagtaatgaattaaaatatgttatatatgttcaaaatataaatgtgttgtgtatgagtagaaaaacacaatccaaatatgtcatatttaaatattgtgttgtatgtacggtgagttatgtaaaaaaatctctctgtggaagttattccttgtgattgttaacgatgtttgcgtccggcttcgtccagtcctttcgtccggtagaatattggtgggcgtccaccccatttcctgtgcccagtgatggttctttcttcttctccaacctcattgtttaccctaggctcttctatgcatttttgactggtgtgggaaatggccttctctggctctgcaatcttcacgctcaggggcatcaaaactgtataaactctcagtttaatgttaccaaaggag

SEQ ID NO: 22675 - DNA, 3703 bp, Cannabis sativa
  modified_base (39)..(48): a, c, t, g, unknown or other
tatattaataagtaaatctgataatattgaaatgagttnnnnnnnnnncataaaacccaacaccatcttctcggtagtcctatctaactataggacctctaggagcaattcaggctagttgccttttccttcctcaaggtgcttctttagggtgtccttgattggttttgttgacagcttccacctggccattttcttgaggatgggccacgaaagttatgctcttgatgatgccatgtctattgcagaaattagtgaacatgtcactatcaaactatttgtctttgtctgacacaatcttttggggaagtttgaatcagcacataatgttcttgacaaaaaattcaaggaccttcttcaaggtaattgctgcaaggggttcagcttttgtccatttggtgaagcagtctactacgacgacaacaaactatactcctctttttccctttaggagctaacgaattaggtatatcccccacactttaaagggcaaaggagactgcatcatcatgagctcattgagtgcagctcttggtattctcaaaaacatctagaacttgtcacatttcgaacatagtctatcgagtgtttgataattgttggcttaaagtatccctgtcagagtatgttcttggataggctttgatcctcggcatgattgtcgtagaagcctcatgcacttctatcattagccgttcagcttcgactttggtgacacacctcaagagaggcatggaaaaacttcatcattacattatctcgtctaagatcatgtacctactagattttcttctcagttttcttgtttcatttttgtcttctagtaaggctctgagcttgagataagttgcaacaggcgtcatccatgttggagtgttatccaacatgttgacttcttctaagataacaatgttgggttcctcttagaactatttgggcaccaagtttgctttgtcatcaatggtgatgcttgccagatgggcaagtgcatctacggtgacgttctgttcgcttatgatctgcttgattgtgtagcctttgagatgatttagcaagtcttagattttgcctaagcaacaattttttcaccccgagctgtatattcacctaggacgtgattcacaactagttgagaattacttaatatgtccacgtggctagcccatacttcatgtgccagcttgaggccatctatcaaggctttgtatttagcctcattgttcgaggccttgaagctaaattttattgctacgtgtagttgctacccatatgtgttgtaagggtgatgactacaccagacaattggtcaacagagcttctgtcaacattgattttccatgctagtattgaggaactttgttactgctcttgctttcgcttcttctctagctctttctcttctcctgagtcttatctcaagagttgagttggtacacttagccatgaagtctacaagggcttgaccctttatggctgtccttggtaggtatgtgatctcaaactggccaaggtcaatggcctatttgagtagtcaacctaatgctttaggtttctgtaaaaccttttgcagtggttgatcattttacaccattatgggttgtgcctagaagtaaagccttaactttctagaagctaagagcaaggtataagtaagcttctccatgaatgggtatcgactttcagtgtcgattagccttttgctgatgtagtatacagggtgctgtacactgtctttttttcttgtgaggatagcactcacatcatgctctgtgactgccagctatacacctagctcttcattgtctacggcttagatagaactacttgtttagccaattgtttcttcagctcctggaatgcattttcacattcctctgtccactcaattgttttgttgcatctaagaatgttgaagaagggtacacatttatttataaacttagacacaaatctacttaatgtagcaatacttcctgttaggatttgtacttccttgaatgttgtgggtgacttcatgtccaaaaggtcttggatcttgtctagatttgcttctattcccttagcgttgacagtaaagccaaggaattttccggagcttactccaaaagagcgtatgagggggttgagcttcatgctatacataagaaggattttgaagcacttgcataggtcttccacgtgcccccacccattttggacttgacaagcatgtcgtccacatacacctccatgttgcagccgataagattggtgatcatcatgttcaccaacttttaatatgtgacccttgcatttttgagcctaaaaggcatgaccttgtagcagtataggcatatgtccgtcatgaagatagtgtgctcctaatctagtggatgcatctttatctgattgtaacttgaatacgcgtccatgaaattcaagatttaatgaccagctatggcatctactagtagtcttttgtacatgctttgtttaggttggtgaagttgatgcatactctcaacttcttgtagggtttaggcaccaatacttggttggatacccactcagggtagaatgcctctgttatgaagtcattggctctcagccttttaacctcacctttgagcgcttcagcatgctccttgtctaacaactgtcttttttgttgaacaggctggatgcttggatcaacgttgagtgcatgggtcatcatgtaggagtcaattctaaccgtgtatccatgtgaccatgcgaaaaggtccaggtttgcccttagaaattctaccattattgattcgatttctagagccaaaccttttccaatctttagtcttattcttcaaaacaatagaggaaacagcagggacacaaataagaaagattctatgcactaagcaaattcaatcaagattatttcctagacattcaacaatcaacccagatatcccaaacatgctatacaaacaaacaatgatacaagtataaagtttcctgaaaacttacatgaagcttgagaactggaggtcgatgttgatcgtcggtacaatgaggattggcagcgacgaaggaaaagtaataagtaatctatggtgtctggaatttttcttctctctatgaaggctctgagaaaatttggtaagatagcgaaagtaaccaaatgaaatgggaaggttggcttttataggccagaatggatgtgaaacagatgtgatcaggcatcatcgtacgatgagaaaatcaatcgattcacattctgcagatctaatagttgggataagcgctcttcaaggcggttggaaaagtttgagtattcgactgacacccattaaatgcgccggatcattaatgaacgggaaacgaattgttgcctgcaaaagtaaaaactgtaataatgacggtcataaatgcaccccacgcacccgaggcacgtgcccgttagttaatacgacaaccggaggcatccaagcaagcctcattcacttcacaccaaacgaggcttgggggtaaatgtttcccctggttttccctaaaatacgtggactaatgcgataacgacacgtagctctgaagagtatggctttgacataatttgactaagtccttgtaaacctagagggtcggttaaagagacaccccccggagaaggtgtgagcaagccacgcactcccggagggcaaagctatagcaaagcacttccgggagatctcagaccccatttgaa

SEQ ID NO: 22676 - DNA, 4177 bp, Cannabis sativa
tatcccccctcaagctggaagggagttgatctagtgacagcttgtgacagaggaaattgaacttgggaagtgtgagagctttcgtgagtaagtcagcaggctgttcttctgtagggatgtaggatatttgaactttgtgtttgttgatcagttctctaacataatgtacatcaacttctatatgcttagttctggagtgaaacacagggtttgaagctaactgttgagcgccttgattatcacaccagatggttggtgtatgtgagagagatatgccgatttcattgagaacagaagtgatccagacaacctcagttgcagtggtagataaggcacgatattcagactccgtgcttgatctggccactgcagtttgtttctttgaaccccaagtgattaagttgttcccaatcatgacacaaaaccctgtagttgactttctatcatcaaggttacacgcccaatccgcatcggaataagcctcgatttgcatattggtagcaggagtaaatacaagtccaaggtgtgtagtgcctttgatgtacctaagtacccttttgcatgcattccagtgggtgattgtaggttgttgcatatattggcttagtctattcacggcaaatgagaggtcaggtcgggtgagggtgagatattgtagagagccaattatacttctgtacattttggatcgtgaaatggttcactaccatcagtgaagagcttgttgccagggcacataggtgtactacatgcttttgaggcttccatattggccttctttagtatgtcgttagcatactttgtttgagtgagatgaagtttcgagtccgttcggtatgcttgaaagcccagaaaataatggacagaacccaatgtttttaacccgaaagtagtgttaagattggagatgatgtgttgtatagcagctgagtcttgtccggttattaggatatcatcgacatataccaaaatgagtagaagatggccatggttatgagagataaagagggaagtatctgaaactgagttggtaaaaccccatgacagaagggctgttttcaacttttcataccaagcccgtggggcttgttttaagccatagatggctttttgaagcttacaaacatgtgtaggatggtcaatgtcttcaaaccctttgggttgttgcatgtagactgtttccttgagttctccattgaggaatgcattattcacatcgacttgttgaatatcccagttgttggtgacagcaagagtgaacatgattcttagggtggaggccttcacaaccggactgaatgtatcaaaataatctatgccttctgtttgttgaaatcccttagccacaagtcttgcctttaacctctcgacagagccatcactattcagtttggtgcgaaacaaccatttgttttgtataacctgcataccttcaatataggggacaagaatccaagtcttgtttcgtataagagcataatattcagttgtcattgctgagttccattttggatcagcaagagctttctttaccgatcttggctcaagaaaattgtgattgaactttgtaattgtagcagctagaattttaggcttatgtataccagatttggagcgtgtttgcatagggtgattggatctatttgggacagaaatagcttgttgttgtgtttgtggtggtgctagactaggggtgggtgatatggttgctggtataggatctggtgtaaggcctggtataggggctggtgtagtgtgagtggttcctgtggacctggcagcagtagaattgatattggggttgcattcaggtgtggtgggattagattgaggaggtaagataggtatagggaagctggttgtttgtatggatgtggagggattatgttgtgtgacaggaaagagttggttataagggaaattgacctcatcaaaggtgacacttcttacaatgtacactcggccagtgggatgtaagcaccgatatcccttgtgatagggactataaccaagaaacacacacatagatgtcttgaactcaaacttgtgtttattatatggtcttagaaatgggaaacaagcacaaccaaaagtttttaagaaattataatcaggtttttgctgaaataatgtctcaaagggtgagatatatgagtttctttgcacaggcagccggtttataaggtaagtagcagaaacaaaggaatcccaccaatattttaagggcattttggcttgagcaagcatggttagcccaatttcagtgacatgtctatgttttcgctcagccctaccttgttgttggtgtgtgtggggacacggatgtcgaaagacaacacccatctgtgctaggataggtttcaaaggtcgatattcccctccccaatcggcttgtaggcttttgatttggaccccaaattgcctttcaacataattgttgaagtattgaaagactgtgtgtgtgtcagatttgagtttaagtgggaatatccaagtatatttagtaaaatcatctatgaatatgatgtaatatttgaatccctcattagtgggatatggagagggtccccacaaatccgtgtggacaatatcaaagggtttagttgtttgatgttgtgaagataggaaagtaaattggtgcaatttgccatattggcatgcatgacaaaaacttggattagtagtgggaatgtgcaaagattgaagaactttattcaaaacaacttttgatgggtggcccaatcgttggtgccacagatttacaagagaaacatttctattgatattgctactcttattacatgaaaaagattgtaaattctgcctaatagcagtgggatgttgagatggaattgagtgttgtggttgtatgtgtgagggcttgtcttgtgaggagggtagttggtacaagccttctttaattgttccctgaagaagaggggtcttggtttggttgtccttgacaaaacaacaagaagagttaaattcaactgaaacatcattatctttggtgattttagagatacttatgaggttcttggtaatagatggaacatgcaaaatgtttttaagatgtaggggttttctagctgctaaagaacaagatccaatatttttaatgacaagtgaggagccattacctacaaccaacttttctttgcccttgtaggaggtctgttgttggagttgcgagttgtcggaggtaacatggttggatgcaccactatccaaataccaattggtgtcttctgtagtggatggtgaggcaacataagcatgtggtgtgttgttggaagaggcaggatgcagattgtcttctggtccattgtagctgagatcaaatcatttatagcacctttgaactgtgtgaccaactctgttgcacagttgacagattggtcgatttccgccttgatttcctctgcctccttgagtgcctcggcctctagtttgagtattgtttcctcttcctcgattgcctgagttcatggtgcgattcgattgattgttgttggtgtagggtgacttcttgaattgagccatattggccgaagcaccattgagatcaagtgagagtgtagcagcatgagcttcgattctgatttcttggttttgcagcaagaattggacttcttgcaatgtgagattgtcccgagaggtaagattaaccactactgcctcatactcaggacccaaaccagcaaggatgtacagtatcaattgatcatcattgagttgatttcctgctgctcttaacccatctgcaagattcttcatttttaagagatattcatcaattgacattgatcctttcttggtgttttgtaattgactcatcagatgtatgaggcgagcctttgaggtggtgccgaagagttgttctagagttctccataactcatgagcagaggtgcaattgaccacatgtccgagcattgtttcagaaatagatgacattagccatgacagtaaaaattggtctaaacgcatccaacgagtgaattcagggttgattacctgagttgttgattctggtggttggcgaatgcgttgttgtggtggattttgatttagcaaaatcgattcaaggtcatgagcccttattgctggtagaacttgtgatcgccagaaaaaataattgttccgatcgaggcgtaatggtggcaggaacatagtt

SEQ ID NO: 22677 - DNA, 7091 bp, Cannabis sativa
tgtaaagggttttatttagggcacaaaacccaacatgtaaccacctgaaagatgagatcaaaatgttggtcaaagcaagtcacttggggcaatgggtccattttcccgttatctatcctaaatagggtatcgccttaaatcctccgcaaggagtagggtacccttatgctcccaaaatgtaacctctagtacttcttactccaccaactctagctgtattgaccatagtggctcaaggactggaaaacccatatcccccaagcctagctccgccaccaattgatggatatgtggctacgatctctagaggaccacaccttataggaagcactagaaactcccaaaagaggtatttgagggagttacatagagaaggggaaatgtgcgactttgtgcaatcaccagcctcgcatcttcgaatgattaattttcctattagtttcatggaggacacccaacacgtgtactttccccataatgaacccttgttcattgaagcccaaatagccaacaagagagtttctagagtcttggtggatcgtggaagctccgtgaacattctattgaaatttgcattttaggcgattgggcttatggaggcagacttgtcaccttgccccatccagctaaaaggcttcaatggggatgctctaatgcaaatgggaaaaatccaacttgctgtcacccttaaaggagaaaacgatgattatgacttcaaacattgcactttgttggtggtggagtgtctcacaacatacaatgcaatactaggacttcaagtcttggtagattttggagcagtaacatcgataaggcatctatataggaagtttccatgtgacaatggatgtgttggagtagtcagaggtgactggaagagtgcaagatgttattacaatgtctctgttcagagtgtgttcatagtctagaaagagatacatagtgctctcaaaatggacaggtttttgaagtggagttagaccctcgtatgggtactaaaagaatgattgaaccaatggaggatgtggaagaggtcagcatttgcagtgtagaccctaccaaaacaatcaaggtgggaggaaatgtacctccaatggtgaaagaaagcactataagtactctcagaagaaattaggatgtgctagcatggagccattctgacatgacaaagatcaatcgcaatactatcttccatgctttgaacatcaatgaagacgtgacactagttcgcaagaagcaaggacccttagatcaagtaagggcaaaagcagtaaaagcataagtttatatgttgaccacgaacgacttcctctgggaagctttatatcccattttgctggctaatctagtttttgtcctgaagcccaatggcacatggaggatgtgcattgatttcacggacctcaacaaggcctatctcaaagactgcttcccttttccgcgaatatataagatggtggatgccacttctgggtaccagttgctcagcttcatcgatgcttattctggatataatcagattaaaatgcatatagctgatgaagaacacactacattctagaaatataaaggtttgtactgctgcaaagtaatgtaatttagtttgaagaatgtcgaagcaacatatcatcgactggttaacaggatgttcaagaaccagttggggacaaacattgaggtctatgtcgatgccatgctggtaaagtctaaaacatctagagatcacagtgcagacctttaggaatccttcttggtcctccgaagatacgagatgaagctcaatcctaagaaatgtacatttgttgtatcctccagaaagattaaggccttcattaacatgctatctcctagtaagcacaacgatgtgtaaagtgttactggaagaattacagcccttagtagattcatctcaaagtccacagacaagtgcatcccattctttaacgtattgtgatcgaataagtagtttgaaaggactgaggagtccaaagaggccttccaaaaactaaagaagaatttgaccaaagctcctatcttatcaaagctagtggaaggtgatgattcgtatcattatttggcagtgtcagattttgccataagtgacgccttagtatgagaagaaggaagggtccaactacttgtatactatgtcagcaaaagattactaggtgcaaaatccaagtaacccttgattgaaaaattgaattttttcttgctagtcacctccagattgttcagaccttactttcaagcccacaccatcaaggtactaacaaatcatcctctatgccaagtgcttcaaaggctagaggcattcggtatgctattaaaatgggcaatggaacttagccaatttgatatttaatatcaaactagggtgtccataaaaggtcaacccctagccgactttgtaatagagtagccccaaagttaccaacttggaaagtctatgttgatggagtgccaaatgaaaagggtgtgggagcaagaatcttactgatctctccacaagaacatcagctctatagtgctcttcatttcaaattccttgcctccaataaagaagttgaacacgaagccatgccaacaggattgcggttggctaaggaagtcagagcacaatatatcaaagtgcatagtgactcccaattgaaggtgaacaaaatatttggggagtatcaaactaaaggtgaaaggatggctacctatgtgatgatgttctgggagctactacaaggttttaaaagatacaacatttgtcaggtcccaccagacccaaattcattcgcggatacgctagaaaaactcaccatagacccagagatcattcaatatcgagtggtgcctgtggcccaattagaagcttcaaatattggcccaattggatgccatcgttgatcattccaactattagatatggcccatctactagttcctaaatttaggagagctttcggcaaacaaagaagcttcctataaaatccaatattaggctcattggtatgtgatactatatgggaagctttattgtagggggcaatctgtgccatacttaagttgcatagccgagaccgagattagtgctatcatataggaaattcatggtggtttctgtggagatcacacttttggaccaaacctatccaaaagatccatcgttagtgttacttttggcctacaatgaagaaggattgtatagagtatgactagaggagcaaacaatgtcagagatatgctaaggttctacgagtgccaccaacagaattaactctcatgagcactccatgttcctttgccgtttgggagattgatttagtaggatcccttcctactagaaaggttagagttaagtatgacatattcgttgttgactagttcaccaaatgggtagcggcagagcctatgaatacaaccacctccaagaaggccttggactttgtgatcaagaacatagtgtgtcgcttcaggcttccacacaagattgtcttagacaacaagaagcaatttgatagtgatcacttcacttattgctgtaacgaacatggaattatgaagagcttcttggctgaggccaaaccataagcaaatggacaagtcaaagctgtgaacaagatcttgaagacaacattgaagaataaactccaaacttgtaaagctcattggcgagaggagcttccacgagtcctctgggcatacagattaacgaagagaacttcaatagggcacacactttatttgatgacttatggttgtgaagcaataatccctgtagaaacgatggttccctgtcacaaacaagacacttatgacaaaacctgaaactaccaaggctagattgcctggcactttaattctaaagtcaagagttgtacctttgatgttggagatctcatcctgaggagttttttcctagctttgcatgaactagaagtgggggtcataggacctaattgggaaagacgctaggaaatattgcatgaattggaaatgaaatattgtagctcaagggaatggatgggtcagagatcccttgtggttggaaagctaaatgtaatcctattctttacaccatgatgtggcaataagaatggatgacacaagtcccatattttagatacctggatagaggaaaatatccctagcagcccataaaggactactcagcatctgtaacattcagacatccgagcaggatgattgagaagatgtctggccaaggtgtagtcatgtttatgtcgggcaaagcatgagagatgatgattccaaagaataatctcgttgtgtccagacgagaagacaatcactttaattacgggattgagtcagagaataacgacaacaaatcctagtttcctatttctcaaattgtaattttagaattaatctagtttcctattatattcattgtaggcaaaagggaacccatctctcatgtattaagtccctataaatagtggcctaacctcactatgaaggggatcagagaattgcttcaaaaatacattcgagagagaaaagtgtgagttaagagagaaagttaaccagagatcaaattgtaatagcctttgagtggaagaacactttgtttcttctctcaagtcaatacaaatacaaggggagtaggctattacaatacttacacggtcaaacctctttaaaatctggtgttctctttactttactatttttgctttcttttatttatcttatttaatcactttattattgactcactgtaattggctagaagtgaggtcaatatttcggcgctctcattgagagcaaaaacacaagcttttgtcttaaattttgacaagtaaacaggattgttgtagaaattcgtaggggaggccttaccgatcagggcgatccaatggtgacagatcccaatgtgcaaactcttagaaacatgagaggccaccagggacaaaccctgagcaggttaatacacaacctcctactgtaggccatggagtgacttcccctctggctgggatcacaccaggcatacaagagactagaaacaccaattttgtagccgatcaaacctctcctaacaccgaggtccaatccactaccaatacttaaaggctagctggagatgatactgaactccaaaatctgcgagaagcacttgggcttatgcaaggccataataatactctgcatcatgattaggaggacttctgagcagccattatccttgtcttcggtgagctacatcaattcatagaatggaggaatcgtgagatggaaattatgagggcacatcaggcagccattgatgatcgtactaggcatgccaacgtattgataagaagggcctaagaagtcaccaatcaacaacccgttactgcatctagtactcccttcaatggaccagaagggtatgcagctaggcatactgcacaaactcacagcgatcaaccgtccaatcaagggccacaagtccaaactgtgggcaaaaaggtagatggccagatcctgctagatcgtcctttaggaggaattccgcattccaacaacttcactactactaacgtctcaggcctacctatcggccaaataagtcagacaccaaggtaacctggtacttacgtttttgataggttgggtagcgcacatgacctcagaactgatctaaatcacaaaaggggtccactgactgtccaactaggtattcatacccaagatccagttcaaagtgatcctaatgtgacaaaggctagttaacaagctgaataagttcatccacttgtgcaagcacaaatatatcaacataaaaatatggtacaaggtctgactggcccaaaactcactgatctcgaactcgaccgagcatgcggatcacttttgttgcctgaaattgaagttcttgagctacccccaaagttcaaaatcccaacttggaaaatgtagacaggaaaagaagatcctttatcatacctaaaatattttgagatgcagatggatctgcaatgggtaaggggtgatgtacggtccaaaatcttttctaccacacttgtagaggctgcccaacaatggtatttcaaactggctccaagaaggtttaactcatggaatgccttctcgtcagagttccatgcacagttttcctcctcctttcagcttccctcacacttggaaggtctactagaagtaaagtgaatgccaagagaacccttaagagcttttatcagtaggtttatgaccgaagccacaaaggttaaggggctggctgaagaaggaagactagctccaatattggaaggcattgagcctcttggagagttgtggaaggacatttaaacactaactgtgggatcaatggcttaatttttagaccagtcagatggatttattaagctcgaagaagctgtacggtgcctggatactgttgggcaaacgaaaaatcaacaacgcgccacggcagcaagaatatccgtctagaactcccaatatcccggtagctcaaatgtattactttctcagtcctaacaaacgacatatagacaatctatgcgacaactcagtctatggtgttgtacaagaaaccatctcacatgaaaaaggatgtatgcaaaagagatacaaccaagtttttcaaatttcatgcggactacgaccacgacacaaacgaatgtaataatttgaagtgagaaattgagttcttaattagacaggataacccacacctatagaaatgtgtcaaggatgatgaagatcaaagggacacccaggtagacaacaatcagaaccaattgatgcctccaccactggacgggcatttacaattcatgattaggggtccacatcttgctggagactcaggcaaaactagggaaaagtatgctcgagccttgtagtaataacaaaatgaaaaaatcttggctatggaaaaaggaaacctaaaaggccacatgtgggggagccaacaataacatttactgaagcagatgctagccacctcatcttcccacacaacaacccccttgtcgtagaagtgcaaattacaaacaagatggtggcacagactatgatagatactggagcttcctcgaaaattctatttaaaataacttatgagaaga

SEQ ID NO: 22678 - DNA, 3336 bp, Cannabis sativa
tagtgtttacgtccataccaacaaattgttattagctgttttccacgtctcaatattaatttatgtatacatgtacatattctaattttaataagctagagggactgattttgatatctatactagaggttttttttcttattattgttttttatatgaatgagcttgtatttacattactccaaaaaatcaatttacaaagaacatcttcatatctagaagtcctcactcaactctatacaactgtatagtaattacaaagagtaccactgagtcaatcaaagggccaggcaaaactaattctctatttcacaaaatccttgactctattaataaatctatctacatcttcacacttggaatttcatagttcatcgtttctgctctttgaaatatgataaatcaagctagccaagactgcagataataactgcttcttagacttacttcatttagctctctcgatccaccttgcaagtctggttgcagaatcggtataggccttccaatgcaaccattcttttacttttagcaatcaagaaaaggagaaagaacaatcaaagaacaaattaatgatcagttgtttcttcctactgattacacaataaacaaacaggatcatcaatgattccaaacttatgtagtcaatctcttatcctcaacttgttttgaaccgctatccacatgatgaaattgtgtttgggagtgttgaatctcctccaaacttcatggctacaatgtactctgttttaagaaggacaaaatagtttgtaactaagagagacttggtacttactatgagtaaattgctggatatccatcagatttttaatttcatccttgactgtcaccacttgtttctaataccagctcacttgaatttgggaccatatagccccaccaatcttcacttctaatgtatactgtgtatacatttaacccacaagttttcttacctattagcaatattagcaatagttcatacatatttgaatatagcagctctattccattatgctatcatcttaatgtctattccctctagctatttttgcttgacaaactaattcccaagatattggacccgacccctgagtgacatgttatttccacaaataaactctgcatattacttcaattttattgactaccttcttaggttgcaccataatttggctccagtatgagtgtattgacatcataactgaatcaataagccctgctctccctgcaaaggagagattccttgaactccaagtctttatttgagaggtcattttctcaaccaacactttacattcctgaccagagatcctttttgcacaaataggaaactccaagtatttgaatgaaacttcttgtttacagaagccaaaaacatcaagtatacgttgaatctctccatatttcataccactacaatagattgcagactttgcaggattaggatgcaagctagaggtacatgagaacaacttcaggccttgcaacatataatagacactttttaaaatcccttttacaaaacaacaacacatcatctacaaaacttaagtggtttaacctcaactcaccacatcttttatgaaactggaagccttatttggagccagttctctgcataattctggacatgtactccattctaagaacaaataacaaattaggagacacagtagccctcttttggattcgaagaatccatgcatagtgccattaaacataagtgagaactttggagcccctaacacatgtcataacaaggctaatgaatttttgagaaaattgaaaggctaccatcatttcctctatgaagttccattcgattgtatcataggccttctgaaggtcaagcttgatcatgcagtttggctttgtcgacttcctctcataatgcatgattagatcttgagatatcatgattttttttttttgatgaatcagctttaatttcattactccaataatccatatttacaatcaaagagcatcccaatcaaaaggacctcacatatgaaacatctgctttgtacattgtacatctattttcaaaaaattattgttacaactataagtttccaaaccaatccaagtcctttgccccaacctgtttcggccatatgctatatactctatgtttcaccatttctttgactgtacaacttactctatctaacatatcatgatgttgtgtgcaataaacctgcctttgacaaatccctcttggttttgtgcaataaacctaccttttactagaggtattttcatattaattgaataagttcagaaatatttttttaagttaatattttcacatgtaatttttatttttactttttaaaattttattaaatttactaattttttttagtgtattttgtattctcattcattaatatttacctcatttaattagggagtgttattttgtacactagattcttattttgaccccaaccccgaccttgaccttatacctgcacccgtaatggaccacgatcccgaacttgatctcagacctgtacttgcacccctgattggatcctgaccccaggtcccaacccaaaccttggaccccaaaacctctggcctagagacctcggaccgcataactcaatcctgaccctgacctcgactccagaccccataccccggcctcgacctagacttggacctttgaacctagccgcaggccttaactccataccccagattcgaaccctagccccgtgcgggacccgaacccaatacccggccccgacccgaaccaagactcgagccctagcaattggcctagagccatctagatcttaacttggattcgaccctaagaccctaacctggacttggacccaccccaaccctaggctaggacccggacccaataccccttaccttggattcggaccctagcctcgggcttggacttggacctaataccctagtctcgaccaagacctgagctcccaaccaccattccatgactttatccctgactcgaattcggaccaaaagcctaaatacgactccgacccccgaccctagcctgatcttggaccccataccccatgtccgagcctggacacgcacctgaaccccaaaccccccgcccacgacccagtttctatcttcgcacttaaataaaaataacataaataaatattacaaaacacatttttattttttaattttataatcaaaaaacaaaaacacttatcaaacaaagtttaatttttcataaacgaaaaaaattgtattttgttttctttgtgttgaccgaggttttcggtaaccaatataataataataataagagagctataaggaattaagaga

SEQ ID NO: 22679 - DNA, 3274 bp, Cannabis sativa
aattgaaatcctgttttcactcttattcctcacccttcacatcttggactctagtattttttgtgtataagattattttcagtattcaaaaaactagacatgattaccaatttaactttggttttctttcttttaatttttgatccttatagtgaagctgatttgcttattatttttttcatagaaaccatttggtcatagctagttctaaattgtgcattttcactggctttgacatgtggtatgtttgtgtgctttttgatattgtacttaattattttatatgtagtatagttcaatatttttgttgctattttgaaatgactacagtactgaaagaaataatagaaaaaaatgtgaataaaataattgcccgaggtattacaagatctagatcattctcttcccccctcttcccacatacatcttacatatcatagtctcttttcttggagtatttgggttataattttcgcaggtggactgtgatgaatcttaatgttgttatagaatgaccaagaaagaaagtgaatcttctactattttctggagtttgtactgtttgatcccaattttcttaattgcatgtcccatttacaaatgtggacaatcccaaacatacttactagtctcattgattgacttggggttcccaagatacattggaattcattttttgttcttgttcttaaattatttcctttttatgttgattggctattttatggtgtaatttgttttccttgcttcttctttaaaggttttcttgtaccaatttcttttaaatggatctaaactttcgtgtacaattacttgtttaacttgtagagcaaccctggctggggatttgacaagaaatgtcagtttatggataagttggtgtggcggatgtcgcagcagtacaagtaagctaaaataatgctcattttatggttgatttacatgccgaacctgaactgattctggggcagtttgaccgttgtatgacgtaaattttgtgctcaacgtatatttctttcaaaagaatttcttgtcaattgtgttgtggcacacagaaaatggaaattttcttgattttttgtaataatttcaataatgtattcgacataagcatctttggtaaaaggagtatacttacaacttctttggcttgggggctcttttctgaactggaaattagtagtgttgaggagattttcatgcttattatctttccctattattttctagtcttttggaatatttctagcttgaggttgagaatatggtattattttccttattctttttagtttttaccaaataacttgaatactattactgttcttattcattttagtaagtaggatttttttctttggaatttatgtgtgccagaattaaatacaagattcatggaaagttataaaccatgactcaactattcagaattcgagagagaaatatgacaagagaagttcatagaacatgtgagaaatcatgaactagttcataatcgaggagagagtttatctcattattatactttttatgcaagcttttgtatagttaccgaaatatatttttcttttcttttttttttaggggtgggatcacgaattcaaaattgcttatttaaatgaaaaatgaaaattaaaaatatcaaatggatattttgttctaatttataaagaagaaggcttgattagataaatgtatgaatgatttaatacaagtacaacattaataaagatctaatccccatctaatactaagatatcatatggtattaatactctttctattttaaccataataacaaaataaagcattgtaaaatataatataataaaaacacaaatgtcgttgatcacacctaaagcaaacttgctacatttgtatatgattctattcacaacattcttactcatccaactcaattacattcacatttgttgttaatataaaatagaaattcaaggacgataattaagtaaatttactaaaatatgtacatttttttttttttgaaagagaaaatatgtacatatttattagtaatgaaaaagatttaaaaaaagaataacatattcgcccaccgtggggctcgaacccacgaccacaaggttaagagccttgcgctctaccaactgagctagacgggctgctattgacattattcactaacaataaaacataataataaatgtctcgaaatataatacgagtaaacctaattcattgtttgaaaattacttaatcctggccgtccattaattattcatccaccgttgattcgaaaaataaaaggcgggaacctcactcgtatataattcgacgaaaaagaaatattagaaaaataactattttctctctggaaaattgaaaaaaaaaaaaaatcttcttctagaattttgggaattgatttcgacggcagggagaaatggacgacggcggcggcgtccccaccgacgttgaggatcccattggcttcatcgtacctttatgccacgtgtcctcctctcaagttgaaaccctacgatgctgcccattagcccgtgtaccttacaaccctcaaaaccacgcttcgttggagccggagtccgagtccgaggagtttcctgtcgaatctaccgggataatgatggtttcgctgacagacagtcaggaagaagaaaacactcacagcaactctcacgaagtattccataccccgccagaagagtcagcggctgggagttctaacgagattcaaccgctgaaggacgtcgtggagacccatgccggaggagatcgtcaaaatcttcaagggaccgacgggggatgcagcgaaactgccgcaatcggagtgggtggttcctctgaaggttatgagacggtggatttgagccgggattcggaattagggttttcggaagtcgaattggcgcagcgtgttcaacccccttttgaccttaatcgtttgcctttggaagtttctggaaatggattggaagtatttaaggttttgacgagggaaccgtctttgaaagatggattaggcgaatcgccaatgaagaaattgaagatatcagaggagaatagagataaatctggagacgaattggagtcagaaagggatactccggaaagtgacggctctgattccacagaagatggtgaaatcaacggtggagaaagctcagggaagagaaaattgaagttcagccaaaacgacgaagtaaacgacatcgtttcggagaatggtgcaatcaatgataacgatatcggcagcaaaaccaaggaggcagctgtt

SEQ ID NO: 22680 - DNA, 3774 bp, Cannabis sativa
agagcatcaaattcattgagtttagcttctccctgcaagtttatgatattcaaaaaccagtgagaaaataccaaaacaagaaaataaatcagctgcattttgttggaaacaaaatttgtaatttacaataagaagaaatgttttcacttgcatagacacacaagtgaattctcataaaagagtaatgtgaccaaaaacaaggacaagaattatctaaaatttacttgtgttagatcagttaaaatttccccaaaagttgacgagtatcaaatcatgccccctaaaagattcttgtccaattatgtttaattttactaacagacacatgattgttcatgtaccaaatcatgcccctgaagatcatggtattgtagatcttcatgttaaatattactgcattttactaagattaagttgctgagacaagactaatctactaaaaacatacagaaatatatataaatattaacataatgaaaagaaaagaagaagaaagagtattcacccttcggaagaaagtagaatgccttgaagaacagacttaaaggctcttgcagcagttgcacttaggcacattacgaagccaaacaagtgaaatcccggctcgccctatctcaccaaacatgaaattgttattatagtttaactgaaacacgaagcaatgcaggtcgaaaaacacaataacaaacgccatacgacaacaatcctttgaaatcgagcattgtttacaagttaatctaagggaacaagctcaagaattatgtctagttcacaaagcataaaaaagtagatatagcaatgtcacaataaaaactaatgccaaactcatatgtacataaaatcttttggtaagaccctttatttattaagtagcaagtttgcttaggattaaaacaatactttatacaaataaacttgaagattaatcctaattatcaaacctgaaaacaatttatttgattcttcagctcagcaataacattatgcatcattatctcactacaaatttagccaaagattattatttacattattcagttattataaaacatgaattacaaaaaatacaataacaaacaagttcttagaattttcagcaaaagaacaacaattgtccaaaactacatagctttacaccaaagtctcaatctttcacctcaaacacatataattaccaacaaaaaaatcaaacccaacaaacaacagatctcagaaattcagaaaacaaaactcataactcataaaaacactaatatatacatactacagatctccaatttccttaaaaaagtaaactttatcccaaaatatcacaccccagataagaaagtttccaaatttatacacacacatatacatatatagatatacatatatatatatatacatataattgacaattgggcttaccccactggcaatgacaaccccagtaacaacaggaaccagagcaccataggtaagccaagcttctctcttaaaggtaacaaaataagcaaaaagggcagtaaaaaacggcgtcgttgcaccaacagcctgattaaacgacacagcaagatacctaagagaaatgtttccaccaacaacagaggcacaaaaaacgacactcaaagttgcgatctttagaaattgagaacgagatttgatcatctgaaaaggaacgatctttaagaaaatgattgagaagtaactgaggatggcacaagctgacatgtggcacattgtcaggaagattgggaatcggaagccatagttggagagtaagaatttgttgaggagaagaacaccgatgttggatgagtaccagagaaccaccaatgagaatatgaaaatggcttcttttttagacgaaagagatagggatgaagatgaagaagaagaggaagatgaagatttctgatgcgaaggcatttttgggggaaaaatcggtttttttttttggaggaaggaagctttggttttgagcttcaatggaaaataagtaatatttttattttatttaattttgaaaaatggttttttttttttttgaatatattttgtttttgttttgagagaaaaaaggttgaaaggtaaatatttggtgtgtcatggacttattgtggttaggggatgtggaaggaaggaaggaatagaggaaacatcaattttgtgtgttccaattttttcttttctttttttggaaaattaatatattattttatttgtactttaaactaataagttattaaacttttaaataaacaaaatgaaaaagaaaaaagaaactcacataagtgtatataagtgtaccttattgtgagggtataaatattattttaagagtaaatattatttggaattttgtgatttgtgaaagttattaattgagttttttattttgttaaataataaattggattttgtgtttttttaaaagggtacaaaatagtagtttgaactaattttttgtctcaataaaatttaatagtaacttgatctagaattgttatgataagattaagtacattttttgtacctatttgtgttaaaaattattttcaagttaattatactaaaaagatattatcgaaatttgagttcaggtactattttgtaccattttaaaaaatacaaagttcaatttattattttacaacacaaagaatctaattaataatttttgtaaaatttaaatacaaaaaaatattaatatttattcaatcttaatatattttaatttaataattattatgaaaaatattttaattatttataagtagttatcgtatagtagtattggattaatatttttatatatataaaagtattagatattattagtgtatctttagtccctaatatttaaaattattaagaacatcatcccaataaaatctaattatcccaaaagaaatctagcaaaaataaaacaaacaaacaaaaaatctcaaaaaaaaaaaaatccaataaatcataatggattttttttgttttaaaaaaaaaaaatccttccatatatgtttaaagattaattttgatgtttttgtttttaatttaattaatacaatttaaactaagtccttagatgttgcataaatccaaaagtttaactaacttaacttttgaggttgaagttgaaggatatacctcaattggatacctcgtatgcatcaagtgtgttagttatgcaagttattattataatatacaaattgctttttggaaactacttaactcaaaaatataataaacaaagttgaaaattcactccaaaaacaacacttgaactgaatcctacaaaacaaaatatttttttatttgcaccctacaaaacaaaatattaagtatactttaaaaaaaaatttaaaaataaacttaaaataatttttaaaaattacttttaatattttttataatttttttaacattattttatgttaatttcaatacttatttttaattttattttaataattttttaaatcatgtataacttttttaataaaatttcatataatattttattttaattttgtgttatattatttaaaaggaaaattactttatatattattttttaattatttttttttaaatttacagtttgaatttttaaagtggtttctccagtggtttctatgtgggttgttatatggattttggttgcaattcatgttgctccgttgattgcaataaattttttttatgtagaattccgtaaaaatgcaaaaaaaaaaatattttaaagtgtaaaaataaaaaaattcctatttaaaatgtaatttatttttg

SEQ ID NO: 22681 - DNA, 3560 bp, Cannabis sativa
ttttttatttaaagttcattatttaaaaagttttaattattcatgttttcaataaatcatttgactagaaaaggagtgcacagtaaaattagaaaatacggtgacatgcctaaactagtagggtattataatgagagtttagacgagctggtagtcttcaagtttgtttctaacgatccatttctaacctctagacgatttgtcacaattcaattagcttaaccctagcttggttcaactcgattcagctcacatgaagatatttacaaagctggaaatggaaatgaagcttcaatagtcaagcaaaaattccataattttcaaatttggaagggtagttcttaacagaatggaattctgtcaattatgttaaaatcgttgagtcgcgttcttcaagattcaaaaaaaaaaaaaataaataaataaaaaattgaacatgtggaaatgaaattttcgaaacaagctgaagcagtccctaacagagcactttaactgctatatgtgtgtggagcagagaagagaagagaatgagtgtgaaggaaagtgaatgctcagctcttctatttatagcagatctcacttattcctaatgcaactaggaaatcactgaaaaattatcttttttctaaaattttcaaagtctcccagatcataaaaaatatcagtaggaggtaaaaaatgagggttacatgcaaacatgtgatgccaaggtagtagtttcacatgaaacgggcatagttcgtgttagaaagtcagcatggcccagccattgggactaaggtggatgacttgggcattggaaactatgtcagtaccctagttgacggttctgagtgcccatgtaggcactgagatccagcaaagacgtttctaggagccatccttcgaaaaagttcagtgaacaggtcctagttaccctaaaatgatgaaccatgaagttgaggatgtcatgtggacatgttagggctcaacctggtctagcattaatgttaggcgcataagttgacatcctatgcgccgtctcacattagttttggttcttactaacttcttataggaaatctgcttagccattatcttaacatacatgagagacatactcccgtcaagtttcagactttggagatgagtctacgaaaaatgataccctggcaccaagaagccctaataggcgcccaagttaatatatagtgatctaggcacaccatgactagagtttaaatttttggggacatacatggaccctgattcctcaaatctatcaaagaagaatccaagaacatgatattagggcattgtccacactttagacattccatgccaacacattcataatgcactttaaacttttaaagactcactagtttatctagttcattcgtgtgaaaatagttaattcattataaatttaatcacactgtattatttttttataaaaaaaagaaggaaaaaaacctttctattaataagaaaaatttcactgccctaatgcaaaatttctcataattttatttcaccaatatccaacgtataagagcggagggttttgttttggtacacaaataaataatacaatcatgcgacaaagtgacaatagatatattatatatctcaagttctcaacatatagtattgagtatatgaaaagtaatcatttatgaattatgttataattagaatccaatttcaaccaatatagaagaataataagatcactaatccatgattttatgatgttgatatcatatgatgtggtggttcgtcatgccatagttgaaataaacttgtagttaagcatctcttcttgttttttttttttttcaattactctataaaaagataattagtggttggaagtttggaataaaaatttggtcaatttaattaataaataatttaaccaatcaagttgtgtgacgcattatatattaactctcacaattgtatataagtcaacaacgttaaacttagtatttttatttatgtgattattagcgtcacattttgaaatttccaataattaattttttgtgtctttatttgtataacatttatgcaataatagaattagtaatgacaaaatgttataaatgataaaaacaataatagaaagagaaaataaataaatgaataaataaaatgacccctccaagcactcgaaaagttgtaacgtgaagtggaaatttatgtaataaaaaagttaaagccacactccaagttgaattgtggggatatgaggagaccaaattaaactattctgttggtataaaacaaaattaatttgattaaagtatgtataattttaacaatatttaacaatttttgcttcatcatcattacatggtagatatctataaatatgaaatattaaataataataataatgtgacgtatactttaccaaaccaataagctacatcacatacattaaataaatatatatatttgatatgacctactgcatattttggaatctcttattataagattttttttccctataagacgtggaagaaagattcaaacttaattgaatatacaagaaaagttatataattatattagtagtcatgctaaatcattaatagtactttgttttttttatgaacatacatatataacttggaattaaattgtttttggttttctttcaataatctttttcataccaaaacccgctcatattaaaatatagtttctaatctaaccatctcatgatcagggaacttggccaaagaaacaaaaaaaaaaaaaaaatcatgatcagaaattatagttatggatatgcattaatgtgattattattagatttaaagtttgatattattatattttcataattaaattacaaaaatataaaataaattaatgagatataattaatatattggaattttttttgtgagagcatcaatctttcccctatcgtaagaatattttttagtatatagagaaattataatttttttttttatatgatggtaatatatttatactaggcatcttgcttattttaaaattttaaattttaaataatttatggtactgaaaatgtaattcaaataattagtcgtaggtaggtctattttattttacatgcatgtaattaattattttaaactttatttttgaaattgtaaaatcttaagattttgttaaagacaaatacctattataaatatacaatacacatcatataaatattttaaatgtaattttttcaaatacaaaaaattagaaacgtccataaaataataaaaatgatgctctcatccgcatccaaatatatattcattatcaacaaaaatatatgaagcaatgtattcttcatttatttgttgattttataattataagagccctatcaaatgctcaaacatataattttatttttttaaaatatttaaagaactaaattaaaaatatagtatatcagatgttttaaattcattcctcattttaaagttactttaaaattcactattcatgttctatataatatagaataaacatactttattaattattttgggtttgaatgatttctttttatatggtaa

SEQ ID NO: 22682 - DNA, 2508 bp, Cannabis sativa
aattaataagatcaaacattgtccatacataaaatatcactacaaaaagtataagtattcatgtccaatacccatatttatgctcaaaacaattatttgcaaaattatgagcaccagatccaaaagatgataatttgtatactactgaatgtcaaaggcaatatatattgtcctacaaattattttaaagtgaataaacatgatctttctaactctttcccgagctgtgtactaaagagagtcatcaatcaggagtctcgccattcatccttctcatcatctgggacactgaaaaagtaagaaaccagagtgagatgcattgtagacaatgccaaatgcatattaaaggcatggagttaattaataaagagaaacaatatatataactgtactataatatatatatcttctctgaattaataataataataataaatatttattagttagtttatgtaaataattaaaatcataatatgtgtgtaggttgttggagaatttagaagattcagcaactacatatggagttatgtgaatcataaaccaatgataaacagatacaagtacccaagaaatgttcctctaaggtcaccaaaagcagaggccataagcaaagacatgttgaaacgtgggtttcggtttgtgggtccagtcattgtgcattcctttatgcaagctgctggcctcactattgaccatcttgtcgactgttataggcattacgaatgtgttagccttgccgaaaggccttggaggcacatttaataacttacctctcacttctcatcctaaaaataatcatatattttcatgcatatatatatatgtatgtgccagccagtattaagttttccaaatttcctagtaataatttaatccatcccccacacccacacacagttattatacttcatcatcactagcttatacatatacattatacatatatatatatgatatatcactcatattattatatgtgtatatatatgaattaatggaagaaaaaagaaataattaattaatatatatgtatgtatgtaatttaggatttaataatatattttttaaagcgataaagatgtacgtacaattgttttactgtacatttgtatgaatatgatcggccgtcatgtggtcctgctggtttgatcatttctagctttttgtctctttttggttgtccaatatatcatgaattcaagagtggttttttatatgagatatttgtaactaaaatatatatatatatatatgaacagagattattataattattctatatagtgatgttaaacaatgattggtttggtacataagttaattttgttggggaacaatttatcgaaatactcaaggccacaaatgttgtgtcaaataattcttcatttgacattatctaagaaatcattatatccacaataatgaaactaattaatataatagattaagaaatggttgcaattttataaacatttgttgaaaaaggttaagattattgaagtatcatgatatatattataacgtggatcgatcaggacatgtgtattgaataatttccaccataaataaattggccttaattaatttaataatgacacaaacttacgagcaaataacgaccaaggactagtgtttcttgttccaatgttcaattcaatcaatgaatttagaggtgttgataaattaaaaataaaaatctgctgccgcatttttactttctccttgctgtcgtactaataaaaagtagacatgtgtcatttgctcattacaaaaatcatgagcatcaatgagacaatgactacaatctcaatgaaatgtttcattagtaatgattattaatggcggacatatcgttagtaatagctcgtcgacgaaagtacgtagtatcaatgatgaaaattcaaatcgttagtgaaaatgagtaccaatgacgacattgttgtcattgataatgtaccatttctttttgttaaaagaattgaataacagaatgcactgaattctgctataaggaatatcctgtggtcccaggaatttggaggttgttagaattgagaatcctcaatgatttgctctgtattatgctgatgtcattattatgccttttgtattttctgttactacacgtgtaagacctggagtggtcatctttgattactgattgtatcagcttcttctataaatgaaaagtttcctgcacagactcctttgagctgtgatctttcatctttctgcatttttctaaatatttcactcttttaaactgttgggctatcaatgatgataatatcatcattgattatattattgttgattggatatttagtcaaccaatactgagtcgtaataaatgagatttaagttaaaaaaataaacaataaatgtcacgacccgaaccctaggccgtgacataggaaaagtgtgagattgagagattccactaattctatgaatttcatttaaagagaatcatattgctttatgagtgcttatttgattaacatt

SEQ ID NO: 22683 - DNA, 5843 bp, Cannabis sativa
  modified_base (3121)..(3122): a, c, t, g, unknown or other
cacaacaagtattgtgactaaaagcatttagtcacaacaatttgtgatttttgtgactaatacttttagccacggacttcttagtcacaacatagaaatagtgatttgtaattagccacaactattttacttatagccacaaattttattttgactaaaagtaaaaaattttgtagtgattgtttccaaaaaaaatgagaattttcccgcacaaatccacaccacccaatatcgacgggacattctgcttggtattgttcattttatttaaaaataaaaaaatcgtttaactttactggtatctgccgataataaccctactaatagggaccgacatgctccgccggtaatatgcccgcccctatttctaattttccttgtagtgtaagtattaaataatacattgtattaaaaaatttgatcgtaataattaatataatatattgttttatctaagcatagtgttatttattattttatacaataagatccttatatagcgtaccaaacgaacccatacaatacaatacggctaattaaacgaacttttggtgaacatagctttggagaactctcttcaagtattgagaccgataacaactcaagtggactaacctattaccaacgaaagataatgaactactataaaatactcatgttcatctttgttaaatctttttcgattaacggtttataatgatttgacggatacttgtgttcatcttacttattatttatgattttcttaattgcgcgcgttaattaacaaaaaatcatatcaacgtacaattgaaaaaaaaaaaaaaaaaaaaaacctcttttaacttttggaagaaaacaatgtttattgtatatgtaatataaattaatgtgttagatagtttgtgaaattgtgaaaatcgaatatccaatcttaagtgaagattcttcatcgatcaaaaaagaaaaagaaagaaagaaggtcgtacatgcaagttgatctaatcttttcctttttttttttcttttttttttttttaatgacagtgccaaaacatgaagaatttctaaacaaagatgacatcctatacaagtatacatggctgcgggacccaatgatattcttacaagacccacaaaaacattgttccatacatagttatataaatatatataattattaagataataatttgtcaaaaaaaaaaaaactaatattgatataaattagaataaataatagtataagtactcaaagttttaaatttgtaaacgacattattattaatttgatagtaacaaaagcaagatattcttgagctagctaaatctgcaaaacacttaaacaacaagagtaagaacactaatttttattctggttctggtcctcaagatcaaacatgatccttggttatactccagttgagaaacaccatcaagttttcattaatggagaattagaaaatttacaagcaccaatggcagagcatacaacactctatctgaaactcgagaattacaccctaagaacagtcacagctctcacacccaaccccgagtacacccttaagttcttgaccccacaagaacttgattacacagctctaacaccattttctcatacactctatctcccttcaattctctgtctcaaagtaatgaaaaaggaaagctatttattggcctagcataccactgaaaacaggaacaaagaatagctcataatacccgaaataattaactgttagagttagttaaggttagttaaagaaaaagaaaagtacatattgatctttcccatccacaaaatatatatacactagtggaagaagcatactatgcccattgtaaaataataatatagtaaaaataaaatttacagctaatttataacttaaagtaatgatattttttattctattttacatcatttcattattaactcaaaataaacataaaactatcactaaacagtttttatgaatttgatttaactaactaactaatgataaaatataatctttaattaagtattacatgattttaaatgtcttaaaactaactaattattcaaaaaaattaattatcatcttataattaatatttattaatttaaacactacattattcaaaaaatttattttgttgccattactaatagctatctaaatttggcactcaatgaaataattttatatttatttaactatttaactaattaattatatagtctaaattatattttaaatttttgttgttatttactcatttataattgagaaattagtacataattataaatatcaatttattattatgttacttttaaaatataattatgataaaaattggttactttaaaatatagttataataaaaattgccaataatcagatttatacatatgagaataagaaagagtataaattattaaagagagttagttaatttggtagttagagttagttattctgttagttcgttaagtgagttgtataataacaaattttttgtttaatatttatagctgattcattgtgtatataatcatatatgtagcagcttaagatttctttctcatcatctttctttctttcttcttaatttgtcttatcataaatggcatatatatgtaataccatatatcctatatatatgatatctcttaatatattatcgatccagaaatattatagagtaagtgataaattacagtttttttgtcatatgccaaaagttataatcaaattttacatttatcctttatttattgtaatttcaagttattcaagttattgtttcagaaattttattttaactgaagccatttatcaataaatatagtaactctcaattagaagctccttgctaatactaaatttaatggtggcttgattattcaagttgtatatatcaaaaaatttattttggttgaagctcattaggtgttttctcttagactatttatatatatttatatatatatatatatctatattcgatctcaatatatattcctctcatacttataatacaatcagcaaaatctagctaattaagaaaaagaggatatatgagtgggatgacgcgttgtatacatgctgacctgacccatagatgggatatatatatatatatatgnntatatatatatatataaatggattggattttgatatttattggcttttccaagagtacgtacataaatatagattttcatttatttagtttaacatattaattatcaaaacgtttgatgtatacatgaacatgatcactatatcaaattctatatataatataagttagagatttgatagcatatgcttgttatggattggatgagaatatataatatattaatattatatatacataatattgtagttattgataaaaaaaaaataggtatatgtggtgtttttggtatgactatttggatatttattactttgatatagatgattaatatctctttttaattgataacagttagatgaatcaactcaaggaatctttagttaatatataaacatataaatataatctcaaaacttatatatatggccagggctgaaatattatttatagcttagatatcgatgatgtattcctttaaatcaatattctaaaccaatacgctcttaaattgcaataacagtactatatatatataaatggtgattaaactctatacttttgataaattatttactatatataacactagtagctacttctatagctatataggtagaagagaagagagtataattagaattatatcctctctggaaaattataagcatctagtatttgattggagggaaaggtatatatataatcgacaagtagaatatatcttatcctaaaatatatatgttgaattttttggggcactttttctatgtctagtttttgtccaactaaagcaaacaattgccaacttgcatatatttctactatatacaactatatatatatatatataactcaactgtctttctttaaccgtaccttgctccatcacaacaaaagtacgtctaagctatatatacgtatatatatacctcattttcatttttatatataattattctacttcaaaaactaagttgttcataatagtataacatgctataaatatatatagctttagggttacgtaacatataatgtatatcgatcgatttttatatatttgtgcgtgtgtatagcttatcaacttatccattattacgtgaattttggtatgttcatgaacttatagtactatttatactactacctatagctactagctagctagctatatagtatatattcatcaactaaaaagttctccaaaggtttaaggaaaaggacatcattcctatccgtttgagtcaacaatttaaattttactttcctatgtgttatatattaattatatgaatacatattcaattgttgggtttgctcacattataattaatattattttgtttaggaaaattagggcataagactatagaaacttatttgattcacactataaaaaacttactttttgtgattactttttagtcacaatataaattttttgtaacttaataagacttttagtcacaacaaaaaattacttgtgactaaaacatagtatttaactaatttagttttagctagtcacaataaatattatgactaaaaacacatttagtcacaataaaatattgtgatttttgtgagtaatatttttagccacagaccttttagtcacaatacaataatgataatttataattagccacaactattttagctttagtcacaaattttagtatgacaaaaagtaaatttttttgtagtggcagataaatctttaattatcttgaaaattgacaataatcgtccttaaggtcatgttttttgcaaatctgttagttatttctaacgaatccattcgatatatactaataaaaatgccacatattaacttattattggtcctaatcataatttttaattaaaaataactttaaaataaaaaaaaaactaaaaaaattattttaaaactataaatttattttttttcttctctttcttctttttctttttttcttcttcgtcttattcacacatcccaagccacaaccctcaccccgccacaaccctcaccccaccccatcccagccacgactcttaccccacccccattaccagccacagtcgccgtctgtcaaggttgaagaccaccagaaaacaaaataaagcccccgtcttctatacacccatgaacaaatctccaacgaaaacttaaatatttttttacaagggaacacttaaatctaattaagcaaataaaacccaaaacaacctatcttagtactatttttcaaaaaaaaaaacctagagattcgacgtccacctgcacaatgacatttaccagagaagttttcttttcttttcgtagattaatttgaggtgatggatctatgtaagttgaaatgagaacaaataaccagagcaccattactgttttgacctaaaaaaaaaaagaaaatcaaacatctattacggtcaaagtcccgtgattcgaaggagaaagaccgggagttatacaatcctacatcgcctgggaaaggtcatgtgtgatgattctgatactgtgtaggtatgggactatatacatagttgaagatggcttaaatagattgattggtactacctatatcaacaaggtgcgtcttgtttttcagtagtccatcacaaaagaactccacggttaagcatgcctggggtaattttaggatgggtaacctcctaagaatttttctcaggaagtgtgcgagtgaggacaaagcacgctgaaaacactcgtg

SEQ ID NO: 22684 - DNA, 4038 bp, Cannabis sativa
  modified_base (1136)..(1147): a, c, t, g, unknown or other
  modified_base (3904)..(3911): a, c, t, g, unknown or other
cttgatctgtttgttgacgggcctagtaactctttgtgggtagacatgctgttttgagttggcttggtctcttttttttctctttcatcaagggatcctgctagtaagatatggtttacctcttagtcactgtagactagaagtatgagagtagactgttggaggatcgggccagctagggtatagaccaggtggctagccatgttggagcattgcctggccatttggaagaggctatggccgaccaagttgttgactttatggtcgaccaacttgtggaggtggtggccgaccatgttgatgattctatggccgaccatcctgctatggtcatggtcagccagccttccagaggccacgtcgatgctgcagtttgatcccttctacactcggttggctttgccccctgcatgattgtcatagagcctttacgcactcctatcaatagctattcaacttttttcatagtaacgcttcttagaggtggcattgggataccacgcctgtgtattatgttgtgtaggattagacatcttgtagccatcccccaaatccttgctttctgacaaggtttttgtttggagatatgttgttgtatgtgtatccatgttggttgtccatcaagtctatttcttttgaaatagggaggcttagttctttgaagaactaagcgagtaccaagtctaccttagtagtcaaggcataactggctagtcgagcgagtgcgtcagctgttgcatcgtctttggggactttcctgttagtacaacgtttgagctgacttaacaagtcttaatattagctcaagtaggtcctcatatttttgaatgggctgtaggttcatccaagacatgacctacgactagttgagaatcgtggtgtatgtttaggtgtttaacatgcgcttcgtgtgctagcctgaggccaacattcggagcttcatgttgatcctcgttgttagaagctttgaaactaacctttgttgccttgtgtagtcattacccctaggtgctttgagggctaaggctgcatcagacaagtggtcaatgcacctcgtgtgttgagctattttgctcttgcttcttctctggctctacttttctcctgaactttgagagatttagggagatatgctnnnnnnnnnnnncatgaagctggtgagagcttggcctttgatggccatgtttggtgacaagtggccttatattggccgagtcttggtcaggtgctacagattttgggaaaacctaccgtaatggttgattggtctacactttcatagggtgtgcctggaggtagggccttagctttctagaagccaagagcaagttataggttagcttctccatgagtgggtactgactttcaacatcgattaatctcttggttatgttgtatacaaggtgttttacaccgtcttcttctcttctgaggacaacactcacaacatgttctatgactactaggtacacgcttagcttttcattatctaagggtttcgacaacacatgtggttgagccaattgtttctttagctcttggaatgtggtttcacattcctctgtccactcgaattttttgttgcctctaagaatgttgaagaagggtaaacatttttctgtagactcggacacgaatctgcttagtgcagcaatgcgtcttgttaggctttgtacttccttgatagttgtgggtgacttcatgtccaaagggcttggatcttgtctgagtttgcttctattcccttgctttaactatgaagtcaaggaattttcataagcctacttcaaaagaatgtttgagggagttaagcttcatgttatagctgcggaggatttttttagcattcgcctaggtcctccacatgcccctagcctttttggactttacaagcatgtcgtccacatccacctccatcttgcagccgataagatcgttgttcgagaaattgacttgagcgacatctccttttgagaaagagatcgtgggctatccaagctttggatgcttagatcctcgttcctcgagtgctaggatgtcgcttttgggctcgtaatggagtgtctgagcataccactccctagctttgctggtcttgcctacaatatggggtccgcagatgatgacctctaagtatcttgtcactgaaggtttgggtagagttgctggtacctgcctgtgcgcttggcaagtcattgggctgttggatgccttgtgactgcctgttgctgacttgccctgtctggttttgtctgggcatgcattcctttgggagtttggtaggagagtgaagcatgtgcacttctcctccttctctcatagacttcatggcgtaagggcatcattgaatttccctcttttgccattatgttggttagagccatcgttgttgcacttgcctccaccattctcattgttggagaattgacagagattgtctgtgttggttggcatgtcggacagtgcttggggcactatgaggccctgtgtttgttcttcattgacctgccctcttgtctacgcttaccggacaacttttcccactttatgaagccattagctcgctcaaggaactccttcatgttgtttgttgagatccttctaatatctttctagaagtcactcaatggtaggatgcctctaagtatggcgtatatcgacctttttttgtcaagcctttggccttggtggcctcggccatgaaccattgaatgtagtccttcaaaggctcttcttatctttactttatttcaacaagatcctccagtcgtgaaggtatttgtcttgaagcagagaactaaatatagaactcttgggagaattcttcccaagaattaaatcttcctagggctaacttgaattaccattgttggtctatttcagctagagttgccgaaaagatttggcatcgcacatctccaaatacttgttggagatctgtttggatctcgaaatatttcaggtgtactaggggatcttctttccctatgtacatctttcacaccggcatcttgaacttgggaaagggcaaggcatttatgtatgtcgtgaatggtgatccccttgacctgtctagctcaaggtctaaaggttttggaccagctaggcccttgatcatgttcctcatttggtccaactgtgcttgcatagaaggatttgctattgctggggcttggtagattggcctttctagattgagctgtagccttggattggacagagcctcgccggccataacctaggagaggataaattcaaggtgggccaaccctgagtctagcagctgtccatggccagctagcccggtgctgggtagggcctagccacccactcctccttgactggttggtggagattgttcgttgacataggatagattacaccaattattggagttttgtggatctaaatgcctgaagtgattgtgttcactccttgaattgttgttgtcttgggtgtttccacctgttcccaggcctcgccaattaaagattgggggcgttgtagtgcaagagattcctggctggccccctaagccaatggctacaaggatctggttgttctcgccagtaggccttcgtggaaaggcctatcctcctttgagtaagggaaggtctatccgggttcctgaagaacctagttggtcagcttgctgatagacccaccctgatctatcaactagtcttccttggagttgatctctaatgagatcctggtctcttccaatgtttttctaattgaactaccttatcaagtcactggcttctctgttgcagcgatccagctctgcctagtgagatcgaaggatgtactcttcgtcatccatccatcttaggaatttgcatatctactgagcgaatacatcacaatcaacagtgcgtggtgttggaattaattttaccannnnnnnngatctactcacaagtatgttggtttaacaacctaaagatgaacttttaaaacaataaacaaaacacataaaagttaagaataacttacagtgatggtagcggaattaagtgtctccttccactcaga

SEQ ID NO: 22685 - DNA, 1617 bp, Cannabis sativa
aattgatatcttattcaaatcaaaagcaactaaatggttgcttttttcaaaactcccaaaaaaacgaaattttttggaaacgagattttttttttctaatttcggtaattgttttgaattttggtatgtaggctgacgtgccataacaatatttatgcaaataattctcttaaaggtatttttataaataaaattatttttaggtataatattgaaaaatcccctattttttatgcattgactttcaatataaataattatgctttttatttatttattgataaaaagtaaatagtttaacattttgtattaatggagatgagatagaacactagtagatggtatagtgtaacactcattatagttttgaatttaactttagatttttgatttattactcatggggtcttagctttaacattaacatgatttttgtcatacgaatgttccaaaagtcatgattcaatttcaaaaacaacacaatttaaggaagtactttttcttttcttatttttttttatataaaaatttaaggaaatacttcaattaaaaggagaatcaaaactttattgtgataacctccatgagcaattaaattacaactaaagttccacaatcaagaacacattgtttagattcaagtttatttattttcaatattttctttatagcgaatagagtaaactttaacatcaccaatcaaagatttggtagcacgtatatatatataatttaattgaatgaacaaacacaagctgtctaaagataaaatattaaaagctctaaataagagtgatgttgaaagaattattagtgggacatacttaatatatttgttataataaaaccccaatactttatgtatctaaataggtgggatggcaattttcatattaaattttagaaaaatttatgataattatttgatgtattttttttattgtgttttaattttattttataagaataagttaaggaataattttttttatctactaattaaaaatactcttatatattatattttattaaaatgtaatcactttactctcactttccacttaagtttagcatataatttgtattatcctaagagatataatggggacagaatgaagatgagtatatcttaaagaatatgaaaataaatgtaaaaattaaaacaattaatataaagtgggtatacaatttaattttctctattattttatatatatgaaataaaataggaataattttaaaaaatacaaaaataataaaaaaattagaaaaatatagtctatacggagttttcaaattttttacatttttttaaattttatttacataaaatatagtcttttgattttttatgttgtacttttgttatttgtatatacagtatatatatatatatttttatgttattttgatgtagttttgttgttgttttcttgttacttttatatgattttttgttattttcttatatttttataaaatactgtaaaaatgtaatttttttttgtcatgtttacttttttgataaaaaaaattagaggaaattacactctataccctttttatattgccctcttttatttttaccttctcttttaaagtctatcatttttactt

SEQ ID NO: 22686 - DNA, 3511 bp, Cannabis sativa
gcagcttcaccgtggtggtattttcttctagtgccctctggtctatttttttttttttaaatcagaatatagcataaaataaatgaccagcttactatgtcaattcatgtgaaaagaccagtttatgtagtttcatcaatttctgggtgaattttcctttcattatcattatttatttccttactttttatttatgttcgtcgtatttctcctggacaggaattgattcacaatcttggcttcctgatgctccacccaatgaaaatgccataattaaggtattttgtgtcaatgattgttctgttgtaacttgatttttaatggtatatatgtgtattcttttctgaaagaattagattgactatgcaaataattaaacatttatttttctaaaatccctccaaaaaatggtaaataaagaaatgagaaatgaaataattttagcattgttatctccatctggccatttatcttttactttgaatggaatatatcgagaatacatcataacagatagccctatctattcagttgtttgtgttcttgcccctttttgtgatcctaatctactatttagtccaaccttttataaatgtacttatattctatttaaactgttatataagtggatattttatggcaaattaataagtcaaattttcaatgttaacaaaccattaatgggttgattcttaagtgataagttaatggttaagttattcggttttgctttgtcagcttatacttatacccttttaatgtgtcgattaagtaatgacaagttgatccttgtgaaaaggccacaggtgggggggcatacaagtatactgacctcttcaagcaaaggctcggtgttactcttgacaaagaagatgaaatggattgcctagttgcaggagcaaattttttgctaaaggtggaagttccttatatattgcattttttcacataatgggctttctccatcattggtgtttttaatgtaatctgtattctttgtccttaatcaatataatagtttatctcttgttctttataatttctatgccggtttcaatacgaaactttaatttatctcctgtggtgtttgctttggtagttgatggaaaactaggaatttacaaagttgaagataaaactttatttcaatgacactggttttcattcttgaattgatttgtagcatttttttcctctccgaaaagtttttttcccttagcatgtgacatacatatgcagattgtgcatatgaatccttttaccccccgccccctcccccaaagagttgattagatattctaacatgatttgtgtagtaggcaattcgacatgaagctttcacacacatggagggtcagaagaaatttgtgcagatcgacccgaatgaattgtttccctatctccttgtcaacattggatctggtgttagtatgattaaggtaaaattgctcttccttctccccttttctcttgattgtcacaactttggttcttttctcggaaaggagatagggggcactcgtgttagaccgaaccccactctaatttattgaaaaacctcacttttggcggaggaagaccgtggtaacaatgaaaaaaatcataaaaataatggcaaagaaaaaataaaataaaactcaacaggttctaactaactaaaggctggtgtaggttgatggagatggacaatttcagcgaattagtggtacaaatgttggtggcggcacttactggggcttgggaaggctattaacaaagtgcaaaaggttttaattatattcaaaatttacacgtccttaatattctactgttctcatgttagtgtcttatgctaatttaactttcttccagttttgatgaattgttagaactgagtcaacgtggagataataggacaatagatatgcttgttggggacatttatggggggatggattactcaaaggtaatctctttttccatatctgcttgctgttagaaaacacttggaaatgcataaactggtggactttttgatatgctataccggcctgaattgtttgcttctttaaatcattgggatgaataggcatcaattaaccataatatcttattgcagattggtctctctgcctcaaccattgcttctagttttggcaaagctatttccgaaaataaggagcttgatgactacagacctgaagatatttccctttctcttttaaggatgatttcctacaatattggacaggtaacttgagcattgacgaagtcgtgttatgctgcatcacaaaagctttaatcatgctatcatgaagtatctcaaataataccaatgtttattgaagatctttcatcatgttttgttggtacaattgtttatacttcctacattttgtgtcatagttttgtatttggtcaaaattatggtgtattcctactcagtcatcttcttgtctaagaaccaattaactaatccaatagatgggctgaatgatactaggtctgtctgataatcctttctgatttacagatagcatatttgaatgctctgagatttggtcttaagcgcatattttttggaggatttttcataaggggtcatgcttataccatggataccatctcgtttgcagttcagttctggtgagtattacattatttagattgtatcatctagctatttctccttttctctaggccaatgacatctgatgtttttgttcatttacgtactatcacacatttttatatttaagttttatttatttgttaggtctcagggtgaggcacaagccatgttcttaagacatgaagggtttcttggagcattaggtgcatttatgagctatgaaaagcatggccttgacgacttgatggttcatcagttagttgaaaggttcccaatgggtgcaccatatactggaggaaatattcacggtcctccccttggggatttaaatgagaaggcaagtacagtttgcaaacctaccctgatccctcttgtcaaatttttgcttgaccatgttactaacttgaagggggaaattattttatcctgcatttctgtgaattagtacaaggactaaatatacaagggagttaactgaaccaaagacaaatgtacaaaaatatacaggacctactcacataaacaaatgtgcaaataaccagccctgttaattgtcaaatcttctgaactcactcaatcgggtgcaaagatgttatgtattctcatatataggatgagtttgtccaaagggtatatatcatgcattttagtgtaagatttactgtatataagggggcagttagcataggtggagaggtgcgccatagttccaaactcaaattctgcacttagtcagtttggtaatattcaattgtggaatcttttgtgtactagatacgtgacagatttagattcttgaaacaaacggctagaaatacatctgctaacaagaagttgtactaaagaccgatctagtttatatcctgcatttgttcaatttggctgaaggttcagcaatca

SEQ ID NO: 22687 - DNA, 1976 bp, Cannabis sativa
ataatataatgagtatggtaaacaactagtggtcatatataaaccatgaatttatatttattaataaaatttaatattacatctcacatatatttaaataaatattattttaaacattatcaacatgctaaataacaatacttcatataaatatatataagagtaactatatgtttgagatgtgcattattaattatttcgctttaataaaaatagatgaataataattttttcatcatttattacacggccagtgatttgcacttacgaattctagtactggtagttaactaaagtgttggagatcaaagaaaaaaaaataaaaaaagaaagcctaattatctagcaaactacctctaaattagataatcatatgcatgcacaacgattagatcgatctccaacttatctcaaagctaattaaggaaagaactaaaatataatatattattaaacattggcctgaagattaaacatgttcatccactccaaattgagagacccttcatttgaaaagtcaaagaaatcatcaacatcaaaatgggtactagtagtagccatgtttgaattatgatctttatcgctgattagaactttgtcggacgatgatgttttgttttctttgactaataattgtgtatgaaccttctcatcatcatacttggtcatcacttttggtcttgtagtattattatttggagtagtagtagtctccatttgtttcttcttcttcttcttcttctctttctggctcattttcttgcacaaatgagaattccagtaattcttgatctcattatctgttcgaccaggcaatcgtcccgctattaacgaccacctagttaattaattatacatcgtaccaaatcatcaaaccaaccttaattagttatctgtaccgtacgtatatatatagtacatatatataatatatgtataagtagagtttgcactaaaatatgaatagtgcctaaagtaaaagagtttaatcattattgtagtgacacaatctcctaaaggtcttgaaagttccaaattaacttattggaccctttataatttcaatattttttaaaaattaaaatgtacatgtgaagtttggaaattaatcccagcccattgaactccttattacattatttattattttatgtataacaaagtacatgtaagagtagaatatactatatatatattatatatagtaacctgttgcctaaaagtttgtgcagcctaaggattaaatcctcttcttgatcagttatatttcctctcttaatgttgggcctgagataattcaaccatctcatcctgcaactcttaccacatcgattgaggccttcaaattaagaggtaaacaaaataataataactgatcagtaattaatttgaagtacttaattataatacaaattaatatatatatatatatatgtatatatacctgctatggctgcaacagtcttccacttttgtgcaccatgatgtgaaattacctcagcaagtttttgatcttcctctgcggtccatgctcccctgttgaatttgaaattgaaattgttttcttcttcaattggcttcgaaatcgactgggaactagaacccatattcactttctcttggactaaattcatgaaaaaaattattactcaagagagagaatttcttaatttattatataatattatttggtggagaggattagttagtgtgaggaattaactacgatcaactacctctgtgatcataattgcgggagggctgctttgaaagcaaaaagacatgaatgatgagaaagagagagagagagagagagaaattgatgattgagaaataaggagagatatcattgccataaaataaatttgtacaattgttaggatatttttagtatttaatttaggttaattttagcacatttttcggtttaatttaaattatggttggagcatttttacgcttttatcttttagttt

SEQ ID NO: 22688 - DNA, 1677 bp, Cannabis sativa
  modified_base (1072)..(1079): a, c, t, g, unknown or other
ttacacgacctgagtctgtatttaaggcttttttgatgataataatgattatatatatataagagatttatgctaatttagttagactgatctcatggttcaacgctttcagactttcagtggaagacagatcatgtattaaggataccacttttcttaattattaatatgtatgcatgtgcaagattagatatcttaattatatattttaaggttatgatttataatgaaatttccttccctatatatgcatagtagcggccaagctgtgtgaacccaatcgtatattctttctatatcatttatgttcatatatataaattaatattatccagttcatacaatagagttatgtcactcatgaagtcatcatcaactatattctcattacttaatttatgaataaatgaaacctttatttctaaataatatataataaagaaaaaagattcctttaaaaatatatagtaataataataaagttaaaacgtgcatggtgcatcttaataggaattatatttaatttaattagtcgtacactagtttttatagtttaaggttaagtgaatggtaggtacgtagaaagtgttatattattagtttaaactaaataataatactttattttttgtgttttaggaaagtagtttatattatcctattccttctcttatttttatgcatattttgtagcactcttgctcagtcttcatacattttctatctttatcttttaaattagtacattaatttttttttttcattcaaaaaaaaaaaaaaaaaaaatagaaaacagtaaagttaaaatataggaaactaataagaactgtaattattaatctaaaaattgtaaatctaatgtaattttctaaactcatcatgtttaaccaaatatacagaacattaaaagaatatttcaatactatatacatagaataaaaaattaggcttgttctctgaactaaattatgctcgctgaacttttaaggtcgttaaaaatactcttgaactatcgagattgttggatttaaggatttttgtctaattttattcaattttactattttagtgnnnnnnnntgtactaaaccatgctccccaaacattgataactaccaaatcatatccctcaaaggacatctactaaatcatgtcccttgaactttcatccatgttagacttttttattaaaattggacaaaaattcttgaatccaacaatcttagtagtttacactacaaaaaactcatacttttagtgacaaccttttagtcacaacataaattgtttgtgactaaatgtcacttttagtcacaacaaaaagttacttatgagtaaaacattgtatttagctacaagttgtgactaatttagttttagtcacaacaaatattatgactaaaagtataattagtcacaacaaattataattttatgactaatacttttagtcatggaccttttatagtcacaacacaataatgataatatatttataattagtcacaatctttttatctttaaatttttttgtagtgtcagggagtatttttaatgatctatgatttgatacatgtcaaagtttaaagggtaaaaatgctgaaatttactcaaaccaacatgtactataaaacttcaaaaagttatgcgatcatcatcttaattaacatcgttgact

SEQ ID NO: 22689 - DNA, 5440 bp, Cannabis sativa
atttttataattgtgtattggaaaataaaataaaaaattttgtaaatttactacaaaattattttttatgctaaataataaatataatactatttttacatttcccaaatagaattatatgtcattttctattcttaataagtatttgttttttctttatttaatgctaactctaaggtggcatttagtattgtaatatcattgacttttctattaattcggtgaaatgaatgaataattgctattatacatactagtatgcctagtaagtatatattggccgttataatcggtcaaaagtcaaatcttattgttttggaatgttatgatagctttctaaataaataaattatttagtcaatgaagtcaaggatttgagtgagaaaaaaaaaatagaaacctaattaattaattcattgcaaaatttgtgaaaatgtaaccgataaaatataagtttatttgaggaagctaataggttaagagaggttggaggatgagaagttaaccttgaataagagaaatgcaaatctagcaccttctaagatgatgggccgtcattaggcataagtgggctaaattcgcctttagggctcactcattctagaaatccaaataaaaaaatatattttaaaaaacatacatatttttttaataatttttaaaaatattatttatctttatataataaaagctcaaaaatttgctcgcggtgcttgtttttggtctgatcgtctttttactgagaacaatgtttcttctgctcttcagtctattgtgatagcggatattgctatttaatgaattatttttgttcaaaaaaataaaataaaattaagagctcaaattttttttttttttacttatgacctaatatcgagttttatattttacgagttttatgagtaatacaaattaagtatgacataacaatatattcaaaatttcagcctcaaccacctcttagaagctatccattggaagccattggaccactttcttgcacaaaagatggtgtatatctttcaggtggagctctatctggaaatgcttatatatgggaggttggtataattaattaactagcacaacaaaaacacttataattataataagtatttttcatattgaaaatttctgataggtttgtagtggaaaactgcttaagacttggcgagcacatcatcgatctttgacatgtatgttgttttctgatgatgggtctcttttcgtttctggttcagaggatggcatcatatgtgtttggtctatgattaggtaatgattgacgattattataagtttcaattgctcttaattatttaattaaataaagtttaagaaagaaagaaagaaatcataactaaacaagtatatatatactattaataaaaagtttgctagatgtggaagatttaagctcaagttcaatattgcatttcactttggagcatagttcttcacctataacaggtctgtcaactacatcatcagtcagctcaagttcaggtttagtatcaagctccaaagatggcacatgcaaggtaataataaccaccattttttttcttattatcgtacgattttgttacagtcgtactattttaactattaaatatttatttaattaaaaaaaactaatttaatttttctatttaaatttatatatttttaattaaaactaagatatataataattagttattacgtgtgctttaataatatgtctcaatgggtttttgacacacttaacaaccaaaagtaagaatatatataaaatgtagattttaatgtaaagattaaaaaaaataaaagtaagaatttataaaagaaaaactaaaatgtaaatatgtatatttgtttgggtgtgtttttttgtaggtgtcagatttagtgttgggaaggatcacaagaactattatttatccacaatcgataactgagatagttgttcacccaactgggcagattctaatatgtggaactgtacatggaacaattttcatcaataacctccattttgaagatcaactagtagagctacaaggacacaagtaacacctcctaccctttagtttcaaatgcataaatattttatcaaagtctaagttagcctttagagatgttgcccccattagagatgctctagcctctaaggctatccatttctactgtgtgtgtgttttttttaagaatcaatactactctgatctgatcattattttcaaaaaaatactactctgatcattatttagttgcacaagttattggttcatgcagtggggcagtaactgcattaaccttcagtcaatcaagtttggtatctgcatctgaggattgcaccatctgcatatgggatatcactacatggaaaatcaaacaaaaattcaactaccataaaggtgaagaagatcaacagttaatgatatatgatcactctcctatattactaactactttcttactatatgctgtttatttaaagcaggagcagtaaccaacttggttgtaatacaccagtcttggctacttccaatggcgaataataaccgaaaatcgatgaactcatttcgggtttcatcagcactagacaagtatcctcagcatcagaaattttccaaggaaacaatcactcttattcccaactcatcatcatcatcatcatcaagttttcaaagcagaagtactgattcatgccaacaaatactcaaattgcagcaatcacaggttaatttagttttagctagctttgttgtgagttcatgttatgtttttttcttttaattttttatttttatttttggggattagaaagagttgacaccagaagcagcagcagcagccatgcaaatggaagtggaaaaatgtatgaagaataggatttgggcattgaagatgacaaagcatgttatggagatgaataggcatttacaatcacgtttacttgacttaatgcagattaggttcttaagctgtagagaaagaagaaatcataagctttttcttgatcagagtacttcttctaacaataacaatggatcaccatcacaagatcatgaccaccatcaataatcagagttatatatatgtataatttttggaacaaagattgtatatggtttattacttacatagtagcagccatgaatatgatggaaattaaggttcatttctgtgtttgttactagttacttcataattagtaatgaggcattttattttttataattactccagaaattaagacatttcatatgatcatttaccaaaataatgactttgattttacaaaaagctatctaaaatatcaacaataatatgtttacaaattaaactgttacatacgtatatgtggaaaagtgaaggaaatccgtgacttttgtgttatcaatcagagtaatatatacaagatacaagcataatggtaggctacaaattagctaactgattgctaaattaatgtaataaatattgattaactaaataaagatatatatatatatacaataataaaagaatatatgctaaatatattctaacacacccctcagttgaagcaagagactctcgtatgcttagattgtccctaaaatcattaaatagaatgtgtagaagcccttttgtaaaaatattagcactttggtaacaggatggcacatgaagcacacagacttcgccacgagccactttctcacgaatgaaatgaatatccatctcaatgtatttggtctgttgatgttgaacaggatttttgaataagtataccgcacttacattgtcatagtaaactagagtagccttttgaatgggacaatgcaactctagaagcaagtttccgatccagtaggaatcataaataacattatccacacctttgtattctgcctctgcactgctagagaagagagttggctgctgtttggaaaaccaagagaccaaattatccccgaggaaaacacaatactcagaagtggaacgacgagtgtcaggacacccaccccaatcagcatctgtataagagattagtctatcaattgtggatttgtacaaatgcaaatcgtgggataaataccctgaaagtagcgtatgataagcttgagagcactcatatgctaatttgttggagcatgcatatgaagacaaatttattgcacgtcataagatatatcaggcccagtgaaagtaaaatattgaagagctcctggaagactacgatatttagttggattatcaaaaggagcattgctagtggcactaagtttggacatagtgtcaacagaaataggacatgagctgtagttagacatgcataagatatatcaggcccagtgaaagtaaaatattgaagagtttctggaagactacgatatttagttggatcatcaaaaggagcattgctagtggcactaagtttggacttagtgtcaacagaagtaggacatgagctgtaattagacatgcataagatatatcaggcccagtgaaagttaaatattgaagagctcctggaagactacggtatttagttggaccatcaaaaggagcatcaccagtggcactaagtttggacttagtgtcaacagaagtaggacatgaactgtagttagacatgtcgacactttcaataatttttgcaacatattgtttttgatataaaaatagaccatgggtatgacgagtaacaacaatactcgaaaagaaactcaaaggacctaagtccttcatagcaaacccaaaaccgaacagaagcataaaatgcttaggaaggtgatcagatgaagccgtaagtataatgtcatctacatacaacagaatataagcagtgttagtaccatttttgtaaataaataaagagtgattggacttactatgagagaatccaatggtagcaataaaatcaacaaacctttgataccatgcgcaaagagcctgtttcaaactatataaagatttttttaagaggcaaacatgatttggatgattttagtctcaaaaattcatggattgatgcatataaactgtttcattaagatgaccatgtaaaaaaatatttttggcatccatttaatggatagaccaagatttagagacaataatactgagaactgctcttatgatagcaggtttaaccacggggctaaacctctcatcacaatcaactccttgctcttgtagtttctgtcacctacaaaacgagccttataatgctcaaaaaaaccatcaaaattatatttatagcacaaaatccacatagaacgaataatattcacatctcctggcctaggcagtaatactcaagtcttattatcaattaaagcaataaattcatccaacattgcatgattccaatttgagtcacgacctgcactaacatgattttttagaataggaaaaatgtccttagtggtggttgcatgacaattggtagagtacttagaatttg

SEQ ID NO: 22690 - DNA, 6808 bp, Cannabis sativa
  modified_base (6040)..(6070): a, c, t, g, unknown or other
taataattgccgtgtaacagtaaaaaagaaataaaatagaaaatatcagtacagggtgtaaatttccctaagaaaatgcgctttctgtcctattcagagttgggaacttacacaaataatagagattattttacaaatacacaaaaacaacaaaaaaattacaaaaatacggttttacggaatttttaatattttttgcagttttaagattttatttacgtaaaatatgatcttttagtgtatttttatgttgtattcttgttattttgttgctgattttttgttatttgtttattattttttaagttattttaatgttattttttcattattttcatgtggtattcttgttattttcttatatttttataaaataccgtaaaaatatttaaaaaaatattgaaggtgaaaatgtaaaaaaaaaaataacaaaaataaatgttttatgtaattatcctaataataaataaagaggaaattacactctttgtcgatttttaaaactttgttagaaaaatatggcaccattaagtttggtcattccccacctactccatctaccaactttgttgaccatcttcggtgatcggtgaactgcacatttggcgaagggatttgtctcacctgaagccaacgccgttagccaccactatgagagatgttgtctccctcgaagttggcgatttacaatattgagcatcaatagagatagaataattcctaccattattcttacgtttgttgaatccatgctctcggtatataaatataattatatgtatattaattgctttttatatattatatacaaaacataattattgatataggggaattttagtataagttgcttatttaaacaaattgaactaatcacaagcttaagaaaatggagtgtgcataaattttatgaaaccagaacaggagattattttattatttaattgatttatttaatttttttctactaactatttaattagatgcttcattctaccgttaaaatcaatccaaatcttcccctccttgtaattgatcagcaaacacatatatgtaatatgcttatattgggagaaccagataaaaaaaaaaaagacttttaagagaataagaaaatgcaaaaactcaactcaaagaaagtgaggcttagaggtatagaattatagtgggataagccattacataaatttgtaacacaaaggggaccacacaaaacttttacacaaaagggctaaaaatttataacagaaaaaggaaatgtgccttaggcacagttgtacaagagcagcaataacaggggatacaagaaaaggattaggaagttaaaacagagttaatcaaagatcatagtttcttaacaccacccctcaagcgagaaggggatttgtaaccctgagcttgtcaactaaatactgtaattgtgaatgagatagatccttttgaattagggtacatatcgaatatttgttttcttctatagaactctatcacgaacaaaatgaatgtccaactctatgtgtttggtacgagcatggtagacaggattagaggctagagcactagcactggtgttgttacaccaaatgactggtattgaaggaggagtgaactacatttcttggagaagagattcaagccatatgatttcagcagaaacctaagcaagagctctatactctgactcagtacttgatcgtgacacaactatttatttcttggactgccaagacacaagagtttcaccaaagtaaacacaataacctcctatggatttttgatcatttagacaataagcccattcagcatctgagtatcccataagactcagattgtcacactgtttgatgtgaagaccatgatgaagagtgccttttagatatctcaaaacacgtttagcagcattttattatggggcatttgaggaactgacttagcttgttaaccaaaaaagttatgtcaggccttgtatgagcgaggtattgcattgcccctataagaattttataggttgttggtttgtcgaggacttgaccatctgttagatacaatggcttttcagcagtcattggtgtgggacaaaagcccatagagagatttctccaacttacagacataatctggtctgtctttgtccacaaacccctgtggttgaatcatgtacacaacatcttctaatttttcatttggaaaggcattgttaatgtcaagttgtctcactgtccacccctttgagattgctacatatagaacaactctgattgttgaaggtttagtaacagtgctaaaagtttcattaaagtttagaccaggtatttcgtgaaaactcttagcaactagccttgctttaagcctctggagtgacccatatgcattgtatttctctttaaagacccatttgtttccaaccatattgtattctggtgaaggtttggcaaggacccaagtcttgttttttatgagagcataaaactcttcactcatttctttattccagccactgtgttgaagtgcttcaagggcagaattgggttctctattactaaaattctactgagcttgaccaacataaacctttggcttgaaaactccaactttggatcgagttatcataggatgtccaccctgaaccgatacaagttttgtgttttgagttgcaaaaatagcctatgaagatgtgggaacaccttgctgtgttggtcagtgatgtcatggtcagtgaaatcaagatcaataaagagattgtgagtgagatctacctgacttttgtttatagcagtacctggtgatacggcaggttcacttgtgtcatgatttgcatcagtttgagagtgagtttatagttgagcagtgttttgacactgagtgacagtatttttagtggtcggtgactcattttctggtcagaaaacatgtagataagtccagtgtaaggggtttgaacttcaactgctgattgttttttgtgagtgtttaagaaaccaattttgtaggagaactctcctttattaaagataacatcctttgagatatatagtctccctgttgaacttaggcacttatagcctttgtgacactcactatagccaagattgacacacttggtagagtgaaagtagaacttatgattctgatatggcctaagacatggaaagcttgctaccccaaaaacttttaagaatttgtaatctagttttttagaatgaacaatcttaaaaggtgttttaccactcaaaataggtgtaggcagtctattaatgagatagactacagtttgaaaggtatccacctaatacttgagaggtaaacttgcttgagctaatagagttagtcccatttctattatatgtatgtgccttctctgagcacacccattttgttcagatgtgtgaggacagggtgagtgaataagatgccattttcttgaaccagatcactaaaagactagtattcaccaccccagccagtgtgaagcctcttcattttcctattaaactagttttcaactaatgttttgaagtgagcaacggaatttagtgcatcaaattttgctttaaaagggtaaagccatgtgtacctactatacttatcaataaaatgaatatagtatcttaaatttgtgtttgacattatgggtgttgatccccaaatgtcaatgtgactaatatctaacatccatttggctctagagttagataatttgaaaggaagagaatgggattttccaaattgacatgcttcacaaaataactattttcattcattgaagtttttacatgtgcattggatatttgatttaagactccagaagaagggtggccaagtttcctgtgccacaaatccttctgactggtacaagattgactaaaagataaattgacattagttatagcagaaaagggactcaagacttgactgaactttggagaatctttactgaattgagagaattttgttgaagcagaataggcagatggattaatctgtgttgaatggagaggtgtcttctcaagctgatacaagccatctctaagcttccattgcaacaccactttctttgttgctaggtccttcacaagacaaaaattagagtagaattcagcatatacttttattatcagatgtgagtctagatacactgatcaacttctttgtaatttgaggaacatgaagcatatcttttaacaataaatgattattactgttggtatgaggcaaaccagaaccagtatgagaaatgatgagtttattaccatttccaactgtcgatttctctttacttccatagttggttatgtgagtcatattcccaatctttgaagttatgtgattactagcaccactgtgtgcatactaaccttcatgacccaccacatctggagtagcaatgaaagctacagggtctttcttctccttattctgatctccaccaagtgttgttcccttataattctcatcatacctattataacaattggcagctgtgtgtccatatctcccacagacttggtaagtgggtttggagtttctacctcctctaccatttccacaactagattctcctttggaatttgccctagatccatgatttcctcttccatagtctcttcctgagttgtgattactgttgggattttgtttgttggcaaagtgtgcagatggtccaaatcctgaaaaacctaaactggaggcattagcacatttgttgtgaccacttgaagtctcccaagtttgctatcaaagctgagaagaacttcttgaagctcctgtcagttgattgattctctgactttaagaatgtaagttatagggagatattctagctcaagacctcgaataacattagaaacaaagtgatgtttaggataaggatcccctgctaaggcaagcatgtctgcccaagatctcttctaacgaagataatctgccattgatgtgctccttttgcaaacagtttgaagattgtctctgagttcatccattctagcttttgaataagctccaaacaacttttccaaggcaaaacataagcctcttgctgagttacaccccattacttttgttgctatggattctgtcagtgatccataaagccaacccatgagaagttggtcacaaatgatccattgtttatactcagggttcacacaaactccaaaacctagtagcccatcaccaaatgcaactccagctagtataaactcttgtggagcatgtttcagtccactaatgtaccatccaatctatagcctctgataatggttgtggccattgttttccagagtgtatagttgttgcgatcgagtttgaatgcaaagggttgtgagagagtattaccaaacggagtatgagcaatacctacttgtccagaatattctttttcatagctattttcaaaatgcctagagagaaaaaggaaattatttttctctcaagttttcttgctcatgtgttgagaaatcaacaagaacacattatacactttatcctaatagcccacactgtttcttgtgtgtggtggatcgatttggaagacattggtgtgattttaaattgtattatctagattaaggatacaacatacgagaagttttgagaatatcctgatagtcatcaacaggtatatattttaaacttgttattttattgttttgatttaatgtacacacatctggagatctaatgggatatggtacaaagataattaaataatacgaaatctaatttaagtatgggatattggcggcaaaattaccagaactatacgatttgtgacacttaatcccataaattaattttttgacgacaaaactacctaaattgcacttatgttttggtctttagtctttacccttctatccaaaatgctctattaagtaccatggtggacatgctacaatgtattcctgatgtacacgtgacaaatatttagtggtccgcataagattaataatttaaatattataaaaaatatttaaattttaaaaataaaataaactacaaattacaaattttcccaatcttttcttcttcttcttcttcnnnnnnnnnnnnnnnnnnnnnnnnnnnnnnntcttcttcttcttcttctctttaaaaccatcaagatgaccaaatagttccttcttacctcttcttcttccattatcacccccacaaccatcattatcactaccactgccaccataaccacacccaccactatacccacaagaaatacatcaaaccaatagaaattaaatcataataaaaaaaccttaaataaccacccaggattcatagttgggtaaggtctgatttttttgtaaaaaaaaacaaataaccataaaaattaggaaagtggaaatataaaccaatagttaatttctaattttatacctaaaattttgacaaaaaaaacttataccaaaaaaaattagtggctttgagccaatgagaccactggtggtttggagctgagatgcttaccggagcaccaccgtgcgtggtggcagtcactgattgaaagggccaatcgggaatgagaccaatgggatcttgaagttttgatgggaaaagctcaaaaatgaatttcgtttggttcattgagacctagaggtggctaaattggagtcgtggagattcaactccaatgagctctaccatgaagagagagatagcgagaagagttcgggagtgatagggaatgaaaccatctgatcttcgggtttcgaggttcatgagagcctgtggtggtaggtgctctgatggtgtctcatcgttgttgtcgaagatggcctatctcaacaaaaggggagagagagagagagag

SEQ ID NO: 22691 - DNA, 1730 bp, Cannabis sativa
cataattaaacatgattaacggctaatttccaaattaaactaagcggtctttacaaaagttgtgcttaagttcttgaaagaaaatatttttttttcccgtttcagttcaccatgtgctatcattagtgataactgtacacacttttgtaataggccttttgagcatttaatgaaacaatatattattacacacaaatcgctacaccttatcacccacaaactagtggtcaagttgaaatatcaaataggaagattaagtacatcctagagaaaactatcaatttaactaggaaagattgatccctaagactcattgatgcattatgggcatatcgcactacatataaaacacacattgggatgtcaccctatagacttgtgtatggaaaagcatgtcacttacctgttgagttagaacatagagcctactgggccatcaaacagttaaatttttctatagacaaagcatgtgagaagaggaagcttcaactgaatgaattagaagaaatacagaatgatgcatatgattattcaaaaaagtacaaggatcgtatgaagctctaccatgataaaaataatttgtgagaagacttctctcaaggtcagaaagtccttttgtacaattcccgtttgcatctattctcaagtaagttgcgttctaaatggactggtccatacattgcgcgcactgtttttccacatggagcaattgaaacaatggtattattttcaaagttaatggacaaaaattaaaaccatttttagaattaatatctgctgaagtggaagagatccttcttgaggatcctgtttactaaggtcattgatctctttcatgtactcttggtaaggtatttttatttagtatttatgttttactataagtatgtattttatttttggttactttcgttccctctcttcaaatgctccaaggtgaggtatgaccattctaaactctaaactcttgtacttttctacgtttctctctatttttgtgatttcttacattgacgacaatgcatgaattaagtttgggggtggtgagttttcttggtgttttttcttcactttatcatttatttaagggggtagaatagcctaatttttttttagcttatgtgttttttttttctttttctcttagtttaaaaaaagtgtttttaatttttcttttgctcgagaactaacaaaatgttaagtttgcgggtaggggtgttcgcggttctagtggtgtggtttttgaacattttttcaaaccaacccatacatgtggtttttttaatttcccaaaccacacccgccccgtgaaactaaaaaaccacaaaaactgcaccgcaaaaaatggtgtggtgcggtgcgatttttgcgatttggactatcactaaataattaaactatcgtaaatacaacaaagcttgagcaacacttgtcaaaaataccataaggcttgaaaataaatctgaaaaaaaaaacgtttcaagtttacacaatacaataattagtgggcttaggttgggccttaacatattgaacctaaataaatataaaaaaaatagtatttttatagtattcggtgcgatacagtttgaaccgcatattaacaattgaaaattgcaaaccacacctataatgacggtatttcataatatggattagtaaaggcaattagcactaattattgacatttttataattattagtggatttaattatttttgggtcccatt

SEQ ID NO: 22692 - DNA, 2574 bp, Cannabis sativa
tgcctttactaatccaaattactaaagcggtcattacacaattggtctctacctggtttagaccgtcttcggctgatgccattttgaagattcctcttccctcttcccaacctttggaccatctttgttggaaagtcaatccttcggggcggttttctctcaaaagtgcctattgggctctaaataactctcgctttgaatataaggatgatgtttgtaagcgtatttggaagacgcgtattcacgagagattgaaattgttcctttggaggctagctcaagatgttctccctttcggatctaaactggcttccatttttggccccaacattgggcggtgcatgctttgtggcttaggggagatggatgttgtttctcactttgtctcggggtgtgatgttactagatctctttggttctcctccctgtggggtttaagaattcagagatttaatttggtgggaagtagagaggtggtttctttgctcttagaaccaaggtttctaaacgattgtggtggtaagattttgaatgagttttttctttatggtgcgattttgtatcataaattgtggaatgttaggaatgatattttccataacaaaggggtgctgagtttggcggaggtgcggaaggcaatcgatttgagttttgcggagcacaaacctctcttgaatgttggctgggacattgaaagcaaccaaaggggtatttgtgcagttcggtggggcttacctcgacctgctagaatgcgatgctatgtggattttgcatctgcgagagacgatggcgcggttgcagctgtttcctatgatgttgcaggtgatatctttgttgcggttgcttctaaggtgcgagttcattcggtgttgcagggtgagctcgaagccgtgcggtttgggctcaatatggctgcgttgctggaggtggatgtgggcactttcttttcggataactagaccttggttaaggctttggttgaggaaagttcccccctttggcacttgcatttttcttttgataatgttcttaggactgttggtattaggaatgtagctttttgttggatccctctgatgaataatacaacagcccatgctcttgctaggtggaatttgtctcataattgtaatggtttgcttaatttttgggaagtgagtccccgtgtgctcactaaacttttggttcctgtttaatgaagtttgtttctttaaaaaaaaaatgtcacgtttgtacataagtgaaattttgtataagagaaacataatataaagataaataaaatgaaatcatttacacatatgtggaccgtacttatttttatgaaatcatttgcttgaagttgtctaaaactatttcttggattttttttaattacatttttttataaaaaaatttaataactatatttatagaaaatataaatattttaaaagtttgtaataaaatgaaataaaataatttgaaagaaaaaattattaaaattccaaaaaataattttttgtcgttctcaaaattttttggttttttttttaatgaaaataatgtcaaacaaagatttatgtagtggattttagacttgtattattataacattatatagtgaatataatatcaatttatatatatataaatatatatatataaaggagaagtacaaagcggtgatatgacatttttaaaatcattttaaaattatttttctcttctcttttttattcttttaattttaaaattttttttataaaaaaaaacataaatctacaaattgatattatactattattttaataatttttctataaaaatataaaatattttttaaaaaaatcaattctaaaaaatctctatatatatatatatatatataaaagaaaggaatgaggcggtgacatagcactctaaaatctctgcaaaagtatttttctcttctctttttaattctctcgggaacaccgcaattcttttctacaccaccctttttatttatttttataaaaataatttttttaacaaagcaatttaaaatactatatataataaattttaaactttttaataaataattctaaataataattaataaaattgtgtatttaatttttaataaataaaattattaatattaatatgaaataagaaaatatatttataattttactatatattaaaattatatttttaagtaactatttattataaatactaaaaaaattaaattaggcgcgaagagtgactatattgcctaattattggataaggaagatattttaatgctcacatcaaatatgtaaccatgataattatattagctttagttattagattattattaattgattgtgattaatttaaaaattacttaaaataattaaaataattaataaattatctgtaatttgatactaacttaaatttattttatttattaatatatttattttcttcttaaatattaattaagattaattaagggaaaaaaacaggaaaatttcaaaaagggtaaaatattacaacaatactgtgggccggcccaatcaacatttgtatagcccagattgaaaatattacaaa

SEQ ID NO: 22693 - DNA, 1995 bp, Cannabis sativa
tataaatgtctaagctcaactggcagattgtacatatcaaggaatgtcattttcaatgaaaatgaattccctttcaaaacaggttttctcaatacacaccaaaatgaacaatctgtcaatgtcacaactcctaataattggttctccctgcctgttcttcagtcaaatgtagaaaatgatacacctgctgaaccatcgaattcatcttcatcttccttacctcaacctgatacaagctgtcaagaggctgctcctgtggaataaccagacaagtcaggtagttcaactccacaaactcatcttgatcttacaggacacgtgtatgtggatcttgactttgatactcagaacactgttgacttaaatactgctaattcccaaaataattcaccacagtctcaaacagaacaggttcaagaaaaagaagtcagcacagtaaggcccagccatcctatggtgacaagatctaaagcaggggtttttaaacccagggtctatatgagcaagtctcagtggattgaatatgagggagaaccagtatctgttgccgctgcactgaaacacaaaggatggtctaaagcaatgtctgatgagaatatagcacaaattaaaaataagacatggaagttggtaccaccatcatcaagctacaatgttgttggaaacaaatgggtgttcaaagagaagctaaatgctgatggatcacttcaaagactcaaagctcgcttggttgcaaaaggttttcaccaaagacccggtttgggttttggtgaaacttttagcccagttatcaaggctcctacaatccgaattgtcctaacaattgcagttacaaaaggttgggaggtgagacaacttgacatcaacaatgcctttttaaatggaaaacttgaagaggatgtctacatgtcacaacctgaaggatttgtggatcctgataaaccagattatgtgtgcaaacttgaaaaatccctttatggcctcaagcaggcaccaagagcttggtttgacaagcttaaaaacacattgatccaatggaattttcagcattcaaaagctgatacctcattctttgttttcagaacaaacaacttcatcattatggtgcttgtgtatgtcgatgacattattgtcacaggttataactcagccgagcttcaaaagttcatcacaacgctcagtcagactttctctcttaaagatcttggagacttgagttatttcttggggattgaagtttatagagacaacactgggatgtatctcactcaaggcaaatacattgcagagctacttaacaaatttaacatgctaaacttgaagccatgtccttctcctatggtaggaggaaagcctttgtggataaaagatggtgttgaacttgaaaatccgactcactatagaagcttgattggagctttacaataccttatctacacaagacctgacatagcttttgtgtcaacaagctaagtcagttcttaaaatgtccaacaacaactcactacagtgctgctaagaggattctaaggtatttgaaaggaactcaacactatggtctacatatcaaacacaatgacaacatgagtttgactgggcctgttgtcctaacgacaggaagtcggttggaggctactctgtttattttagtgacacactagtttcatggtcctcgaagaagcagtctgttgtatcgagatcaagcacagagtcagagtacagggctctagctcatgtgacagcagaaataatctagttggaatctctgttgaacgaaatcaagtttccactatcctcaacctccatagtttggtgtgacaatatgagtgcaagtgcacttgcctctaacccagtctatcacgcaaggacaaaacatatagagcttgacatccattttgtaagggatagagtgctgcagaagaagctttacattcaatatgttccctcttcagatcaagttgctgattgtttaacaaaggggctatcacactctcc

SEQ ID NO: 22694 - DNA, 4750 bp, Cannabis sativa
tgtaaggtcttaagtgctaagtacttgagaggcagatctttctttaatttctcatgcaagaactcgaattcgtggttcttaaagaacgtggtgagatctagagagattcttaaaaagggcgcttgtaagctgatcgctgatgggaaggagacgaacatatggactaatccgtgggttatccatggcacaaatttcttccctaagcctattacttctcagcctgcgaggcttaaagggtcgcagaacttattttggacaatggagagtggaatatccctaaacttcatgttctttttgatcaagcaacaattaatggtattttaaaaggatgtaagccttgtgctaatggtagggatagatgggtctaggccaaggagtcaaatggattattctctattaagtctgcctatctagtttaagctttggatcgagctcctttgtgctctgtctctctagccttgtggaacatactttggaactctaaagtattagagcgtcataaggttctctggtagagcatgatttctaatgcccttcccgtctgtgctattcttgccaaaagaatccatatcaaagatgtctctttccctctgtgtggggagggtgaggaaacattggaatacctgttcctgttctgtaactttgcgtcccatctgtggcatgcctctccttgggggattatgtaggttgttgagtctgaggcgagaatgtgggactgggtcaattttctttggaacctgaagtctagaggggttgtggtagataaactttttctctatgtttcaattgtggtggatacgatgtggaaggcttggaaccataagatacacaataattatttgagtaactttaaatagtgttttgactttattaccatctgttacgtagattatgtgtctgtcttgttttccttaccggaagttgtgattcctcaaaggtggaccccttctccagaagattggatcaaaatcaattgtgatgtgaaagttggttgcggttccatgtgcagagtggctttggcaaggaatcacacgagttctattttgtgggtgaccactaacaagcttaactttgaggatctcctaattggagaagctgcgacttgtcagtttaccatggagaaggtcgtgttattgaaacacttttttgttaattgagagtgactcaaagatagttatcaaggcggtgaatggaaccattttcaattggggtattggtaactatattcaccaatgtaatatgctttctaatttatttttgagttgtaatttttcgcttatttctagactttgtaattttgcggcctataatgtgattaagtgggctttcaccaacagtgtgtttggcatggttgacctgtcaaccatcccgagtaacattattagtaatgaccgtgaagtccagtgtattttatctataaataattttttccttaaaaaaaaatccatctggtgtaattttttatattcatcttattcgtacaagttatggccattgtcatagatcatataaatatatatatatatgaagagaagagaatttaacttgttaagtttttaatgtagaacatatatttatatgagtatatatatttttatactctaaaagcaattttcttctctaaagaatcaatttctttcaaatgcaatgtaattagaacaacacaatgtaattttagaattgatttctttaaaatatggatttagggttgtttacacacacatttatataaatattcctgaaaaacatgattaggtcgatcaatttttcaagatactcccaagctccatatttgaatgtgaaaattcaaatttcaaatcacattgtagttgatgggagagagtaattcgcatttataattgggtgagttcatattcaaggttagtttttacgattaaaagtaatttattttaaaaaaaaattgaaaatatttagtgaagtaagagaatattcggttaaaatttaacaaaaaaaatatcaaatgtaataaagatataaaatatgtttagcaggtatatcctatttatgccgtatattatgtttggtattaatttttatgtgcatataaatatataatattttaatataaattaaaatttaatatattattacataaaatataatataccacataatttaatataatataatacaaaataaaattcaataaagcataccaaacgaactctaatgtgtttttcattaaaaaaaatctcatattgtgtttctttatgagctaaaatcaaagcatacaacacttcaaaaagttaaaaaaaaaatgtatgaaagattagatgttttttttggtcaaattttaggaggttttattaaaaatatttgtataaacaatacttattattatcataattaattagtgtgtcgtcttgctttaggtaaagttattaagtgtatgtagtatggtgtggtgtatcaatatctttaatataggtgtatttataaaatattcaatctaatttaatttgcatgatctaatctaatctaattcacaaagtgaggatatccgtacttgtgcggattgaattaattggatgttgattgacatgtaaaagtaaccaatctattcaaattcacacatatttaaatatattttaatatatatataatattttaatataaaaaaaataatttaaaaatctaatatgtaatataaatatattttaaatttttatagatcaaatgtatattttatctttacatgtataatttcaaacaaaattaaactattctttttgtatacaatttttattttttcttctttgagtcagttatttattattaaagatataaaacaaaaataattttttttttgttattagttatgtgaaaatattaaataattcaatatttaaaagtaacaaatttaaaattatcgatctaatctacactgttatattattgtgtggattagatttgaattactgtacgaattgaattgaatctaaaatataaaattcgaacttagtataaattggatgcagtataaataaaatattagtaattagatttaatcaacattcctaatccaaatataaggtcaaaggtcaaaataaaaggtaaagttccaccctaaaattcaaatagggaacataaaccaaatttaacaaaggaaaacaattaatatttaagtagtacttgaagataaatccaaaaagttatggtacaaaatacaatgtcaaagacaaaatcactgtttattctaatagtgatgatgatagtcattaatactaatttgattttaataggtacatttcataaaaaaaaaaaaaaaaccttttggtgtgatttcctttaaaaataagagaaacatctcacgtaaatatgattatataattctttttcactgaataaatataaatattatagaaaggttataagtacaaacctcataccaatcctataatcctattcatgagagtaatgtaagcccaaaattttccaacccctaataatgagtatttattatagttaagggaagatgagttaggaataggagtaggaatatcttaaaagcaatgtgaaagtacaaaattatttaaagggatttattcaataaagacaaataatatatgagctacacattattttgggacattcatttatattaagccatttccacagctagacatattgttaactgatcggtcaaatcaaagatgataaatgcacatttctactgtttaaatatttatttgaaaatcaatgaacttaattagcgatatttattggaccacatttaatgtttttaaacttattctgatctaattatatattggatgttagattttacaattccatccgatccaattaatttcagttatccaatcgatctaacatctattggatgttgaattggatcggttctatccaatgaatatatttcatatatatttattagtttaatttgagtttattcaatatgttaacttagtattttttttttatcggatcgtatccatctaatatttaagtccagtatatattgaattaaattgaatccatccaatccaagaaaaaaaaagagtaaaaaattaatgttaatttttatatatacatatatattttacatataacaatataaaatctaattactcatccaaactaaataaaaatactaattagcttgattggatgttagatgtattggatttttagacatctcatctattagtaccaaaagtggtgtgttttacatttatcaacttgcaagtgcacaaatctttattgttgtgtagagattgtaaaaaacgaggtcaaacccatgggaattgtgtgagattgaagaaaatatttacttattctaagctattaaaaatctaatctagtttcgaaaattttgagatttttggtaacaaaataaaataaagtgttttaacaataaaaatgacaataacaaatatttttcagtgatatttggggatattattaaaggttcagaattcacttgagtaatataaaaatatttatgttcatattgattctcataatttaatcagtaaccaaaccaattattttctgaagaaaaactaaattttccttgctttaaaattataacttctaagcattaaatgtgaaacaatttaatgtaaatacaaaaaatcaaaaaatatagaactaaacattaataatttttaaccatcaaaaatacgtgatattaaatatgaaagaaattattttaagaagccaaaagcataagcatatattgtactgagaatcaaaataaaaataaata

SEQ ID NO: 22695 - DNA, 3529 bp, Cannabis sativa
  modified_base (2508)..(2520): a, c, t, g, unknown or other
  modified_base (3166)..(3170): a, c, t, g, unknown or other
  modified_base (3212)..(3212): a, c, t, g, unknown or other
  modified_base (3281)..(3297): a, c, t, g, unknown or other
  modified_base (3486)..(3486): a, c, t, g, unknown or other
attattattattattattatcggtaaaggctgataaaggcgtcgtattttgggagctgtaagtgttgtgcagtagactaaagagcattgatatgtaagagtggttgagaaaggaaccaagatcttctgttaaaagattgtgtttcatagtgtattaaaccaatttaattgtgatacatcaattaatttgagcattttaaaagaaaaaaaactgtatttatagatggttaaattttttaataaatgatataaattggtcgtgtcaaacttagactggtttaacaagtatgactattaagcacatgctaaattttttgataaatgctacatttttatttattataataccacaaattattataatttattcacttttactaaattttatagtctttatttaccatattactattatttagcatacttaagaaaactactataataatttagcacatgctaaaatttttgataaatgctacatttttctttattataataccacaaattattatagtttattgacttttactaaactttatagtctttatttaccatattactattatttaaataataaaagaaaaaaagtaataacttttgtatattcttaataaagcataaaatgatatcaacataattgattgtttttttttatttaacatcttatctatattacaaactttttttttttgatgtataatctttcattagagatgatctaagatgggccgtaccttttttcttaaaattatgtaacaactttgggtagtgtgacaaaatgaggtaaagcccatggacacctatagtgtgtggctgaggcctagcgaagacatgagtatagcgcaatagcacaacccaatagctctaaccttgttgtctacctatttgttcatagcagtctttggtcagcatatgagatagtaagtgctattaaaatcactacacacttcattacttttcaagaatttctgaggtaaaatgtagaatacaatatgaatttctagaaattttctaaatatattttgttattatagaaattaaacaaattaactagagaagtctaggacttataaagtcttggcaaaattagtaaataattctagatatttgaatgtgcatgtttaccatagacttttgctagtataaataggataacatggataaccaaaggttgtgtaaagaagaaccactcactataaaccacttagggatgcacacggatcggattttcgggttttcgagtagtcaggttcgggtttttggattttggatcttggaaatgcataaccgaacccggttttcaggtaaatcgggtatggcgggtttcgggtcaggtatgcacgagttgggcgtggtcgggttcggatgttactaggctgagctcaaatcatgaattttaatttttaaaaatgccatatttttttttatttttatcacattggcttttgggttcccgagaaaaggctcaacaaccaaatttcatttatcacattgattttttatttttatcacattggcttttgtgtttccaagaaaagtaggtggtgcctagtacacttgcctcataatattggagtacttcgtaaatgccactattgtcattgtacatgattcatgctcttcaggacatacttttattgttttgaaaaactattcatctactgtagccacctactaggtattgaatgaactgtaaaaagtaaggtgtataaactaaaaattaattaaaaaaaatatttttttgctgtaatttcgggtcacgggttagaacccgactaaaaaaaactactttttaatatccgaacctgaaacccgtgtagggtgatttcgacccgacctgaccacacgggttttaatatttttcggtttttttggcagcaggtcgggacgggtggccgagtttctcgggtctaaatgttcagccctaaaaccacttagtactttactacttcctataacatactaattaatctacactcccattttttttttaattatacaaaacacaaatataacttttttaattttccccatccaaaccatctatcatcagcttatcaacagtacctatacactaccactactattcagcataacaactatatacctctatattatcatctaactcatcgtaaattaaatgtaaattataactattttatttttatacaaattaacaaaccattaatggtattagagctccattcgattgtattactaggagtaatctttttttttttctcataaccatgagttttgactccaatcgctcttaattccttacctcttctaatttttaatggagaatactataattcttgatccattatactaacgacttattttttatcacaaaaactatgtaaaattattgaagagagattcactattccgaaagacattacctccatttcggaagattaaaagaaagcattggaggataaccaacaaaaagagtttccacccattatacttcatacaacaagtcattgttggaacttattttacnnnnnnnnnnnnntactaacatgtatgtttgattaacactataaatatgaactctctaaaacaatgaaataaactcatataaagtttagagaaccttacattgatgcagcagaataatatgactccttccgctcagatctctaacacttgttattttctatcatagagtaataacaagatctgagcttggatctccttctcttcttcagtttggttaaccactgtcttcagcactatgattgagtacttgacttgttatgtgtaggcatggtactctatcactaaagacttgaagattgatgaaaaataataataaggattcgaaatcactatgaaagagtctctcatctactacttgtctgacagagttagaaaactaggtttagtttagttgagataggatgagttggatgagaatgagagcatcatgctccctttatagtatttcaactagggtttagaatttaattatatggattaaaaaagaacaaaataatgggggaaaatccattctagtggtcggccacttaatgggcctcactagttataattttaccactttattttaaccatttatcctttctttcaataatgtcatattttcttatttcaatctataaatatcaaaactatttatttaattaataattataattaannnnnaaataaaattgccatttattttatttattaattagacttaanaaagtctcttaattaacaaacaaatctcaaaactttttttcttaacaattaagccattgcttagtgaannnnnnnnnnnnnnnnntagtctaattttagaattatataagcagatctagaatttacaaagcaaatttcttaacttattaatttctccttgcttcacaatagattcagaattgtactctcaattatctagagtgctctatacgtaccaagatatagatacgttatgattatctattgttataatccaaatagtcaaagatcctcnatagatgatctacatcgagtaggataaatttaccgttttaccc

SEQ ID NO: 22696 - DNA, 2179 bp, Cannabis sativa
tattaacacaatttcttgtagtgatagatttgaatttgaatttttcaataaaaaaaaactaaaaaagtaatacagtaaaaccttgtcatgttcatctttactagagccacgcacatagaaatattgttctagtttttaagtttatatatgcgtagttgcattgtagttgcattaacattttactagcactctgaaactagacatatcaatgattacaaattgatagtgatacaataatttttatgatatttgcaggtgtttcatatcaacaatccaacacaaagttatttaaaaaaattataacatggttagttttattaatatattcatttggtcgttataaagttagtttacagaattctaaccattgtttctccatataatattattaaggtacaattgattattgatcagtggcaaaaaaaatactgacagaatttttcttgacgattctcatttaaattttctatttctagttgcatttaagttgtattttagtcgaataatagttgtgttagtacaatattattattttaaaaaataggactccaaattggcaatacacaactcttacagagaaaacacaattgcagtaagttttatatgtattacatagggacattattagttattttaaggtttaatattaattgtctcacaaaaaatataactgttgcattaaagtttcaggataattatcacatagtcgacttacaatgcttaaattttaaaactgtcaagaaaaagacgcaattttatttctcatattttataatggacagtttggtcaaagagcgaattatgtacattacaaagctactggccaatacatttcaataaattgcaaatacgaagaactattacggaagctaaaacaggagctggaatgcaatcaaaataaatactcaactacaattgaaatacaaagtgaaagaaggatgctaaccattgaggataaatgacgatccaagcctattcttctacatacaactaaaattgaaagaatcttacttcacaaggtatccattgtgagtgaacatggtcaacaacacaacaacaaccaacaacaccttcttctttgcaatgagcaactcattagttgcacaacaattattttaatgttgtatgtcatatccaaaatattaactgcagaaacataaagcattttaacatcatatttgacacattaatgtgaagttttttgaaaacttttcttattacattgattattctgttgaatcttcaaaagtttcttaatactaaaatagtgcaaattttaaggcccaagataaatgttaacatggggaaccaaatgaggaaccttatgcaaagcattccagccaactacaccacacactcggtggtacgattaattagtcatttaaataataaaaaataataaatacttttgtattaaaaaaaacttataatcctaagagatatttaaaaatagaataaatatgagtttaccctcctaaagaaactagtaataagaaaagttagggtaatgttagggaaaaatgataaagaaactagaaagaaacattcgaactctcatcaacttggttcttccctttcttaactttagggagggaaatgttttcagcaacattaacctttgatttcttcttaacaggacggcgatcactttttttggtaggcggagcaaagtcttaatcaacatcttcaacaatgaatcgtttgcctttagaatggaaaaaaagaagaaaaaaattggagaaaaaaaatatggtcaggtgataaaggaagacagttaagaaagatggacgaaatatttttttttattggatcaaaaatagttttgatcgtgagagatgttttcaaacaaaaagttataataaaaaatgaaatgaaactgaaaacaaaaatgatagaaaatgaggaaaagtagatagtgtgtgaatgtggtataataatattatgtatgtgtaagaggtattagtgtaaataaaataatacaaaatataaaaatgagtagccttgtaaaagcataagggtaatatttttgagtttttgtattttttatgtaaattttccttcttttaattttttttgaattcatataatttttttaatatatatatatatatataaatgggtattacccatgaataggtaaaattagaaaattttgagtttttatgcttaatttttctat

SEQ ID NO: 22697 - DNA, 2585 bp, Cannabis sativa
ccagctgtatcccaaatctgcataaatcaaaatggatttaacatttaacattttaagtaatagttatccccacttattcaaaaaaaaaaaaaatcattaaaataatgcttaatttataatgctcttctacattaaataattcttattcaacatatatcaaagatctgtaaatcaagcatacaagatctaatgacaatggtttaagagaacaaaaaccctgtgtgaagagataagaaaactaaaaaaaaaaaagaaaactaaatattcaagttttgttcatctggggcacagcagaatagcctaacttccttcaatttgctaaaagctttgataatcaattctaagcatcatagagacatagacaaggattcagcactaacaacaataaaaatagctaaacagaattacagatcaagattgctcaccaatctaaaacttaaaattgttcatcaagaatattcataaatgcatttcattataaaatttacttaaaataataaagtaaatttataagaagaaagagaccgacctgcagtgtgaacagtctgtcttcaaactgaacctccttcgtcagaaaatcagccccaattgtagccttgtactgattactaaacttacgattcacgtacctaaacatcaattaacaacaatcgattaccaaaacaacccttcaagtaacaaaatttaacaagaaaagtgtacgatctaggtttaagaaagtactgattcatcagcgatgtcttcccaaccctggcaaaagaatcatacaaaccatttgtcaataagatgatcaaccctccattatttcaaatcaaaacacaaaattcattctaaccaatatatgtataacgaaataaataaatgtgacgttcttcaattgtatagtttcctccattttcatggaaaccaaacggatatcattaagaaaaaaataaataaattacccgctgtcgccaaggatgatcacctttaggagcatacgccttcgagtagccatggatggaattaaattatatgaaaatcgaaacaaaaatgaccaaagaatgactttgacgttgggatcaaaagctactggagagaggaaattttccttgtgaaaccgtaatttgtcgaggaagaaggagctggttttggattttggtgccaagccgaagaaacgataacctgaaataataatttaaaggtttttttctataaatttctactctgttttcattttcaattttcgaaaatacgattttaaatattcaaaattagaaaaataccgttttctgaaacattgtaagaaaaagtaataaagtaaatttcatctatggtgtcttaaaacactaacaggtgatacaaaattaaaaaaaatgctctaatagtatactaaaagattaacccaaatttggtacataataaatgttgtgccaaaatttctatcgccataaatacacaactttattattaagttttatgttatttttattatttacttaatgaaaaatgataaaattaataaaaaattattattttttatatttctaataaaaatattaaattttacaattgtgtgttggaacacaatgttaaaacttaatgcaaatatatcacatgtttttttgtatcaaatatagctcaaatttaatagtctaactgtaaaccggtagcgtctaacacaacttaaaagtgacattttatgattgattagcgatatttcataaagattaatatattaaattaattgaaactcaatacttaattataacaatagtactataatacattaaaaagtgctaaacaccttaattaagtctcatacattttaatttagtaaataatataaaaaattaacaactaattataaaacacaatattagttagtgttaggcaccttaaaaaaggcaatgctcaagttacactcaccattctataagccaagtggttgaatagaataatggattcaatattaatttactcattttctaaggaaaggaaagaaaaacaaaactatcaatttactatggaagattaaaagtgaaacagttacttatattcagataagataattaaagtgaaataaagtaatgtgtatagttttcttttgaaccagtaaagccacaagagttactaatcaaacaaccaattaaacttcaaaatcaactgactctattcattaccatattattatttaaagacaaattgtcaaacaattatgagccatgaatgaagactgagctgagagtagtatccatcagtacaataacatatcacacagttggatggaacagaagaaacaaaaggaatgcgaaagtgatacaatgatagacaaaatgtcttttttcctgatccaaatatgatacaaatagaatttcacaaccttcactaaatgataacagaatttcataaccttcactagatgataataaagtgtgcgcttgttaaaagcaactaaattatattcaccaaatgctaagtgtcttttgtagaattaatccaaagagcaaacccatttgagaaccacttaacattcacaaccagttgatctttgttgccgccctccgccagcaacgtcaattgtctcaggaaggtatctaacatca

SEQ ID NO: 22698 - DNA, 2469 bp, Cannabis sativa
caatttcgacaccacaataaaaatttgtacatttgcgagttgataaatataaaacgtactacttttggtactaacactacgtccataggttgaggaaaacatcagcccacaacattgctcaattttcactcaagataaataacattaagatttagaatggaagtgaaccctttttttcttctttgcagtttgttaatgggttattttcctctaaaaaaatatatcataaaatcattttctactaaaagtaatataatttttatattttgaattggagatcttctatagtaacaaggtaaccatgattattataaaaaaaataatagagctaccaaataattatgtagtatctacccgtacataattgtgtttaaaatgttaggcagcaaactctagaaagcaagaaattttagtttattcttttaaataataaaatagaaaagaaaaaaaaaatagaagggagagaagaggtgcacagataaacatggtgtaccctcgtgtcggaaagtatatctctctctctctctctcactcatttattcatgcgcgtgggggccactgtcttccccctctccatgctcaaatatcagccctcccgtacgaccatcagagctttggcttcttgacggggacgtttctaacttatcttttgctctccattcctttccatttaatccctcctctcttcactcttttattctttctctctcctcttattctctctacctctctatatgaatatctattcgatcgagtcaatactttcgtatccccttccaaaaaaatttcaaaagccacactacgcttcctttccccaaaagccctagcccacctctttctaaggtctacgcttattaactttgctcatcgctttctctctcaccaactaattggaaatttttttcccaagagggacctcaaataatagttcttatggatgatgaagacaaattgaaatccgatctaggaaccggaggaggaccagtgactcagtttgggagccagtcgagctggactcacttcggaggcctagactcggacgacggagggtatttcatctctgccgctgatagagagaccagcttactgagcgagttcggttggaattttcacacggaggatgacgatcagctacgcggagctacagagcaagagcgggctcgggagttagagaggagaacaacggcagatttggcagagagcagtactgtcaccgaaagggcggctcggatcgggtcaacgacgtcaaataatccgtcggtgtcttcgagctctagcgaggatccgacagaaaagtctactggctccgatgaaaagccgccacccgatcagattccgtgagtggatttccatgatatcagatatgatccgtatgtggttcaatcgtaattaagttgattttctggggcaaaatgacaaagtcgttatttaacaaaaaaaattaatgataattcagaaatcaaatcggattttttagcgtgcgagggaggcagagagagagagagtgcaattccgtgtccgtacgcttactactactgataaaacaacacggttcatgcaagttgcagtagatttttccatatatattttttattttttaataaaaaagaatataggtaagggtggtgatttcgtaatttcacatagaaagtggggcgtttctggctatttgcaaaaaaaaaaaaaaaaattctgtcttcgcctccgccattattgcggcggtaatggcgtgcggtaatttttatttttgatttaattctttttcatttttaattgcactctggggtcttttcctttattaattatttacattttacacgctaatttgtgtcgggaaaaagcttaaggctatagattgtgtttaagggagacgatatagaaaaagaagagtatatatacagcatgctaaaaaaaaaaaaaaattagactttctgttcgtcttttcgttatttaagtaatattgtttttttttatagtatatacaaagtgcaaatattattgcttttctttgcaatgctttcttacattagattatgatcaatttgtgaggaaatgcaggtgaagcaagtataagtgtctctcacttatatatataagtgattctgcattagctagtatatgatatcatatattacagtatctgcctctcattattattttactagttcactctattgcatcttttgttttatataaaacttgtcaatacattaggtcaaaaaaaaacagtacttgtcaatacataatctatgactatgattgtttttgttattttagtttttggtttttgtctatgtatatatgcatgtacaggaatcacatatttcttttctatgaactatatatattgaaagaagctatatcaattcatatgtgtatttaatactaatttatatacataattaaaatttactccatcaaaacaaaaaaatttactcatggcatacatcaatgaacattcatcaatat

SEQ ID NO: 22699 - DNA, 998 bp, Cannabis sativa
tcccaagtgtattcttggataaaggttctactgtatatattaataattaacaataaaaacctaataaaaagggaacaatctagtagtgtcaaaagtaaggggacaaaataataattattcttagattaatggttgttttgaattgatcaaatcacacaaaatctaaacgagattcattaagttttgctttaaataattaagtatatataaaagctagctaataattaattggctctactagttaattataacttgtggctcaagcaagtaattttatgtttattttcagagccaataaacaaataaataaaaaattattgtatgaaatttgtatgatacaaaagcatagtgggtccaatcttctcaaaacatacttaaaaagattaattaatttcattaatccaaagaattattctatataacattcttttcttcattcttgtctttcttttaattctttttgtcttttactttttttttttgtccacaaacactcgaacatgctagccagctatataaatttaaaatagttacttagtcaaaagaaaatagaaattgaactacttattagagaatagagtgtagagaagaaattagagtgagtgtgtagatagattattgttctaattcttgattaggtgatttattcatatttgttgtgtttattatatgtttaagtttgatcacctcgagcatgatttatgattttaatgtaaattttgaaaaataaacattattagtataatctaaatgaataaacataaagtaaaatggaagtatttgcatatgtaatttttaaattattgcttaatgtaaattatttgttgaactatttcagagatgcatgcagtagttggattgcaatttagtaactttattatttgaaaagaatttaagtgatttttatcacaattgggtaattgaagcaattgaaatcagttccttaattttacatctattgattaaaacccttttatttcttattttatttttctaca

SEQ ID NO: 22700 - DNA, 7031 bp, Cannabis sativa
  modified_base (4630)..(4631): a, c, t, g, unknown or other
cacttttcagtacttagttaatgttcatattaccttatgatattgattaaaatgtactttcttattgatcgcagatagaccggctcgacctgttctggacctagctcgtagagaagtcgctgaagttctcagtagcctccctgttcaagatcgcgattggtgattattgtgtacaactccaaagttgcgagaacataagctaattccttagaacgtaagccttcattgggaaccagtatacaaagagccgtctgaaaaaaagaagaagatagacaaacgtctttccaaacaaaactctcgaacaacattaggtaactcatcgtgtattagtgatatataatcataaattgtttatttttaacttaacttttcttgtcctcgtagaaatgacttttttgtagtaggctctagtgcttaatcgcaagccaaaaacggaacagcggcaacttcccctgtcattcctcagaagaggaagagtgacgttattgcgactcctgttgctgactcgtccaagaagcaaacgaagccttctcaggacaaggggaagaaggttatgattcatccaactgttcgagctcacgaaatcttagctcttcaagagaagtttgtgggcgaggaatttatgtcaaaggttgaagggactccttctaaggaattaatgtcacgctctacggagttggcctcgcagttcatcactatgttctcgagggcgtttgtcgctggctacaaagaggtcgaccttttgaagaaccagatcgtccagcttcaagagaaccacaaggagctgaagcaggacgcgaatgctaaggacaaagaactcgagaacctccagaggtccaaagagcaggtggaacttcaggccaaactttctcaatcaaaggtcgaggagttgtctcgcgacttggagactgagaaggagaatgggaagaagcagtacgaccaagcggtctccgactatatatatacgaccttgtccaaggtaccagattttgacttctcaatccttggagcaaaggcggctaagatggcgaaagcatttcgtgctatgtcgcctactcagactcaaaggtgtggaggaaatctttttcctgaggacgcagagactgcgaatactgaagaggtcgttgatgaggctgttagcaaggtcgtagatggctccactactccaactgctccaagtgcttgatttatctaagtttttacttctttagctattaaactttattagcggtacatgggtactcgtgttttgtacgtggaaaaatttcactttacctttttttttatttcaaacagcatatatcccttcgaggatatttatttatctgtttgcttttcgcggaacactggtactcacatattctacacgcttaatcgtaatatgtttttttaattacagcttggtgtaaaacctttaagaaatgctaaggcgaaaaatttgaaacgtcgagaaataaataactcttattacaagaaatcaatagtacaaagtaggctatatacccctatacttagaacatttatactaataaattaactaagtataaatacacgacgagtactattgatatattgcgagtactactgataataaaattttagactttcgccattccaagctcttcggatcgcagtaccatcgaagtctgcaagccgataagtcgcatggccaacctttttagtgataaggtatggtccgtcccaattgtcaccgaaaactccatgtgctaggtttttcgtgtttggcatgactttgcagaaccaaatcccctactcgcagagttcgctctttgaccatagaattaaaatagcgaccagtttgctgctgataggccgcattcttcaaatgggcctgatcgcgtttttcctctaaaaggtcaagttggagcaattgcttttccgcattttgactaatgttgaaaacatctctttgtagggaccctgccccgacttcgactggtatcatggcttcgcacccataggaatgcgagaagggagtttcgccagtcatggatcggggggttgtattatacgaccatagacctgcggaagctcttctggccatacccccttacgctcttcgagttttcccttgatggtatgcataattattttattcacggcctccgtttgcccattgctctgtggataagcaactgctgaaaatgcttttttaattcctaagtcattgaactgttttccattatctcagattagtttgtaagggatgccaaatctgaaaatgatggaagtatacacaaattcttgcaatttaacagttgtaatagtcgcaagggcttttgcctcagcccacttggtgaaataatcgactgtgactacgacatatttgactctgcccttccctttgggtaattctccaatgaagtcaatgccccagaccgcgaagggccaaggactcgttatggagtttaattggcttggagtttggttggcatacgtggctatccgctaaaatttttcacatttcttagcgaagtttgaggcgtctactcgtagtgtcggccaataatacccttgccgcattatttttaatgaaagggaattacccccggcgtggttgtcgcagatgccaccacgcacttcgtggagtatgtaattgcactcggctccatcaatacatttgagcaacggttggctgaagcttctgcggtaaagcctgccatcataaatgacataccaagctgctggataccgtagttttctagcctcaatcttatcttcgggtaggatttctttttccaagtaatccattattggagtcatccatgtgacttctctggcagtatttacctccattacttcgatttgacttactgttgggtgagttaacacatcaacatgaattacatcgagtaactcagcttctcttgttgaggccaaacgggccaaagcgtctgaatgagagttatgagcacggggtactcgagaaacaatcacttttttgaatttctgtagcaactcgcaagttagggcgaggtatctagccaaacatcttcctctagccagatactcttcgttcacttggcattcaatgatttgggagtcgcagaaggcttgtaaatgctcgatcttcatctcaaaagtgagtttcaatctttcaatcaaagcctcatactcgacttcgttgttagatgcagaaaattcaaatctaagtgcagcatgtaccttaaaattactagggcttatgagtattataccaccgccggagcctttgctgttggaggctccgtcaacgtataaagtccatccttcaccatctagtatgttaggatcaattttttcttctataagtgctatctcagtgcttggaaactcgagtatgaaatccgcaagggcccgccccttaatcgtagatttaggcttgtacctaatatagaactgactcaactctactgaccattttaacaatcttcctgaggcctctggtttcaccaaaacttgccttaaggggtagtttgttaaaacttcaatgctatgagcttggaaataaggtcccaattttcttgacgctattaccagggcaaatgccagtttcttcatctgcggataacgagtttcagcgtctaagagacgcttactgacataatacacccgttactattttccttggtcttcgcagattagtactgaactaatcacgttttcagacactgcgaggtagatgaataatatttctccagacatcggttttgaaaggattgggggttgcccccaatgtgacttaagagcttgaaaagcctcttcgcacttctcagtccactgaaacttcttattgccttttaaaatttgaaaaaaatctttgcacttatcagaggaatgtgatataaagtagcgactttacctttaaggctttggacgtcctttggtttggtcggagatcacatttccaccaaagctttgatctttgcggggttagcttcaattcctcgctgattcaccataaacccgaggaattttcttgatccgactccaaaaacactcttgagaggattgagtcgcattttatatcgtcgcagtatctcgaacattgcttgcaagtgggtgacatggtcctttgcatgttgagattttacgagcatatcgttaacatacacttccatggttcaccaattagattcgcgaacatcatgtttaccaacctctgatatgttgcccctgtatttatcaaaccaaaaggcattaccttgtaacaatacaaacctcgatctgtaataaaagaggtatgttcctggtctggttcatagattgaaattcgtctatatcccgagtatgcgtccataaaactaagaagttcatgacctgcagtggcatcgacaagctggttaatgctaggaagcggaaaactgtccttcagacaagctttatttaaatcagtgaaatcaacacatgtgcgccatgagccattaggcttgggcacgagtacgggatttgctaaccagtttgggtagaacgactcccttatgaagccacacgccaaaaggcgatctacttcttccttcagtgattggtacctcgtggggtccattttgcggcgcttctatcggacacctcacacttcggggtcaatgttcaatcagtgacacatgacctgcggagatattccgaccanntctgaatgtttccaggcaaaaacatctagattttgtttgagaaaagtgacaagcttttctcgctgttgaaaagttaatttagaaccacttttcaaaaccttgttattatctaagggatcaatgggtacctcaatggtttctttcgcagcttgggcggtggtggtataatcgaggaccctaggatccaagtctggtttgtcttcatgcggtatttcctctattctgaacacctcctgccgaggggtggtgcttctaacatataaatcatattgaccgacttcttttctgcgagctttaatgtcgcgttgtaacattctcacgagtccgattggactcctcgcacagatcctactcttgtgggagtagggaacttcatggtgagatgataaatggacgtcacagtcttcatctccttcaagatagggtgcccaatcaatgaattatatgtcgagtattggtcgataagggcgaagtcaaccatcgacttggccacgacaggtgctgttcccagagtgattgggagttcgatcattccatttaaagaaatagtgtctccagtaaaaccgtagatactcgacacgactggtcgcagatccttctcttgtagtcccatctgcataaaagcttgaaagttaaggagattcacggaacttccattgtccactagtatgcggtcgacattgtctcctccaatgttagcgacgatgacaagtgcatcgacatgtgggtggtgaacccatctagtatcgccttccataaatgttatatcatcaccttccttcttgaacagtttttctggccgctcactcaaattgttcacattaaatcattaaatcattaaatcatttaaaataatcttgaagacactcaccgacctcttgtttaatgttagccagagtggtatagggtggcctataggtcatcgtggcttgaaagtgcatgaaaaagaggtcggaaaaagtctcccatgttgatatagatgctttaggcaattggctgaaccaatcgtgagcattatcctctagtgttgccgcaagaatgcgacacttcgcaagctggggtacctggtccacttccataatagtattaaatttttcttaatagtctataggattagtggtacctttatatttcaaagactcggacaatcgaaatcccttaggtaatcgaggttgtcgcacttccgtagtgaaaggagaagtcccatgcagcttgtatatgggctttctatgctgctcgattatcgtcaaggcttgtaaaagcataccctggtcaataccgcctgctagggcagtgttgccttgagtcgtcgtagatgccgttactacaacggcgatattttctaggatattaactccggtagtcgcagctggtgcggtaggcaggtttgtgcgattatttatgccctgatcgcccaactgaggatcacgaggttcttcattgttccagggcgtatgagaacgtgccttgaaaagagcgttaaggtgatcacaaagatcgcctttatgaacttggtacctccctcctcgcggtgtttccgccgaacctgacctggtgtacttgttgggagtacggctttgcaaagacgaggagccagactcaatgtcattctcttcgtttcgtggctggggtctgctgcaagggttacgtcactctggatcttcctctgtttgcacctcatggttgaagttccttgtgaattgatccctcgacatcggctgatttaaatcaagcccttcatgatctgtccttcgatccctgcaagtacggttacttcgacgtctagagtttgttacctagggattatttgagcgggtagtgggcactcgaggaggacgtcgattcctattccgtccatcgatttcggcctgcaaagcacatatttgatcatgtattgccgtatactgatcaatggttaattaaatgatgccctcagacaccactgcaggcgtaataggtggaaaatgtcctgtcatcgctgccggtgtggatctttcccgaacatgaggagcagcagtttcggggaacaagttgagaggtgttacgttcatccgtcctacaccgccgttgatagtatccacgggaggtaccctatttcccggtagtgggacattcatcatcccaatgttgattgattcgttgttaagatctccatttgtctgatttccagccattgtgattttccttctaaatcagcaaagtattatcgttcccacaaacggcaccaaatgttgttgaaggaattttacaacaccaaaaatagatagtaataataatagtaaatgtatagtaagtgcaagtactcaacccagaatggcaagtattcaaatcaggaacacaaatacttagcaaaagactggaaaaataatgaacacgagaggaatatagtggttcagtcag

SEQ ID NO: 22701 - DNA, 5130 bp, Cannabis sativa
  modified_base (5076)..(5089): a, c, t, g, unknown or other
agatactggtaaaatataatccaacagataggtggtgttatcatcggcttcataaatccctagctgtccatagatcgaatctctaatagcaacttcagtattagaactgaagaaaacagatgatttctcaaaattcactcgttgacccgaagcttgctcataaagatggagtaactccataataaaaacaacttcccgagttagctctacaaaaggcataactatcatcagcgaagagcatatgggaatttaccggagccctacgagccactttacacccatgaatcttgccatcaacctcatatttccgcaggacacccgaaaaaccttgagcacagagaataaagagataacgagatataggatcccccttacgaataccccgtgtaggaagaacttgatccatctcacgaccagcatgcacaaagtataagataccgattccacacaatggataatcaagttcacctatctcccatcaaagcccatcctcagcagaaccgcgcgaaggtaaccccactccattctatcgtaagccttactcatgtcgagctttaaagctatcaagcctttcctcccatggggtttcctttttaattaatgcatgattttgaaagaaaccatgatattgtttgagataagccgaccttgaagaaaagctgtttaagtatcagatatcaccgaaggaagcacaacctttaacatatttgctaggacttttgttatgaccttgagtagcacattacaaagagaaataggtcttaaatcacccatgatgctaggctgctttttcttggggataagaaccacatttgtattattgagcccaccagggagaacctgtgtcagaaagaaattttgtactagtgcagcgacatccccgtcaaccacgtcccaacatttttggtagaaaccaggtgtcatgccatccggacccagagccttgtcagggtgcatttgaaaaagagctttgctaatttcatctgcttcaacaggtttaagcaaatcctcatttggagcagccgagatacaaggagaaatacagtcagaaatatgagaccaatcagagccgctggaagagaacaagccttgaaaataactcatcattaactcagtcagacccgtgtcccaatcatgccaaatcccattcgaatctttgagtttggcaatcaaattgttgcgacgacgggaagaagtcggcttatgaaaaaacttactattgctatctcttgcttgtagccataattgcttggagcgctgcctccaaaaaatctctctctgggtaaacacctcaaacagattctttcttgcttctttaaatttttgaacgaacagagcatctcgatcgtcaatagttggtgccggttgaatagtctccgagaaagctaaaacatcttcttctgcatcctccaaaacaatattagctccttgttttgacagatcaagagttcccatactactagaatccataaaagaaaactaggcagaaacaaaacacaaaaacaaaacccttaaaacaatatgatcaaaaccaacgtgtcacaaagacaagacataactcataatctaaaaactgtataaaaaatatattttagcgtatacatataattgttattagtagttgattatagctaatttttaatttatattcatttttaaaatgaaagtcttctacgaatatttcatcttccctgacgtctttaactttttgttattaattttgtattatgactcatataaagctaataatattattaatactaattgaaaatatacaaataattaattttatttatattattttaataatttataaatataaaaatattttttattaatgaatagtattaataagtggcaaatagataattaaaaaaagtgatatatatcgtgggctaaaatttgatatatattatcttttgtactaaatttgatataatttttagcttgagtcaaatttggcacatattttacatcactattgaagttagcttttagcaaaatattctaaaaaatggcaatacaccacatttatagttctccattagagatactcttagtaacctcacttgcatttgaggtgttacatacttcaaataagacaataaataatttactattgcaacaagtaacttttgttacttttattttaggaaaaaacctattattataaattaaaccaaagagtcatttacaacaacagggtttataggtggaggagtacaatccgaccaaaaacaatctccatccacctctagtgcaaacttagtcagaccgtgggcaactatattaactgtacgtttgacatgagatacatttacattaggaaaaaaatataaaagactagaaatatccataataatatcttgaaaagtagataaggctgctgatggtttggataaagcagttttgacccacagagcatcagtctcgatttgaagttgaggaagctgaagctgtagagcataatatagaccatgaaacatagctaaagcctccatttcatgaggatcaaaattgccaattagttgcttggagaaagcagccataaccataccagtagagttacgtatcacaacacctaaaccagtcaggtttttcgatcgatccaaagcaacgtcaatattgagcttgaaagtccccgctggtggtggtttccatctaaccggttcgcatgatgggggaggaggttgagttgcagcaggaataggctggctgtattttaattgtacagaacggaagttcagcatatagttggttgcaaaaaatgacagctccctagctggcttggctttttgcccatgaactactcgatttcattccatccaaattgtccaaagagtacaaattatttgttccacttcaaactgagagtggatagatgacagatggacctctactttctcagctcctacagccttggccaatctcaatcctgcgattaaggcttcatatttggcctcattgttagaggctgggaacgtgaaccgcaaagcgacttggagtcgtaacccatctgattaaaatcattgttatgctggaacccgaccctttttaattagacgacccatctacatataccttccatgctggtatattttgggttggcatattggcattggcctccatctcgttacactctacgaagaagtcaggcagtgcctggccttttatcgagatgcgtggaacgtattgtatgtcgaactggcttaactccatggcccacttgaggagccttcttgaggcctcaggcttctgcagaacctgctgaagcgggtggtttgtaaatattttgatggaatgggcctggaagtagcgcctgagttttcttgaagcaatcaggaggcagaaagctagattttcaattataggatgctaaatttcagctcctatcatgcgtttgctaacataatataccgggtgttaaactttttcctcttctcggaccaaggctgcactgactgcgttctcgaagacggctaaatataaaaacaagtattctccgtgaactggttttgacagtattggtggtttggccatgtgctctttcaattttttgaatgcctcctcgcattctttggtccattcaaatttctgacatttctttaaaatattgaagagatgcatttgttgtcgagcgggagatgaatcgacttaaggcagcaaccttcccggtcaagctttgtacgcccttatgtgttttcagggagggcatgtttataaggcttgtattttttagggttcgcctctatcctgcgctgacttatgatgaatcctagaaattttcccaatttgacgccgaaagtgcatttcttaggattaagtatcatcccatgtcccagactacctcaaaacactccatgaggtcatctgcatggcccatgcactttgtggatttgaccagcatgtcgtctacatatactttcatgttccgccccaggaagcctttgaacatttagttgaccatgcactagtaagttgctccagcgttctttaatctgaagggcatgaccaggtagcagtacaccaccttgtcagtcctgaagctattacactcttgatctgcgacatgcatttttatatgattttaccctgaataggcgtccatgaaggataggaacttgaaacccgaggtggcgtccaccatctgatcgattcgggggagcgagaagcaatcctttggacaagccttgttaagatcggtgaaatctatacacactcgccatgtgccattcggtttaagtaccagaactaggttggccaaccattctgggtagtacacgtcccgaatgaagccgttggataacaacttatccacttccttctccagggcgtcagcttttactagctctatcaagcattttttttgttgtaccggaggcatgtctgggttgatgttcaagacatgagtgattacataggggcttatcccagtcatatccccatggcaccaagcaaagacgtccgtagctgcctttatagtgtctatgatcttactccgctcatccagttctagatttttccctagacggataaccttagaagggtcgaggtcacacactctcacttccttgacgtcctccataggttctaaaatcacttcggatccaatacgggggtccaattcgtcctgttcttctgccaaaggttcttcaccccttcttaccatcaggaccgacaaatgtactgcagcgttataacattgccttgcttctccttggttccccctcactgttcccactcctgcttcccgggtagggaatttaagacacatgtgtcgaatggaggtaactgatccaaagtcaactagggctggcctactgaggatggcgttataggcggtagggcaatccaccaccacgaaggtgcaatgcttaaaggtattttgaggggtgttaggacacaaggtaactgggagtctcacctttcccatcaggatgagggtcgtcccgttgaaccctgtgcgttgtgaacggctgagagaaaggtccctgtcggtgagcccaatggccgtgaaggcatctttgagctggaagttgagtaacttcctgttcgaatttattttaccaggatctnnnnnnnnnnnnnnagtatgttgtttaacaccctaaaatatgaactttctaaaac

SEQ ID NO: 22702 - DNA, 2823 bp, Cannabis sativa
  modified_base (2704)..(2722): a, c, t, g, unknown or other
acatacatattagtaaatctagatcctggtaaaataagttccaacacgttcttcatccaccacttccaccgagggttcatcgtcagattccgccagatcctcgaacttgttttgcaaatgctccatcattttgttcatttttgtagtgagtttctctgctctgctaactctgtatgagtagcttccaattctctagtcactcgtaataagtttgaggcgtggtcgtagtaataattgtccttataatacccatcttttacatagtcatcaccatcatcttcctcatccctgcctttaggattttggcctttgtcaaggtcatcgagcatgttctcggtatcctcctcggttctcggcatggatcgtgccttcttctctaacatcgttcgcttggaggccagaggcgtgggagtcaacttcctccataactgtgtccaagggagttttcttgctggtgttcttttgagtattcaccatagtcgaagtgaggcagcaactaataatctttccttgtctctcaatgaaatcaccaaaatatttaccgagatttttagaaattgattacaaagagcttaaggaagtgcaaaataataaataatagacaaatggattttcttacgtggttcaggcgttaataattcctagtccacgagtcagttgtattagcctttttggcaagtatttgagtatcacaagtgtttacaatggtaactttgtattcctcttatttctctcaaagaagaaagctctttggaaattttagcagagttttgtaagtaaaaattatccttcctttgtactaaaaaatggaggtatttataggcacacatgcgggtaaagacataccctttacccacttagggtttcttactcaacacacaagaaaggccaaaaacacaacaataccatctgaccgctagtttggtaggtagctttcccattgtgtggtgcttgatcaatgcaggatatcatgtaaaggtcttgacacgtgtcattcaaaggtttttcctttaaaagtaatcacttagacaagttgttggacaataagcactatagaggcacatacgcgtacaaccacgatctcatgcaggggcaagatctgatttgatgtcagacgacatgcaactatcaggcctaactccgaattcgaccttaaggagtttcagggaggttcggctaaggtcttccttgaccaacccattcgcaaccatcctgggacgtatgcgactcttatttactctcgattacggaagcataaggtgagaatctccataatcacctcgaccttcgctagagttttgggtactacagtatcttccgtaacctcgtttaggggaaggtccatgatagcaacgtttaatctaatgtggcacccttcataactttcatgttgaactcatctgggaacatggataacaatgtattttatcaacccacactagtccttgtgtgttgttattgattaagaaaattgcggtatgagacattaccgttccttggatacaacctctgaaaagattgcaagaataattgatagatcatcaagaggtaacattattgttcatctttttgtttcctgatttaatatttatacatatggaggattctagagtgtggtacgaagataatcatattaaaatgcttctgttgcacacctaatttagtaccacaaaactaacatctggaccccgacccagacctggatccagctctggcctcaaaccctgatcctgaaccctacctaggaccccagctctgaatctgcggtcatggtccaaggtcagggtcaggattgaggtcgagtttatagttaatatagtataatttcacacaatctataaatataagtcgatacaaaatatagtgttgtattaaataatactaaaattatccaacacaatgcaatacagtacaatacaatacggtgtaccaaacaagtccataatgtaatatatattataagtaagaacatgaagaagaatatgatcactcgctcacaaccttgagtatagataagtgggtatcaccataacttgaacaagatatatcacatttgtctaaaagcttatttttcatatctttaagcactaaaggaactctctacgaaatagttttgagaattatcaagcctttagattttttagtaaaataatttgctgatggaagctagtgtccaaatgagtattttaaaccactaattataatgtttaggtgattatacttgaggttcaaatatctataacatctcatgattgttataagcacatcaataagcgtaaattggactaaagaagaagatttagtgtttacacaaagattaaaatcaagcaccaaaatatttatacattttcttacagtgcacctacaggcgacatgtcaccacattttacaggttactagtttttatctttcgtaactcccattcgaccaaattaattccaattcaactcacttctctcatataaatgtgcattaattaaattcctaacaagtatataatcataactttgcatttgaatcctataactattttgtgtaataactccttttattacatttgatttgtgatcaactaaagatagttacaaatgttactaatttgtacactcttcatatgttacattttgaccacaataactatatagaacaattttctttttgtcaatttgtaacactcatatgccactaaggctagcttagtggnnnnnnnnnnnnnnnnnnnagggagaggtcatgggttcgaacttaggaccttgaaactattaagctattaactaggggtgggcaggatccaatccgatccaattgaaccgaaccaatcca

SEQ ID NO: 22703 - DNA, 1615 bp, Cannabis sativa
  modified_base (26)..(59): a, c, t, g, unknown or other
ataaatcacttcaaatttcttatatnnnnnnnnnnnnnnnnnnnnnnnnnnnnnnnnnngggcacaaaacccaacagaaactacattgaaaagagcatgaagagccttagagttaagtttgccttttccatttcttcagtactccaatcattggtttgtttaatcttttatcccttctcatcaattacagggggaggagaccatccctcagaaacaccatccaaactctttcatcaaccgctttcaagaacacccttatctttgttttctagtaaggatagttagctccttcaagcataggaggatgcgagatggaatctccttcccaaaataactccatttcctattaatctgcaatcacacacacagattgagaaacaagcgtaatacttcgagatgagactcgaagccgattagttttccaaaaaatcaagaacaccgaaacaacaaaacataagaaatgagcaagatctaaaacaaaagacacatgactacttaaattgacacgacgcaccaagatctcaatctcaataacaagataggttctgataccaaatgtgaaacctaaatatcttaatttcttctaagtatattttagaaataaaacttgtctaaaattacaaaaagaaaattagtaaacacatggaatttacaagcttcatctgaccctagaaatgcattctaagcgactagtgcttaggttcccttgaactagggtaataactttcattatgaatcaatcaatctacaatatccatttctggttacaatttccaaatagtaatcgaaaatcaattcatacaaagactaccctacaaacttaatcaccgatcaagtctaaccatctaagttcctttagacatttaaagccaagatccccttctttcctcacaattgatattccttcaacaacttaatttgaactctcttcagagagaaatagatcattgattctcctttagctcttgaagatctaataaagaataacctacaaataaaccaagaaacacaaagaaaaagttctaccctagtagaccaaaaatacaagagaaagtctttcaaagaagaagagttagttagaaaatagttaatcattaattatatactaacaactctactaaagcaatctaaacaactcaacaactaactaaagacagcgacccattattcatatgccaactaatgctgacctgccagaaataagcaaacaccgaacccaaaacaacaaaaagctagatgaactaacaaccaattagatgaccaatcacacataattttccaaacatgacaaactggaacttacattttctttgaaaactcaacaacaattgacagtcaataataaaaccaaaagtagaaaacaaatcaatattacttataatggcttgaacaaccaataagcgagttttcaccataatcttcatgaatgactgagatttaagccaactcaccacctccttaatcctaagagcctcagccaccactgattcaataatgtcactacgaggatgagtagcaactaccaacatctgttccgtcgagtcccaaaccacaaagcgaatgttgggattttatgccctaaaaaaacctatttcaatctaatcttatttgtaat

SEQ ID NO: 22704 - DNA, 5008 bp, Cannabis sativa
ttaatgtatatatgagtttgtagcccactatttttttccttttatccatgcactaaattcgaaaggtgttaactttgtgttgggtccggaattttttcattatactttagggaggtaggcagaatacagccaattcactcaatattataaatataatatataatttttttttttttttttttgaagggaatataatatatattcaagacataggaagaagaagagaaatattaaaattgtttacaataaaaatacaagacactatgaactagaagatagaataataaaagagaagaatactcaatgattaagcaagattcacaacctttgtctaccgcttcctccctcacataaatacttagagaaattctaaatatacatttaaggatgagcttcatatacttagtctagtatctaagaataaacacattttgataacatttctatattttcaacattgtaacatattatgtgttttaacttagtcactaaattaaaaaaaagggtccgtgcttggttgcagctcatcatgccaccctctttccctgtgtccatatgtacatgcatggagttaacattaattgcaatatataattatatatcacttgagaacttttattttgttgcatgtgccacctgctatgctcaaagaaaggaagaaacaagagaaatgctaaaagacacaagtggtgtcaagtactctcctatgtgtcaatatcgctattagtgtaatttagtatcgggtcccctatagtttaatataatagcttttaggaagtatcgctggccaatcgtaagacgacacgtcttaagggtgctaggcaccactggtacccaatagcaatgctcaagaagcaagtaaatatatatcatattttccttattcttcttccaatcacaaactgccacatgaaaattcttttgtcttcaactctctaagagccacgcttagtgtaacaccctaatgattaggcacgctacagtgactttctaattatagtccacacctgtgctaattaaagagttttctcgaaaattgtgataaattcaaatttttaatttaacttttataaatatatatatatatatattcatacaaaaagtcaggatcccacttttaaaatttatatccatattcaaaataaactttacaaacatgtcgtacagtgactacaaaatgaggccacagttgtcccgagaccgaactctctaggttgcaccgttttgacatgtataattatccccgagctctagacacactattattcagctttggccttccctttacctatacacgaaagtaatatctgtgagtcaacagactcaataagaaaagcatataacatataatatattaccgatttgtatttaggcgcccatacacctttccacaaggcttatacaaaggtacgacctctgtaccacatgcattacgtaccgctactattggtagggcttgaaccgtaccccaagtactacatgcactacaaacttgatcgtacaagtgttggtaccatcggatcgtaccctttgaacatcatatgttgtaccaatgcactcagtaacactattgtactagtgttggtaacatatgagtcacaatatcagcatgcatataatacacacacatattcatataaatatatatacattctatgctaatcttacctcatttctaaatttaagcgtatcggtcaacctgaatggaaaatcacgcattgaatggaggccttatgtcacaatcacataaatgggtaaacaacttgctatgactctttctgaggacctaaattaaacttaaaactaaaagttttccaattgataaatggcatgataataccctaaatatcgaggaaacatcaaaactaaggctctagaaactgcctaaactagtaaatcagattccccaaatggaaaaccgatttctagggtcttgcctagtgaaacggttaactggttctacagtactagcagaattggttaaccagttcactgcaaaaaaaccctaaaaattgtatatctctctcaaatcatacccaaactcaacaaaactttccaaaatacctataatatcacccaacaacatattttaagcaaaaaagcagcaaaattgtatagaaactcaaaacaattgttgaaccaagtttgagttcaaactcaaacttgctcaacacttaacaatccatcaaaatcactcaaaccaggcccaagaaatttagaattaataatataataattatattaatattaatattaacaataatataataatataataataaaaactttattattaatggttatgttatcattctttagccactatgaaatctctacttctaggacactaggccaaatttcacatactcttaattatcccaatatttatactatcaacttatcataatattcctgccaaatctattaattaaacttattatgatatttttggcccccgatcgagtctctaaggtcgccaaaattaaaaatatttttattccacaaatagctcatattacattcacatatgctatataaatctccgtaatttaaaaatcacgcttatttatccacttataacagatttaaacaccaaattgttgacctcaaatttggccaactgacaacatagtcgtatttattaatgatgtttgccatgtgctgcacaataagaacaaaaaagtaaataagacatgagattttatagagattcggccctcttagttagcaagtaatgacctgctcccttttttgttatattgataccagagataataccactaagatcacaagtgttatggaatctgaagtggctctcttaagattacaatatgagaatggagttggcaaatctcaagtgatggagagaatattcttatggcgtgagagagaggagaaagttaagtttcagacttagagcttgagggttggaactgacttaggaaattaggatttaactaatgctttttatatagtagagcttacatcactaatatcccttaaaaatatgtaaataaaactatatttatataattaaataataaactttaaatgacttaaatatccctaaaaaataggaaagttgctgatattttttctttattttcgtgggttgtcaaggcctaattcgctgcttaacttgctgtccacagatgaaggttgcgcaccagaatttggtcggccatgcacttgctagggtgcaggctggtcggccacataatgcttggaagttgcccgacctatgctgggcatagggccggccaacccctaagggtggctggtttgtcatttcgttgtctctcctaagtactcggatcctccattagttgaagtgttgaatagacggcttagtttccttgttggcgagttgtactttcacgtggtattaatattggccacatggacctgtcaggtcatgtcagtaaaaatcagaataatatatacaatatttatataagagtggttatagaaatggttaagggacactcagggccaaccctgggaatataggcctaagacgaattaaattttggtgccctcaaaaatatataaaaaaaaagaagagtgttatgggatttgaacttataaccttgaataatatgtcatccacctcaactaactaaactatgaatatttgttgattacaacacaaataaattttactcaaataaaagcctaataatttttttttttattttgggcccccgaaaagtgtgggccctaatcgcaggcctagcccgcctatgtctaggatcggtcgtggagacacttcattattatattagtcctatacatatattttctttaaataaatatatatataaaaaaaaactgtgaatcacttatgcaatgtaatattattgagtcaattatttccaacttagtcatcattggaaagttgaataaaaaacaaagtaggcgcatgcacaaattgatgaataaactctatgagtgaatgtttacttgtggggaagaagatagaatagatgattgattagtatatatatagaaatatataaatatatacgtgtatatttccttatacaatcaatacgatattattaatacacagaattgatttgggaaaatgctgataatgatgaaattccagcaaaatgggcgactacgtccattatacatgacagttcaattctctataacgtataacatgttggctgctatgaacaatttagctacgtcaccttcccatttcaacatacaattcaattattatacatacatatctcttaatatttggggatcaacatccaattcaattcaattatactgaattaatctaatctaatttaatcataaaagttggatatccatttacaattaaattgaatgtgaattattgaattttaattatattaccctactaaccagctaggcatgttgttgtgttttccttaataattatgctaatcaaagtgtttaatataaatcatatttaaattataataaatataaattttactaaataaacataataaatactcaaagtttaaaaattccaagatcttgaatttacttttatgaaaaaacttgtacaaaaagcagcataactaaagtgtcgtccagcaattagcaaaatggaacccattttgtttcgaagattcgaactctctagatctaaccatctagatatgtacaatcttcattgagctcaaaactcactattattgttcaacttttgtcttgcctttacttacacatagaaaatatatctgtgagatgacaaaactcaatcagaaaggtataaaacataaacatataacatcacttgtaattaggctcccatacacctaattaccacaaatctaaaacctacgtctaatgcgtattctcgaacgttcttgactataatatcattgactataataccacatgcactcaatactctaggtgtactaatgttggtagcatcaatccatactataagtacaactagtcataatacctcaattctgtaattaggtgtgccgatcaaacttgagtggaaaaa

SEQ ID NO: 22705 - DNA, 3220 bp, Cannabis sativa
ggcaggcttagtgattccctggatgttatccctcagaaccttcctgtgcctcttagctcctccctttcccaagcctttacctcccttgcctcttcctgacattttctcagagattttcttgactgccaaacaggacgtttaaaagtttaagatggatgaagtggaattgtgttttggggcattatatattgaggcgagaattggagccaagcttttcgcgatccaattttagccgtaggatgatagttttcatcgacggctgagactagtgatccgcgtgatgagtaagatgttatcttggccgttaatataatttcatctacggatgaaacataacagatgaatcgtcgcgcggatcgttaaaataatgtattttatttccttttttacaaaagcatgtcatggtaatgtatttttgtgtctttttttctgctgaaacctataataatgttaattagatttttattacaaaaaattatgttaaaatttaaaacacacttttccacccatataattctcttagtattgatggtcattgctcttctatcacactcaacaaatttcccttatctatcttatctatagtttctgtatatgatttaaatttttttttttctatttttagttatatattgaaaacttccctacatgatttaaagaatcaacccacatttttttttttacaatgttctatataaatagctataactcgctcttctgcttctctctctgtgaaaaaagttctaattatacgagttaaagctttagaaatagggttaaaatctgtctccaaaaaaatagaaaagggaaaaaaaagtaagatgatgattttgttgagtgcatactcaaacaaagaaaggctcctactaagaagaaatctaaaatcgttaaagaagaggaaatcaaggggagtcctattactgttggtatggatacatacggggagaaaaactaacaagaaatgctgacccgtctccatcctcacttattgaacaaaaaaaaaataatacaactattcatttaaaaaaatctaaattgaacaaaaacaaatacattaataaatattgtgaatcatggggtttcatctcaaaactaattagcaatgaatagagtagtacatgtttttaaatataactcaattctctaccatttattcaatgtaggacaatatcttacaataattatttatgctaaaaaaactgaaaaagagcataaactcttcattgttgatacaaatacaatactcttcaatgttgatacaattatgaaaaaacaaaagaaagtcaaagttacatttttattttttaaaattacaaattataaaagaaaaaggaaataaaaaataactattttaaaaataactgtaacaacaagttacaaaactgattgttaaaagttgtaaagttaaaaacaacctaaagctactgcacaaaaaaaagtatattgtcttatgtgaggtattaccaagtgaggaactctataataatcctatattacataagtagaaagaaattatatctatttatttataatttgtctcctcaaattattttttcttacaatttgccccagacactaatataatgtgttcgacatgtgtcagagttgtagctatttgtaaaaatactactattagtaacataacctttaaactagcgaattaataatggactcaagtcacataatacctgtattatcacgtactacaataattgaaaataaaagaaataggatgagcaacttctcaaatgaaaattgatattatttgatgactgaatagcaataacataaaatggatattaattattaaattgcaataatttggagaatatgattacacaataaattagagtatctatctttgagtttgatttatcattcatctgcataggaatcaaatatgaggacacgcacggccactgagcccctcaccagatccttataatcaccacgcacccattgtaccgacgagaaagtcaccacaaacgacaccattttcgttgtcgtatcaaaactcaacaccagaggttcaactctcatttctactccacccaaaggagcagacgcattcgacataatcttctgtagacttttagtgtacgagtccagtccaccacctatggcagtttcaatctaaattttagatattttaagttcgtgggtattatatgaatataagtctctctaattacgaccgagaattaatttaaacattttccattcattgcaattccattgttccagatcaaagacaaaatttgaagccaatctaagataattttgattcatttcctcaaattccgactacattgacatcagatactaagagataacaaatctatgtccaaagacccagaaaagaaaagaacctaaaaaccctaaaagacaggaaccgattgattgtacagaaatcgttttgggaattaaccaccaaaaccgtatagggtgcgaccttgtctcttcaaagcataaactacatccatggcagtgaccgtcttcctccgagcgtgctctgtgtaagtaacagcgtcacgaataacattttccaagaagatcttgaggactcctctggtttcctcatagataaggccactgatacgcttcacacctcccctacgagcgagtcttcgaatggcaggtttagtgattccctggatattgtccctaagaaccttcctgtgcctcttagctcctccctttcccaagcctttacctcccttgcctcttcctgacattttctcaaagattttctcgacaaccaaacaatgattataatagttaaagacgagatgaaacgggattgggttttggggcgtatatataagggagagaattcgaagccaagcttttttatgatccattttcagccgtaggatgatacttttcatcgacggttgagaagagtgatccgtgtgaagagtgaaacgttttcttgaccgtcgatagtatttcatttaaggatgaaatgcaacagctgaatggtggcgcggatcgttacggtacaatatcttttttttaatattattattgacaaaagaatcgctatagtaatgtttcttttttcaacaaattatcattaaaataaagtaatggagttttatttgaactcaaaaaataataaatgcattttaatacaacgttaaacttaaattaattttttttagaagagacactaatttttttttttttttacattaggaagggagattcgaatttagat

SEQ ID NO: 22706 - DNA, 2975 bp, Cannabis sativa
aatcactggtactttgatagtggtggctcacgatatatgacaggctccagagaatccctacaaaattttctagattcaaaagaaggctttgtgacatttggtgatggtaataaagggtagattatgggacaaggagatttaaatctctcgggtacatttccattaactggagttctatttgttaaaggactaaaagccaatttgattagaatcagtcagttatgtgatgctaattatgatgttatatttactaagtctcaatgtttagtttcattggatgagaattttattcttacaactaatagaacttcatatcatttcaaagtttctatgcggccaagtgaaatgtcacagggtttttctggacaaacttgatctgtggcattatagattgggtcatttgaattatagagatttgaggattgtcactgtaaaggcagttcgtggtgttcctaagtttaaattaggaggagattgactgtgtggaccgtgtcaacaaggaaagcaaattaaggcatctcattctcctataaaaatgatcttcttacatcaagagtattgaaactcctccatattgatttaatgggacccatgcaaactgctagtattgctgttaaacgatatgtcatggtatgcgtgggtgacttctcaagatttacttggatgaattttctccaagacaagtttggcacttttggtgctttctctgctctttctttgaagttgtgaattgaaaaggatgttacaattgggaaagtgtatcaggacataagtgaccatgggaaagagtttgagaatgctatatttgctcaattttgtgaatatatgggaatttttcataagttttctgctcctaaaacccctaaacaaaatggggttgtgaaaagaaaaaataaaactcttcaggagatggctagagctatgctatgtgccaaaggtgttgcgtctcatttttgggttgaagcagttaatattgcttgctacatatgtaatcgtattcatttgaggactagtactacttaaacagcctatgaaattcggaaaggaaagattcctaacttaagtcacctgcatatttttggctgtatttgctatatactaaatgattgtgatcatcttggaaaatttgatgcacaaagtgatgaagggatatttttaggttactccgcaaatagtcgtgcatatcgaggttataacagaagaactttcacagttatggagtccatgaatgtgaaatttgatgacttggaagtatctaatgatgtcattattaatgatgaatctcttagtcccactttataattgaatccttctatgacaaatcctagaagctcctgaattatcaaatgctaactcatccagacatccgtctctctcatctgactgtgttacaagcccttctacagatattacagatatttctaaaccatctagtgtctctgcagatggtcaagctacaaatagatcatctgatgattcatctcatgctcgactgtataagaaagagcctccatcgtggatacaaaaggctcatcctcctactgttgtgatcagggatcccaatgctacaatggtgacttatcgtaaggtaccagatgtcatagactttgcttgttatgtttctctagttgaacctcaaaagatgaattttggaacaatgctatgcaagatgagatgggtcaattcaagagaaagaaggtctagatctggttcttgagcaagatggagtaaatatcattgggactttagtggatttttaaaaacaaatctgatgagtttaggactgtgataaggagcaaggatcttcttgtggcacaatgatacaagcaagttcagagagtggattttgaggaaacctttgcacatttgctaaaattgaatcaattcgattacttttggccatggcttttttttttttttaattcaaatacatgagatggatgtgaaatgtgaatttcttaatggttttctccaagaataagtatatgtgaaacaaccccaaggatttgaggactccaagtatcctaatcatgtttacaaacttgaaaaagaattgtatggactcaagcaagctccacgagcatggtatgacaagttaacatcttttctcatttctcatgaatttgtgcgaggtactattgataacacattgtttattaagcatttaaatcttggtatttttgttacccaaatttatgttgatgatattatctttggatctacatgtgaaagggaagttaacaaatattttgatctcatgactagtgagtttgaaatgactcttataggatatcttaccttctttctaggattgcatgttgaacaagttgaccagtgcatttttatttcacagtcaaaatatatataacaaaaatgcttgagaaatttggcttagatcaaactaaacatggtcctgccccttattgcaccactactagattgtctagagatgagtctggtgagtcagtcgatcaaaccatttataggggcatgatagggagttttctttacctaacaactagtcgactagatatatactttagtgtcggtctatatgcttggtaccaagccaatcccaaacaatcccattttttgatgtgaaatgtatattcaaatatctagctggtacttttgagtttggcttatggtacttgagggataccaacatgtctattgttggttttagtgatttagactgggctgggagtctagatgacaaaaaagcaccactagaaggtgtttttatcttggcaataaccttgttttgtgggcgagtaagaaacaaagttcaatttcactctctactgttggaggtgagtatattgcgactgggagctgctgtactcaaatcatttggataaacaaattggtaattgattatggatttccacaagactctgtggttcttttttgtgatggtacaagtgctattaacatgtaaaaatatccaatctaacattctcgaaccaaacatg

SEQ ID NO: 22707 - DNA, 3009 bp, Cannabis sativa
tttttttttttttttgctcttaatttaattttttttttctttttaaactaataatatatccccaaatatatataccctccaaataaatttcttttttttttacaatatttaacataaagagacaaaattccatgcatatgaaaagaccaatttgccctataccctagttacttaaattaatcaaagcttaaatttgtaatttgtaactaaccaccaaactgttaactcaaaattttaaactagtccggtatactttcaacttaatttattttatgttgtcatgacatttccgaccactccgtcgagtttccacaggttttgggcccgaaaccatttaatttcagaaacagtatttacgatactcacatagtctaataaaatctccgtaattaataaattacgctttatttaaccatttactaaattcacacaaatcaacctaagtaagatcataatcttacttcatttaccagattaagtacatatttaataaaatatgcccaattaaatatcgtattattttccaggatattacactcaaattgctaactttttggaatttgatgttgctaaaaaaatatcccttcaacatctcttgaaataggggagtcatctaagagaatatttattcctatgtcgttttcaagagatgataataatagcagtcttattcttactctagttgataacgctctgattgctgatgaatatattgctcctaatatctaagatgacgagggtcctattattcaagaaagttttgttgttgatgagggtcttattattagagaaatccaattgcagaatatgtcactcaaaatgataatcaacaattagaggctatttcagaattatctcctttaaggagatattaaagacaaaagatgtcaataaggtgtgatgataattttttttatcttggagaaggtaaatatgatcttggtcattttgaggatcttctcacttatagtgaagtacgtaatagtccacattcttcaaaatggatagaagctatggatggtgagactgagtccatagagaaaaatgatgtatgggagttaattctattacctatggtttcaaaccaataggttgtaagtgaatttgaagaactaaaaagattaaagaatagattgaaagatttaaagcacgtttagtggcaaaatgctattttcaaagagaaggtattgattacactgaaactttctcgcttgtttctactaaaagattcattcagaattattatgactttaattgagcatattgattaaggcattaaatggatgttaaaactacttttctgaatggagaatcaagagagcaagtctatatgtctcaacctaaaagattcaaggaaaatggaaatgaaaatttagtttgcaaattgaaacaatccatttttattctcaaacagacatctcgctagcggttcttgaagtttaataaggttgtgacatcatttagttttattaagaacaaatttgaccagtgtatgtatatgaagatgggtgggagtcgtcatattttttcttattctttatgtagatgacattttactgatcatcaaagatttgtcattactaaacgagaaaaaaaattatctaccagctttgatataaatgatcttggagaggcatcttttatttttattttggggattgagatttatcgtgacaagaattaaaaagttcttggcttatctcaagaagcttgcattaatcgtgtgctcaaaaagtttaacatgaatttatgtaaggctagttttattactaagcaacattgtcccaagaatgacttgaaaagagaagcaatgaagaatatctcatatgcaattgtagtagggagtttgatttatgcttaggtttgcactagacttgacattgttttcatagtcgatgttcttggaagatatttatctgatcctagccatgatcattgagttgtagccaagaaagtcatgagatatatgtgaagaacgaaaagtttttatgcttgtgtataagcatatcaacaatcttcaaattgttggttattcatactcaaattttggtggttgtgtagataatttaatgtcaacttcttgctatatttttactttttctggtgtagttatttcttgaaaaagtgttaatagactttaatcacatcatctactatatatattgagtttgtcgaatgttatgggacatctttttaagctttatggttaaagaatttgattttagagatagatacgagtagttgattctatttcctctcctatactaatctattataataataatatttatgtattcttttcaaagaataatgagattagtagtgcttccaaatatatggaaataaaatatctcagcattagagacttggcgaagaaatgagatattgttatagaatattgtaagaccaagttgatatgtttgcagatcctctaactaaaagattaagtgccaggttatttaataaacatgtttgttgatatgagtattttaataatcttttgcacttttgggttagtggaagtttcttattttatcatttgagattaaatttatatataatttacttgttgatgttgtgaactactttgtgggcaataattttttttttgttattattggatatttatgctttcaattatattttgttatattctcaagaatatcttttaagtttttttattattgtgggcaatgattgtcttttaagtttaattacttaatgacaatgatgttttgttggcttaatttttttaagcatgattagtgacactgacttattattaagtagtgtatgactaattttactggcttattgattaagcatcatggtatcaatgaaattgaagactgataaggatattatgttattttaaattgatctcatgttgaacataatgtcttactacactactagacttattgaccatgtcgatttaatactttggtatttgtgattatgaatgtcttttgttgatttaaaaacaatatgattgtcatagttcattat

SEQ ID NO: 22708 - DNA, 2887 bp, Cannabis sativa
  modified_base (966)..(977): a, c, t, g, unknown or other
  modified_base (1702)..(1709): a, c, t, g, unknown or other
aacacagggtccaattggtaacttttgtaaaatagatggtccaaaatggtatataggacccgatatttagttggacaaatagtgatactagtgccctttagcatttctctaatataaataaagagaattgttaaaaatatattgttggtgcactcattttgttatcatattatttgctgttattaagtatcaaattttatataagttaagaaaatagtttttaaaaattattactaactaataataatagagcaccatttataaaaagtattctagtacccaataataataatgttctttttatctctctttctcagtttgtgttttgtattttatgtatgtgcttaattaagtaatttataattataattaattaattatataattttaaaaaataatttttataaaatattattaactaatcatacgcatcacctataaaagatagtgtccaattgtaatattctaaattaatggttcaaactcatcaaggacttcatcaagtaatttatgtaagagcattgttattaagcattattggtaactattattttttataggtaatgaatcacggttacttaataatattttttaaaaattattttctttaaattatataaaatttgatacttaattacattaataataatatgatattgaaataagtgttacgcactaatattttttttaagtaatttgcggcataaatacttaagtataactctcagttacaaataaatatttaagtttaatttttggcagtaataatagttaagttatatttttggaactctgtaggtacccaacggttaaatgttaagccattatatctatgtatcattttcttattggtatatttgaactaattttttttaaataataaaaatttaatgacttggaccaatcaaggattgccacgtggcaatttatttaaccaagtacttacagaagttctaaaattataannnnnnnnnnnntactgtcaaaaattaaacttaagtatttatttgtaaccggaatctaaacttaagtatttatgctgtaaattttttttttttcacaattctctacaaagaaagagttaattatattatattgaatggtatggtatgtaatatgtatattaaattggattacgttggagccttgtcgtttaccgaggaacagaactaccattaggcattagttatatatcaaagtagtctccacaacagcgcgtggaacttactctctcttatggaactcattaataacctcacattgtactctatgaaggaaatttcatttataatatgtaagaaatttaattctgatatatagtaaataatttttgtaattttaattttaagatcatacttaaataaataaaaattaaaataaataaatcaagaatcaaatcagtaaacatatattaaatcaaatatataaatatagataaatttagatagctttcagatataacacacaaaaattatattgattctgatcttaagttcaatgtgaacctaatcatactctaatttaaaagtactactgctattttttttttattaatgaggtgaattagagatatcaatctcaagagcagtaagtcttcaatggtgtaattcctcaacacccattaacttatttaactcgagtcaaaatagttgacaatattgctcaatataattttccaatctcaactctctctctctctctnnnnnnnnctctctctctctctctctcagatgtctctctctactgtgttgtgtttctctctcctttctattgtgttatgtttctctctcctttctttggatgaatctttttgttatcctcttatgaaatgagatgagtatagtccactttatataggttaatggactcaagaagcttgttttcatatttgacaattaagttagttaacgaacaactaactaactaattgaatcttagttagaggtttaaggaataataccacataatacgtaaaactttatcaaacaactaataaattcccaatcaataattttataccaaattatacttattttattttaacatacatattttacctttcttataaaagctcattctctctctctctcaaccaaactaaaagaactccatccccttagccagccgctctgtcactctcgtaatcgcacatccgagatcacaagacagccagtgtcgcacctccaccccattgtctaagttggggttagacctccataattaatggatgtctttttttaatttacaaaaagaaaaaaaaaacatcaatggtattgtaatttttaagtatatagtttgtttgcattatatctgcataatttttgtagtttttgtatatttttatgtataaactaagtagatttgattttgttttttgcatctttttgtcttttagctatttttttgatagtttcttgatgctttttcgattgattctcgatggtattcctaaatgtactttccgaaggtcagtgatgcatattttaatagtttcacgatagtttatcgacagtttcttgataaattattcttgatggtttctcgacatttttttgacatacatttttaatggcttttcaataattttttcgataggtttttgatagatgataacttcaaagttagcttttaattaatttaggttatcgataggatttcatgttcacaacagttttttaataatttctcaatgtttttgcgattattatcaagaaactagcagttgtaaaaataataataattaaaaaaattgttgcagattgtcgcccacttcgtcttctcaatggtagcgacgatggacaaggatctgtggttctcggcttttaaggctttggtttggtgagtcgtcgacgatgaggacacagaagaaccacggggcgtctgtgct

SEQ ID NO: 22709 - DNA, 4992 bp, Cannabis sativa
  modified_base (214)..(216): a, c, t, g, unknown or other
gaagttgacagtagcactcctaaaaaaatatattaaaatcaaaatatgatgatatatttatataataatcccacaaaaattatactttttttaaaaaaaaaatatatatctaatactatttttcagttttcttagaattttaatttgacttaatgaatatctaatttacaacataatctcatctcaccctcttttatattattattattattannnttattattattattattatagcctattattatatttaatatttccatttacatatactaaaactaaaacattttgtcaaaaaaaaacactaaaatatctctcaataccctgatcaaattgatatatagaattgacaagtagagagcaatacaaaataataataataataatcttcttaatgtacattaatcattttgttgtaatatatagtgaaaataacatatattataacgcattggatggtgattttgtatatagtaacattattaagataatgacaagaagttgtaagtaagtggacaaataatattgctatatgttgttgtttcataaattaaaacgttccacaagacaagatgccaagatggttgagtggggccccaaccccttcaacttggggctgctctcttctgtttctgttatatatataatattaataataataataataaactttaaagcagccatagccgcaaataattaaataatatatacacaaataaagtaaataagaaaaaaatcaaataaaggaacaaataaggttaggagcacgtgagggtgagatgagtttggctttgatattatttggaatgaatgaattatagtaactcaactcatagctactttactttgagtgagttttcaactctcttttactattggctattgcctctctctctcctctatattattattattattaacttagccaaaatagtattacaatcttcccaatatatatatggtggttattatattacttttcatacagagaatttgatctttttctaggttgatcttgtcaactagatttttccttttattttctttttcgagagagagaaaagatcagaagtacttatctctttaacaagaggtaattgattatgtcacaagctaatcactatcatgtaccatgtatagttatatgctagctaaaaagctctccttctcctcatcacccgggaactaattaataattattatataattatcatctaattaattaatgagaattattatattttgatgttttactgtaaaaaatatagttaaaaaaattacttttgactaaaatatatatagtatttggaggtaagttttcactaatttatgtttagttacaataattattgtgacttaaaatatcatttagttacaataaattataatttttgtgactaatatttttatttatagattttttaaatttagtcacaacatagaaataataatttataattaattaattaatctattcaaaaaaaataatttataattaattatataattttcttttactttaattataaattttggtgtgagtaaaataaaaaaaaaaaattgtattagttctgatggagtttaaatttcaactagttctcattaactctaagtggataaattatgatcttgtggatgagaaacataattcaatatttattatttatttattgaaaaacgaaatatatgaattgtaataattatatgatgctatatatatatatatatcgagttcgggaccaagagtgatgatctctttttcttcgataaaaataaaaataataatagtaatcaatttctaattttatttggactatttatttcacaaaatatttcattaattattaaaagaaaataaataaataaataaataacgggtatggtagtgatccaattccaaaccgtatataaggtattaatttgttaaatataaaaaattagtatgtatataaaggaaataaacattttattataatattatattttcaaaatgtaacatgcatgactctgctatacattatatactaaatctgagtagatatagtgagcgtagtatatatatactgatatactttataataacatatttaagtgtccaacaacgttaatcaactacctgatcaaaacaaaatacatatacttgtctttattatttatattaattaatcaactttagcatataatacatattaatggtaacattgtaataataaaagattatgctaataaatataattataattgaactcaatatatgtatattttttttcttgtttcaaacatagttaaataccctctttggaggaactacttatttttatgtatatataatggtatatgaaatttgactatggattatctatattatataataagtgatgaagagtgggatatatatagaatatgtttggctgggaaataggggggtttgggtccctcccaaggctaaaaatacggtgcaaaaacagactgataatattgtttaatatgtaaagaagtagaagtacatacagaaagaacgtgcccacacatgacacacataatttattatatatataagcttagattttgtgtggtccaaaaccacacttggccttattattattgtttgctggatatcactcatcattccccatgttaatttctgatcacatttacataattaaaacagtttttacaactaaagtttcgtctaacaaagcaaatatatatacacacaaataataaatctatatatgttatttatggtatacatatactgatgatgatatcatggcttgtagccaagccctgcactctcaccaagttgtacacttgcactgctacactactaagatattttcttcacaagtaataaattaattgactgctactgtatctgtatttattaattaatgttgtcactatatttaatgtacttatcactaatatatgcgatgcatcagtttttgtgaataataaataatgatgagtaattttcacaacttctccttagactaactccatccacaaacatcaaattgtgttgaaagtgaaactatactaaagttgtgtaattttaccattagaataaaataaatattattttgaacctacaccatgttttgtaaaagttactaattgaattttttattttgttaaatgataaaatagatctcgtattttttaaaattgttcaaataggaccctaaactccattttcaacaattttatttttttaatataactaactttaagacaaattttaacacaaatagatatagaaaatgtaaccaaatttaacattacatctctagatcgaattattattaagttttattttgacaaaaaatcagttcagggttctatttgtacaattttgaaaaatataagattcattttgtcatttaacaaaacagatggtctaattagtaaattttacaaaacacggggtccaaaatagtattatcccattataatattgtggttttttcaaaaatacttttttctttaatgttttatttacaattttactgtctaaaatttttatttgcaaatatataattttaaaatttcaaaattataaaaatatgattttttcagccaaaagtaagaaaataattaaaaaacaatgagatttcaatcttacaataaatataagttaactataaataaactataaaacaacaaaaaaaagtaaataaagaaaactaaacgcataataactataaatcaattataaataaattataaaacaaaaaaaaatattgaacattttattgaaatctatatttataaataaaaattcaaaccgtaaaaaataaaaaatttctctgtattaacgaatttttgtaagtatttttcaaaattttactttattatgcaaaaatttctaaaatattcttttactcaagtcataacactaaaattcacattttttttttttttgaaagagcactaaaatttacatgaaaatatattctctaataaatatacaagtatgttccctattatatttaacaaatatttaaatacttattttttattaacaatatcattatattattttatgataagtaatttacctatttaagattttttgtacattattgtgcatccctatataataacaaatattcaaaatactataatattgtataagtaaaaaagtaataatttacagtgagataaattttgtaacaaataaatattatattaaatttgacacaatatttagtacgtaataaatttgtaggaacttttggcacattaatagagcacattttttgctagataatttatattttagttttatatcactcatttaaatctttctattgatgatgctctaaaataatcattttgttaaattttgctgtattttactaacaaaagaatgaaatggctctttagtcactgatttgaagggtattcattgaatcaaatccaatccaatgaatttggatccaaccgatccaatctaattatttattagatattaaattttgtcatccgatccaattcaatcgaattaagtcatccgatccgatccgatctaatagatgtattagattggatcggtttcaaccattagatgcattgttgggttttctattggattgtattggatccatccaatctattttaactgtcatttaagttgatttcattaaaaaatatatatatttatataaaacataatttacaacttaataatccaatatacataataaacatgatgagtttagtccaacctaattctcataatctcataataaaaccacttaaaactaaaatttattcaatacgtattgacaattttattagtgtttatgaatatgagaatcaatattttagatctaaggttttttttaatctcacgtgttaaatgtatattaaactaattaatatatatttttaaataaaatatattaaattcataaaattataaatatattttaaaaatatataaatataattggatgaccattggatgataattggatcggtttg

SEQ ID NO: 22710 - DNA, 3457 bp, Cannabis sativa
  modified_base (878)..(889): a, c, t, g, unknown or other
  modified_base (935)..(936): a, c, t, g, unknown or other
  modified_base (2184)..(2189): a, c, t, g, unknown or other
ttaaacttaatatttgattataccaataaaaatacaatattttgtaggagtattagatgttaatgacgctctttagcatttctcatttaccaccgtgttttgcgtgattttttacaataattgcaatatttttagtttttaaattttttatactaatctaattaaattcaacattttttttttactcaaatccaagataaatattaattagattaaaaaaaaaaacttctaatctaatccatttaagtgacaaaattaaatttaatttgtaatttaattaacttgatttttttaattggatttttagtttggaacgtaaattttactattaacttaaactaatacgaaaaaattacataaaaattaaatattattaatcatttaagttttaatggtactacgtacatacaattatcagatttatagtatacaacagaaatattaaagtagctaataaaataaaagtaacaattaaaatgtctcaaaatattaaacattattattaataagatattattattaataagatgtgctatgtagtttttttctcaaacaccaaacataatatatagcaatattggtaacctttagtttatttaattttttaaaagtaatgtacagttatgatgatatataatattaactaattataatttatatgtgtcaagtatagaaatataaaaatatgcaagagtgtaaacatgtattataagtatttaaatcaaatatatgtatttgtgcattccatcttaataaataaattaatcataatttttattaatattaaattatttttgtaaatgaatattttttgtatgcctttttttttttactatactattttttttaaaaaaaaatttacggtttgggtttttaannnnnnnnnnnngctagttgcaataggggtttcaatacgattttttattgcaatttannttgcagcgctagttgcaatatgtgttttcatgtagaattccataaaaatacaaaaaaactgttttgaagtgtaaaaatgaaaaaaaccctaatttttttatgtgtatatcttttttttttttttttttttgattatacgtttatcactaaattattaataatactaataatatgttatttttgtaataatatactttttgtgtgtcttttcattttctctttcatttttattatatgtttatccctaaataattaataatactaatagaatatcttttgtgtgtcttttcagtttttattatatgtttattattaaataattaataacactagtaatatattatttttgtaaaagtatattttttatgccttttcattttctgataaatttgacaatttatattaagtttgaatattataataatattatgagtttatcaataagtttacattaatttatttaattatcatattataataataaaatagtttggtcaaataggtaggagttatgagaataaaaataaaattaatacaaaacatgtttttttattggagaaaatgttaagctctagaaaaattagaaaagatagaataaaaaatgtagagaatgctacttaattaaactttttaatgagattttttttctagaataattgttattttttgcacaaacggtgtataatatttttttttataagtgcgtaatgttttataagccttttagtagagataattataatataaatttgtgtttagtttttttctattaaaaaaatataaaaggaagcctcataaagtagtaaaagttgaaagaaaatattataaaatgtcacatattttttttggacttactttttttatatatattataaaaataactttttttttaataaaaaataagtaaattttttggctcacaaaaaatacataaaattaattatagaataacaaatgttttgataatttgaaaattaactaatattaacagtagcttatgtttttattttctataagaaaatataaaaaatgtagaaaataattagaaaaaaatataaaataggtaagattttgtatattttcctttatacaattaattgattgatattaatataaattcaaatggaagtgattatatacaaatgaaaatttaaaatactctattttctttctaactattatatattattatgattacattactaattattatttacatttttataagataattattattattattannnnnnttattattattaaataaatagtttgatttttctttttaaaaggcaataaaattattttgtgaaagttgttgtggatttattatcatattattatgggtaaatactatttggacgctatgtttaacaaaattacagattggactctatggtttgttaaataataaaatgaatcatgtattttttaaaatggtacaaataggaccctaagctgaatttttgacaattttctcttaatttaatcaacttgaagacaattcctaacatagacttatgtagaaaatttaaccaatttgtcacaacacctctaggtcagattattattaagtttaatttccacaaaaaatcacttcaaggtcctatttgtaccattttagaagatacatagtctattttgccatttaacaaaggtccaatctataatttttgtaaaacacaaggtccaaaatagtatttacagttttattattatatttattcttaaataactatgtaataagttgagtgatcacttagcgtcactttttacttaattaatgtattgttatcactaaatattttttttattaatggtactacgaccaaacaacaaacagcttcaaacaaagatagagacaaaggcccagagccccaacccagaacacaaactagaaaaaaccaactctaaaacagttacactgacgctccatgttgacctcgcttttagccagcgacagtgagtcaattaataagcgattagaaatataataaagacagagcaaaaatcaataagaaataaagaacaccaggttttaaagaggttcgacccctttagttcggtaatagcctactccccttggattgtattgacttgagaacaaagaacacagtgtttcctctctcaacgctttcacaatgaaatctttgagtgttttctcttagatctctctctaaagcaattctttcgatccttttaacagtgaggctagatcactatttacaggactaaatgcatgagggaaggtttccttttgcatgcaaaatctataattggtaagaacatacattacatatttagaatacatgaaatgggagattgagacagcctgccatatccctctgattcaatcccataattgtagggatttcctttgtgcttgggcttcacgatatcaactctcaagtagtcaagtcttgatacacagctcagagaactaacttcactcgttgctcaaattatcagtcctttactctgcttggacaagcagacttcgtacatgcagatatgttgc

SEQ ID NO: 22711 - DNA, 6736 bp, Cannabis sativa
gagagagagagagagaggaaagtgagtgcgaggaggtttgaaccgagctgagagggaatgagagatggtaacagagagagagtgtaaccgaaggtgttgtgtgtgtgtattttttgttcatttttaactatttttttattaaaaaagataaaatgagaagttcatgaaatcaaatgaattatttagtaaaatttacttaggagtctaaatttttatataggatattttattaagtatttattgtgaaattttcaatttttaatttggtgagatttcaaagttgactatgtaatatgcatgtgtttttttccccacaagaagagtgctatttttttttttttttttcaaaagaataggtgagcaatttgaaatattgaaataagtttttgtttttttttttggttttgtaaagtgggaaaaattggttgagatgggccgggggggttgggcggagtttgcaattagtgagacccctcgttttcatcgaccatagtcaattcccacctccttcatatccttcttcgctgcaatccgttttctttgttctcttctctcttccttcacactctttctctcttctcatctctccctcccttgcttcgcaaaacaatcgctctcctcggtcgcattccgccaggtaaattcccactctcactcgagatctcatttctcttatttctatactcaacactgatttcctcactcttgtttaatttcatttaaactctagctatcatggatgccacaatgcctatgtgcaaatctgttacttcaactcctgtaagttcctacccatgttttcttttttgattccggatgttgggttgtcctttgattagtttcaattcatctgggtcacttatttttcaaatcttgtttttactaagtttgtatgtaattcgaaatgaataacttcacttcttattaccacattgcatctctctctgatgatttgacatgtgagattacacgtttatattgtttttttttctcttagtcgtgttatatagttagtactgctaatacaatccttgtcttcttatgggaaattgattagcactacgattactctcaccattgtttctattggcctaaattttgtgtgctcattttgtttgcaatatttgggtctttgaagggtttgtttatgtggagaacccaaggaattaggagttcccagtgcagttttatggtggggaataaagtgaacttccctagacaaatagctcaggggatgagggttagctataagtctaagaagtcagggggagctctccatgctacatgccgcgcagaaaagattcttgtggcaaacagaggagaaatagctgttcgaattattagaactgctcatgaaatgggaattccttgtgtggctgtttactcaaccatagacaaggaggcacttcatgtacaattggctgatgaatcagtttgcattggtgaagcaccaagcaatcagtcgtaagcaatcgtgctttttctttttgactattttttttaggttgatttttttaagtgctgactatcaaatcattttccttttcagatatttagttattccaaatgttctatcagctgcgattagtcgtggatgtacaatgttgcatcctggttatggtttccttgccgagaatgcattgtttgttgagatgtgtagagaacatggaatcaacttcattggaccaaatgtgagttaggccaattaattttttgcagttctgttaagttgatgctgtattaactattacccatttctttctattgtgaactaaagtgagctatctaatgtggaatttgccataaatacccaatctaatgtagcttttctttatccatatgagaaaagaaaggaaaggagaaagaaaaagaaagaacatgtgtagattttagtgctaacttttgagtaaattcaatgacccagacatattttaatacttctatgatttttctatggccatatcacggattcagttttttctaaaatattttgattgtgttattgacaataatataaaatttgtttagaggatttattataaatagaaaagtttaatggttttagtttttctaaaatattttggttgtgttgttgataatgttttgaatatatttgtttttttttggaggatttattaacttttgaagctatactttctggaaagaaaaaagaagaaaacctttttttaccagaatcccatgattacacagtttttatgttgataattatttatgacatatattattgtttcaaattcctatctggtttgtaaatattatgttttaccttttcagcctgatagtatccgtgttatgggtgacaaagcaacagcaagagagacaatgaagaaagcaggtgttccaactgtaccaggtagtgatggattgcttcaggtatcctagttgactctagctctcaaattttaaatttccttttatccacctagctattatgaagtttgtaatagtcatttggttatattgtgcattgtattgccataacagaacacggaggaagcaattaggctagcccatgagattggttttcctgtgatgatcaaggtataaatcctctacagcatctgttgaaatcctaaagataaccttccatcatgttgaagcattaaactggaatttatatgtaagctgccttataccccatgtgaactgacaataattttatgtctccaaggcaacagcaggtggtggaggccgtggcatgcgtcttgctaaagaacctgaagagtttgttaagttgttacaggtatattcttgaagtggtctttgccttttctttagtgctttagtaccattcgcacatgtatctcaagattctataactaacaatagcacagatcttgtagacatctctagttatcatgtgcattttctagagttaactgtcaagagattgaatggtaggggcctgacatgtggatttaagctttaataagatatgacactggtaatgatagcccattctctatcacctaattaattgtgtatgtgtagggatgtaaataaccaaaaggtcactcttgttgaagatttgtgctcaattgagtttttttttttttttttaaattgttctcagcaagctaagagtgaggctgcagctgcttttggaaatgatggagtttatttggaaaagtacattcaaaatccaaggcatattgaatttcaggtaatactcaatgaaatcctagtgattgataacacaaacacaagtaaatatgcattgcatttgttcgtattttgaaatctaaaagtctggttctttaagataagttccttttaagtattacagaaagagagtgcttaaaatgaccattcttgaggactgccataggaaagaacattctggttaaatgttacttttaggaagaaaattttcaagcatttcataaatttgatctcaattcagacgtggttgataagttggattgatgcatggaactgtgaagtatcaagatattagttctttttagatgattcacaatgtctagggaaacagggattggaacggttcatgcaataatgctgagttgttttgttaagtataataactgtaatgtttaattattcttgttgtttcttatatggtatttacattttaagctgttgagtgtcatttaggtacatttctatatagctattcattgcatctcattttggatttgctaagttaatgcctattttttcaattggtacttcaggttcttgcagataaatatggtaatgttgttcactttggagaacgtgattgcagtatccaggtactattaacaaatctcatggcttattaccttttttcatgagaagattcaattattagttatcaagataaaacttgctcaattctagcttttagttaaccttgataagttataagttgctatactagatttctactttcagtcatgtaccctgttagctcataaaggaaaatccatggcctagtgaaggtgtaaggctaggttgacactgttttgttattgtattcattgttaggctgtcgtaatggcatttcaatattaattatctgtactgctttgtaatgtgaagtaaccctctccaaattagagtaaattttgtagacatttgattatactttctcgtagtgcgacttgtttgtaaaattcttaacgtgagtgacaaatttgttgtgcatgtttgtttgtatagaggcggaatcaaaaacttttggaagaagcaccctctcctgcattgaccccagagttgaggaaggccatgggtgatgcagcagttgctgctgcagcatctattggctatatcggcgtgggaaccgtggagtttcttttggatgaaagaggttccttctatttcatggaaatgaacactcgaattcaggttagaatgattttttgaggaagtgggtatcaatctaagaaatgcataagaagttaaatgctttactgtgaatataaatatattttcatttctttctttctcgggtgctggttgatggatgattttaaatgtaggttgagcatccagtaacagaaatgatctcctctgttgacttaattgaggaacaaattcgtgtagctatgggtgaaaaactccgatacacacaggtagttgatgagtgatttttaagataagcttctgttaaaaaaaataaatcattcaaatggctgatctgatgcgggtttattttattaacaggatgaaattgtgctcagaggacattcgattgagtgccgtatcaatgctgaagatgctttcaaaggattccgacctggaccaggtgtgttttaatggtgtgcctgaggaccagcaatccttggttgcttgcaattgaaaattaattgctctcaccaatttgtttttgcaaggatcacatgttttaaagattacctcacactttttccttctttcagttctcatatttttttcaagttactgatacattcattaaataatgttatcatacatttgttttcttgttcaggaagaataacagcatacctgccatctggagggccatttgttcgtatggatagccatgtttaccctgattatgtggttcctccgagctatgactcccttcttggaaaggcatgtcaaatcttaccaggaaatgttttttcagttggaatcattgtagattggaaaataactgctttgcctatgcattgtattctttgtcaaatattttttcagtattttcacgaagatctaaaatttgctatgggatttatccaattagggccaattacttttgtattgctttaccagacaaggcacgttgattcatagtgattctaattactgtctggtgtaaatgcagctcatagtatgggcaccaacaagagaaaaggcaatcgaacgcatgaagagggctcttaatgacaccattattacaggtactaattgagtttccttatttcattataacaattctgaatttctgatagttatcttggtgggattttgctatattaagtgtgttgagttacttatttaaacatatttgaaattcacaggggttccaacaaccatagaataccacaaacttattctcgacatagaggtatacgaaagctcttgtcattttttctcttattatcaatgctttaactttaatgaaacattgtccaactgctacacctctaattttgtctcatgcggagttttatgtttctttctttcattgcaggatttcaaaaatggcaaggttgatacagcttttataccaaaacacgaacaagagctagcagaggtaagtgataatatacaatgcaaaattacattttacctcttaaatgtaaaatttgtgtactctgcataggattgaaaaatttagatcagtgtgtgttggggacttttaatgaaatgtatatatgcagagtagggcaatgttccaaagttgtcatactacagggattaagtgaaagctttcattttatttgtttatgaaattgtttcgttggaaagtactaatttacaagtgtttggtgtggtgacagccccagaaaatggtgcgtgcatctccagtgtaagaagttaacgattgggatgcatagatagctctgagattgtactgcataactcaggtccactgttaggccatccctgatcgtggaaaccagcaaccggcacaaaatttagttagctccattaaatgtttccttgtaatttatttgtcatcatttgaagaagaataaaagcacttctgttaaaactcaagtagttcaagtttttaacaattttgataatggtatggttgtggaattctcctctctccaaatggatttgttttaattataactgtttctagtcaaggtatgatgtggaagtttatctgaacctaataaatgtgtgacgcgatatatttattaccataaaaaacatcaatcagattttttttttctttaaatttaggaacaaaccaaatcagatttggtaaaacctctctacgatttcatctctcttcaattgtgcgacctcatctctctctctccattatagatgtaaattgtgtgttgtgctggttcgacttatattttgaaaaacttgcaataatatgagtcgtgttataaaataatataaaatagatgagaagaaagaaaaaaagatgaagagaaaaagagaaagtaaatgagaattttccagttgttttttctaatggggtgaacttctatttatacaaatacgagagtcaaatattaagaaactaagaaaaagaaaaactaaaaaaaaaggaatgttg

SEQ ID NO: 22712 - DNA, 2651 bp, Cannabis sativa
acattcacaagagctctggttgctttcaaaccctaatattgtgctctgttatcttcactcttatgtcttggggagctcccatcaacgtgaccccaagacaaggaaatattagcaaagcccacatggatgcacgagagtgctatattttagtgtcatttcagtatctttcctttttatttttttggtagtctttgagtatctttccaagtcttactatggtctatttattgagaaatcttaaaggagacatctttgatgtatagcacttgtgatgtatctataaccatctaggtgcaatttcatatttcacatcttttaatttaataataattatagaacattgcatcatgttagctcatgatgcaatgcttcctatttatataaaggatctccaagggtgatgtaaaatttatattatatttgattaaaaaatattaatttttaacattgtgtttcaatgcacaattacaaaatttaatcaaaattcaatgtttaattagtatttttttaaaaaaaatataaaaaataataattttatcattagctttattattaatttatcataaaatataaatgtaaaaagtttataatttaatacaataactaaatttagttgtaaaaaattcaaaaatgacagtgaatataaaagtattacacttgttgtgatttaaattttgcatcatgctatattatgattcaaatttagataagttgtgacaaatttagatcaatttttggctcatcattggagtaaacttttttacaagatgagttatgttttagcaatagattactaatggaaatgttcttagggtggtgattttggtctcttttaggacatgtcctgtttcatcactgttggtgttgactcagaaatctggacatagatatctagctcacattctctcgctagattaacgagaataaattatgagttaagtataagtagattggcacaacaatttatagtagtttactccctatgtcacgacaataatggagcaacatctattttaagttttatttcttacgatatggattacagaaaaatagctaagtttggatactctaatttttatagagagaaactagagagaaatattatgaccttatggctacttttctgaacttcaaaaataagctagtggagctctcattttttaggtgaaggagtacctattaaatgggaataaaataattcaaaaaatatgaaaaaaaatacatttatactatttttgaccgtagatgatgatctaatggtgaaaagtaacttttgtggttgattgttaatttttggagtttgagtcatgttggcgagacccactccgggtaagttgcaacttaaattcgtaactcacttggggtaaaatttggagttgatagttcagaatttcgattgaagtgtgagacatgacttgataaagcattaaaatagcttcaaaatgcaagttcaatcgcgtaatcgaatcaatattgagtaagttatggccattttactgaaggttgttctgggcccagtgcccaggttgacattctagcacccaagttgacatctagttgccatgttgacatgtgatgttaaccaggaagctagtgagtggaaaaacacgtcggagatgtattttttgatgcctaagtgatattttaacattactcagtccatttatgtgttctggcaaagctaatcactagttcttgaagatgttgttctacggaaacaaaaaacttaaaactatcatgtttctgagtaattcaccttgtcgggaaagtgaaaatataaagttctgaatttgactcttttgacttcatgactctcaattattgtgaaaaattagacaaatggtcgagaaaaaaatcataatcgaataagcagaactcaacacaccatgccatttgtcaacctgggtgttaagtgcttatttcagagcttctgtgatgtcattttggcactttcgaggttcttgaacttgaggacgagatctcctatcctgtttttgaccattttggtgagaatcctgagagcataattggcatttgagtgatcaaaatcaacgctccaggatgattgccaacctgggtgttgggctcaattttaaggcccttggacttgtggttttctccctaagtttacttgtatcttcgtcatttctgatgacggaaaaattcccaaaacgcttttttcagaaaattgattggaaatagcccaagttgacaatatgtcaacctgggtattaggtccagtgtcaggtgtcaacttgggcgtaggccacctgaaagttctgtttggtccccaaaaataattaagtcttaatctttgctgaaaattgagaatattttaaaaagattttttttttaaaaaaaaactccttggaattggcctaagttgacaaaatatcaacccgggcactggaccaacactaggtgttatcttgggcgctggtcccttgttctggcacccaggatgggccgtttctttctcaaaagcactaggttccccatttttgatgaagacgaagaacttgcaagagttggatttttgatctgatgcttggaagtggcccaagttgatagattgtcaacctgggcgttggatagcccgcgcactaggtgtgtaacgtccccgcttcaagcctccattgggtccttacacc

SEQ ID NO: 22713 - DNA, 2090 bp, Cannabis sativa
ataaattgagaaatgttataagtccccgttagtatttttttcggtgtcatattactattagcgcaattaagtgttgagtttcatataatttattattattttttaaatggagtttcatataatttaagataataatttttaaaggatatcgctaatcaataataggacgccgtaggtactactggcatgttctaattatacttcatgttttaattcaacaagcttaccttcatgttttttcttttaaaataaaaaattggttaagattgtgatgttgtttttattttagtctaaaaaaaattacaataaccctttgattagtaaagggttgttcatgctatgggtgctgaagttaatttttttaaaatcttcttaattagacatattttaatcttgaaatttaacttaatacattctttttagggcttaataatgaatgaaaatggaacactagacccttgtatattgttgggaattttctctaaaaaagggccatctacttttttctttattattttttcctcttatgggaatcctgtacccaaactttaggatagggtagaccattattaaaaatatatatttttaaaaagaaaaggaaaacttatccttgtgtaaaggaaacatagtacgagcattgttattagacacaaaatgattaaaacataatacgagtattgctattagacacaaaaggatcaaaatataatatgagcattgctattagacactagtagtagtgttcaacaccacctaaaggtagtgttttgcgattagttaatgatattccataaaatgtaatatcaatttatataagatctcatattaattacatcaatagtgatttaacacaaggtgattcatacaaatgattccttttaacattatatactctcactgaattatgttaaatttttagaaatagttaatgaataggtatttttttaattagtcattatgtatttaggtctagttatttgtgaaatagtacctgtcaaaaaattaagaaatgttaaaaagtactacctaaaagtgttatatcgctattggtatatggattatacataatttcatttaataattattatggcatatcactaattatttacaaggtgacacacttagagtgctaggcacaaggtggtgcctaatagcaatgctccgaaaattttggtaaactatttaaatgttgtctgcttaaattttttgacaattattttctgtctccgagatcattttagaaacaatatttgaaattaagttaaaatgcaaaatgaatccaaatgaaaaatgaaggaaaagatattaattgattgtaaaaataccattacgttacacttaaagtgtaatggtatttttacaaacaatgttttttttttttttttgagtgtagcgtaatgatatttttacaatcaattaatagcttatagcttaaagatcttagattcgaacctgaacagaaagcatgctgtcagtttcaatctcaacgtgttgccattgtttgctattgacctaattaagagcctccttaattcccatgacttctactattacagtagaatagcagcctcctcctgcatttgttctagctccaataagagtgtcgatactatctcttgctaccgaatcaaaactatacatagattttaactcaaaaatagttgcatcaacattgattttaattgcgttctcaattgatttttatccaaagctcagatccatcacctttgctgccgaaggaaatcttatcaggagctttcctccgatgatcaaaacatatagatgtcatacaacattgtttaacatgaataattacttgcaatttttaaaataaaattggatgtaaatatcttcattattaaaggaaaacaatgttcattttcttctgtcatagttagaggatgatcaatatggaatacaaaatgttagaaaagtaaacttaatctgttattgatagaaaatgaaagaagggcaaattaaacaaacaaaaagtccaatttctggttgaacatctcagatctttgcacaatatttatacgatatagaacaaaccaccccgaagaaattcacaccgttcatcaacgcaaatt

SEQ ID NO: 22714 - DNA, 3043 bp, Cannabis sativa
tgtcgttagaatagtacggatacatattatatgtcgtttagaaaacttttattcatacaaatataaagtaaaggtagcagtagtagtaagttagtaacgagtaacgacttggctgcctcaaacatcttatccaactctgctttgaagcaagagcgtggcaacaacatgaacgctttgccctccacttccttctgcaactaccaaataccaaagtttaagctcacaaattcaacttcaaccctcaaccacatctccttctcccatttcactactccctctctcagcagaagcctcagaatttatgctaattccaaccaagttgaaacacagcctcctgtagaggaagaacccaccggtcttgaatccaaggaagcaactaagccctcctctgttccacttgacaaagatcttaaaaaggtttcttctctctctatatctctctctcttgggtgaattgggtcagaagggatagcaaaggcaattgggttttctgggcttgttaagattagtactgttttgggtaatgcttactttatacgatgtttagaaaatttggatgattagtttggagaaagtttatgtgtgcacatcaattttcttcaagtcaatagattttgttgagaatcatggacatggtccactatgtgtataggtgcggatcgtaatcctatggctctgataccatgtcgagaatcatggagtccatctcaaaatcaattggcaatgaatggagtagcccatgttcttatatatggctcaattctctaccatttattccacgtgggataatgtccgatttgatattgtatgtgttgatatgttgttcatataggttgttcaaaaaactgctgcaacctttgctccaagggcttctacagcttccaagaaccctgcaatccctggaactgttttatacactgtttttgaagtacaaggatatgtttccatgttgttaggtggagctttgtcttttaatctactgttcccttcaaatgaaccagatatatggagactaatgggaatgtggtcaatttggatgttcagtaagttatctttctttctttcttttttcatcatgtaatcaaacttatttccctagtgtagaattcgatcatcataacataacaagtaacttatttcaatttttcagccattccatcattacgggctagagattgctctaaaaatgagaaggaagctcttaactatctcttccttctagtccccttactcaatgtagcaattcctttctttttgaagtcttttgctgttgtttggtctgctgatactgtagccttctttggcatgtatgcatggaaggtatgttttcattcaacacttgaggcaatctctatcttaattctactcccttacttctcattcattcttctgaaatatattgtgtgttcttctactacagcttggttggttgcaaaaagaagagtaggaatcctttgatggctctcttccattgagtaccataaataggcattttgatttagcagtggggcactatagaagaaaaagacaacctttttcatgaagatacataatcatggtattcaagcccaaatgatttgttaatatgatgtattatatggggaaacttcattataacatttgggtgctcattaatacacctgaattctggttttttttttttttctttcttttgcaaattttgttttgttatttacttcaccagcaactttgaagaaagaattaagaacacaatattacttgtatgatatgacagaattaagaacacaactttgaagagttatactattggaaatacataggtgtcatttttttaagacaaatttacccttactttaccctaacttaaactctaaagctaggggtaaaatgatcataactaattaccccacactaccccagtaaaaccaataccaactaaaacctctcgacaccaaaaccatacatactaataccgttgtgatatttctagccaaccaatcgagtttctactgttgtcagaccttaaaatattttatttcataaataatatttatattgcatgtataatctaataaaatctccgtaattaataaattacgcttaatgtgctcattttatgaaaaagtctattttctcatagtaacttagtaagattataatttcactcattttattctcctaaaatctatattacttcatatttcataaaatatactttaattaattataattaattcttgaaatattacaaatgctttcataataattactcctctttttaatattttgtgtaatcaaatcaaatcagcttatataatttatacatccttgtataattgcatactactttctgaatgaccatacttcttcatttaaaccacttgaggctagcttaaatggctataagtgggtgggtgtgtgtcttggaggtcctgggttcgagtcccaggtaaaacatggttgtaatatataaacgcttaaataaaagaaaaaacacttcttcatttgaatttctatatacttatctttccttgatgtagtgatacatatgagtgtttcacatgagaccatcagtgaaaaatagtaggtaaagcatctaatgatactcatatatatttgtgtcttgtttgttttttgttataataaggtggacatgtgactcttgaagaagtcagtttgttgttaagtttactaaaactacgtaactatctacagaccaacaaagattactacccaaaactaaatgacagctaagaacaaggaattcaacagacgacaaagactcctctgaccagctaaaatgtgtgtaattaaaattaaaaaaaaaaaaatctagaatgccaaagattccctttttaggaaaggatgtaatttaaattatttttgtttattgtatgtttgtgttagtagaggacctatatatagcctctcatttttaactgtaagtacaactcaatgtctttctaaatactatttttaggttttttctctactaggatagataataagaaaatattgcctaaagttcaaaattagtagttaaaaggtatatcaacaaagt

SEQ ID NO: 22715 - DNA, 1138 bp, Cannabis sativa
gagaggtgtcgctgtcccgcgctgaagatggagattgatcagcagagacagatgaggaggagccagccgggtgagatgaggaagatgatggaggttgctcaggatcttccatctatgtgcagaatggcgcctcaatcttgccattttcgtactccgtactactgaagatagttgagtttaatttaatttcatggtttttaattaaccatctttagagcaattcaaaaacaaaaaaaaaaaaagcacaatatcgtgtgctttctccatcctcttctgtagtttataaagtagctttttagggctctttctctttgtgtctcttgaataaaatggatgcttttttgtttgactttttagtgaagccgatctttgaacaatctcgcaataataaatcctctgtttttgtgaagggatctggtatataattactattttatatatttttatttattttttgaaacatactgtttcagtgaccattcattgataatacatatagtacaatacaaatcaaagagaaaagaaataaaaattaatattcatctagggttggttaattaatattcatctagggttggtttggaacgtttggaattgtattaattttgatggacacttatataattcaatttaatataatacaatataatacgaactaataccacgttacaaaccactcctaaactatagtttatcaactgttaattcatgcaaccatatagcggaacaaaagaacatgattgtgtgtcatgaagcacaagagcaactctcaaaagaactaatagatagtccaagtgcgtaatataagtaaataaataaatataagtgaaatagtatgctaatggaagtaaccttcacagtaaaattattccattaaaattttaagtgtatttatttgttgagatgattcaaaatgtgagtcactgaataaaagaaagcaatacaaaacagaacaaaacatatcatactataccatatataccgaactataaagaaaataacaaataaataattaatttatagatctatataattcagtttaaaatctaaactagtatgcttgcgattatttgaagcaaaaaagtaagattatctagcttcgttttagggatgaaaacacttcttatattcttgctag

SEQ ID NO: 22716 - DNA, 1946 bp, Cannabis sativa
  modified_base (52)..(54): a, c, t, g, unknown or other
tttagaattcatattagggtgttagtaaaacatacatgatagtaaatagatnnnggtaaaataatttccaacacagccctgtggtcctcaacgacataagacccacaaccacaattgtagtcgcgtcgtccattctccctccctctctctcatcttctctccctctttgaaggaacaaattcacaatgagctcgacctgccatcagccgtctacaaccccgagacccaggtttccttcgagcccatagcaaagctcgaatatctcaggcttcccctcttactctttctcgtctctgctcgaaaagaacattttgttcatggtttgtaatatttttcttgatctactttttaatttattttgaagaaactttttttaattggctttgtttttttgtttcatttgagatactaaatatattgattaagtttggtcaaacctttaattttggataattggaaaataataaagaggaaggaatatcaaagaaatggattaaagacatagaaatgtatggaaaattttgtaaaagtagttaacaacctaaaacaacaatttatttttttttattttgaaatgtcatctacactatagcctagggttttaaaccataggctatggcaatgattttaaatcgtaggctatagtttataatattgccaatggtgttaacctgtcagtaaattatttcatcgacgattttctgccttcggctattctatctagttttgagatggttgaataggcaatgactatagagactgatgaaaatacattagctgaatatttaaaataggcaagaaaacataatttttttagtattatgacgttgtcttttatcttgcatcgaggtatcaatctcattaatatgagtcttttaggtttgattacattttttgtatgtttttttgatttttttaagctcgtgagatatagggtttggataccctcggtagtggtcgaaaagtcgattgtgttagttggaaaatcactcatggtactcggaaattttgtggcgttggttgaaaaatcatgtaaaatttattgtttgattttagggttttttgggttgtgggtcttagcgtcaacgaattaaaatagagtcttcaatttaaggtaaaattatcattttttttagaaaaaataccaatctcttcggttatttcccagtatgtcttttgtgttttcgggacctatgtacgtctttgcctaaaaagttttttattataagatttttaatagatgatagactagtaaaaaaaacgaagataaatgttgcttttcttgtagtggtcattttcccatttataattaaaaaataatattcaaaaaacatataatcaagatttattattactaaaattaacatcgtaataaataaaaaaactatattataacacctaaatggttgttaaccccaaaaattagcaaagctacgtttcgagattagttataagcaacgtgcgccattaaaaaagttttttaatcaagctttgggtgatgaggccaaatccatccccacttcgagtctttcaacttgaagaatgaagcgtcaagatgaggagccaatcttgcaagcgtctcagcaaggcttgcatgcaagcatctcgacaagcatgcgtgcaagcatcctgacaaagcatgtgtgcaagcatcttgacaaggatgcatgcaagcatctcaacaaagaatgtaagaaagcatcccagaaaggcatgcatgcaagcatcacaaaaaagcatgcatgcaaccatctcgatgaggcatgcctgtaagcatattgaaaacaccaagccttgtatgcgtgcaagcatctcttaattattttgtgcaggcatctcgtaacgctggcgtgaaagcatctcgacattcatgcatgaattcaagcatcttggcaaggcttgcatgaatggaagcctttaagcgacatgaccaagcttgcatgctt

SEQ ID NO: 22717 - DNA, 4040 bp, Cannabis sativa
tcaacagggaagaatttcaggataacaagattggttgcgccgaggggacaactcggggaagaagagcagagtagagacaacaacaatggcgtcgccggagatgggaatacggcgagaggttgcggaaggacaggctcgatcaagggaaagcattcctttcctgctctgataccataatgcgaaaagagaaaaggcagaatgaaattgtattattgaaatgaatggaaaagaacaatttacaaggctatatatacaaggaaaaagcaggggtgacacatcaatccaacttaacatatacaaagcaccagaacaagaaccaaccgactcaactaaaataactaacctatctgacacacctaaactgaaatagctgaatgagcataaatcggagaagcagttaggatagtagaaacagttgacttagtgattctaataataggtttacaatgatgaaagaaatacaaaatctatttattacaaattatttataaaatttattaacaattaaattttgattaaaattaaaccattaaatctatcaacaatttaatcgtaacaatttacatcatataaataatagatttgttattattctcaaaatatttttaaagtaaataaatcaataagacaaaaaccagaaaactgaaatttggtcgtttatgatattagccacttcacataacataactggcttgactcggttccctttgtttggtgccaaccaacctaactacgcccaagtttcagatagctttcccctgtgcacgagtgggttttcatcttcaattcaagaacaggtgattactccctaaccctagattaaaagatgaagcttcaatttctatctatccttttgctccttttttatccgcctatgcttaatttcggaatagttttcgtatagttataatcactacacttttggtgttattgattagttttatttagaggaaaaggtaatttaagggttgatttattgtcaataaaatagatactatgaagcaaatcttattgctgtcatttatgaggtgcattacaacgatctctgcttaaagattgatttgaatttgttagttcttttatatatttatgtataaaattggagacaaaattgtttgacgggtgatcataattgtttagaattacataggaattaacttgattgtttatcaaagaagccttgttttgttttgtgttctttgttactgtgtatattctcaatcatttctgccatgcattttattgtcttttcttcttcttctttatattttagggatatgggtgtagccatcaatgaagctatagcagtttcagtcttgtaatgcaaacaacggaagctatggcattcaacatttttgtaaccatatattagaagacttagaattttcaatttacaattttgtatcacacaaccgtgatctgcatatgttgtagcgtcacaccttccctaaccatgtcattagctgcgacactctctcccttatcatttcaaacacttaaatctcgtcaacaagtatttcactccatttatctccatcggcacaccgcgaatttcagacttagatttttaccttttcaaactccttttcgccttcaagcctcaagacgaatctccaattctccccaggtttttctctttgtatgtctcatggttttattacatgtatagtgattgttaaagtatgattctagcttagaattttgtttcagggtagtgatactcttgtggatgatccacgcagttggagccgttctatcagctctgaatacagtagacatggtgatgatgaagatgacgatgatgatgatgaagaagaagaagatagaagtcttgatcttttgattaagttcgtccagaatgtttttaagaagatctctaggcgtgctcgacgagctgtaagatcagttcttccaatagttatcccaaccaaactggtacaaatactcggttcttctcagcatagatttattatcatgaaatgaaaaactggggtttcatttcatttttaatttgatctttataaatttgcatctgacctagttcttgaaattcgatattaggtgggattttctgtcaatggagtgctaattcttgcttttttgtggattttgaaggcgtttcttgaggtaaatgaatcatttctcttacattaaatcacttaaaatcactgttgtgtatgatctctaattgaatgggtcttgcaagtgcttctcacagaaggttttgaaatatttgaggttcctctggcttaagaatttggcattggcatgtttgtcatgcttttgaccaataagtcatagcagtactgtagtaacttttcatcttaattctttagttacatcggatcttaactgcttcactagttaaatttagtttccaacatgtaatgttctatcatgtttaataatttgatgtccatgcttgttcgagcccagtaagaatagtagaagtagaactatgtataggactacattacaatacatctggtatacaattcgagaaaacatggttcaaaattacccattagattataagcccacaccaccatgaagtaaattttaacaatacctgtagcttgtcttgtagattgaggctgcctaatgcttctgcaactggttttacataagcctaagctacttgcggtgtatatgcttatgtgataaaaagttcagagaatgtgcctaactttgagcagttcactgtacaagtttggaagacgtgcctaattttgtactgtttattggattaagttatgatgacatgcctaactttatgcaatttattggagctgttgctgtttattgtgttttaatgataataattgagttgagaagttagttctagttctgttaaacacccgtatccataacgttacatggtttgaaattgattattgaatacatcaagattctaatttaaaagccaagataacatgagtagtgatgcaacatttaagaattaagatatctttaaccaaaatgcagtcttaaattcttaatccaatttctatttgttttgaaattgcaggtggtttgcaccatcggtagtgtagtgtttgtgagcatcttactcatccgaggaatatggactgggttaatatatttgcaagaaaaccacaacctttcaataaaggactttgatgacgagaatggcgcatgggatcgtgttaagcctgcttgacaacagacaagcctgcttctgtaacagatgtagtctgttctagatacgaatcttggatacaaaaattgcttacctttctggagatcaagaactaactacatctgttatcatataataaacattttctaaggtagcaaggtctacctttctgtatcatcatcacatatcagatcagatctacaggtataaataaatctggcatgattatgcctgtctcgtgtattcatatcatatgtttcataacttgggactttggggtaatgaaatggaatgcaaaaaaaaaaattgaatatttatttcattcttttgtttaattggatttttaaacattagaaggtaagaataactttttcagtggatgacaattctatttatagatgtgagaaaagactattttaatacaagataaaataaaaattaagaactttcagcttaaatggggcaactccaagataattacagaattctttgtagtactctctcaaggggagaaatgctccagtcttgatgtgttcgaggctccaagcgcttatcttagacgagccactagtactagcaccaccgcactcctcgcggataactctttctggagggaagtagctgaattcccctggagcaacagatctaatgcagcatcctcgcctttgcttgatgccacaagactttaatacaccacccacatactctctaatggctctcacattggattcaataagttcagcttcaaatgtgacattaggatcctgggagtttttgatttacgaggcttggtggacataatttcaaaattaaggtcacctgatgaaaaagcaacagtgacttgaggtaaaaatatgggtctcgctaaaggaatagaaga

SEQ ID NO: 22718 - DNA, 2177 bp, Cannabis sativa
  modified_base (2089)..(2091): a, c, t, g, unknown or other
tatggagtgtaattatcccaaaataataactattattaatgctaattgtaaaaactaagtaatgtcattattataattgaaaattgtgtattcaaatcactaattaatatttaatgacactattataattatataaatttatctatatatatagaaaataaaggtatattgtaatttaatttctttgtatcaaatatgatacaactttttttagcatgtactcacaatttttaacataattacaaaaatactatttttttacaaaagtacttgaatatgacaatacatcacaaatttaagatggtcttagtgaactccatccttgcatgtgagtgactaacaaatataattatacatacaagtattgcatagtgcctctttcatacctagataagcctgcatttgaatagtactgattttagtgaatatttcatgtatatatataatataatataatagtcaactaagcattacattccactccatgtggacctttaactggaacactttcttattcactcaaattatttgtaaaattaggcctcaaccaataaaaatactaccatgaattttcctctttttaacaagcttcatgttcatggtattatattgccttgcatttggattttattagtcaaggtctggaatatatactattacccaaagtaataattaaacaacaaaaacattcagatttctcaaggtgaagaattaattaattaatccaaaatccaatcataatgatttactgaacaaaacattgtacactacaagtattacaccttatccatatacaaatattcatgttggactaaaagaaaaatatgtacatgtgatcttggcatgatcttccttacaaaaattgcaaaattgtatttcattaggctttcgaacgagacataagatcgacgaaggcatcttctttgcagggaattgtaagagctcccatcggatgatcgaatccaaattcttcttcggcttgacttaacaacttttggaaagatggtctgtttaagaaggataaagggataacaaatctcttcattttgttctcatcaccaacataaacagccaaatagccttttgggacatcttttgtgttagaaaaaggcttttgaatgaattgtttagcatgaactatgatgtggaaatggaaattcatcatcttgtaaaaaaatctcaataggaaattgacaaaaaggaaagtttttctattttttttttttggaaaaggaagctttggatacttgagaagctaatatcttatgagtatatatatgaaaatataaaatgtaggagagttatccaattgtatgggggaatgaatggttaagacaaaagagacattcaattaaatggggtctaacaataaggatacccacaaaaagtaacactaccacttgatatgtggtgctattcatcattattgactcaaaacaaaattgacttatggccggtttatttgaaaaatatatacatctatttaaaacttctcactaaatagccaacttggcctcaacaatttgaaaattagagctaacaattgtattaagtgatgattacccaatatataaatatctatgttatttccaagtaacacatgattaagtcattttagtgtttaaaattgaatgggaagcttaattacaatacaagggaatattatttttgtttgatgtaagagaatagataagattcttaaacacaatagctacttctcaacttggctgtggcggccttgtgtgtctacttactcaattgttattttctctagttcccacgtcccattcaataataaagcatagcaataaacttggataagcataaattagaatgacataggctttagggcattattgtattttcagaaaagtgaggatcaacctcattttatgcacaaggataaagagttaaaaaagcatctactgttaaccgagcaattatcgaaattgtaggacgagcagcagtcgccattgttcagttcagtgttgacctcaagcacctatcttcttggctgttcacttgggatttacagttgtgttcgtgttcattatagaatctgcataatttaggtggtgtttggttggannnaatgaaatggaatggaaaggaaaggaaataatttttattctattcctttgtttggttccattttaaagtattggaatggcattcca

SEQ ID NO: 22719 - DNA, 2460 bp, Cannabis sativa
aacacagggtccaattggtaacttttgtaaaacagagtccaaaatggtatttaccctattataattgacgaaataaaatataagtaaaaacttttactaaatataaaagctttcgcaaccgcaaactccaaacacaactcttcgagccatgtctttttttgctgaatctcttccagccatgtttggtgacatgataaacaagaagatgtaaagaataaaatactaaaaagtaaataacacaaatgcagtcaaaagactcgagaggccataacatgtatatcatgaaatgttactatactgtctacaagtacaaactcaggaccgtctaccaaacttaatagtagtagcaatatagacactacagactcaggtccatcatctacatcagtgctaaacaatcctaaacttgacagtgtcaatggtacacaatagtaagtcaaaatattagccaatgcttatataataaactttacataaaagaaaatggcatcaatagcagagtagactgatactcaccagcaaaaatcatcatcatcatcatcttttcttaaagccatatttcttacgttcgtagaacaaatcagtcttggcacttcctaaattaacaatcttaggacacccatctctgtctttctcttgctgagtacactccttgcagtaataagcatcggatataccaactccaccacagatgacacaccgaccttgaaaggatccatagttgcattcatcacagacccgcacgagagtgcagggtcgcacgtacgagtcgcatatcacacactttccatcacatttctcacatagtcttccaattgcaattcccggttgtttccggcacataatcagatcgggatgatgcttagccatgataatctgcagacacagtgccccatcatttataattgttagattcattagccccccaaaacggaaagggttaaattcaagggcagttttaaatgaaaatcaaactaaaaaaagttaggcatgcataaagttggagttgctgggagaatatataactgaaattgaattggactatgtatatgaatataaatcaacccaaaaataataaagttacgaacaaaattataaaccattagtaatttatcatgaaagaaaaaaagaacaacataaatgatacaaaagttgcgaaagaaaaaacataaacgcatcaagaaacagcagtaccgatcattgaaattacctacaggatatgcagtacactcggcggcgggttcgactgaagagacggggcgtgggtgatcgggttggggagagtgagaatgtaggagaaggtgcgagtgagaaatggtgatgacggctgagtaaggtgatttgaggttaggtttctagaagagaatagatgttgggttgggccaaaatatgtggcagcccaattcatttaatctcaaggaagagtccaagaaattaagaaaattttcacctagtacatataatctcacttcattacattaatctcttaataattactttctttcatttttaacttatatttttatattattattatttatgtaccgacttttataatattattttgtttataacttaattgtgttataaatcataataaatgtaaatttttcaaataaattaattaaaataataataattttataatatttataaaatatatatagaaatgtgctttttattttattttcttaattagtgtaaaaaaaaatgcacacccttataattttttaattaatatattattagttttaaaatatatacatatagaaataaatagagaaatttaaatatgaaaagttttttgtgagttactaattaattaatattcggtatatttgataaaatatctatatattacgttataatatgttttataagttgttttcgtaataaagtttataatagtgtataattatataaagttcccaagaaattacgtggggtactcactctaagttggtcattttaattttgggacaagttgaggaattggggtaattactgcgaaaattccaaaaaatttaaaggtgatggagattagtctccaacctcaaaaattagcggtaatagtgcctaaggttacattttttgtaagtccgttggtccctaatttaattgatcggtcaaccccgaataaaatatcacgtgttaattttttattggtccgaattataattttaattaaaaacaatttaaataaaataaaaaaactaaaaatatatatattttaaaatcataaatttattttattttattttatttttctttttttctattttttttatatttttttcttctttgtcttccccgacctttaccccaaccttcacccacccaacagtaaatcaaaaccacctcgactttcacccaccctatctcaagatttgctagttcgaaattatcccaacagtgatttcaagggcactaaacaaaactagaacccttataatggctact

SEQ ID NO: 22720 - DNA, 1985 bp, Cannabis sativa
tttgagtgaaagaggtctaattcagctagagaaacagggcgtgttaaggaacaagttgaattgtaagttcgagttttgtgaagaatgtgtactaggaaaaacttgtagggtaaaattttctactggtatacatgtcaccaaagagccactaaattatgttcattcagacctatggggtccctcaaggacacaaactcttggagttgctaactccttcatgagtatcattgatgattttagcagaaaagtttgggttttcatgttcagaaataggaactaggctctggaaacattcaacaattggaggaagctcatgaaaaacaaaacaggaaggaagctaaaagtgttgagaacagataatggactagaatactgctcatatgaattcaaagaatattgtgccaaaatttgaatcaaaagacacaaatcaataatcaagacgcctcaacaaaatggattggctgagagaatgaatataaccattcttgagagggttacgtgtatgcaaaagggtgtagggctacaaaaacttttttgggatgaagctgtaaaaataacatgttacttaactaatagatgtccctatgttgctctaaacttcaaagcatgacaagacatttggacagtaaccaagcaaaattatgatcacttaaaggtttttggatgtcttgcctatgcttatatcagacaagacaaattagaacctagggccttgaaatgcctgctcgttggtgttatctgcattttcacgggcatgacatttagatatcaatcaaggaggaggataaaggcaacgacctcagggaagggaatccgtgaaagggagattccgcagatactggtcgcgcagaagtcatccgtgaactagtgcctcactcccctctgagatacaaaaccctttgctctcgtagggagaatggatctttttctagataggacgcaccagtccgaggtagacctttgatccacggaagctcagccaatgcgtgtcaagctacggacaaaataaccatgcctttcgttgtataatgttagaggttgtctcccacgttaccttatcatgcaaagcgtgattgtccttatgtacagagctaaatggttcaatggctaggagcaagggaaattcaaactatggcaaccctaaggttacacgcgtctgaagcccagtcagtatagctagtacgatctaacatccataaaggccacatggaaactgtgccacctaccaatccgacgataggggttcactgttggaagatccacccgagatggcccatgcgaggggatcggcctataaatacccctgaagacacacaaggcaagggattgtaatcctcttttcaaacgacaacctcaggatggaagactcatttttcattatcctaagaaaacacatctctgcaaccctacgatcaactccaaaatattcctactaagattcctcttctttaaatggaacacaatagtctggagtaaagtctatcctttttgtatttgtataaataattatcggccagagagcctaatgaaatggactcgtggactaaggataattaacgcctgaaccacgtaaaaatctcttgtctgttattttattatttacacccattactttcttaagctctaatattattcagttgcgaaaaacctcggtaaacattttggtggtttcattgagagctgaggaaagaaacatgcacggcgactaccggcacaaaactgcctggaagaaggtccgtgcaagattagaaggaagacctcctaatcatttttcgaggtcccaccaaaggccacaaatgtacagatccaaggtgttgcccataaaaagaatggatgcctcagtctattcaagaaaggtggcgatgatgaatgcaagcagtctcaaaacacatgatacgccaatacacgtcctcaaaagcttatatatggcaagccaactctctccggctttgatccagtgtcgtatctgttggaaattattttac

SEQ ID NO: 22721 - DNA, 6670 bp, Cannabis sativa
  modified_base (6533)..(6535): a, c, t, g, unknown or other
ctctccactaatacctaataccctcttgaagaagaagaaggggattggggataggggatgctgccccatcacaatcgcccacttcatctcttccgataccggctgcagtcgccatcttctaattcctatcaggttggtgcttgtacaatttctatgataattatttatttgaatctgtttgttcataattctttacgtaaaaaaaactagattggaattaattattttttcaatcgctatgccgttcaagaatttgaacattctgcaaaccaaaaataaatttacgattcaattgaattctaggacaccaacattgtagatttatttgatcaggtcttattagaccactttggtcaatttctctcccaaaaattagtatacggctccttcattttcctcttcgcgacatccatggcgacccactctgggattctccacagatcgccctttccgcgatgtgtgacgacccactttggggtcaagttttcactttcatacaattgattagtgattttcataattgcgttttaatttcaccatttcagtatttgccttttcttttttctccctttgttactgtgttcatccctattagctaatgaaatattcaaccatgctcgttttagtgatgtgatgtaagaattcactttgaattagttattttatttggattaaatttcgtagtccttttttttgtgttcataattgagccattatgtgcatctgtgtggtgctatatgtttagaaagaattatagctaagtttattgtgtagggaattaagagaaagtagattttgtttgtattgcaacccacaaaagagaaggtttttgaggtaaaagagacaggaagattcttcttttggcaatggaagcttctgccaaaactgtgtcagccaggaatggctctgtgaatgaagattggacagtagttgtaccccgtcgaggtcgcggtagaaaaagaaccaatcccttagttcaaactcgagaaccactgccccagaaaccgatcccttggtctccaacagattttgaagttaattctcttagagaatcaaaattgatgcagaagatggaactctgtatgaagaaactcgagacttctcagttttttcttactttattggatcaaattgagtctcaagaaatttcaaataatttgcaaaaggttttaggttctgattcaaacatgcagatggtaatttatggtatcggcagcatcgaatcctatgaaaaccctcgattgcaattgagtcttgcacttctgctaaaaagaaagttcacctggattggaggcattgaggtatttgatccagttctttcttccacagaatcacaagttttggaagttctgggttgctcagtcttatctattgatgaacaaggtcggcgaaaggcgcaaaagccaaccatgtttttcatgccacactgtgaagcagagttgtatgacaatcttttagaggagaatttgagagttgggcttttgaaaaacatagtattgtttgggaatagctttgacaactatgaacagtatgcatcacaatttaagaactcagttgttgcattatcaaggcatatctttttggttagtaaagtcacagatgagttcaaaattaagacagtttcagatgattattatggtgctttccatgattcaagctggcattttttcagcccagctgttgttctagggtcacagtctagtactgttgattgcatttcagaaatttgaataaattgcttcactttttgatttgtctcctaatattttgtgcatattgcacttgaatactatgtaaccacatttatctttattgtattataattgttttgttttagcgcttatctagtctttaaattttacacctaacacttgaagactgtatacactgattaatctttcttgtttttcttactgttatatttctcgtcttcaattatacaaaataaattgaagagggataaattttcaaagatctctggcttcatatattgttcctaaaatatgtcatttgctagattttttttttgaataaaaaggattttttcctttgaattatgactcttgtggcttgtagagttttggccctatttttttttttgtccccctgcaaatatccccattcaattatattctgctcttttttttcaaaaaaaacaatttgcttattaggccttgagttacttgcagcatgagagtctatttaactacttttaagttatttgaaatttagttcattatcgttaacacataaaaacattttctttaagaatgcatgtgcatattcgcataattcatcattaggctgttatttatatatttatttttttgtctgaatttttgaattgagccagatttacaggttagtaatagatcaacaaattgtctgaaataatgagcagaatataactagaggggatatttacaatgatattatttcaaaaattatagtctttgatattgtttcgaaaggtttgacttacaacggtctcttagacatgggccaagcaatttatgaccctttcattaatgattgccagtgactcactgtaaatggtaacatgtctaccatttgattagtggttgccaatgattcatttttcaggcttcaatctcagttatgattattattataaatgagtgatgtcaattgggttattgttttgaagttttgtacagggcaggcctcaaatttttataaaaagccaagcttctatgtattttcttgtctaccaaacacaaatatatgatgtactcgttaagcatggttttggttgaaatttccagggaccatgagaggcagtgagaagccgagttgggctgtctcgccttctaatgccggttaccactttggtactagtggactttcggtagcagttgcaacaggaataactcatcctcttgatgtacttaaagttaggctgcagatgcaacttgttggtcagaaaggtcctttggctggaatggtaatcttcattgattttaatgaatgcatcatgatctgatttatcagagtatactcatgaaaaaaatcatgtacaggggcaattatttgttggagtattaaaaactgaaggtcctaaatctttgtatctgggattaacacctgcattgacaaggtcagttctgtatggtggtctacgcttaggcttgtatgaaccctcaaagtatgcttgtaattgggcttttggatctaacaatatctttcttaagattgcatctggtgggtttgctggtgcctttgcaactgctgtgacaaatccaattgaggttttgaaggttcgattgcagatgaatccaaatatgagaaatagaggaccgatagaagaattgcggagaattgtttcccaagaaggaataatagcactttggaagggggttggccctgcaatggccagagctgctgctttgactgcctcacaactggcaacatatgatgaaaccaagcggatcctgattagtttggcatcatttgaagaaggatttcatttgcatctcatctcgagtgttgttgcaggcacagtcagcaccttcattactgcacccatggacatggtgaaaacccgcctcatgttgcaacgagaatctaaaagagttggtaactataagaatggatttcattgtgcataccaggtcattcgtacagaaggccccaaagccctttacaaggggggttttgcaattttcgcaagattaggtcctcaaactacaatcacatttatactctgcgagaaactacgccaacttgctgggttgaaagcaatctagtacacaaatatattgaattaaattttgcaatggttacaattttggcgttagaatagaagaggggctcaactcaatgatttgttcatttatagttttctagttcatcctttttccacattcttttcctcaaatctgtaatctgtatccaatgaaatatttaataggaaagaaaccccattattggtttctgtttttgttttatataatgaatgaagttataatattctactgctttctttttctggtaaaaaaaaacattgttttgaagttttgggtttcagatggcaatctttttaggctatattatactctccagattatgctggttaattagctgaattcttaattatgtgatcttttaatattggcaggtgaagttgtgacgttacctgatatctcaaagggcaaatggatcttgaagccaaaagctttggacatggtaataggctatactgattatttgatagtttattggacttgtgttttgtggatttacaattttgaaataattggtacttgacatatggtccaaacattgaagggtgtgagtttatttgtttgactaagtttttgtttttgttcttgttttagttctttttggttggtgggggaatgccaattgtgtttgaagtccttatgaatggaggcagttatatactgtcaatatatctgtattatttataaatataagcttattgtgtcactgatcagatctccatgtttggagtgtttcatggggtttaaacacagtgatataaaaaactgagctgtatacaaacccatttgatcgtgaaatgatcatctggagaagtccttggaaggaacttgctcaaacatacgcaattttaatgcttaaatagtaggacgattctattccttaaatttaggatttaaattatggctctgaaatatcattgccatattttctttccttctattgtttgtgctaagattgaaatggttggaagttggaacttggagaactaaattaaacaagttccatctcgaaccggcttctactatctgctgtgttatggaacattgtcaattatcttgaaccatgtgtaataagttaattgaaattatggtactttataaaatctttgaatgattgtcagggttgcgagaacttggcggtgcggttgatctcataaatcagtacaaacttatgcctcactacgaacttttctgtagaaggtcaattccttcatcaatatctgagacacactatctacatagtgtggttggaaaccttgaaatctgtaaaggggaagggatggagttggaacagctccttcaagatggcacatttttgcgaaaaagagatgcatgtattcgtccttttaatctgaatgccctagatgatgcctttcatatgagggatgccaattcagttaacctttctcttgtaagatttatgaattctgtatgtggttttatacttgctattttagtgtatgataattgcaacttattgtaatgttcataggcagagaaagggattcctactactgtggcaaaggttaagagtaagttggaagaaaaggtgacgaaacgccgaaggctcgatagcaaggataaaacaactaaggattgtaagaagcagaaatccttacataagaataaaacttatcagaaggaaaagaatggcaacttttctagtggctctaatcttgaggacttgaagaaacaaggagaaaaggtatgtatgtaccttttgttgttctttcatattgacttacattctactgaaccttaaccatataatatattcttgggttaaaataacattcttgagtcccattgaaataggcaaggccattcctatattaattgatttatattcattgagtacaactaaaagatgatctcttagtttaaatgatggagaaatttcatttgacatattcataggaaattaatactatcatcattatatattgtctagttcatcttatatttttttggagataaatattaagtaatgtagcattgttttatcataatgtattgaaattgaattccttacttgatatattgatttattattggagctgattttcatcacacttaaatgtagagaggtggacagagagactactggagtcatttgagatgaatgttggttcttattctttaattcgttaaaagagacccatttttctctttcttttgtctttgtaatgactaaccttttacttcaaaatttcttttcctaatatgccggttttgtcataatgattagtaatttttttctttatcactatttctttttgaagagaaactttattcaacaaaacggactaatagcgtgcaactctgcttaaaaattgagaaatgttaaaaggcacaagtggtggtgcttagcaccatttagatgtgtcatattactattcgtataattaaatatcagatttcatataattttaatttaataattattatagaataatcactaaccatttatatagtgccacctatagagagtgctaggcgccgctacaactcaacaagcaaaaagcaaaactagctaacttatgagctactttattagttgcacggaaaggaaagaatgaaacaatctcaaagagttggaaaattattatacaactctctaagggctcatttggtacgctgtataatggtcgtattgtattaaataataaataacactatgtttggattaagcaatatattgtattaattattacaatcaaattttttaatacaatgtatgttgtattatttaatacctaataaatggtnnntattagcttgcattataatatttacaaaggatttggggtcaacactaatcttcgacctggattcggaccccggactttgacccgggcccggaccccaaaccccgaccccgaacccagaccctggacccgaacttg

SEQ ID NO: 22722 - DNA, 5342 bp, Cannabis sativa
taggcttttacgggtttttaaaacccaacattacattttatatattttggccttcatcacggtatagaataatatatttgcctgccatgattggtgcaattattattatacgccgtacatatataaattacatgtgattgttttgcataatctaagctgagaaaaacgcagatcactattagagattttaagggtaacttaacaggaaaaacaaaacaaaaaaataaagaatgttggatgtgaaatttcagatcagcaatatatcttatcagtctcctatatagaggtaagtggcgggtcatcttattgagtatttcttctttaagtattttttcgtttcaagtaaactcaacaccaagaagcaatgccatgtgagtaatcgctgctatatatgctcatatgtaaaaacaaattaaaacatgtcaataatattaatcataattattatatataatattcaaaaattggaaaagagtcaacactataaagcgtataaaaactaaaaagtatgcgtacccttgtcctcatttaactgtatagctcatgtatccacagttcaaagctctactatatatatgtatcctaatccccttcattattagccacagacacgaaacaatttctctctctctctttctctctcatatatatatataatatatatagatatattaaacaaaatatgagtatgttaaagcgaagtctatcattgatcataattgctttcatgattgcttcactagtgtggtcttcatgcttaaaaccttgccatgctaggcaatggaatccaaatatcccaacatggacaaaaaacaattatcacaaaatagcaccagttgaaaagcttagtggtactactactggaaacgttgccgttttcaatgtcttgaactatggagccaaaggtgatggacgagctgatgacacaaaggtcagcttcttctatatttatataaattatatatgatatccatattttatatgcatgtatactttcgttcataatgatgagtacgttattttaaccactatacatacacgagacttttagttcttatgataccatatttgatatatataattgttgttggtttttgtgtccaaaagtgttgactgctgcccacatgaacaaaatatgtgttgtaaaaaattaatggtttaaatccaaatcacaaagtataaaaacttaagtagagatcacaaaaaactttaacgagttcaaaagtatattcctctttatttgcaacgacaataaagtcaaagcacaaatcacaggctgcaagtaatagtagtattgtagtcgtttactaattaattggtttaattctcatcatataataatatatgtatcactaaaacgacaggcgtttgaagcagcgtgggcagcagcttgtaaagtgaaggcttcgacaataatagttccatcagggtccgtgttccttgtcaaaccaatctcattctctggtcctaattgtcaatcggacattgtagttcaggtgaattaatcacaactctaatgattagtaataccaataatccttttcaaaaaaataataacaatattaacaataatcaattatattataatactaatgtttgtgaaaatatatatattacttagttggatggcaagattatagctccaacgggctctgcatcatggggttcaggtcttctacagtggattgagtttacaaagctacaaagaatcacaattaaaggaaaaggtgttattgatggacagggctcagtttggtggaatgactctccaacatacgaccccacacaagatttggtaattgattttttcaaagccaaaatcctgaaaccccattacacctttagacataattaaactgattagccatgaaaataatcttgtttgttcaggaggaaagtatgagtgggaaaatgccaggcaccaaaccaacggtaatagtcattccctccacctaataaaagcttattttcccttcctccacacattttccttgtttttttctttttaatttttgaaagcaaaattatataatcatacaaatttgttctgtttgagtgcacaggctctgaggttctatggaagtaatggtgtgacagtaactgggataacgattcaaaacagccctcaaacacatctaaaattcgatgattgtactaatgttcaggtctccagtgttagtgtttcttcccctggtaacagcccgaacacagacggtattcacttgcagaactctcgtgatgtgaccatctatggcagcaatcttgcatgtggtaccttccaaattccttccctcttaaccaatttctttctcttatacaagtttttcataaccatatcatgtgtatatgaatatactattatgatgcaggagacgattgtgtatctatacaaaccggatgctcaaacgtgtacatacacaatatcaactgtggacctggacatggaatcagcattggtggcctagggaagggcaacaccaaagcttgtgtgtcaaatgtcactgtcagagatatcaaattacaaaacacattaactggtgttagaattaaaacatggccggtacagagttacaaacatcttttcagaacatcattaacaaattatgaagtttcatgaatgattttcaagagtcttgactgtcgtttcctattcttttttaccaacacagggaggatcaggctcagtacaaaatgttatgttctctaacattcaagtatctgaagtggaaacacctatcaagatagaccaattctattgtgacaaaagcaagtgttcgaatcagacctcagctgtggctgttagagacatacattacataaatattaaaggaacttacacaaaggaaccagtgcatttagcttgcagtgatagtttgccctgcactggagtatctttgaacaccatacagctgaaatcagtccaagcaagtcagcacttatctggccctttctgttggaaggcatatggacagcttgaaactgccactgtacctccggtagactgcttgaagtccggggctacagttcaagctaagagtgaatcttgctgagctgactagcttacgcaattcaagtggatcacttacatggaaaaggttttaataaaagcaatacaaatagtagtagtagaagtagtacgtatctatatgtatatcaaccagctactttatatttcaagttgaaatactatgaacttactgccaagccaacatgatcatatatactttacattttatatatataaaagaaaagaaaaggtttaaggaatgcacatgagaagggatcaagtgaaagtaaacatgcacagaaacttttaataattagtgtatacatatgatataaggttttatgtttctacaacctatagaatgattaggacatggtgcattaaaaaggtgtctaaaaatagtacaaatcttgctcctcaacaagttcctctcaatattgaacacagttcgatgtatttgacctattacatttgtggtgttgctcttcctaaagatgtgaagacatgtgaagctgcttcgacctctatcgttatgtggaaaaatgtgattcgctacagtttttgagcatcatcagccctcagaacaactccaggacctagaagctagaacatgttaaaccctacaaaaaaagaaaagtcaagctcatgccactgaacaattaaaggagcacccataagtatgataacagaaaagtgatgagaaaaaaactagttaacgaaatcctgcaatttctcctcacggttcaaaggaataatgaatcatgataattttccaaaaccaacagcagccttcctggtttggcggggttcgacttcgaccttttcaggacttggcaaacctgtcctatcctcgtactttttttccagggcctgtcaccattattggaacaagtaagcaaacacaaaatataatttggagtattaaatcatggaaggagaaatcttctattaactcattttaacagcatccaaacaaaaagcaatggcctcaattgcaattgttatggagaagtaactataaagatggattgataactcaaggaaggtaaaacaaagaccattgttacttcacccccccatccacagatgtggaaaagccaaaatgaaaaaatgtgctgaaataaaacttgacatcagtaaacatgtctactcacctgcaattgtgtacttatactgctaagaacttcttcagtcattctatcaaagaagagcacaccctgcaagaagttgctagctataagagaacatagaatcatgaaagaccataaaactgaccttagaagatctaaattaatcctcaaacaattgcatattccaagcaggatttttattcaaaaaggaaaaaaataaataaacgcgactcatgtgatgatataccctacagtacacaggtacaactgggacagcttacttggagaattatttagtttgattcaatagtctataccaatcaacatcattgcttatacatattgtgtgggatgttctacatcgttcttgttattcttaggtgagagtataaatatgagtaagccatttgataaggtaatgaatgaaaatatcagaattgtttctctctctagtttctctctgtactctcttctatgtttcttcctattcttcttcttcataattctatggggtaaaccagcactcaaagttttgcaatttttgatacaaggtcgtattaggtgatgtttattcttcaagagaaaagagaacgttggttaaaacattttggacacatagaaaggcttctttgaacatccctccttactatgagcacaattttagataacagagttctatccaatatgtggtccatagccagcttcttcaactctataaaagaactataagacccgactttaaaccatatatatactttactctcaaatctatatttacatcgatcaatgaaattaaatgacttaatattcataaagaaaggaaacaaaatcttgaacaaaagctgggaaaaaacctctaaatgatcgaattcatgttggaaaacccttgcaggaagaccagaaagattgactgaaaatcttgcaccattaatgtcccttgcatcaatctttaccgattctggcctctgcaaaagtaaaatatacattgtaaaatagtctaaaaaattaaagcacaaccaaaatagccagcaatgtaaaacaaacttagatggcacaatactttgctagaccaagaataaacaaacgaacctacacttataagaaaaaaacacacattatgcacccaaaacgttttagtatttattgcacgttcagttgtccagaagcctattgacaatgactgatctagttatgttatgatcggt

SEQ ID NO: 22723 - DNA, 3386 bp, Cannabis sativa
  modified_base (2933)..(2942): a, c, t, g, unknown or other
ttgttcttgtaataaaaaacttttgattgatccttatgaatggttttaaccatagttctcttggatttgcttcttagctccttattttgactatccattgcttatttgaactaacaatgaatttttatcacaagtgtcttcgaagtcataacagggtgagtcccttgaaaccttcccattcgacgagctaccgtgaatttttgtctaggagcattagtagtattgacctcattggttgtgtcaatacaacggaggtagtgggaccatcttatatataataagatgatataacactttggaattgaatcaaaaagtatctcctctactttgctactttaattttagatttagtcatgttcttagaaaagtagtatttcttaaaattaaccttttcttatcttaatgaccataggattatccactcctaatcactttagaatagctatcaaacatgtaaaacttagttaacatttctagtttttcttaagttcatgaacaatgcatccctgaatctagtaatagtgtatactaagtgtatgaccattctatcattctgagattttcttgtgatcatacttagataggatgacatagaatgttgtttatctctaaggcctttccctagaatgactcaggcagctgctagtaactaatcatacaccttacattttcatcattatgcgatactctaaagttctggggaggtaagtttggatacaattcgaagttcaacataatgatctttgaatcgcataacaaaatatttatccacccctatcagttcgcaagatctttaccttgatagttttcaccattgctaaaaattcatgaaattttttaaacatttaaaatttctttgcacaaggtatattctggagtgattgtctaagaaattaacgataactcatatccactcatgaatatgtatatctatatgtttgaatactgataaatatacttccaagtgaattttggcatgtttttctttgaatagaatgatcttgtcaaaaattactatgaataggatgcaaatgacataaatatactattgtgatttgtgatcttttaatgattgttaagtttagttacaacaaaaaattcttagaagaatgatgtgactcatagacaagttatgatcaacaattaaacattctcattttgcaatattactaatggctttttttcggtaaaatatttccaatctttttataacattaatcaaagacaacgagaagaaagaagaacataccactgtatttatttagtattacgacaatatatgttggtcgtaatttttatacatggaaattatatagtaaaataaattcatcacaaatatgatatttaacatatgagaaattaagccccaaactgtttctgaagatgttgaatcacatccttatccaacatgaatgccttagcaagaacttcaggcataatgggagggttggacccaaacaaggtattagcaatggtaatgattccgccattctggcttcccaagctagcaaaggctacagctggggtctttccgatattgaattggaagtgaatcattcctttggggaacacaaagacatctcccttgtgaagaaccttcgtgaagaatcggttcccatctatgtttgacgaaatgaacccgacatacagtattccctccgccacgtacaagatctccgaggctcggggatgtgtgtgaggtgggttagttccgttcggtgcgtagtcaatacgcgctatcgatactccgagagtgttgagccccggtaggttttcgacggacacgtttgtcacatttgatccgaatgcgttgtctgtgtttgccgggatgttgattcctgagatgaaaaagtcatctgctttcaccagctccggcttcttgcagaatttcccattcacgaatactacattaaatgattgaaataatagagaaaaatgttaatttaatttgcatatatattatttaatcaattttaatataatattaatatatagtaataaaaaaagtacatgatgataaactcttggaataatattttcataagaaataatcaatattgataattagataccgctaaaccatttaaaatttctaaacatttatgtgttatatctaatcaaatttagttatatcttaagtgataaaataattatctatggtggtgaccggtgatcaatggtggcgagtttctgtttggcgggggtccaaaccattaacagaggatgaaaactctagatctgaagggaatggagtcggtggggatttgtgctggagcaagcggtctcagttaagagggagcaaatcgtgaaaaaatttatttggtgtacacaaattactaataatcatattatattatatatatttgatatatatgaatttttttttagtacttttacggctataaccccatacttaaaaaatggctttgtgactggtcttgatcgtgttcggatgagctacgaatgagaatattaatgaagttgaattaaaattaaaatgaataaaaataaaattgataaaaaaattattaaatttgttttcatcttacaatgaaatggtataaccttcaatttcaaaacaaaataataatccactaaaataaggaaaaaataattctattgaaatgatattttaatagttaaaaatacaaccaaaataaaaatttatttcattcattttttgtttttttatctaaataaaatatatatttaaaagccgtacaattttcggactttggtgggaatggaatggaaatgaaataatttcatttcattcttttgtttggttgcatttaaaactattggaataccattgcaatagaatgacatttccatcattttggttaaatgactattctattttgaaattgaaagaaaccattccaatgcaaattttgagaaaaaaaaattaataattttttttatcaattttnnnnnnnnnnttaaattttattctattccattctcattttaattcctattctcattcatattccaattcctattctctttcctatttctatgtttttattcttcccaaccaaacgcttggttaataacaatttcgttacaagtgtctctaattgataaaataaacaagacactgttgttgaataagtgttgctagctaaatatatatgttttttttctttgtaagtagcatttttattagaatatactaaaacgtatttatataaggaacactttttaatgggtattaactattgatggttactaaacaatttaaatatatattaattttaaaaatattaaactattaaattttgatcgaccgaccaataataaaaagagaaatttgaatttctatatttaatttaactacttaattaaaaaaatattaaaaaatattactttttacactatat

SEQ ID NO: 22724 - DNA, 3497 bp, Cannabis sativa
ttcctgaaataaaccaggaaaaaacgctgcagcagagagattccagcaactttgagcaagtctgcactcaacaaggatgtgaaaaatcgtttcattctcaacattacaaaatggacaaattaaatccatatatacgtgctttgtactaagctgaactttagtgggaaggcaacccgaacatgccctccacaagaagtgatgaacttttggaggaacttctaacttccataatttcttccagcagttttcctcatccaaatgtaaccaactgctagcagccgattgcaagaactggtatgcactcttgaccgtataaagacctgagtgttccatgtaccaataccatgaatcctctacagttgtgttacttaattgaatactcaaaatcaagtttttgtccctctccacaaacatatcatcaagaatctccatgtcccaagatttctcacccaccaccatcagactagaaacagttgtatcaactaagcttgggtgatccgagacaatgaaaggattactatccataggcaaccacagatcaaggagaacattaacagttgaaccattaccaatcgaacgccttgcacccattctaaccagatcttgagcttcccaaatactacgccaaataaagcttggattttgtccgagttcagcttgtaagaaagagccatttgggtaataccaagccttataaattctttccaccaacatatcttttttagtgagcagccgccaaccttgttttcccaaaaaagatagattgtaatcacgaaggtttcgaaatcctaacccaccaacatgtttatgttgacaaagacgcttccaactaaaccaactcacacccttacttgatgagtttgattgagctttccaccaaaactttgccatcataccctcaagactagcacaaatctccttggtcaacaagaacacactcatagcatagcttggaagagcttgggcaactgacttgatcaaaacttccttacccgctttagacaagaatctagtctcccagctaaaaatacgcttcctcattttctccttgagaaacccaaggatagcattctttttcctacccatgatacaaggtaggcccaaatataaactatcctcattagcctcggctaatcccattagagtacaaacttgaagccgaacctcatcactagtattcttgctcaaaaagactgaggacttgttaaaattcaccttttggccagaccccaactcataaatttgtaaaagctgcatcactctttaagcttcccgaccattagccttgcaatacacatagctatcatctgcgaaaagcatatgagaaactcttggagcaccacgagcaactttacacccagttagccattgatgcctttcatactttttcaagagagccgaaaaaccctcggcacatataagaaaaagataaggagatagagggtctccttggcgcaagcctctaccaggacaaattggacccatagtatgaccaccatgtgtgacattgtaggtaacggtagagacacagaacataatccactccaccacccttctgtcaaaccccattcgaatcaagagtgactcaataaaagcccactccacccggtcgtatgccttgctcatatcaagtttgactgccatatagccttccttcccaatcctttttcgtttcaagtagtgcattatttcgaaagataccatcacattatcagaaatcgatcttcccagaataaacgcactttgattatcaaaaataacattgggcaacactcctttcaaacgattagccaacaccttagatatgatcttatataacacattgcataatctctttttgaattcaagtatttattagaattaaactcaacctatttatacaacaaattatatttttttataattattattatcaaaggaaagaattacatagccaaaatgattaacacaaggactcaacacaaattgtaaattgctatccaaaaaaattattctaagctttctcttagattgcttgatgagtttgaaatttacaagtcctgaattgttttattttttgatagattaaatagcatcaaacatagtatttatttaattaccaaaatcttaaaaataatcaagtcaagcaaatcttagttattttcttgaagaaatttagaaacctaaggatagtcacaacctctttaaaacgtaagtcaatttttgggtcattaatttaacgtttttatgtaacatatttcttaggtctaaataatatgtcaccaacacttttacctatctctaaaaattatagttggaaatctccatttcattctaaacttttttagtaatcttatttattcctaataaataaaaaaaacatctgaattttcaaaattgtttttatatactttttggttaaatgataaattgtgttgatgagagatagtaataaacttattttgtcccacattaattgaatcataaattttaccatgttttctcactatataaatagagaaaaaatcttatcatatttcaaaaataatgctatacttaaaataaataatatataattatataatatactgattgtgatgctttttcctatatagaacaaattcaagaatgcactatcttctcgattttccgattcatttatttcattgagtattataattctaattaaagttgtatattcgaaccgggttttttggtacggtacgaaatcgacacgaaaaaatataagcttagacctagcatgaaacgaataaatatgagcccaatcacgacacgaaaaatatgagcttgaatatggcatgacacagaaagcatgaaaactacacgaaaatacaaatttcttagtacaagacacgatatgtaagtacgaaataaaacataaagtaaaattcataaaataaatttttatttaataattcatttactctttcgtataaaaatagtttatttaaatattttaagattatatatacatattttttaaaacattaaattattttaatatatataatatttattatttaaaatatcctttgctaggcgaaggttctaaattatgttggcacattttataaatcaacgaccataattgacatattttgatatattgaacattttttttttgttgaaagaaattatgttgaatgatattaatagctttatgtgaaaatttattaatgaactaacattatggtaatattattttagttattaaacatgtaattgtaattatttatttttttttgtaattgtaattgaaacaatttatttgtactttaaaattagaaatttatttaaaaagtacaaaaaaatggcaattttctataggcccatttaggagccatttataaatagggattttttttttcataaagatgagaaaatataatagagttcactatgcaaaaaaaatatgagattaaaaaataattaaattttaaaatatggaaaaaaaaaaaacaataaataaatttgataaaacttgtaataataaggtt

SEQ ID NO: 22725 - DNA, 1633 bp, Cannabis sativa
  modified_base (1094)..(1105): a, c, t, g, unknown or other
ttacaaaattctaaatgtactccaccttcaaatttgtgattttcttttacctaagcagatgggacaagttgaagttacttgtgttttgctgtgaaatttgaaaacttgatacttttatggttatgatttcaactgcaactttatgatgaaagcaggagatcacattccaagaactatactacatttgtacatgaatttattacttgggaaattcacagaataattatcattatggtattttttataagaagtttaccaaaaatgaagaagtggtctggaggtttgatgattgtagctcttgctatggtattggtttttcggtacagtctcattggaactaagccaccaccaacaagtccaacacaaaatcatgattcggcttatggtttcttcaataaccatccaccgaaaaatccttatgaggagagtgatctcccaatccttcctgagataagagttaaaccagtaataccaccatttaagaggccccattttgtcaatcatgaaggactcaatgagctttatgttttgcaaaatatatcggtaggagattcgagtccattgcttgtttgggctcaattgcgctcggtactagctaggtctgatgctttgcctgaaactgctcaagggatcaaagaagcatctgtagcatggaaagaattagtttctataatagaagaaaaggcctctcagttaagcaacattgacaagtctgaagataagaactgtcctttctctgtaaataaacttgagaaaacagcattaggtgatgaaatggttcttgagctcccttgtggccttgttgaggattcttccatttcattggttggaattcctgatggccctcaccggagctttcaaattcagcttctcggttctcaaacttgcaggggaacccaatgctccaattatcttgcattataatgttagcttggctggagataacatgactgaggagccatttacagttcaaaacacatggactaaggagcttggatggggcaaagaggaaaaatgtccttctcacaagtcaattgacagctcaaatggtatagtaatcactggaaaaactactttagaaactcaaaccgtannnnnnnnnnnnaaattaaaaaaacagtatatgggaacaacttgttgattaccaataaatttgaataattataacaaatttaataataaaaatcttatttaaatattataattttgtcattattatatcatcatatatatatatgataatatttgacattcatacccaataaaaaaatattaaaaaaaaaagatgacttaaaaaaattagggtcctaaaaatttagaaatatagaggatatgtattttggttacttggatgatagtgttgatttttagttacttgcatccaaagtacacgatacttaattacgcgttttttattccctttctaataagactttagaaaacggcacaagtgggaccacatgactattaatatagcttttggtgttagattgtgagtaatgagaggacaacgatgcatgagaaagaaaaaacacacaaggactagtgaacatgatgaagtttgtggcttgtggggtcattcatcactttgagtctgatgttgatatattacttactaaaagggaatcagacc

SEQ ID NO: 22726 - DNA, 2225 bp, Cannabis sativa
acattaacaagctagagagagaaacatggctgaagaaaagaagcttcacatagcgatgtatccatggttcgccatgggacacctcacctcattcctccacatttccaacaagttagccgagagaggccacataatctccttctacataccaaccaaaacgcagtccaaattactgtcgttcaacctccacccacacctcatctccttcatccccatcaacgtgcctcacgtcgaaggcctccctcccggttctgaaactacttctgacgttcctttccatctactgccctttctcatgaccgccatggatctcactcgtccccaactcgaactttcccttcaaaacctcaaaccccaattcatcttcttcgatttcactcattgggtacctcaaacggcatgtcgttttgggattaggtccatctgttacgtaaccgttagccctgcaacactctgcttcctgatcagtccagacagagaattgagcgaagttaatcccttaacggaagccgatttattagagcctaaacccggtttcccatcatcgtacattaaatttaagtctcacgaagctcggaatctggttaaattaacagaaaatgaattcgggagtggcatctcattccataaacgacagcaaatctcgttaaacgacagcgatgctatcgccttcaaaacctccagagagatggaaggaatctactccgattatgtagccgaaaagtgggggaagacagttattctggcgggcccggtcgttcctgaaaaaccgaaatcggtattggaaggtgaaacggcggcttttctttctaaattcgagaagggaagtgtggtgtactgcgccttcggaagcgaatgtgttttggcgaaggagcaattccaagaacttgttttgggtcttgagttaacaaatagaccgttcttagtggcgctgaaacctccagttgggttcgaaacagttgattcagctttgccagatgggttcaagaggagagttgggagtagagggatggtccatggtggttgggtccagcagcatctgatactgagccatggctcggttgggtgctttgttactcattgtggttctgggtctttacttgaggctatggtgaatgagtgtcaaatggttttggtcccaaatgttggagatcagtttattaatgcgaggattatgagtaaagatcttaaagttggagttgaggttgaaaaaggagatgaagatgggttgtttacaaaagaaggtgtttgtactgctgtggaggctgtgatggataaggagagccgcgtgggcgaggaagtgagggcaaatcataagaaatggagagattttctattgagtgaagggcttgaggactcttatattgatgcctttatcaacaaactctacggtctcatcagtacctagcaagtattcaaatttgtaggaaccccagaactagaactactggcctgctctgctggaatatttcttttcaagttaattttgtctcaaaatctatatgtacttttaaaaccctacgtacctttttttttttttttttgcctgtttctatcatataataactaatggattttcatattaatccttttgagcccgatttcattatgttaatgaatgtttttttaaaagttagcccgtaaaagaattaaataagttccttaagtatttgattaagcagaaatattaaaatcggatatattacctgtgcgcatgcattaagatatacggctttttagtatacattgaacactattgaattattgtaactaaattaatggtatatgtgtcctccgatttcatcatctcattgggagcttttcttttaaaatttatggagtgttgtccccggcggctgtgtattaaaatgcaaaaatattgctatttaaagtgtgggaatcatcaaccttctattttaacttttttttttggggggggtaaattagtcgttttattgctcaagggaaatttcactatgcaagcctaaaaataagccaattataaaaatttagttcccaagttaatttgtactaaatgatattagtatttttcctagatatcgtcatttaatgtttttatttttctcgctctctatcgcacactcactccatcgaaaactccacccaccgcgccgaaaaccaaatggcgagacacccaatgacggatatcatttctccatttaaaatttttaactccattttctcgctctttctcgcccttcctc

SEQ ID NO: 22727 - DNA, 2079 bp, Cannabis sativa
aattagatattaaattttacataaaaattttgtaattgtgcattggagcacaaagctaaaatttgatgtaaatttatgacaaaactactttttgtgctaattatagcacaatttttacatctcccattggagatggtctaatatgagttaatattaacatatgcatgagagttaatatgagatgccacaggtgcaatgggtaacaccactcatattagtttctctatcctacctttaaaatacatcgctaaaatttaggagtattcaaaaaaatttacaaaccacccgacccaaataaatcctccaaactaaactgaataaacagcaaaaaatacaacctgactaacccaacaaaaaaatttaaactacctaatgaatatattaagtgggttgaatatcattctaacctacccaaataatatatttttaccaaaatttataatatatattacataaattatatttaagaatcaaactatttcactttgaaagtttgtactttgttagtgtttaattaaaaaattaaattttataattgataattttaattatatttgaatactgaagttgacatttagaattttacagtatatattatttttatttgttaaagaatattatttaatattttaatatttatttaattcatatttattttaggtttaagtttttaatattaatttagactataatacttataatcttaaaatatatatactatatatttttttttccaaatctaattatttgaaataaagatcgatttagataggttaatccgaccaaaccgacaaaattattgggcgggttaatttttttttattttttaattgggtggattacaattagatatttgcatctcgacaactatattgggttagtaaaaatatactgcaaccagatcaaatagaccgatgtacattcctactaaaattctattttttttatattacttcaaacttttatatcataccatatatcaggttctctattttttttttatctacatcacttaaatattatattataagatatatatttatcattttaaatattgaataataatttatacacatataaaataaataaaaacaataatagagtaactttagggcaataaatagtgttaccttatatatggagaagtattattcattgctttaaaatatatatatatttatttatatatatatataaaatagctcacttgatgaatgttattttttttaactattttcttttctattttgaagaaaatctcatttcaaaagagttaatgtgagtctccaagagaggtagaaaaatccttctccagaatgctccataaaataaaaaattatgtttttaatttaattttttttttttggatgctagaaattataacttgtaccgaaaaaatattgagaaactatatttaaaatttatccaaacacttttaaaagattttttttattaaaatgtataacttttttataataattatataaacaaaaatataagttaaaaatatttttgagtaatgttacatgtgaggattgaaatgggctcatgattcacatggtgaatgaagactggttgtcaaacctacttgtaggcctgataacgagtcttcaaccttatgaataaggaaccctcttttaatggagaaattttttgatgaataccctaaaattgctactattgtagtgtttatgttctgtgtatattgagaaactatgaattatatgtatatataataatatgtattatatttaggtgttgtttgataatatttttgttttctaattttttaattataaaaatgaaagttaaattttgtttttaaaaattttatttttgaaaaataaaaatacgttctataactactttaattttttaattttaaaaataaaaaataaaagtgtgttctaaagttcatttttatttttatttattattttatttaagttgggtctaggttcgaggtcgagtccggctccagatcaggggccgagttcgacgacagggctagggcgaggtttgggttcaagttcgggtctagtcggagtctaaaatattaattaagaaaaaaatatttaa

SEQ ID NO: 22728 - DNA, 4426 bp, Cannabis sativa
gagacctcaaagaaggttgggactcggaatcaattcataatggtgttggccaaaatatgttctataacaacttttattttttaattttaaaagtaaaaaacaaaagtgaatttaattaatacatttaaatttcaattttaacttttgttttaatttaagtgagaaataagaaattaacgttatagaaagtaggttggggttggagtccagattaggggatcagggtatgggtccaagtccgggtctatatctgggatttgggttcagagtccataatcagggtttgggatttgagtctgaggttcgagttcagaactcagaccagctcgagccaggggtccaaatttgggtcatgggtctagctcttggatccggattcaagtcagagtccaattccaaaatattattaatagaaaaatacaaagtacaatgaaaaaaaaatattgaaataaattttgaaaataacttgttagaaagaaaaaaaaaataaaatttgttttcaataaaacatgtttttttgaaaatatttcaattttttatttaaaaaaaacaaaaaaaaaatattaaaaaaatattagagaatgcaccctaaatttttcacacaatcatgataatcaagccaccaaatagctaacaatgcatatttagctaaagaatacgctaccaaattaactgttttggatcaatacagaaatctaacatcatgaaaattattacaagaataatcaatgtctcccgaagtgctgtcaatctaactcaaactggatctttgtaaaaccaaaatgaatgagcacattgaaccgcagccttcctaagtgtcaacacctctgtatcttaggctgaaaacaaccccagaccttccaagctgtcgaacccagtccaagacatctcactgatacctccattatctttttgataaattatttaactacaagggattccttaatttgtattacatattatttttgtgtatatacacatataataatgtatgaatactatttcatacttgcttattgtcctttcctcccgtgacaaaatatagcattaaccgaaaataataataaagacaaagacacatatctccaatgtataattataaatgaaaaccccattcggaaagctctttagtattgcaacaaaattaaaacatatcaagtctctaattaataagatctgatactaatcatgattaaggatcaaagcaaccacagcttaagctggtggtggtttgtagtgatcatatgcattttcttctacttgcaccaaacaatgctactcatttcagctcaggaagttggtacgtccctaataatattaatctttagaatatgtttagtacatatgatcaaaatagatttaataattataataatatttgggaaaagtaattacaagggtacgattattaatcaatggtcacatattgtaaataaaatcttaaatagttgagattgtgccttaccctatcacaataaccctttatattacatatatatttaattagggtttgatttggtttatgcaggtgatgaaagagaatttgactatggagaatcgagcaagaaaggaccacgacattggggagagctaaagaaagaatggagtgcatgcaatcatggaaagttacagtctccggttgatcttttgtatcaaagaatcaaacttagtccgaaacttggagaaataaacatgaattattataagccttctaatgctactatcaacaatagaggccatgatagatattgcggtaataataataataatattattaatctattagataaaagccgaggttagcaaagtcaaagataaaatatgttcattgcacacaattttaaaatggaacttttccttattatacatatgtacatattaattttatatttttgtttttgtctcatttgaattatgtggtctactctcagttctgagagaatacgtacctacccctattttgtgatcttcttcttttatatatttcaaagtttaagagataaggatgtataatacaaaatttcttaatgatattgttgttgttgttgttggaagatcgaatggttggaagatgctggatcaatcaagatcaacggcactgattactttcttaagcaatgccactggcactcaccctccgagcacaccctcaatggcaggaggtaactatctatacattcataaataaaaaataaaattataaaattctatcgatcatatcatatatagataaattatggttttaagtaataatttgctcattattaaagtcaactttgttttgtgtatgatattaggtttgacttagagctacatatggttcaccaaagccatgagatcaaccaagaaagtaaaattgctgtaactgctctcttctacaaaattggcaagcctaattggtttctctccaaggttaaatttaaagtcgtttaatcattacttcctttataattcatggctaacatgagcaatgttcttatcaataacttatgctatgaaatattaatattataaactaactaaagctcttaaacattgatttttttttctctaacaaaaaaagcgcttaagtaattaatttgttactttagattgtaattgcaaaagtatgatgcaaatgaatattgggattcacgtaataaattatttttttggatgcatgtaacagttaaccagagatataataaacataactgatacaaagaaagaggtacaccaaggagtgattgaccccaaagagttaggattgaatggatcaatgaagtactacagatacattggctcactcacagtccctccttgcactgaaggagttctttgggccataaatacaagggtagatatatatacacacctctctcttttttctctcattaatttcttgtttaatctaatgttttcttatcaaagtaaattttcttgaatgttctcagataagcacagtttccatagaacaagtgaaactgctcaaacaagctgttcatgatgtaagttcatatttcctccccattttttaattgtaataaaatccataaaaatatacacaaatatatataatactctttttgtgatgtttttttttaattcagtatgcagagataaatgcacgacctttacagcccataaatggaagatacatttacctatgagtcccaatgatttttgcctcaaaagagacttgacaaaaactaaagcttgtcaattgtcatgctatgatttcagaatttggttttttttttcattacttattcattatacttctcaaatattaaatcaccatagtttatcaaatcatcctagcaatagcttgtgtatcttgtaacggctaatgttgaaattactcagtgaggcatgatatctatcaaccacattgtaagaaaatgacagcagattctacatgggaaaatgaaaacgacaatatgaaacaataggagcatgactagaaaagagaaacgacccaattaaattgggattgcaatggtgactgacccaacaccgccaatgaatgcaaaagagttaggaaacctaacacgttatccacaatggtgtaatcaaacaacagtataatcaaaacaacaatgaatgagatactaacattcaatctttaaaacgacatcaaattatagagtaaatcagcctctttttcaaccttcactaaactccatcattaagagaataatgtcgagtctataatttaaattaaaattaatggaatccactattaaaatgtactaataactcatttcataggatgtcttataacaatgttcttaagttaaactaaagcaatactaatgattagcgaccaaatccaagatatagctacttttcccagttatgtgcccacttttcccctcttgtactagacactaataattgcacacgaaaattgaataaacaagcttgcaaattgaatattgtgagagctattttcccttacaatagcaacccatatatattatatatcaccttttagtaaagaaccaaagtgtaaaatagtacaacttttgattttgagcatgtgaattgttggctgtagtgtgcaccaacaacattatcaaaagatgtgactaagtaaaaacttcacatgaagcaaatgatcaaggtaaattactaaccaaagaattcggtcatcatcgttgtcttcttctcgtccatgtcatgagtgaatgaagattatgtttctgaagtttgagttaaccttttgttgtcaccaacaacaaacaaactcatctcaccatttcctcaaaccttgatgagcatgagcttggccctccttgtgtttgtcgagtattataggatttgcatttcaagcacttgtgcgcgacaatgtgaaaatgtacctctgaattctcgccacaatcattgcagaggatccaaacctagttgatttataccaatgaattgtgagaaaaaggtaatggag

SEQ ID NO: 22729 - DNA, 3678 bp, Cannabis sativa
ccactcagtaaccttcatttgattatgtgcgtaagtgatagtgtaagagatattttggtaattaaaagcacataaaatgtataaatattatttacacttattttgtaaataaagtgtcaatttgtatttttcatgtaataatttcaaattaaaactcataaaaataaatccattgttatatttttcttctatactaaaattaataaagaaatttacaatttaactaaaaaaattgcaatttaatttgatttttcccaacttttagacagaaaattaagaagtttgatcatctctgtatttatttattttatgaaactgctcctttaattatacaaactacatttggaggatcgtatattggtgaatggtgtgccaaagccaaaactctcaattatgtaggctctacattgaatttttcattatttaatttacaatttacaaaaatttatacacgtatccaatgactaagtagcttattttgcaattcccattcaagaatgggaaaaagagcaaccccaaaatggcatttcagctgagaaatttgtattcttggcctggctcaaataatttttcttcaacttcaaggcgatgccaaccaaaattgcctctctattgttaataatggcatgaaaaaaacagcaccatcagacttgtcaaggccaactatgcccctctcatgtcatattcatatgggttttaactgaagaattctattgttccaaaccgagtgaagtgtcatgtgaaataagtcatacttcacaggtgttttgtgccaaaagaaatgcttctgaaccatcttaactcctaattgcattgctttgtacttctcattcgggattgagagtagaatatttcgcaagttatgaacatccttctcttgaacgaagactgaaaacgcctcccagtttaaaacctcaaagaaaggagggaaatagttatctgatataataacaggcacacactcataaaagatggcctcaataattcttggtgtgtgaacctcataacccctggcgcatatgcaatacttgctgctcttcatgtactccctgtaaagagttttgccttcgatatcacgtggcattgggccaaaaaccttcatgtctggttctttgttctgccagtagtgcaacagaattggccggagatagccgtgcattccacctgcaaagaaagccaagatagatctctctgaagccggttttcctccaacgtccttcaaaggggcttctccagagcgaatataagtaacaggtagactactgtccttgccaattttgaagtctttaccaacattggcattacaaagagcccggatgcaattcttcatgcacttttctgtaatataaggggcctgaaatttcatatgcacaatagttgtaagtggtactattataggttgtcgccttgccactgataatacttttggaaaggtgtattatgagacataagtatactaccatttgaacagtaatcagcttaccttatcaattttacaaggtacaagaaacttgtagtatgtaagctcccaactatttcaatttgaagattaaaaacagccatacttgatactggcgagctataaaatagaatataaaaatgatgggaaaagcagcttacccaatcatgacaagcaacaagaaagtgatctgctcctccagttctgttccaaaatcgatattttcttgagattaaactcacatagcttgttagatatttctcaaggtccttcttgcccccagatttttgttcagaaaatgttatccttagcatttttgagctgaagggtaaataaaataaatgagccttcttagcgtcccgcacaacgaactttttacttctctccatcagtttcaaaaaccatccttctgaggcgtaaattcctctcagataaggttgatggaatccgggcttttctccttccttgtatatataaacttttagcaaacgttccatcaattcataactcctgcaatggaaatgtgaaacctttagcataagtagtataaagaacaatgggtcaaacagaagaccagaaatcattatattcatcagtcttgaaagtaatctatatagctcataaattagaataattaactcttctttggctgtaagagagtacttgcttgtcagatgccactactaatctaatttcaaattataattagaaagacatttggaagagattacaaatgaaaataagtgttagaagacttacttgcaaaagaaacattgtgcttaaataacaagaataagaaagcattatttggagaaacatagcaaagtacaatacttcccaaaacttaatagaccatgtatcactactataatagcaaaaagaagtcaatgctcatctcagtaccaagaaatactaaaataaaaaaagttggtgttcacctcttaaacttagaaacatttcggaagacatatgcactgagttctggattgtttctgatggtaggtgcattctcaatctccagcttagcagattgaagttcacgatcacgaacagaagaccaccttgacctctatcaccaacaaaaggtattgagtgagaaactaggacatattgaatcatgcttatcacactaatcgaatatccaaactataggtgatagatccataccattgagtgaaaagaaagtgtactttgaagcaaaagtgagttcatttgagatagtgttgttggattgttagcccacctctttggcatgaacagactagagtttgccatattttctgaatcagtggttattcgcaactcggtctccctaatatcactttctcttttcatatccaaatctcttatgctgcctctaaaaacagtagcaacttgattcctagcttcactaaaagttgttcttgaaccaattgtaggtgctgcttctttctcataactctcatttttcatactaacctgattaaaaccattgtatctactagaatcagattccattccaaaaccctttactcccttctcagatatggacattttgcttaaattgcccaaaccatctgattctagttcatagtaatcctcattatccacaccattttcatatctgaatttgttgtccaaattagaagggctagaatcattaccggccactacttcaactgcataaattttagccgattctaaattgcttaaaccatcagcagcattggcaataagcataggagttgaacccatattagcagataaaaagtaaagggttttcccaaatggaaaagtccaacactgtgaaacaaccataagagaaactaaaaggccgacaatgcagatcagtctccgcatttcagcacgaattttcatctgggtaactacagaaatatccacaatcataatattttgcagtgtagccaacctattattattaaatagattgctttgtcaatgctgaaagaaaaagttataaatctattacaacaaagacccataaaatgttaaggtgtagttgaagttgggtaattttctctataactaaaagattaaactttcttactagaaactgataaaagggagagtacctgaaacattttcctgagaaaatattggaaatgaaggaatctggtaagcagccaaaagttaactgaactggcgtctctgtacttaaagtttaacagtaagaaagaaaagaggaaagattcattattgggcactgtactcacttagtc

SEQ ID NO: 22730 - DNA, 4159 bp, Cannabis sativa
cgtgatgtataggtggtgtatcatttcctcccccttttagattcaccttgtcctcaaggtggaagtgtgggaattgttcggtgatggtctcaaagtcttcccaagtcgcttcaaatgctggaagtgatttccactgaatgaggacttcaattttggttggatttgtggtcttttgtcgctgctgcaacaccatctcaggttccacgcgaagctctaattccgaggtgagctgtggaggaatatctggagagaaatcagcattaccaacggcccttctaagctgtgatatatgaaaaacggggtgaatggtggaatgagatggtagttggagcttgtaagctactttgccgatgcgttggattacactaaacggaccatagtatctaggagagagtttctcattaagtcgtttagctagagattgctggcggtagggacgtagcttgacatagacttgatcacccagctggaattcctcatcgtgcctcttcaagtttgcttggcgctgcatttgttgttgtgctcggagtaggtgcatgcgtaagtcatccaatatagcgtcgcggttgtccaataaactgtccacttcagccaccattgtggcaccttttttgtatggcagtaggggtggtggttctcgaccatagagtgctttgaaaggagaatatttggtggccgagtggtacgaagtattgtaccaaaattctgcccacgctaaccattgcgaccatctcttagggttatcatatgtgaagcaccgtaaatatgtttccaaacatctgttaaggacctccgattgaccatccgtttgggggtgataagccgtgctccgtttaagtgtggtcccttgtaggctaaataggtgttgccaaaatttgctaaggaaaatgcggtcgcggtctgtaatgatggacaaaggtaatccatgaaggcgcactatttcttgcatgaaattctcagccacgattttagcggtgaaggggtgtcgaagtttcaaaaaatgagcatatttagacagccagtcaattactacaagtatagtgtcccaaccattggatttagggaggccttcaatgaaatccattgtgatgtcatcccaaacttgggcgggtaggggaatgggttgaaggagacctgctggagtagtagtgaggtacttgttttgttgacaaatggcacaccttttgatgaactgtgtgatgtcgtttttcatgccttcccaaaataattctgcctgtatttttttataagttttcagctcacccgcatgacctcctaaagggctgcaatgaaattcctggaggatctggttgattatgctagattttttgggaaccactaatcgatttttgtagtgtaggatcccttgatggagtgtaaagccgtggtggtgccttcccatttctatgtcctcttttattttctgcagcaaggggtctgccgctatgtctttttctagctggggccatagcttccattcggcagtcatcattaaatgggagaagtcggctggctgttgtctagaaagggcgtcagccactcggttgcttgctccacttctatactcaatgtcgaaattaagccccataagttttgaaacccacttttggtattctgagccaataactcgttgttccattaaaaatttcaggctgtgttgatctgtccgtactataaatttactacccattaaatacggtcgccatttagctattgcaaaaacgatggccatcaattctttttcatagatagatttctttcgagcttgaggacctaatgtttgactgaagaaggcaatcgggtgttgatcttgcatgaggactgcgcctaaaccaaacccggaagcatcggtttccacaataaatttttttgagaaatcgggtaacttgagtgtgggaactgaggtcatggcagttttgagagcttgaaatgccttttctgctgatgttgtccacccaaattgatccttccgtaactgatcagtaaggggttgtgctatgctggcgtagttggctacaaactttcgatagtaaccagtaagaccaagaaaaccgcgcagttgtttcaaggtggctggtgttggccaatctgtcattgcttgtatctttgcgggatcggctgatactccttggctagaaatgatgtgtcccaagtaagaaatttctctctgtccaaaagcgcacttcttcttgtttagaaataatttctgagttcccaatatgctgaatacttgtttcaggtgctgaatgtgatcctcttctgttttgctgtatattagaatgtcatcaaagaacaccaaaacggactttcggagatatggtcggaatatgtcattcatgagagattggaaggtagctggggcgtttgtcaacccaaacggcatgactaagaattcgtaatggccgtcatgagttctgaatgcagttttgtgaacatccacttttttgaccaagatttgatggtatccagattttaaatccaactttgaaaatatggcagcaccatgtaattcgtctagtagctcgtctatgactggaattgggtatttgtcggggatggtagttcgatttagggccctatagtcaacacaaaatcgccacgacccatctttctttttaactagaagtacggggcttgagaagggactgttgcttggctgaataattcctgctgccaacatttctttgatgagtttctcaatctcagctttttggcagtgagggtaacgataggggcgcacgctaattggcatagttcctggttgtaagttgatggaatgctcgtgttgccgtgaaggtggtaagccgacaggttctgcaaatatttctgggctctcctcaagtattctctctaaaaatctgggcagtttaactgtactaaatggctgttctattcttgcttcatttaattccacccaaaaaccattcttttctgccaataatgttttgtagatatttttcaaagacaccaaactccttccaagagatggatctcctcttatagttacatcttggttaccaaatttaaatgtcattgtttggagtttccaatcggtatgcgtcattcctagagtagtcagccactgtaggcccaagataatgtctgcactacccaacttgataggtagaaaatcctcccaaatatctattccttgaaaatgcacatgtactgtcttgcatattcctttatttggcatggaatccccatttcccatggtgaccccgtaggttcctgttgacacaataggaatccgtaacttggccaccaatgtttgcgaaatgaagttatgtgtggccccgggatcgataagtatgatcacctcctgctcctctatgtttccctttaacttcatggtcgtattggatgacagaccggccacagattgcagggatacttccacagtttctgtttctagttctgctggcagctcctccgccagtggttcctggaagtcttcgggctgttcctcaggaatgagaagaacattaatctccctttgtttgcagcgatgtcccggagaccatttatcctcacatctgaagcataatcccttttccctcttggcctgcacttgagcatctgtcaaacgttttacctcccctgtttggcgcacgtttccgcttcgattcaggtggttgagtggctggtaagtgtggctgttgctggatggtgtcatgcgtccatatcctaatcctctttgacggaaaagacctgcaacacggttcttttcttcgatgtccaatgctatttccattgcttcatctgtatttcttggtctctgcacccgtagttcggctcttattgctggagtgagtccgtttaaaaatgtactcagttgtacttcagctgtgatgttgtccaagggtgccaataatcttataaaatttctggagtattcccctacggaaccttcttgtttgatagacaggaactggtcatagagtgaacctgcctgtgtatctctgaaatgtctcaacaggagccttttcatttcttcccaactgagaatggcccgtttcttgacttcatactgataccataacagagcgtcgccggtgagggaaataaaagctgcctcaattttctctgattcatcgtactggaaacaagaaaaatatctttctgcttgcatgatccacccatcaggatttgttccatc

SEQ ID NO: 22731 - DNA, 5644 bp, Cannabis sativa
taggcttcatagagctaggggaagctatcaggcaagccttgacaaggcaagtcaacaggtagtctcaaggttgtgtaaacctctaaaatttgccaaacatgcaagcaaccaacagcagtacctgccagacttctagtgcaaagaacactggaggcaaacgttacagcaacaattttgaacggaacaatcgcaaaaagggaaatataatacttctcccacaccacaaaacaataatgagatgtaggagaagtacacttgcttcaccctcctatcagagaaacttgagaccatttacatggccacttaggctacttttccttacaagaagccccctcctattataaaagagatgagcaaaagggtcatgtcgaagtttctccagtttcatagtgattttcgccatgacaccaatgagtgtcaaaacttgatgagggagattgaactcctcataaggaaaaacaatccccacttgtgtcattatgtgcagaacggtgaacctatgccacctccagtggcaggtcacttgggggtcataattggcagaccctgcattgcaggagaactaccaaggttagggaatgctatgctcggactctccatcatgagcctaaaagtgatatcttggccattaaagaaagggtttccaaagcaactcaagcttgggggagctttgccatctcctttacagagggagatgccacctaagtcaacttcccacacaatcacccctggtcattacagcacagacaaggaacatgacggttgctaggtgcatgctggacaacagagcctcctccaacattctttttaaatcaacatattaaaagaccgggctccaaatgatagacatggcaccttgcacacaagtaatgtatggcttccttagccgaggcattgcacctatggggtacatccaactgcccctgatagttggagagaatccaacaacacgaacgatgatggcataattccttgtaatcgatgtgccatcaaccttcaatgctatgataggttggcaagccctgtatgaattaaaggtagtgacatgcatctactacctatgcttgaagttccctataaggcatggggtaggatgtttgaggggagaccaacagtcttcccatcactattacaacttggcgtatccaaagccaagaatgagaagatgcctgccaagagctctgatgatgagcttggcaaatggcaatgaagtccaacccaaagcagggaggaaaacatagatcctttctttggggatcctgcagacaaccttagcccgtaaaagaactggaagaagtggttgtcgatcccacttttctagctagaaaactaaagattgggaaaggtttagcgccagaaataaaattagtattgatagaatttctaagggaaaaccttggcctcttcgcatggtcacatggagacatggttggaataaaccctttcgcgatgactcgcgcactaaacattgatccaaacttctaacccgtgtaacagaaaagggaggttattggacaaagaacgcacccgcacattaaaagatgaagtcaaacggctgagtgccaatgacttttccacagaatagttttatccactttgggcatccaaccccgtgttggtacccaaaccaaatagcaagtggagggtgtatatagatttcaccaacctgaataaagcatatcaaaaggactgctttccactttcaaggatcgacaagctagtagatgctataactgaccataagatcctgagattcatggatgcttattcacattaaaagcaaatctagatgcacctgccaaatcaagaacacacatgcttcatgacaaacctaggcctatacatctacaaggtcatgctcattgagcaaagaaatgcaggggccacctactagagacttgtgaacaaaatgttcaaagatctcattggttggaatatgtacgtgtacgtggacgacatgctagataagtccaaaaaggctgggggcatgtggaagatctagatgaatgcttcaggatcctttgagagcacaacatgaaactcaacctcctaaaatgttcatttggcataggttctggcaaattccttggtttcatagtcaatgctaggggaatagaagcaaacccaaaaaagatccaagctcttttggatatgacatcgcccataacaatcaaagaagtactaagcctaatgagatgtattgttgcacttagaagagttgtgtcaaagttcacgaaaaatgcgcgtccttcttcatcatactcacaagaaacaaaaaaaaaattgagtggacaggggttgtggaaaagcattccaaaagctgaagaaacaattggctcaaccatctatcctatcaaaaacctcttcacaatgaagagttgggtgtctaccttgttgtcatagagcatgttgtgagtgcagcgttaataagagaagaagattgtatacaacatcaagtatactacataagcaagagagtgatcgaagctaaaatttaatacctgctcatggaaaagctgacatacaacttactctttgcatcaagatagctaaggctgtacttccaagctcaccaaataagagtgtacactgaccaaccattgaggtacgtcttacaaaaacctgaagcatctggtcgactactcaagtgggacatcaaactttgctaatttgagatcacatacaaactaagagcggccataaaaggccaagctcttgtagactttgtgctgaatgtataagcatatctcttgaaatctctcaagtttcgggataaaagtaagagcaagagaataagcgagggcaagaggagcaacaagaacctaaagaatcaacatggaaattacatgttgatggaagcttcactaaccaacaatctggtgcaggcgttgcgctcaaaacactttgaggacaacaactacacggagcaatcaaatttgacattaaggcctctaaaaatgaggctaaatatgaagccctaatcacttgcctcatgctggcgcgtaaagtataagctgaccacctagacatatacagtgattctcaacaagtcgtaaattaagctctaggtgaatacacaactcgaggtgaaaaaatggtagcccatttgagtacgatccaagacttgctaagtcaactaaaaggctacacaataatgcagatccccagagaagggaatgcaacaataaatgaaagtccaacccaatttttacccatatgacgtggcatgtccgcatgggcaagattgatgccacatggagtacagcttgtcagcaaggaggccaagtcatcatgtaaaatgtatcagttcaaaaggagtccaaatacttaagcgtgacaaagagaccatgaattggccaacttaaggggtctggccgaccctattaacagcataggtcgaccagcatcaagcaaaggaaaggacaaccaacgtccttcctaacaggcacattttatgcttctgcagctttcaacgtggacaacacttctagttagaaattggacctgaaagacccacaaaaataggacataaacttcagttatttacctattcttggggactaattactatgttatttatttattattttaatgtgtaacgaataggggatatctctcattttaaaggatatcaacctttcatctcttgtaagctcttatataaatagcactaaactaaacatattctctaacttttgagttctaagtgctctaaagctctatgttctaaagccctagctcactctctctctctctttctccccctctctctctctctctctccctctctcacttctacacgcccctagcagtatagaagagactaaatctgtcacatctcacccacttgagattcgccctttgattcttactatggtaatcttaagagagccactatagaatccccaactctttagatctgagtggtattatctctaatatcaatacaaccaaaagtacgtcactacgcgctatctacgggacttgaatctctataaaatatttcatctttttcatttacttgttcttattgtgtacacgtggtgatatccctcataaatatgcctctgttgtcggtttgccaaatcaaagagtagtattgtttaccgagtttttggaagtagagcttaagaaagtaatgaaggaataaataatgcaataatgaacaagatatttttacgtggttcaggcgttaactatccttagtctaccagtccattttattaggctctattgccggtgatcctttacacaaatgcaaaacaatggacctttttcctattccactgtgttcctcttgaagaagaggaagctaagtaggaatattctagagttagtagtggggttacaggaatttgttttcttgatgaagaatggatctccaatctctaggtcgaggttcaaagaacaggtcccaatccttctcatgtgctttccttggagtattaataggccaattccattacatgggctaccttggatggatcttcatagggatgaactcccaccgttggattggtttgtggcacattttccatatggtctttaccgatgttagattgtactggctgtaccggcgaggctttggatggacataacctcagggccactctcatttgaatttccctcgtccatcgtcgtcagatttcttatcacagtacacaaggatgcgcatgctctgcatggtagcatggcatgggagacaacctctaacatcgtacaggaagaaaggcacggttagtgggcccgtagcctcgcaatcacgggctgaactttcgcgggtcaaaggcgtaccctagaccgatgcatccctatggaaggtccatattcctcgtgggagaaaagagtcccatcctctagaatggagagaaatgttagctcacggacatctctctcatgcatgcatatctctatcttcagctctcaatgaatgcaccaaaaagtttaccaagtttttcggaaactgaataattttagagcttaagaaagtaatgaatgtataaatatgcaataatgaacaaatgatttttacatggttcaggcattaaccatccttagtccaggagtccattttgtaaggttctttggtcggtgattgtttatataaatgcaaaacaatggacctttctcctattccaccgtgttcctcttgaagaagatgaggaagcttagtagaaatattttggagtaagtagcggggttacaggaatgtgttttcttgatgacaaatggatctccagtctctaggtcgaggtccgaagaacgggtcccaatccttctcttgtgctttctttggagtatttataggcagactccattgcatgggctaccttggatggatcttcatagggatgaactcccatcgttggattggcagctggcacattttccatgtggtctttactgatgccagattgtactagctgtaccagcgaggctttgggggctcgtcacctcaaggccactctaatttgaatttccctcgtccctagccgttggattgcttagcacaatacacaaggacacgcatgctctgtatggtcgcgtagcgtgggagataacctctaacatagtacatgaagaaaggcacgattagcgggcccatagcctggcatacgcaggctgaacttccgcgggtcaaagg

SEQ ID NO: 22732 - DNA, 1234 bp, Cannabis sativa
  modified_base (1019)..(1022): a, c, t, g, unknown or other
  modified_base (1091)..(1097): a, c, t, g, unknown or other
aagccctggttttcatttctaacacttacaaaacttcccaccaattactacctgggtttttttcattatctttgtcatcattattagcactttacattcccacaaaaccgagttccggttcttctaaatggatacacagtagctgtaatggctgccgcaaaaacttatccggaatggtgaaatccgagctctttacctaattattaatttaaataacaataataaaagctaaatctaataatttaattatattttttaaatttattaaatgtaatctaattttaaatttctttataagaaattatatatttaattaattttactaaacaagtaaataaatttagatattttaaaaaataaaattactaaatatgttatcaagtatgattaattaatctctaatttaaatttaaattaagatttatataaaaaataattatctaattttgttgatatatacttaaataattatttaagtcttatcctaattttcgcatgggataatgtgatacccaataaggtgacacgtagaaattattccaatacttggaggggttaattgccaccaaaaagctccgttcaaaaaagtctagactcaaaactagttatgtctaagtctccaccaagcatctagcctaatttgtgtgtaatgcttcgagtagaacgtctttagccagctaagcagaatccaccttgcagaaaagacaatatcaatacatttatgggataagttttgtacaaccgagagattgtagagatttagtatataatttcctttttatttcttattattttgggtaacaatattcatggtatctctcctataaatagtggaatcatttcattgtttgggggtcgagttcatatttctaaagggcacttatggtgtcaaaatactagtaagctttcatccagattgttgggaaacatgttgggaatattttaccaagatctagattaactaacaagcatgttaattatatcctaaatataaaaatttctaaaacaatgaaattaannnnataagagtttagaaaatcttacatcgattgcagcggaatataataactccttccgctcagatctctaannnnnnntcctttctgtcgcagagtattatccagatctgagtactactacgaaaatggtttttctcgacatttttaaacattcgtttaaagtattctcgtcggtttctataaccgtcgcctatacgactgtcgtaaaatgggca

SEQ ID NO: 22733 - DNA, 6074 bp, Cannabis sativa
  modified_base (1245)..(1245): a, c, t, g, unknown or other
gaggttcagccccgtgactgtggtaatagcctactccccttggattgtattaaattgagataaagaacaaagtgttttcctctctcaaagctcttacaatgaatctttgagtaattatcttagacctctctctcgaaagtaattcttttgatccctttctcagtgaggtcaagtcactatttatagggccttaatgcatgagggtaggtttcccttttgcttacaatgtataaaataggaaatcacatttattacattattataattcacgaaataggaaaccagaacacgttgccatatttctctaaattgatcccacgattgtagggattgcattcgtatctagactcgacgagatcattctgagataactaactcttgatgagtagttcagcaagctagatttatacttgctcagatgatctgttttttgtcctgcgtgtgtaagcaaaggttatacatgcagacgtacaatatagagtctgtttgggaccttcagctctgcccaagtaccaaaaatgtaggacacgtgtcacttgatccttctgccatgtcgttatgcaaaaaattggataacaggatgtattgcctataattaattattaaatagtataaatggtaattttatttcataattaattatcattaacaaatagatagagttattatctaaataactagaattgaaaaatggcattattgaagaaagataagttttcttcattaaggaggcaaaataatggcaaaaatctaactcatgggccttcataaccggttcagccatgagggtaattttaggtcgttggatctttcaaatcatcccatttaattaaaatcgtaaaccttatgaatccttgtaaatagaacataatggcctttgattcaaaagaacaccttttggactctctcttgtctaacaaattcaataaaaaagagaacctatttttttctatgtattatttttgaatttctctttgtttttcctcttaaaatttgttgttcttggtgttaataaattgcccgcacatttcaaagcaatactcagcatagtgaggtagattgtcttgttcaaattgttaactgaaggagaatccaagttcagatcttgatcatgctctgtaatagaaaggatcaagggttagagagctgaatggaaggagtcatattattccactgccattaatataaagttttcgataagttttgtgtgcttatttcactattttaggaaatttatatttaggntgttagattatagaattataatccaacatacatgttagtaaatctagatcttggtaaaagattcccaacaagctgttgatcttttggtccatctcccagatggaaacattgaatgcatgtgcgagaggtggagtttcggctttccctttccctttggatttcacaaataccccagataaaacagcctttgggatagcctctaaggaagttccctgttgtagtcctccatcaagaacctttctctgagcttcctcagtgaccacttcctctgtaggagcgactgcaaggttttctttaatgtccaccgcttcgagattgaattcttggttcaaatgcatcactggaaaaatggagaggaaataaaagttaagcaactagacacccaatatccaaatgatcaaatgggcatcggggaaggcctcccctaaaattgcttggagaggtccctgctggacccatcactcctagaagcctgtctttgctagacgactagaagtgatagaatgagaacctagggaaaatataccagaacaaaatctaaagaaaattctagaaattaagtccattcggagtcataacaactccgaatcgacatacaaaagatgggcgaacctaatactccctcaatggttcatcatgcttggttcaaacccaaattctagagtcctaaaaacatgaaaagtcctatagtgttcaaatgaccatgccctaactttccatactatatcagcactcccacggtacaaaaatttccacataatcctgtcctagaaatgtagttctacggtcaacatttcaccattctaacatgctagacatcctaaagctaacttgaactaagaatttttattctaaatacaaatagtaaatattcaacaaagcgtcgggatacttacttggtacatgagtggggaatgaaagattgttgtggaaatcctcccaagagtgttaaatcgagttcatcacgcaattgtagctggcttgaatgtcaaaagctttgtcttgctgggagtggaacagtttggggattgtcagatctgcatctagaaatcgagctgcacgaagatttaagaaatattggattaggcaatcaagacttcttgcattcacaactagaaattattgcaagatgaaagtttccttgaaaaggagaagctctagttataaattcaaaatggagatttgaaggtctgaaatagtggaaaaagaaaaaataggcttaacgaatccatttatacctaggtcaaatccatgcaatttaaatgaatggcctagatcttctctccaaaaaacacaagttgatccaatggatgggaagttaaaaagatggcatttaaaactttctcattgcgtttatttttcatcattgcctgcctcaagtatcgtacacattaaagaggctcatttaaatagacttgtaatcattgtaactttttccaagagacgcgcccgctacacgcacattatcaacaaatgcattaaaagcacctcatgtgtgtcacaccagtggcacctttagtttttagtcctttaattgatgaaaactcaagggatacatccgtgatcccaacaatcaccacgtgtcaaaatactttctctaagagacagaagaagactgcaagctcgcacaactcaaagagtccaaaaagcttgggggtaaatattatttgtgtttctaagaaagtgacacatgacataaaaaagaagagataatcccataatctcactaattaaaatcccccattacaattctatcacagagaaggctcatggaaccaagagtaagtcaagactaagagataagcataagtctacctcgcctcatccttacctcctagacacggaagatatattgtctctctaggacccagagtggtccaaacttagagtctacccatcagatactcagatgggtactcaaaggggctgtcgccaacactgaccgcccaagagtatcgcaaatatctaccttggatgcttcccagatcacccagggacagttatgcttttttttgacacagaatcatatcttggccctttgtccaggcatggtagtgcacgtatctcatccacctttttgccagatagttattccaagtctttacttttaaaggtcaaaccttttgacgacatgtgtccactacatacaatggtctcaaattttctagctattacacgcacgagtacaattgtttccaaggggcccaatagtcatctcttttttgcatgtaattttaaccattagtgagaatttggcagaaaccctaggcaattcgtaggtatgtccatgcccgcccttagcctataaatatctttctatttccatacaaaggggtgatagcaacaacaatagttgaagctctactaatatttttttgagtcttattcttcaagagaatctaagaacacaaagttagggtttcttgcaaaatattgtaaactcatcaaatacgcccttggaggctaatagactgactcgtggactaaggttaattaacacataaaccacataaaaatatccatctcatttatttttacattttaccatttctttagtttttgaaaatctcgatcaaaaactagtttctattgacctcgcttttagccaacgacagtgagtctaaatagtaagcaacaagtagtataatatgtgtgtataatataataaagtaaataaagacacgagaattttatagaggttcagccccgagcagtttggtaatagcctaatcctctcggttagtattgacctaagaacaaggaaaataatcccttttcttagagcacttacaatagtatctctgaatatgacttcttagataagtttttccccttagataagtttttccccttttgcccatttttccccttttgcccagtgagtccttttgcccagtgagtatgtgcccagtgagtatgaatcactatttatagggctataagctttggagggaagactttcccttctgattacaattgatataaatggaaagattgcatattaaatacagaatacactaataaagggattcagacagcttgccatatctctatgatctgatcccaaaattatagggatttctttggtgactcacaatgcgagaattgaattcgctaagcgttggcgtgctgttcggactgctcactgcccggttaagaaggctttgtccgagcgaatatatgtggtgccttgttcggcatatctcttgcgagaagatacacaaagttgattccatgtgtcaccatcgtgtgatgccacatcagagtgtaaaaattgagacaacatttgcccccaaagtctatacgggactttcgaagttgcgtgtagacttcatctgagctgcccttgcgtttgaatgggtgacacatgttaggcgcgtttgtttaggattcgatgtgaggctgaccaggcgtctcttcagtttttggcgaattaatgctctgactcaattaatgcctcaaaacctggttttctctcaccacgtttgacggttacacttaattatatttgattcttgatattttcttttggggaaaccgatacgtccaaggcatttaaaatgattaccctttcttcatctttctgcctataaatagggttgtgcatccttcacgaattcactcttacaactttctccattaaacaaactcagagcaaaaagaggttttcacttcaagtctgtcgtgagatttctacaaaagcatccgagaagcttcgtttgcactgaactcagatgtcaaacagtgagtaagttttcaattccttcttctttttactttccatgtttaatttttgggtttcgaatatgcgttcttgaccttgctatataccataggtggaaaacctacgattaaaactttgccattttctttgtaataatctttgagctttgcggttcatgacgttggccttttgatcgcacattgtctatctttcaccttgcatattcaaagcttcgtgaaactttgccctaaacccaaaaattttgatcttctgggttttgacttatttttgaatgttttcattcttttaaatctgttgcgtactcctggtcggcatatttgtctatttattgttcgatatcccgactaaacactcatcttgtgtgttattttttgtagatgaacccttgtgagttttggggaagcaaacatcgaattgaccaggacttacatcaatttctgtacaaggatcaccctcatcttcgtgctagtccgtcctcttcaagtgacggactttccaattgaagccttgaagattgggaagtgagtagtgaacactcttctactctagaacctgaagtacaacagcactactactctgagcagatcgttaaagagggatacgaccacttcatttgggagttgaagaaaggttagaggcgctatctgccgtccaactggacatacgttgtctggccatatgctgctgacactttgcctgctagccctccaagttcgaggaactttggtattccctttgctgttcctgccgtcatggttgctcgacattcaccttagtatccgtccagtcaaaggatgatggctcgaacaaagaaaacgatgtgtaagatcaatgcatcaaatcctcacgtcgcccagctccccacactaccgagcgccaaacaagatccacccgtcctggaggagggggatcatgagggagacattaaagtccaggaaattgaggaataggacgatgtccttctaggcagcccttctgaggctgaggaagaggagaaggctgaacctctaaattttgggggatacaatgaggtcgaggagccggtggatgcggaaggtgaagtcctagtcgaaggagtggacta

SEQ ID NO: 22734 - DNA, 3602 bp, Cannabis sativa
gtatgggtttggggttatctttgaggatgggtttgggtcaagaccggagtctaagtctaaggtttgggtctgggtctaggtcaaggtccgaatgtggagtctagggtcaaggctagatttatgttaaagattgtataattttacacaacgtattaataaagtcaatactaatcatagtacgatattaaataatattgtacaatacaagacatcttaacatactgatactgtaccaaacgagcttaatatatgtatattactaggagagagttacgtgagatggatcacttttcctcttaccattaaaaatttggtacatagaaaaattataactcaaatacttttataccattgtgtatattgtaattatagcaaagcaaacacccttttaactttcggaagattctaaattactataggccttaaattttgagaattttctaaaaactatcaaaatatctaccatacatccttatattaaaagcaatattttaattttaatagcaataaaacaacaataaaccatgaccatgtgatgcaatcaatgacaactatggttgacaataatggaaatttaagagttggactaggcagttcttatgatccaaaataggccataccctagtacaaccacaccccatatcttcctagtgagacaacccaattctctaatcttatataatatatatataataattacacattcaaattacataccaaaaaaagtttcagctttatgccacaccttattttttaacattaaattaccatattctaataatttaggttgacaataaagaaaatacaacagttgtctgttatgattgttggtgaccaaaattctaattgcctcaagctcaaaatcttgtggtctcatctcatatctattcaattttcaatgttgttttgataaaaaaaaaattatttagggtgattttattcatgggttattttcataaatacctaaaaatgacacaaagctaaaaaaatacagttctataatttttttttcttgatattttaagtgagaaaaactgagtaataataggcattgaattttgtttataaaatagttcttcattttattttttttttcttttcaaggcaattaaacttaaaattaaggcaaaaaaactatggttagtttagtgtactttttttactatgatgtaagcaagctcagataactatataacactactaaaaaaatcttacatacatattatacagaggaaaacaatcaagaaaaaagagagcaaaaaaatatatatttgaacataattaaacatgaatatgtgattgattgattgattaattggattatctcctcccagattctaattcatccaaggttgaagtagttgaattctgatcaaccgaaaacgccatgaaagtttcgccattagatcgcatctctgcattcgattctcgacgaacataccccgtgctctgtccattcacagcactgctcacatcgttcatattgatagcgttgctacgagtctcctccaacgctctgaagtatgcgtacggcccccatcctgaaattcgcgaaaaaattctcaagaactgaaaaaccgaacaaaagtaaaactcgaaaggaaaatcttgttacttaccttcattgtggtaaggcagtggaaagaattgacaatagcaaaaggttgctacaacaagccctgaaaattttcatattatgttaaagatttcgaaatacaaaacaaacaaacgagcgaacaaacctaataggcctccggcgaagacatcttgccaatgatgccaataatcatccactctagaaataccaaccaatgatgcaaacaacaaagggaagaaagtaatgcatagttttgcaacatgcccgtttcgatcaaacacttgaatctttcccgacaagtacaacgacagaaaacctaaccctgcaaaagaccctgcatttccaaacacacaatacttgtcaattatgaacaaaatgatggacagccctgatttaagggctgtcccgagcagtgttgctactcaacatgaagtgaaatttcacttacatgaagtatggccacttgggaaactcttatgtccttccttgatatcactagccttaccgtgacatatcacatcgccccatcgatcatatgcctaaccgaaattaaacaaaataagctttaataccaaaaaaatgaatgtaaatgtgtgtttgtattgagatgaacacatacatctataccgtcgggaaagcaacgccagaaaaagtcgggtcttggtctaccaactgcgttttttattgcctcagtaagaaccccagttatcaccacagcaaataataggcctgttacaagtacaaaactcttgttagaacaatgcttttaagatacaattagtttttaagttaaaataattaattaagaacaaatatatggttcaaattattaccaagaatgctgtggtgaagatcatagacatctcttctacgcagatagactatgacaaagatcaaaataggcaacaaaactgcatatatctgatccataaacaaaaataatcttatcagttgaatattaataataataataaagataattctttgtaaaatggtctcagtcgggaatccaaagatggggtgtgtgcaatacaatacaccaactctggaattcccgactgattgtcttagtcgtgttttgaccaattactcgtaaaagtaaggacaattaaagttaattctttgtaaaatggtctcagttgggaattcgttttgtacaccgtgtctagaattcccaactaattgtctttgttgtgttttcactcaaagagttaaattctttgtaaaatggtcttagtcgggaattcgaagacgatgtttagtacaccatgtccagaattcccgactgattgtctttgttgtgtactcgtagagttaaattctttgttggtctcagtcgggaatccaaagactgtatttttacagtgtttagaattcccgactgattgtttttattgtattttaactctttaagagttaaattcttcgtaaaatagtctcagtcgggactccaaagatggtatttttacaccgtctctaaaattcccgactaattgtctctattgtaatttaactcttaagagttaaattctttgtaaaatggtctcggtcgggaatccaaagatggtgtttggaattcccgactgattgtctcgacattataaaatagtcagtggtgtttgaaccgattactcgaaaaagagagagacttacaggaatagcccaaacaggaacagtgttgtctttcatgggatatctaaggtcatccatcatatctttcccaacaaagcggttaaaagggtgaatttgattgagaataatcgctattactcccaacactactaatataagccaatctagcatatggtttctggcaactgatgctccatgagattttattgtatgtgctccaagatctatttctctaggtccaccaaactatacataaaaatccaagaaaataaaataaaattatatacataaaaaaaaatgagacaaattggtttaaattaatcaaaattggatgaacttaacaatgataatcttgttattgtcatttatttat

SEQ ID NO: 22735 - DNA, 3002 bp, Cannabis sativa
taattttattttaaattgtatgtgctaaaaaagttatatataaaaatagaatgtacatttgatctattaagttttgaaatataatagtattatatatactagacttttaaatgactatttccttaacactaaaatattgtttgtatataattttttaatttgttttttataaatatgtgttgattggattggatcgattacttttacatgtcaatcaacatccaatctgcacaagtacagattttaaattttttaatccaatctaatccgcacaagtgcatatatctgcacttaacatatttgattacattggattggatcgtgcggattggattaaatcgactattttatgaacacccctaaatagatagatagtaacatatatgtacattgtaacaaaataagtttacgaaaagaatttctaaaagctcactatgttataaagatattttctatgcaatattattttatgaattttgtttattgtaagtcaataacaaaatacaaatttaatgtgagtaagatgtaatgtattattaaattgtaacaaaagaaaatatatttattgtattttaaaaaatattaaattattgaaatttaaatttataaaaattaagtcataacccacaagattaaatataaatattaaattatttaaaaatatttaaatttaaaatattatttttttaaagagaagagtcactcaaatgaaaaatgaaaaatcacgaaaagacaaaatactttaaccaaaataaaaataaaatacaaaacaaaatataaaccaaaaaaattgcataacaaagtataaaataaatgtgagaaaaattaatatattgtatattttaaagtgtaataaaataaaatttaattattattttatttatttattttaaacaaaaacaactacactttttttaataataaaaaaaaaagaatattgttggtgggattttaacttttggtgattgacatttagcttaataattaaactaaaaagtattttgttgttaattatttactttaatttaaaaatatatcttgtaattaattaaaatacatgtttatattttttaaattttttgagagaatcgattgcttactctaatttttataaggattcgcccgtgcgtagcacagatttttcacctagtattccaaataaagatagttgcggtgaacttatatatccgacttgtggaaaaaatttattcaaattcagtattaattgaaattattttctgcttatatttcacatatcaatatggcgtgatatgattagttagcagtttcttatattattttattatattaaattgtgtgagattcaatagtgatttgtatcaataacaatgtgacttcttgtggtgcttagaactataaggtatacaataatttatcctaatcctaagttttattacccgaactaacaccaaaaccccaatgacttggaaaatacattaaagaatcatagactacacattgagcaaaaaaaaaaaaattttaaaaatgtagaaagttacctaaattaagcataagtacacagttttcagtattgtatttgaaattgtgtagcgctaaatgcaacatcacatgcattgagtgtcttccaatgcattgctaaaaaattcatgtacttcactatctacacttgttaatatacaatcttcaaatgaaaagatatgaccctaaagtaatctcttcaggggttccaaataattatagttttgcttgaaggttttggtctcttcaaaagatgtttacgcctcatatttgttgcagctgaattggatatctcaataaagttataaatagttggtttggtattagcatgcgtctgtactaagtcctcagaccaaagacactaggtaaataaaaatatttatattacctggtcattaacagaattgttgtcaacaaatcccaaatcactaaataaatgtttgcaaattagcaagatccattccatagcttgaagcaggccaatcgaaaaagctttactaacttcatttcaagaactaggcaacctcgactgcagttgaaacttagtgcatcttttatctttaaataacatcttaaaaggacaataagatctaagaatttgatgcccattctaataaactgaacgataacaaagatgataagtaacatagattactcctacgtgttgaaaattttgacgtcttgcaaaagtcacgcagctatggagccatatcttctaacttcccagtcactaagttctgcatttggggttcttttcacttcttcagcatcctcatcaacttactctgccacttgctccacctaaatatctcatccgtggattgatttgtttcaactttatcagttgtttaatcaattcccttactttgatttgtttcaacttcgtcttctgcttcatcaaaccccttagaagtgatatcatttgtttcgacttcatctgttatccgatcaatttccttaagatttctttctgaggtacctgcttgaggttttgatcccataatgaagagttgaatactaggatgttggtaagtgtcatccatctgcatgaaatgaagtaattagtgcatagtttgaagagttatgatcaagccaaatggcaagctatctttttctctgctaaagcaagatcataagaccaagaagcacattagacctaaaaataagttggccccaaaactattgaagctggaacaaaaactgtaacatttaaaagaaagctcgcacattcactaatgcactggtaggatttggacaagcactagtaagatataagttgaggttattcatcatttattcaagaaaaaaaaattgtaagacctaccttagaatttggaactattttcacctcaaaattctctttccacatgctaagcatttgttcatggacactagtagaacggatttcgtagcccaccttggataaaaataaaagaaaagtattagtcactctgacaaaaaaaaaaaaaaaaaagtattataatttttataatatccaatac

SEQ ID NO: 22736 - DNA, 4049 bp, Cannabis sativa
tggcaggtcgattctgcaaaaatggcaagccatttttttgggttacctgccagtaaacacggtagaccgtttccacagaaccgacctgccattttctattgcagaaaacaacaaagccttaaatcttgctcaaaataaccccaaactaaaaactgagctccataatacctattcataccatgatacactaattctaagcaatataatcaaaaataacctcaatatgcaattttcaccattattgagcgacgtttaagttcttgaactcaaacttgctcaactcaacaaacaaccaaccaaataatttcaaataagcttaaaactactgtaatttaatccaaaaaactaaatcaacactcatctaactcagacaacaagtatttctcatttttttcatgcttgaacctagccacaacttactaaaaacaaagtgaactagggctagggcctacctttggatcttcaccccttgaatttaactacagttcaccaaaatctgatgaagaacaccctggttccttctggttctcttgaggtcgaatggttagagagagagaaagataaaagtggttttgttcttattcaccttaatgataatctaataaaagataagattaacttatcttagcatttaatcaatatggccagctaaaagaattagtggaataattcactcactaaataaaataaataaccaaactaatccttgcttcctacctaagcaacctttaggcttaggggtaaaatggttcaataccacaattctgcctaacctcgatataccaatatcacaatgaggattttcccactaaaacaaaagttcaaaactaatttgagtgactctaacagctattcggcgcattttctatcgttactgagtaaaaatcataaaaaatataaatttcacatatagcataaataatacacttagattttaataaaatcttcgaaattgagaaattataactccaattgtcattttttctaaaattgagaaattataactctaatgtctattttctgaaaatagggcccataacatttaaattcatatataatcataaaataaagataattaatgcttattgccctactaatttatattttaatcatacagccattacaaagtcacacaactcccctctttttttattttattgtatgaatttcaaaattaacataaaatacaaaagaactaaaatattttatacaaaaattgagttattctaaagcgttcatctttctttgtttcatcaaaggaacaaataaccatgatatgcttttaaagatgataagaatttagtgtctcaaatacaaaccatacttactagatgttgagaaaaaatagacaaattacataaaatgtgaaccagtttttcttatatatattttagtagaggagacttacaaacttgtacacacttatcagacattaatgtgtgcagtgaaaataagatcattgtcatttgcaatattttcatttttctccttttttagtttgatcttgcaactagatgatttcacaccatactgaaagtagcccttttctatggtttcgcatcctcttcataactcctaattaccaagtattaacctactcaaaagatggtattcacacttcagtatgggtagctctattccaacaaggggcctggcaagaaactgaacaaagatcgctcaagtctgtattaatattttagtatcccaatcacacatataagtaactcaaatcttttaacccaacctcaaaagtataaaaagtacatgacactaagataaatatcatccaaaagcataaacatgttttatcaaccaatgatgaaagaagaatatatgtataagaatactctttgtacaaaatagagaaccaaatgaaaaaaaaaaattagacaatgcaaacccccaaagattttataagggagtcaaactgaattgaatctaaggccttagtaaaaatatcaacaaattgctttttaatatcaacatattctaactgcaatatttggttgtcaaaaagttttctaataaaatgatgtcttatattaatgtattttgtacaagaatatcgaacaaaatttttgaaaaaatttatagcactagtattatcacaaacagaatgacaagtaagagtgtaacaattatcaacatttctaaaatcttgtaaaatgcactgtttcattgttaagaacaaaacaatgatcactgtcaaaatttacagtataccctaatcttactaatgttgagtaaattagcccttagtccctcatcaagcatcacatttttcaacctttgtaaccctttaaaattgagagttctcataccaatgatattttctgctaaaccatttctaaatatgaccacaccaacattgcattggtctgatatttaaccaaaaaatcattgtcacctagcatatgtctagaataactacttcaaaatactacatttgagaagcagaacttttatcaaaaaatctagcaagacattttcctttttcaatccacttttgttttggagtattatgttctttgaaaaatattcaaaataccaaaatattttaatttgaacgaattttgcatggtgaaacatttaagtcgaatatgcccattaatgccacaaaaatgataaataggaataaaccttctcgcctgagagcttaccttttttatgctttctagagattttgctactgcagaagacggttatgcaccaaaagattttgaatttgcaacagtagccaaatttgcaggaacaatcgattttataaattttgtttttctagaactttcagtaccatttgatccaagaccaacaacgcctctttgacatgcatgctgaactttctcaaaaatagaagattcagggttaagcatttgaatattgttcttataattttcaagttccttctttaatagaataattttttcatcttttaaataaaaaacaatctcatattctctattttgaattcaagagattcaatttgatgagacaattatttatttattttaaacattgatctatttttagaagtaatcagtatccacttttcatacatgaccttgtaagactcagccagagactcttcatagatttcagattcattagaatcagaatcttcttttttaatgatattattcaaacataccattctttctttcacttgaaaatcacaaaacaaactagaagaaactgaggttagtgcaacattattggaaatttctttattactatcagtttcatcatcactacatgtgtcattgaaacttttcttactcttttttagagtatttacacattcaaattgaacatgtccaaaaccttcacattccctggattgaattctcttttgattgctactcattgaaggtttcaaaaagtattaccttttgaaaaaatctttttgtcacttatctttttcatgtattttttaaagtttctagttaaaatattcatctcatcattttcttcattatctgaactttcttttccaataacattaaaaacaatacatttacctttaccaactatggacttgggtttgtccttttgtttaatttgttgatttagttcaaaggtacgcaatgaccccatcaactcctccactttcatcttgttgaaatcttttgcttcttccgtagccaatagcttagcatcgaatctattaggaagacctctcacaatttttctaactatcactgattcattaagtttttctcccaaagcaaaacattcgaaggcaatatcagaaaatatttcataaaattcagataaagattcattatcagacattctaagattattaaacttggtttgaagctgtaaataaagtttttatttgtccaataaaaaattagtatattactaatttaacattctttaatgtaatttttttaataatatatgtagcttaagaatttttaagaccacgtaacgcgcgatttttatttcctagttaagtatatcatgagcatgttgagaattaaggttcatcacatcccctgctactcatcacagaggagttctgcccatttgtctgcagtcagcat

SEQ ID NO: 22737 - DNA, 4232 bp, Cannabis sativa
taactctatttctagccgacatcacactaacaatgaggttgggattgttctccaagacaattatcaagtgtggaattctttttcatcaatttccatctctcattgtaaatgaaaaatagtgttatgactcattcttcaacaaagcttgctttatctttagaagctcctctcaagtaaagtggtgggaactacctgtttgtctttggccttaatgcttcaatgcttcttttttatatatccatttgctattggttttgtgccttcttttctctaggaaagaaaaatctacaaatttttgaattttttttgaataattaatgcgttaaaaatatatttaaataatcttttacacgtgtctcgtttattttatacgcgtgtaaaatagattgcataaaccttattataaattattttatttcttaaaattttgcatatcttaaataaaaataaataaacattaaaactatttagatgtcaaaatgcaccataccgtagaagcacccaatatgatatgtgaacaaacaatttatgccaatatgtgaacaaataatttatgccaaaaaaaatataaatattcacgttacaatttcaactaaccatatccatatttatttatgatgatttccacatgattaaaatcacctactacacaagtgagcaatattttggtattaaatgtgtgcagatatcagtacacttccaaattaattaaaatcaataactgtgccagttaggaatcagcatcctccatactaaacgaagataaaatccatatactgtgagcaatgtaattctcactcacacaagtgcttaatttcataacccgtgatagatcttaattaaactggataaaattacatctgttttaaaacaatttgatattcgttcttcttcgagagaaaaacggctaatctgaaacacatgcctaactccatgtaaactttagtaaagagatataatattaccactgttccaaagtttattgtctttcagtgtataaagtcgagattgatcaaaccttaaggaacaaatgaccaaattgaatttcacctcccaatctcctctcactttggatctgatgaccttattccgtggcgcttgaaaaactctctaaatccataggcactaagatcgtagttgtactggacatgtaaatataaatatatatatgtatatgtatataaataagactcttgattggggtaaaaaaaaaataaataaatagagtttcttttcctactgtgtaggtaggaagaggacttcaacatgagaaaaatgactgtaaaatgctagtcatagctcaaatctaagttaccaattacttaatcaaaactaaaaaagacaagaaatgtcagttcatttaagaagcccaaaacttacaggaataactttgaccgagtactttgtaatatttgtatccacaatccttccttgattagatggtgcctgaagaagatcgagatcataattttgataagaaaaataaataacaaaaaatctgtctatcaagcacgacataaatcaaattaaaaggccgagcttagaaattgggagaagtcaaggattgcccaaattaagactcaataaatcattatgacccttcatcacttttctttctagctcttactctcaacctcttgtactcactttctcgtactctctcacttgcattctcaaacaagaaatcacctttttcagtgccaataaagaagttttgcaaacaaaatagtcttgaagaagaattttcaaggcagcacttccgtctgatgacattgataaataaaagagatcacaagcaaaaatactaaggacagcaatctatatttattcatcgtcttctttatagaagagtgcatatcctgttcactaacagtgatgctttcattgagagcaattgcagtgagtgatttcattgagagaactctcaaccatgaaagctgaagagattgttgaactcttgaaatctatggaatcttgtttcaagcaacatttggattctcaattcaagaagttcactgataggccttaggtattaaataaagagggtgaatagttattgtaatggggtattgagatagtatatataagagtgtattaaaagggttgggaaagagaattattttgttgtgagcaatagctcttgagagtgtcgggtctcttgaatacctagaaacttgttcatttccttttccactatctattactttccatcttgctattgtgtggctctatttaccctattttgccactgtttatacttgaatgatagaaaattcttatcaaatggtatcagagcacgtcgatccggtaaccatgaaaaactcgaaactcattttttacagcgatgatccatacgcgtgggtcactaacattgaagagtattttgataggccacccttaacctttgtatatggttgaaagaataggaaaggtatcgtggtcgacaccacaagaaattaatagctgagctggcacagtttgttatgtgagttgtgtttaagtgtgtgctattttgggtgcactcgttttgtgggaataaagggtgtatgatttgtctttttagggtgagaagaattttattatcttgtaacctcttgagagagaactaggctctcgaattcctgggtatcaatagaaggcaattatgtcatttttgcaatataatctcaccgttcttcttcctctcttgcttttgacctaattttggcaccaaatatgaatggccccacaagatgtcgagaagacggcttttcgcacccatgaatgccactatgagttccttgtcatgccgtttggtctttctaatgctccagcaacgtttaatgtgctggttttctttgacatcttagtgtacagcccctctttggaagctcatgttgatcattcggaggaagtcttaaggcgactatagtagcaccaattgtacgccaaccaaaagaaatgggcaaaatagtgtcgagtacttagggcacatcatctcagctcaaggagtttcagcagacccagctaagatagcggctatggcacagtggccagttccaaaaactctcaaggaactttgggcatttttgggattaacgggatattttcgtaaatttgaattatggcactattgctcgaccattgacggaccagccataaaaagatgctttcggatggaacaaggaagctcaacaggccttccaactattgaaagaagccatgtgctcagtactagttttggcctacctgatttttcgtgttcgtttattgtagagacggacgcttccagagttgggttgggagcgatgttgatgcaaaatcagcgacccatagcctatttcagccaagctttgtctcctaggtcacaagccaaaacagtatatgagcgaaatggccatcatgcttgctattcacaagtggcgtccttacctccttgagcgtagatttgttgttcgaacagatcagcgcagcctcaagtaccttctcgaacaaagattggtggcagaggagcaccaatagtggttgtctagaatcttgggatataactttgaaattcagtacagacctgggctcgaaaattaggcagcagacgcccgtccacagcgactctactttggctgctatttctgtccccaatgtcatttccattccagaattacaagcccaggtaaaaactgatccattgttgtctgaagttaatggagctggaaaagggtcatgatgggggtggatatactttagtgcaaggggtgttgcgcttctgtggccatctcgtgttgccatctacttcaccatgtgttccattgttattacaagagtatcactgcagcaaggtcggaggccattcaggggtgtttaaaacttttcagcggctagcaactgacctctattggtcaagtttgcagaaaaatgttcaaaagtttgtggcagaatgtgctatttgtcaacaaaataaatatctagctcaatcccccaccggtttgcttcaacccttgtccattcccgagcaagtttgggaagacattttcatggatttcatcaaaggattgcctatgtctcatggttgtggatcgtttgactaagtatgggcactttattcccctacgacacccttatacgacagctactgtatctgaagtttttgttcggggggtggtcaaacttcatggctttccacgttccattgtctcgaatcgcgataagatttttcttaacttgttctagaaggaactatttcgtttgcaaggcac

SEQ ID NO: 22738 - DNA, 5406 bp, Cannabis sativa
gtggatggtaagtgatttcaaactgccccaacttgagcaaccattttatcaatcttcctaatgcattaagttttgataatacttgtcatagaggttggtgtgtcaaaaccttgttggggtgcgcttgaaaataaggttgtaactttttggatggatgtaccaagctaagtgcgactttcagagtggacagtacctcagttatgcccccagtaaccttttgcttatataataaattggttgctagttttttccctcctcttgcactaatgcagcactaatggcatttttcgagatggataagtagatgtacaacacctctccagttattggtttgaccaatactggtggcatagaaagatgtttcttaatttcttgataggcctactcgcactcctcattccattcgaattttttgttgcctcaaaaaatattaatgaatgggagacatttatcaattgatctcaaaatgaatctacttagtgtttccattcttccaattagggattaaacctcctttggtttatttggagaaggcattttgagcactgtctttattttctcgtggctttcctcaattcatcttgcattcacaataaaactaacgaattttcctaaggacacccccaaacgaacatttttgtttattaagcttcatattatattttcttaatattgcaaaacattctacgaggtcttctacatggtcctcgcttttaacagattttaccaatatgttatccacatacacttcaatattatgacctatctagttttcaaacataccattcacaagtcattgatatgttgctcttggattttttagtctggatgacatgaccttgcaacaatacagccccatgtttgtaatgaaacttgtatattcttgatctggaatatgtatttaaatcttcttttatctagagtatgcatccataaaggtcatcagctcgtgcccagctgtcgcatcaaccaactggttaatctatggtaatggaaaacagttagagaagtctatgcaggtttgtttaagtcatagaagtctatgtaggttctgcatgtcccatttggttttgaaacaagaataagattaaaatccacgagggatagaatgcttctcttataaagttgttggtaaacaacttgttaacctctccttttaaagtattttgtcagtcaaggtctaaaggacatcgcttctgacacttcaaggggtaggaggaaccaatattgagatggaggcatattacatttgggttaatcctgcccatatctgaatggctctaagtaaactgatcttggtttgcctataaaaatgtaattaattgttgttttagttcttcccccaaatcttttcatatgttaacacatttggttggatcatttgggtctaaattcacctcctccaactcttcgattggcttaaattttttgtattcatcgtggatgctaggatccaattcacccatctcatttttctcactttcttttgtcaaaataaccatcaattggtggttcaacctttgattctgtaactcaacgttatagcacttactagccaatagttgatcacctctcactatccttactccataatgacttgggaatttcaaagacaggtgattaatcgagcttacttccctcaatcttgttaatgtagggcaacctatgagtatgttctatactgaagacttatcaactactaaaaaactcttgcatttaggttgatgatagtggcagctctcccatagtcattgggagttcaatagtgcctaggcttgcaacactatcgcccgtgaatctacacaagttcaccatgcatgatcttaaattggcctcttctagacccatactattcaatttttctttataaagaatattaatagaactctcgttatcaatgaggactctctttattctcttatttgtgagcaaaattgtaataactagggggtctgaatgtgggaaccgaacatgtaaggcgtcttcatcagtgaaaataataggtggtttcttaggctttgctcgctttaggggttcttgtgcaaagattgactcttgattttttactaggtttatatatctcttctgggcgctattactgtttcctgcgagatgcgaccctccaaaaataacccagatgttcttacactcaattggggaaggttatacttcttggttgttcttctggtttctgggtagattttgttcattccctcaatttcttacatattgcctgagatactcatgggaaatgagtccttcaatttcatcttttaattggcgacattcctcagtggtatgtcctatgtctcgatggaaatgacaatatttgttaggatcttgcttattcctaccatgtctcataggtttgggtcttaaaaacgcgacctgattttcatttgtcagataaatattctcacgagttttgtttagttccttatatatcgagtatattagaacatacctctcatacttctactttttcttgtccattgacgaatctttcgactcatctttcctctttctgtttgacctattatggttcaaatatcctacttttgttgttacaatagtcattgttccagtactagtgtttggtttatctcccgagcctaatttaagcattttcatctcattttgcgcctcttcctttcacacaaagattaacacttttcgattaaattcattaatgttttttacagggcaaccctaaagatcatgccatagttctcctcccatggtttataaatcaatcgttcaactgaatactatgatttaaatttctcactttggttgcttccgtactaaatcaactcttctaagcttttagagattctctcagctgttacttgatgttagttagcgagaacgtctctagcctcctgtccctcgcagcctgaaattatttcttgaaatctttggatagttgttcccaagaggtaattgaatggttagtgaatttaacaaaccaatgtctctccgctcatgtcagtgatgttggaaataaaatgcaacacaagttgttagaaacattgcttgctcacatttttgtgttaaaattgttcaggtgtgctacaaaatcggttgtcttgtcatattgggtgacatgcaggttcttgaatccttaagggaatcgataatttaataaatcgggatgaaaagactttgtctcttcaacggaatcatatcctaataatttcccatattctccatcttagtatcacctgaacttgtcttctagatgtattactcttaattgaatcggattcatgggttgttgctcgacgtgttgctggcaacctgcgttctgattcaatcgatcttggagatccgaaacgttacgattcaagtgctcatgcaagtcgcgggttgtctataattaaaatgtttgcatagatcaaggtcgcatcacctttcatttctctggtcataattgctaattgacctagttgcagaataactctcagattgataactctgagaattacttacgctttcttgatcaccttgatagtggcaacatgtaccttcactatctcatgttttcccttcccgtgcgtgggttctagtcgatttgctctgcccatgagtccttgatctagcttaaaacatatcattatgatctactcttcaatgtgaacattccaagatgtgggaaacatatgtttgtttgctatttctaaaatttaagaaactattttgttaatcatgataccaatcatatagtgattagttactgttctatattttaatctttaacaatttatttttagaaatttagttaattgaattatattataccatatgataaattgataactaatttgtttttttaagaagtttggaaatgtcaaaaaggaaaataaatgtattttaaaagaataaaaaaaacatatataagataattggtatataaaaatagtagctacttatattatattgacactcatatgttttaaaaataattttttttagtttatccaaatatattttaaataataagttaccataatataacataaaaataactaattaattactaagatgtatacaaataaattttggaggtaatccttacacaacaaaaattgaaaattcaagatttattaaatgaacttgaggtcacattagatacgttagatttagctggtatggcacgttagtaatattaataatactattattgtaaattaaatacaaaatacatattacaaaaaacgttcctttaatttatttaaatatgttagttttaccttaaattatttttataaaaaatgtttctggttttctactctaatttagactacaaaaattaacaaattaattataataattagtgatattatcgtaaataaataaaaaaaaaaagtaatatttattgtgaactaaatttggcacaacactatattttgggtcaaatttaatacaacttttagcatatgtgtaaagaacgtttaattttaatatgagaattagcagataattaaggtttggtatagacttagacttttagttatgatttatgaatttatggagatatatttaaattctaactgtgttatttatgttacatataaaatttcatgtttttcgtattttaaccccggtaacagtggaacgcaatgtttggccgataacgtcacattttcttatgatttagtattttagtaatagcacggcaaattagatagacatttagaatgtcgggaatgttcgaggtattaggtttgaccgaaataccccttggtagcaaggatgctttttggtgcaaacaagggcaaaatggtcttttaccatataatttattttatcctttagttgaatggattaagttagattaatctgatttcttctataggtttgatattaaataaatattaattatttcatttaaccaaaattagaaataaaacacaaaacactctctctctttcttcaactctctctctctagatctctcaagataccagcagcaagttagggttttttcagctcaattcagggtattctagcaagatcatagtaattcaatccaaggtaaatatcaaagctcccttctctttgttttcataagttcaaagctaggttctatgcataatttgtggagttaggatactgtaagtttaaattgttgttgttcctattttcagaggtgattttgaggttatatgctagattaagttaagttagaggctggttatgaggtttgatcaaggtttgagcttaagagctcaaactttgctctttaatggtgtttttattagtttatgggtgtattgcttgatttatgcttgttgtagcctaattaggcggtctgaagttttggtttagtttggggatgatttgagttgtttacagggttttttgtggttcctgcactgaaccagttgactggttcagtttgga

SEQ ID NO: 22739 - DNA, 2327 bp, Cannabis sativa
  modified_base (2269)..(2290): a, c, t, g, unknown or other
aaaaaaaaaaaaaaaaagctattcttcaacttctcccctctcttaaacctatttgtgtgctagacccaaatcaatagtaaagcctagggtacccgatatatcgtcttcaaccttagagctaccattttttttgaagccatgaaaagctagtgagatctcctttagtgacatctcttcttctatagtcctcaatatttgaccacgatataaatatatactcatcttaacagtaactaggtagatatgtatgtatatatatatatatatttcttcaccaaaccagtaaacatagagacgtcattgactcttctccaatgtattttctgggatctggcgtgcccacacatcccttctcccaccaatgaccattcccctccgtccttcgtcggtactttctgtttcttggcgaagtctaatttcaactatctcttattgtggttgccatttttgttaagaaattttagacgaagaactcgaccatattcgtgttagatctagttcgaatcacgaacgacgaagagaatatcagagctaacatcagtcattggagctaaggtcatcatgtctagcactagtgttcttcgagtcacttccattgacgacgaaggaccatgagtcggttgtggaaccacactagttgaacgatctagaggtggcaaaatcattagatcccacacttttgatgaagcacgctaaggggtcttctctagcatcgatgatctgcgagctactgtcgtatattgaactagagtcaattacaatctacctagatcggatacagcagaaacatcaatagtgatgagatcgagatgcatctccaatggtttcgtgttgatcgttggttcaatagggtcatcgatgtggttttcaacatctaacaaagtaggaaatgcctgaactgagggagccaaagatgtctctgatgagcaatatcgctcaactctaccatctaattcctccttgagatgcacttgtattgccttcagttgagcattgaagaattgatccatatgcaactcgatggatatcaacgtggatctcatgaatttataaagttctttgtcagttatattgcagagctctcaactcaatgaaagcaccaatgatagataatagtcttctttgagaaaggataaatctcataaaatacactcttcgagtcagtgccaaattccaattaaactaaagttctattttctcattccatatttaacaatagctacacaattatatatttatagtctttcactctattactaataaatcactgtactatttcatagtgtaatagataccccattggcttgagagccagatccctcttagtagaaaaacttgaaaaatatagagtagaaaagataataaatctcagctcaatgaacatgagtaatttcattgctatttaaggtttacaatgtttgatcaaagcaattgaataaggagatagatgacaaaagattacacaaaggaatattacagaaaatgatgctaacaatacactgaaatggttccttcatcatctcctaggttttaaaccataggaggttttcatcatcttcccaacttcacaatagaggaggccttcatcaaatcctcaactttatagtagaggagacctttatcatctcattggctttacagcggaggagacatttgtcatctcctcagcttcagaatggaggaggccttagtcatctcctctattttatattggaggaggtctttttggtgactgccaacaaagtattttagtagtcgtggctcattcttcggccaattgaggatgtgaccaacttttgaattaatatatcaaaaattaagagtgatgtcttccctgtcttgggcgcaccttgaagcgatcgtaggtgcagtctctatttactccttggtcacaaccatagaggtttttgtcatccctccagctatattcatagcagaagaggccttctttgtctccttgactatggaagaggtcttccttatcctcttggctgctagcacagcgaaggaggtcttcttcatctctttggttgtattaatagtagggaaggtcttcttgggaaatgtcaatgatgtgttataatattcgcgtgttgctctttagttgtcaaagagatgatcgataccaattgctatcgggaacttaacagataagtagtagatagatgagattgtttggaggtcatagagtgttgacattcttattattacattgtaaggatatttggtgtcatctactatgaaggtagtgttggatattattttaccnnnnnnnnnnnnnnnnnnnnnngtatgttgtttaacaacctaaatatgaactttctaaa

SEQ ID NO: 22740 - DNA, 12691 bp, Cannabis sativa
  modified_base (4658)..(4663): a, c, t, g, unknown or other
ttcctccccgagttcctgttacatttgagcggcagagtcatcctccactgcaatctcttgatcctatgctgcaaactagatggcaagttggccgtgattcagacaatgaacatgttagtcatcaaagaaagccggtggaaattaataggattaggcgtttttgccgtcccattgtaggtggtgctccattcattacatgtcataaatgctttgagttgttgaaattgcctagaaagtttagaatgagagacaataataatcctcctaaaaggcttcggtgtggttcttgttcgactttaatttcaatttcaattgagaataagaagcttagtacttctgattttgaggaactcaagcagatatctccagatagccctgtaagttcaagttgtttgagtgtcaaaggtgccagcttgtgctctgatgatttcaaaagttctggttacaactttcggttggctgatatgggaaacaattctctggtggaagatgaaaggctaaactttgatgtgtctgagaagacgtggggtcattcttcatcgccttccatctcttcaagggaagaggagaaccgagattgtgtgacttcccttgcttctgagcccgctgagatgcctttaagagatgcatactcgccaacaccaccacgctcacctgtctggcaagagtccaatagtcctaagcgcggtccaagcagatatggcgagcagggaaacaagagcaaaagaacgttgcgtaacaatatggtttttagtaggatgtcctctcaaaacagttctgttaaagatgcagctgaggccaccgaactggatgaggtttcctttaacgaataccaaaaccgagactatgaagaaacagacaaagaagatcaactcaagctcagcaaaggcaatgattccttctttgtaggtttcatcaagaagagttttagagatatgtcaagatctaataatcataatggtgagattgagaggcctaaggtttttatcaacgggcaccctatacaagatcgagtggtcaaaaaggctgaaaagatcgccggtccaatttgcccgggggattattggtgagtcttcacattaaaaatcaagtcttttgtataaattcaataacataactctaactcactatgctttatctatcaggtatgactacagatctggattttggggagtcatgggccaaccttgtcttggcataattccagtatgttcaattgattttcggtttataaatttattatgttgtccacactgctgaatattttataacaaagcatttttttcggttgccttcagccgtttattgaagaattcaattatcccatgccaacaaactgtggcgcgggaaacactggtgtctatgtaaatggaagagagcttcatcagagggatttagaactactctccaatagaggacttccaatgacaagagacaaattttacaacatcgagatttctgggagagttttcgatgaggacactggcaaagaactcgatccccttggcaaactcgctccaacgtaagctcttacaaagcatgctttagttaatgattccaatgtcatattatgtcatgattctgtaaacactaatttggacactttcctaaacagggttgagagaacaaagcagggatttggaatgaaagtgccaaacatggtcttatgacttttggttcggtttcagattcttcggtttctcaacaaaggtgatcacctcaaattgtaccatgtttattttccatttttggttttctttgaatctacttttcttaatccaaagctaaaatcctctgattatgatgttgtagtaaaactactgcgaaatctttttcgcttgttcatatatgttttcgggtagatgatgaggctctaactgattcattcttagataatttattatttggtttgtttttgtagatttaagtcaaaattcttttgattgtactattttgtaacaaacagatgaaaattttatttgaatcacatttttattagttcttgtttttaccatcttcttcaatcttcagtaacaatacttcaattcaagtagttgagtctaggcatgtttatacctaatattcaaagaataaattaatctgaccaaagagtagggttgaaatttaatgttgtaattgctcataataccataatatatggttaatttttatgtaccaaaagcaagaagatgaagactttcttgaaggatgattctttatagagaaatgttaagtgatgtgttaaggggctaagcattcttaaggtaaaacatccatatccatgttgtttatgaaaagtaatggtatgtgcttacactcaaatattagaatatgacataataatttttctcaataaattatgagattatcacttaatttaggctatgttttgtaggatggatggagagttttgaaaggatggagatgatagttactcattttcgtgttgtttggtattagaagtaaagttagaatattttcgtgttgtttggtattagaagtaaaattagaatgatagagaataaaataaatattaaaattattattttattatttttaatataattatatattttattttaaagggtagaaaagttattttatatattgtcccttttttttttctttcaatttccctatttctggaaggattaaaaataaggaaagagtctccttccattaatcctgttccttaccttctctcccttgccaaacaagaaaagtcattagttcctctatccttctccctccactcctctcctcccctctaccaaacatagtgttagggtaaatggtattttaaattctatattttacaaaaggctaattaggatttttgtctcttaaactttgacatgtaccaaatcatactccctgaacttttttgaccgttaaacattccctttaaactattgagattatcgaatttaaggacttttgtccaacttcattcaattttactaatttagtgattgtttatgtactaaatcatgctctccagactttaatatctaccaaatcatgctccttgaactttcatccatgttggaatttccttaccaaaataagacaaaaatccttaaatctaacaatcctaatagttcaggaaaaatttttaacgatcagaaaatttcagagggcatgatttggtacatgtcaaagttcaggggacaaaaatcctaattagcttttacaaaaataccaatttgaccttttatttgttaaatgacaattcatattgtatttttcaaaatagaaaaaaaaaattataccttgaacttaattattgtcaaattaacacttaataataacttaatctagaggtgttatgactagactgtatgtatatatttttttatctgttcgtgttacaaactagttttaaatcgattatattaaataaaaaattgaattcatggtctattttgtactattttaaaaaacacaagatctaaattatcatttatcaaaacagagttgtaaaatattatttacccctaatttatatgttatgacactagatagcaaacaccacaaccaccattttgtttaattagttactttgattgctaattttagtgttgtttaattattggcaaaagaacaaagcatttcatatattttaataattcacaaaaacgtgacacttacaagaagattccttccttatctttcaaaatatttattctatctcaatattaaaaaaagaggaaaaaatatttgcattacatatattattgctaaattggctgctttctaatcacacttccaactttgaaaatagaacacactactttttttaatgttatttttacttttaacaaaaaaaaaaaaattgtccaattctttattgtatttgttgcagttcttttataaataattatgaaaaaatgattctttttatattataatttggtttttaataaatttaaatttatcacacatttttttaattaaaaaaattgaagataaatttaaccagaacctaattaataattttcttgtgagaaattcatttgtgaatagtgtagtaatttctattattttatttgacaaattaattagtaattacattaaaaaatatatttaaaagaaaagtttttagtaaatgacactcagttttagtagcatccatgagaattagaaaaaataaataaaacttctcaaaacctttttttttttttcaaaattctacaattatctttaattacatatttattatggtaaattagaagtttttttttaataaggtaaataagataattagataaacataacaaattgtttttttttttttttgaaactcaccaaattacatcttaattaaagtaaaatttttaatttttttttatgttttatttataattttatttataaatttacagcctaaattttttatacataaaaatacgtttataaaattttaaaattacaaaaattgacattaattaacaaaaagtaagaaaataacagtaataatttatgaatcaaatataaataaattataaaataattaaaaaacaaactcacgagtcacagatttaaattgccatttaaattatttcatgtattttatatttttttaagataaaaaatgaagttaatcatgtattgttaaaacataaacaaaatcgaatgtaaaaataattttttttttnnnnnnattttttattttttaaaaaaatatgttctacttgagtaagtctttcctaaatataaggtaaataaaagaatttgtcagggcatcgagagagatgattggctgtcttggcctaacattgtcggtgctgctgtgatccaatctccaatctccaatctccaatctccaatcttcacttaataaagcttcttcctttatcatttttattttcattcttttcctataaattattattattgaattgaatttcctcttatttttattctattaaattttgggtttttatcattttttttttgtttttttggacgtttatggctgaaactgacccaccctagttcacagacactaagaaaagggcttgtaatcagctaaagtttagattttgatttaatttcgggagtttgagcgaagaagatgaagttgaactggaagctatggcttccacagaagcacaggcaattgcttgttaagtttgctgtggctgttctcttaatgggtcttgctttacgtcttcttctcgttcgttctaccgacatttctcctgaactcgaaacccctttacctgaaacccctcgtcttcctcagaaaattgttgctgttgaagaaccacctccttttgttgaagttgaagctcaagaaaatgaggaacaggtttctcaaacaggtgaatttctagttagattggaatgagatctagttacagttaatgatgggattatggagattttaatgggttctgtgttgagatctaatgatgaaaattataatggggtttggttatgattaaccttttcttaatcaaaattattaatatgggtaatcctactttgaaagtggtcctatatgatatggttagctatgcattgaatttaggctctgagatctaatttccattaatggggtttgttgattgtcttgctttatagattgtcagaatgaaaattatgaggcttttaatggtggttttgtgattaagataataccaacaaactgttgaatttgatttatatatgttctgattttattccataatcattttgtttgagtagaccttcctgaaatagatggaggaaagtgtgatcttttcaatggggaatggattccaaacccatctggtcctatttacacaaataagacttgctcttttattgaatcccatcagaattgcattagaaatggtagacctgattcagagtatttgtattggaggtggaaacctcggcgttgtgagttacctaagtttgatgctgaaagatttcttgagatgatgaggaacaaagcatgggcattgataggtgattcgatttctcggaaccatgtgcagtcattgctctgcatgctatcaacggtatgtgtttgaattaagcttgtcattttgatattttctttgttaagctttctcttgtatcattctttacaatatgagttcaacatgtagttttccattgtaattttcgggtgttatgagttcatcaatatttccctcattgatgtttctaagctcaacaacatcaacattgttttcgactttatgtgatttgtattcaaacttgcccagaaatatgttgtgtactactatgcttctgttgatccatgttagagtacttgttgattcaattgttctgccatgtggtttgctcgctcaaggtttgagcttcgagtctctcttagggtacttgctatagtttcctagctcccaaatagttatgaagatgggagttgctgtaacaaataacatgttcggggagggattcgtctttctgtcatgacatttgatgagttgttttcttaagatctctctattctttctggtctttcgcttaatagtcagtatctgtgtttttatgaagtctatcatacatttacgaggcaaaaatttgggagccactattagtcaattgtttagttactgttcctttacgagtttcgattgttaaattacaagctttataaatgttaacaatggtaacttagcttgctgcactgtttttcggtttaaactttctctgattcatagtacgtttgtattggttggaatttgtttgattctgtcttattgaatcctgcaatgtattttcagatgttcaaattaaaatgttgtttgttatctttggatgttatgctatctttttcaattctagcccttctcaaacacattatttataagtgtcttaattttgtccatcaggtggaaaaaccagttgaagtctttcatgacaaagaatacaagtccagacgatggaactttccgacatacaatttgactatctctgtaatttggtctccttttctcgttaaagctactatatatgaagactacaacggcgtttcaacatctgaagttaagctgcatgttgacaaactcgataagaagtggacaagtctttacgagagcttagactacatgatcatttcaaccgggaaatggtttctcaaatcttcaatctactacgaaaacaacgaagttgttggatgccattactgtcaaaataaattcgaggaggtggggtttgattatgcttaccgaaaagcactgagagaagctatgaactttgtagcagcatctaatcacaaaggcatgatcctattcagaacttctacaccagatcatttcgagaatggggagtggtcaagtggcgggacttgcaagagaaaactcccggctaaagcaggtgactttcgactcaaggatctacacaggattctgcgtaaaattgagctagaagaatttagggacgccacagctaatgctaccactaatggggtcaagatgaaactcctcgatgttaacccgctttcactgttgagaccagatgggcatccggggccttacagagaatatcatccattcgaacgccataaagatgggaatgtacaaaatgattgcctgcattggtgcttaccgggggcgattgattcatggaatgatttgataatggaaatggtggtaaatagttaagaaattggccagtttgaaatgtgataatgatatggtattcttgtaaaaagggttgctcttgccaagttttgacattggaaaattcatacttttatggtgagaagtgcaactgtactaggtatcaaaattggcctgtccttgacttcatttcattatgttatgatggtatagagaatagaaaggttatgaatgaaggtcaaaaagagtaacattatgaaaaattgaaacctcaaccatatttatttgttgtagattttgattctcatactttgatgaaaatgattgtccacctgtattttcttagttattttgaattaggtcatgttacttgtcacctacctaattcaaaagatatttagtctgtgtgttgtttatatttttttttctttgctaattataatttttactccctgaactttaatatttactaaatcatattttttgaacttttaaggtcgttaaaaatttctcttaaactattgagattgttggatttaaagattttttttcaattttaataaaaaaaatttaacatagatgaaagttcaggaggtttgatttggtacattttaaaatttgaatgacatgatttagtagatatcaaagtttagaaagcatggtttagtaaaattgaatgaaactggataaaagtccttaaatctaataatcttaatagtttaagaaaaaaatttaacgattaaaaaagttaatggagcatgatttggtgtaagttgaagtttagaaaataaaattctaattaattttttttaatatatatagagtaatttgaatcataaaaaaacaacgttgatgtagagaaatctctccagccaataaattaattgtctagccaaaatatatataaagtaaaaatatgaatcactataaaacaagcgacttatatatatgatcaagttactcagaaattttaaacaaagtaacttgaaaccattttaaaatgtatccagtctaaatgaacaaaagcaaatttacaaaataaatacattagatagaaagttgattagcacactaaataaataaaatattacatttttatattagagaaaataataaactattttcaaagtggtttttttagtaattatataagaaacagatttatttattttttaaaaaaaaagtgagataatttacatctttaattgtaattatataattatataatttttgatttagtaatttagtaattatataatttacatctttatctcaaaaaaaaaaaaaaaattgtaagttttgatttttgatttttttttttgccttgattctctccctaagattttacaacatgtattcttaaaattatttttaaatgcacatttttcttacttgagcaataaaattttttggttatcccaatgtgtatagcatggccaccccaaaaatataacatacaattttattttttatttcatagagaaaagatcatcaaaatttctttttattttatacatcatgtctcatgtctaaactctaagaataaaagtgattaattaaataaatgaaacaaaaataacatactataagtcaaatttggcactttattttacaatggggaattaaatttggctattatttattaatattatgttttaacaaaaaacttacaaaatgcacattgaatttgaaataacattttatcatattgatatcctatggtaaaaatgaattgagtcatttttgcacttaaatttctaccaacggtcaaattaacacaaatgaatcagtactggaattcaaaccattcttcattcccccaaaattttatatttttgaatttgaaaaatctagccgttataacctattctctcctctctatataaaacccctcttctctttcattgacctaaccaaatcaccgtaaaaactccactcaacagagaccaagatctcacctttcttccttctaccatggccggagctacagtcgccgcagccgagacgaaacccaagaagcagaaccgcagagctctcaaagagaagaacccaactaccgatgaggccaacattttggccgggaaattgtctgagccatctccatcgccgtcgccggcgatgttgaagagcgatccggcgaaggagaaccacgagagcctctctcagaagaaaatgacttcgcctaagaaagggaaagccgtgtcgaagaaacaagcggcgacgaaacaaacgtcgtcgtttgagaaagatttgcaggaaatgcaagataagcttcagcaattgaggatcgagaaggagaaaaccgaggagcttttgaaggagaaagatgagatgttgaaggttagggaggaagagctcgagaatcgaggtaaagaacaggagaagcttcagatggagctgaagaaattgcagaaggctaaggagtttaaacccaccatggttagggttttgcttgaaaattttgattcaggttaattttgcgggttttagtgattgattgaatttcttatattgttttatgattttgtagacatttccaatttttcaatccatgaaagataatgaattagacaagaaagagaagaagaagaaggtttgccctgagaagaaaaggccatctccaccttatatcctatggtgtaaagatcagtggaatgaggtaatatacagatcaaatgagaaaaggggtttttgaaattttgaatcatttttgtaaaatctatctgggtttttgaaatgcagattaagaaggagaatcctgaagctcaattctcagatattggtaatattttgggggcgaaatggaaaacagtcactgctgaagagaagaagccgtatgaggagaagtaccaagctgagaaagaagcttacttgcttgtcgttgcgaaagagaagcgagagactgaagcaatgaagctctttgaagatgaacacaaacaaaagacagctatggagttgcttgatcagtaccttcagtttaaacaagaagcggaaaaggctgaaaaggaaaacaagaagactaagtaagaaaatcccttatctctctttctttgtatgtaatgtatatactgttgtttaactcagtagaaattttacaggaaagaaaaggatccattgaaaccgaagcagccaatgtcggcatatttcatctttttgaacgagagaagagcttctctgcgtgaagacaacaagagtgtcttggaggtagctaagatcacaggtgaagagtggaagaacatgacggaggaaatgaaagctccttatgaagaggttcctgccttggttttttttttatatatatatttttgctgtcaaatgattatatggtgtcattaacattatgtttgctgaccagtttttcatgatatgaaaattgcagatagctaagaagaataaggagaagtataagcaagagatggagatttacaatcagaagaaagaagaggaagctgagaatttgaggaaggaagatgaagaaaacatgaaagttcagaagcaagaagccttgcagttgctcaagaaaaaagagaaaacagataacatcatcaaggtggttcctttattcaaaaccttttaatcccattatcactaaattatggttagtttgttttagtttttttacttgattgattaaattaatctacagaaaacaaaagaggttctccaacagaagaaggagaagaaggatgttgaccccaacaagcccaaaaagcctgcttcatcatacattttgttcaggtgaataattagtaataataaactgaaaatatcctcagtaattgaagaagggtataagagaaaatagcttaattatgtggtatgttgatgaaaaatgcagcaaagaagcaagaaagaacttgttggaggagaaaccagggctcaatggtgcctcagttaatgcagctatttcagtcaaatggaaggtaaaatatacactgctgtttagtatgaatttacttttgtcctaacaattgagcctaaatattgtatgttattgtgaatttataggaactgaatgagaaagatagagaagtgtggaatgagaaagctgcagaagccatggaagcttacaagaaggaattagaagcttacaacaagactcttgctgatactgctactacatccaccccaagtgaatcagtgaattcatgttcaagttcttgttgaacatttgctgaagttgactctagttgcctagtttttttttttaattttcttttaaggtgtttctttagcataactactaaatgtgcaaagaaagctttcatgttatgttgtcaatagaactgaaaatttatcttctcttgagtttcttcaagtattttgttcaagtattcaatcaatatcctctcttgagttccaagtatttctttaacactttaattccctaaaaaaccaaattaaattagtattttgacttaaacctttccctcaaaaagaaaacaaaaaaaaaataataataataaaaactatgcctcatcgtcctctttgagaaaattgagttcaagtattttgaccactcaaaacaaagttgaggaacttcttattttaatgtgttcttcttgttgaacatttgttgactacacaagttgactctctttcttaattaatgttgcttccttcttttgttcttttgaacattttttcttttaactgtgcaaagaattgtcttagttcttgggatccttctgttgtttcttttttcaaaacctagcattactgtcaagatgatgataatttgttcaagttcaagaaagaatcgtctcattccctaatttcattatttctagttcattcacttcaaggctagttctgaacgccacataacatcatcttcaaccatatggtcactttaatttccttttttaaattcaagttttcttaaaaaatacagaatgaaattatgtgcaaagaatgttcaaatatgaatgttatttattatcttctccttgctaaaaagcatcactcaaaacaaatttgaggaacttaaatatgaattaataatttttttaaggagcaacactaaatagaagactttactaatttgaccaagtatggccaagtattttgaccactttaattacaagtttaacaaacttacccaatcaagt

SEQ ID NO: 22741 - DNA, 4145 bp, Cannabis sativa
atgtataatgacatccttagagattgatgagtacaatctcgtgacaccaaagctacctagaatatcaaaggagcctcgggggtgtcaccccgagacgattgccgacatcctcttcatgttgggtcttgggggtgtcacccctaagtattagattctacccctaatgggggttaacaatcataccacaccctagggagaccctcatcgttaataactaattcaaatattcaaatatcgccaaaagtttaatgacaactataaactcacaaaaataacgagatattatcacaaaaacagacttcaatcacttccaaaaactaaggagacggttgagatagctttgcattggtcgcgcctcctaaagcgagaaacaccgatcttctccccctatataaggggtcacccatgacttgggaaaaggatccaaaaatttgagcacttagagaaaaaagactctgccattgtgtatttttgcatgcaagagcttgttcttaattttacaaccctgatcaaggggagtaggctattattgatatttgggattgaacctctttaaattttagtgtctttatttacatttattgttaatttggtgtcattattcatatttattgctagtttttggtttaaatcttatttattatgattcctcgtcaattgcctaaaaatctagtcagtaaacacccttggccaaaatcttatgaagcccgtggatttcaataatgtcatttttagttaaagcttatcttttcttaaaaataccatttttcattctaagcttttaaatttaaatcttgtctatttaataaatatgactaattatcataaaaaaactatcatttaagttaattattaattaggctctccaaagtcttttaatcaataattaaaccctagattttattttcttcttaaattcacccttgcttagtaaaaccaattagttaagtactctacaaggcaatatgatctcaaatagtgtggggatcatgggtctatataatcaagcttccaataagtatagaatttaccgagtaaattttctatctcattaattcctcttaactccactacagattcaaaatcccactcttgattacataaaatgctctattcaccaataataaacaagctataagctatccattatttcaatctaaataatcaatgaccctttataaattgtctacattgaatatggacttaaattaccgttttacctttcaatatattttatctttgaagcacttgcttcttacaaatgatattttattaaactagtataattactgaaataagagtttttatatttatctattagccagctctaaggagacatcatttcacttctaaattgttatagaagctatagattctatatatctatgattagcgctcccaatcaaaagtactacaatgttctcaagatgtaagtattgagtcatttttttgggtaggcttgtgacgaacaaatcaaagaacaagtgtaacacagttaaaccagaacctaaccatctcaagattaagattattaatttaagatcaactaagtgatattaatttacttaaaaaagatattacattaagtttacgatatctcttccactgtgaatatcggtccagttcgatgtatagccaatacatccgatcttagcttactctactaataccttagaaaaagcattccacttatccaagtgtgagtaaattacatcgttgattattacgtcagtataaatcaagtgcactgataaatcatgggacttcatatttaaatcttatgatcatgattatttttcattgtgtagacaacacaacaatcatgattatccataagttttggatttaatataatttatatattaaaactataatcataaaataatcatgtgaaccaagtaatataaaatttgaaagttgatggtgcattacgtaacccaaatgatattcttcgaaaagcaaaagtatcataaggacatgtaaatgtcgttttctcttggtcctctggtgcaatagatatttgatgatgccccaaatatccatccagaaaacattaatagtactcctgacttgccaatctatctaacatctagtcaatgaaaggaagtggaaagtggtcttttcttgtggccttgtttctgtatcaatcatatatggagtaaatgtcacttcctttacgttaacttgacaagtattgtaggaatgtagccctccacatagctcacatgttacttgggcatgttgaactcaagcattcatcagtttggttaaagcttcaacttgagtggttagttttgtgattgcatcaacttcatacaacttagccactttctttgaatttctcattttgttgattgttcatggccatcttttctaacatctcataagcgtcattagtactctttttcatgaatgcctcactagttacaacatcaatgagagtgcgggtagtactgcccaacccattgtaaaaattatggaccaacatccacttttcaattctatggtgaggataatttttgattagatctttaaatatctctcccaagcatcataaagagactcattgttaagctggttgaagttgttgatctcctatctcaagttggtagctttggctggaagaaagaacttggaaagaaattttagtgtcaatttctcccaagtgttgatggagttaggtggcaaggacaccagccaactctttgctcgttcccttagtgagaatgggaacaggctcaagcgaatcacatcattactaactctattcatcttgaatgtctgacaaagctccatgaagttagcatcagcatgtttgggtcttccaagggcagtaccttaaactggactaaagattgaaccatctaaagaatggttggcttgatttcaaaaactattagtatcaacagcaggtggtctgatacaagattggatcctgtgggtagcacatactcatgcaaacttctattttgaccattagcctgatctactacgccccaatgttatcattttgagccatatctttttctaactcaacatctctaatagcagttctttcctacatcttcttttcctttattctgttgacaagtcttctcaatttcatgatcagcagacacttttgcagttggtcctcgacgttgcataaattgcttgatctcgagaaaagagaaagattaacacacatagagttagtaaaaagttgcaaagaatggccctagcttggattcgatcctacaagaactgctcgtgctacactcaacatccctattaaaatgattaggggataaaatattctctcgtcgagtaatacagtttgacatacaaaggcattaccttgctttatgtcgaataatgccaagaaagcaccaacatatgaggcaataaaagtgatcttagacttaaaaaactcaaccttgaatttgactgttgggttttgaggaatcctagacttacgagctttgggaggagccataatttgaaagtctaaaaaacctgatgaaaaaatgaccgtaacgagagacaaaaaatagaggtttggctaaaggatactttattagttgaggtaactcaaaccaagctgctttttgcaaataaagacgtttactctcaataactttatttataaagtacatatagtgagcgaatgtattagttcaatctaacctattatagtgtgttttttgattctctcttcattatctttgagtttttttttttcaaaactttaagttttggttcaaaaggaaaaacaagtgaaagttgaatttttggtactaaaattttttaagttttcacattcataatcagacagacgaagatgagtttacgaaatttatataaatctgtatggtagatctaactaggtcagtttaagcattgtcaagtaatacttgaatcagttaaaggttgttacattctattaagattgttttctatcactagtaactacttttgccaaccttcttgtagatcaacttgctatataataaagaaaagtcccaccttatttgttattcaatgaatcattttcatatagtattaggttttttttgagtaaatataaattaactttttttttgacacgaatatataatttacacttgtttttttttttttttaaaaatagaatattttataatata

SEQ ID NO: 22742 - DNA, 3306 bp, Cannabis sativa
ttcctttccatttcattacctccaaccaaacgccacctaagagtttgacaactcagcttctataatcctaattacttttaatggttagaataatgttaaggtgtaacacatatgactttctatttggcaaaacgatattactgacaatagcattttctatatcgtcacttaccaaacatacaaacaaaaataaggtagaagtttcattttcaggaaagtttttttgattcacttactaacaagataatgaacaccaagatcaaacattttaatagacccactaaaatggttttaccagcaatgcaagttttcatggtagaaggggaatagtaaagtaacctggagaggtgtatggccgagtgaatctcgtaagggtctaacattagagacaggatgttctggaggtagctcgcatactatctggtttaataactgcaatatgcaacatatcagcaatttcattaacattcacattaacaatttgcaggaattcttctcttgaatactattaagaataaaccaacaacttaaaaatgaaatgttaagaaataagatgtcacacgaaccctaagaaaagaagaagaatagccgcaagaaatagagagcatattttagctaaaggaactaacgaaacaaaacaacaattagtgagctggaaaactaggaaacactatcatgcaccaaatattattcaattcttgattcaagaaaccgttgagttattttgaaatgaaatgagcatctacaaaagaatagatcttacttcggcttgctggccagcatggagtcttacaccagaagcatcatacattacctgcaataaaaatattaaataaataaaccaactatttttaattgaattcgtgtacagtaattatttatgaaaacaatatcatgattagaaaaggatttccaatacaaatgacaaagttataccagaaccattcaggcatgccctacaatttctaggtataaaaaaactatagcaattgctaagtagaatgtaggagggctagaaccacagactttgtgggagaggaccacatgtttgacccatttgagctaccttcttcggttaaatgaaagtttcttataaactaaaaaatatccatccatcggtggaatgtgcatgaacacatcttagggatccagcttttaaatttaatattgtttgcccttgaaccaccgaaacaaacaagtgtaacaaaaaccagatgcttgactgaactaacaaatatatacaagcatcaaaaattttcgttgttaaaatcttgaataaacagcaccatatttgataataactgaaccccaccaacttacatgctgacattagaaatagaagacatttatatatcagctggatagcttcctaatttgatgcagaatgattgaacagaatgaccatgctaacttaaaagaatgaacaagacctggttaagagttacatacaacacatgccaaaaccacagcgatggcaaatgctggtcctccagttccttcatgtaaaccaattgtaactgcaagtgatgtcacagtagctgaatgcgacgatggcattcctccagacccgagcatccttctcgaatcccatctcttctccttgtacctgcacttctatgagaaatatactaaaagacaaacaaaaacttacaaataaccaagagatttaaggtcagagagcaatagctccatgagattaaacccatcattactttaaagacctacctagcaatatgctagagattcctgcctcctgaagattgtagggttcaggactagtatcaaaagtaataaagagaaaggaagggagaaaaaaacaccaatctcttcttctaactagaacatgttgttacgacaaattgtatatattgtgcaggtatgccatttctataagcattacaaaaactccttttagcctcaaaagaacacaaaaccataagttgcctattctcacaaacaaataatccatctgaaacccaaagaacagtttagctctaaacaaaaattaaattaaaatggggggcaagtttcaaacaaacaactgcctaatcaaagaacttcatagaagcactttaacacccatcatgcaaaattaagtttttatctgtttggaacccaaagaaacgcagaaaatgaaaaaatctgaagctttaaaccatatcaaaacatccataattaggaaaggggagagctaagttaccaggtagtgaagagcttcagaaactgggcaagagcgaaggcaaggaaagcagagaggagaggaaggtttgaggggatggtggtgggctgataagtactggatcggaaacttgatgaggcatcagcggccgtgataacctcgtccattgattgaatattgttttgggattttggaatgaaaatgttgtagcgttagtaggtgggttttctttctttgaaacttcaaacagaaaactaattgtgattttgattctctttccatggaagttggccacgattaggttctcaaccatattttcattttcatttttttaaaatatttctttgcaatttgattggctctcttaagtaatccacctttactcatgcaattatatatttttggagttttttcttttattggggaaccaaggtgttcataaaatgtccaattcaataatctaatctaagtcataaaatacaatatctgtacttttgcaaattagattagattggaaaatctaaatctgtacttgtgcagattagatattaattgatatgtaaaagtaatcgatcaaatctaatttacatatatttagatatattttccaaaaaatatatatgaaagtaatattttaatgtaaaaataatcatttagaaaatttaatgcaaacaataaaaatatatttcaaaacataatagatcaaatttatattttattcttatttataagaaaaatataatttaaaataaaattaaacttttttttatacgtaaaaatttttttcttcttgttttgaatttgttgtttttctatttcatttattttaatttattgttgtagacataaaataacaataattttttttattttgttgttagttatgtgaaaaaaattattttttaaataaatatgaaataatttgatattaaaaagtaaccaattcaaagtaactgatccaatctacacttttacagattggattggattggattgaatttaagttattatgcggattggactaaatcaaaaattaaaattcgcacctagtgcggatcggatgcactatgagtaaaatagtgcggattggataggatgaacaaccctaatacacaatactaaataac

SEQ ID NO: 22743 - DNA, 5195 bp, Cannabis sativa
  modified_base (3802)..(3831): a, c, t, g, unknown or other
attagttttgtttgttggtgtaggtggcaagatagtaaaattctatcttaaaattcctacagcatgttacttattttggtttggagaactcaactaaaatgtatttccaatacagggaaagcttctaaattaattgtttttttgtttgtttgttttagtttcagggtcaatagctttaaatcaaattgaactaattgataattggtaataaaacaagattatacagaagttaggtttttcatatactaaaactaatctgacactaacaatgcataatactaattagagaagtcagctaattcttttggcttatcaatatctattgttgatattcaatatttgagattaatttgaaattcataaataaataaaacacaatattattaaatacaattttttcaggcaaaatattacaaacaatcacacttttattatataacgatcatgtacatatgcatgataaagatcatgtatatatatatatatatataatcatactttgctattacacatataatctagacaaacatcataattattaattaaccaattaataacgacacacattataagcgacaatactaatcgactgtgtgtaatttaattggactctcaacacaaacagcagaccttgtggagctttattaaaaacaatgaatatatatatatatacatgacgccatgatcagtgatcactaagcctgttcggctcgacttttctttataaaaataagctttcttgcgaacctgcaaaaccatgcatccatatccatataaattattattggttttattaaattaaaatttgtgagacccgatattaaaatatgcactaatagtaatataacacctgatattaatttattgtatatgtaaatgatgaatatatagtaaattacttactcttcaagtgcatcttggtaagtttggtttaatttattcataacaatgcgtttaaaggtaggtagatcaaggcgagtaattggcttttgtagcaagtctttggcatactgctccaattttttcagattggtaagatcaccgttatccatcgcactaagatcttttggcaacgccgaatcctttcaaattattgtaagttattaagtaagatattttgtaaattttaaataatttaaagtatcgaaaacaagattcaaatagcgtgttgtgttgtaaattttgtaaaacatgatgttaaataacatataaaattcagattataactattcacatattgaaaacacgaaacatgtatttttagaagtgcactgtacaagaaccctatatagaagtacctgaatgcgaaggaaattttgatgataattatggaaaaacattgtggtgtagtgatcaatcatatccgcgtttgcatcacccatgatttcaattattggatggtcagcatgcaaactaagaattggattttgtacccaattaagtatacaccatccattaaccatatcagcattgtatttcccttgtaccttatcaactcctgttcctaaggacagaacaagaagatcaccataatcatcatcttcactactctcaccatcttcattattattattattattatccctttttcttttttttcctttttctttttctaattgacgatcaaccttaattctctttcttttcaaaacttctgtaatagcagctacagtctgaaattaatcaatatattaacaaacattagtaattaatattaaactaagaaaatagaaaatataagggagtctctctaaaatctagcttattatttttattttggagaagacgtttaaattatcatttaacaaaacacaaagttgaaaataatatatattactggattatttgcggcaacgcctccatcaatcatattgaattctgtatttttgttggtgaacttataagcaggaaagtaagttggtgctgcagaggtgctaatgcaaatatctgataggtatgcatccagtattttattctttttttccagtacctgcattattccttaattaattcatataaataaaaatttataaatgcatagttcaatgatatatatatatatatcaatttaactgaaatttcaaaatatgttatatataagatgaaaaatgctaaaaggtatactgcctagtaccctcctatgttattatcgctatattgaaagtattgggtctcatttagtttaaaataataatttttaaggagtatcgctagctaatggcaaaacgatatagccgctaggcaccactagtgaccaataacaatactcaatatacattgtaataattagcagcatagttagttaagaacaagttattttatagaccatagttcaaatccgctcgccactgattattattaataaaatattattttttatttttgatcaactactttttaacatttttttttacatctcataatacttaaaaaaatcaaaataataggatattttattttgaacatataactagtttgtatagggttaatatcatcgactttctattttattaaatatcgtgtatttttaaaaaatagtataaaatagtacgcggagacgtgactttacctcataagaggagaagataacaggtgagagtttcttgatgtcgtatgcaggaataacaacttttgtgagagtatcacttaaacggttactcccaagaatatttcttaccaaatcgtgaaggtaattaccatcataagtagaccttagtaataaactttcattcttactataattatcccttccatgtccatgggaagtagttgcagttggatgtgaaattttcaggtgcatttcatgacggttttcgaattggtagctcatgttcatttccacagcaacaccagactctttttcatttgacaaaagattacaactgcatacatattaaattaaattacacttattacaactgctcaattattaattatcatattaaaacttaataataacttgacctaaaagtgttatgacaatttatttgttctagaaattaatggattagggtattattcttaattaccactttaaaaaatagaggatatgatttgttatttagtactctcaacgttatcctactatataaatataatgattaggttccatctcaaaactaattagctatgagtagagcagctcatgttcttaatatatggctcaattctctaccatttattctacgtggaacaatgtctacaacaatatacaataatacaataatacaataccatcaatgctataaatgcaatgtagagtattagagagattattaattactcacagaaagcatgactttttgaatatttgtgggcattcctctttgtagaaaggcacaatatctttggcagcatataaaggacgatctttatcattgggtgttgatatcattgtggcaataagacccccagtgcttgttcctgatatcacatcgaaatagtctgcaagtcttgcatccttgttattatcaaattcctgaaccaccgtattgacgtgttagagaatctcacataattataatacattttataaaattacaactattttctactaatttattatttttcatggagaaaattataaatgttatgcttttttatattatatgtgcaaaacaatatgaattactttcactcattgttaatttgttctcaaatgatgagaccatatttcttagacttcacttccccatgctttaatatatatatgtacatatgtattaataattagagaaatgctaaagggcagaagtggtgcctaacaccctcctatgtgttaatatcgttattggtccaactnnnnnnnnnnnnnnnnnnnnnnnnnnnnnntagcttttagggagtatcgctagccaaacgcaacgtgacatctcgagaaggtgctagacaccactggtgcctaataacaatgctctaataattaagttaattattattacctgaagttttgattcaagataatcaagcatgactccagggatgatccctctaactcctcctccatcaatacttaggatggtagttgtaccagctccaactcccatattattatttttactcattattattaattattattattattatttttattattatagcaaaacttcttagatatactatatatgcatgcagtccgggagtaaactagtacttctatttatagatgctactatgaatctatgatacctaaattaccattataccctctatattggtggcttggtaattagttaatatttgaaacaatattaaaatactttgcggtataaatactaatttaacttttattgtaaataaatatttaaattttagaacttctataaaatgttaagtaaattgtcacttgaccatccttaattggtccaagtcattaattttttattttttttttaaaaaaagttagtttaaatatacgaataagaaaatagcatgtagatatgtacctacagagttctaaaaatataatttagttattattccgccaaaaattaaacttagttatttatttacagttggaaattaaacttaattatttatactataaattactcaacaataacataatttttttttaaaaaattaaatattaataatttaataatgtctaacactatctaaaatattatatcgttcttgaagtaataatttaatttagtaattattataaaatatcgcacattaataatatcatgcaccactaatattttatcacatatcttatcacattactcatagtgtgcggtcataatttagtaaagatgaacaaaaggacatcatttaaaatgggatattgatttggaaaacctttctcattataaaaaacgtgtttcttgacaaaattaggactattacgataaataattgctattccaaaagaaatagatgataaaactttattttatataaaaaaaattaaataacctcaattcattatggtacattatctctaatgtaagatctaaaatttgtgctaaatttagtacaaaaataaatttgtactatatttagcctactatttataattgtgtttcaatacacaacatataaaataagaaaaaaataattaattatattaatggtcatttcatattttatagagaacatacaaaatttattattttttattcttttattatttaaataatagtaatatggtaaatgttagagattttataataatggaagaaaat

SEQ ID NO: 22744 - DNA, 1304 bp, Cannabis sativa
ggaagctgcctatgacgacacatatttgggactttggattggcaacaacactttgtgcgccattgtagattttcatttttctacatgggttgtttgtctcaaggaagaatgtgccaatatgctaatctgaggcattttctcatacttatatattcttatttatttgctttttatgaaccaaccctatatgtccagtccagaaatggttatgtttgatttttattttattttttcgaaatggaaaaaaaaaagcaagacatttgacaaaattagtcaagtatgagaaatttgccaattgtaatctaagaaactgttattgacagaaaaatgacttctttatttttacagttaggagtctcccaaaataaatgagtgaccctaagtactcatacatgtgtaacatgcatttatgccattttacaataaaatatttaaagctgttacataacaaatttctttatctcgtgcaatttttgcaaatgtttttttttttttttttcattctttattaatgagtaacaaagtgaaatgagctaaatgacttgtttttgggagtcaatagtaaatgtttttgggagcttttgaatgttatataaggcaaggtattcgttttattttgggagttattgggcaaagaggtctctatgtaatgtaagtcttattttttgagtattatgttaactaacttacatctgacaaatggcaatatgtacactagttcaaaatatacatgcaagcttttgaatggtaggttgcacagttacagaggatggccctttggtttgaccaacaggttcatttgtgagaaatatgtttgacttgttgctgcaaagtaatgttgagaaagtatatactgactcacatctcatctataatgcttcatggataagtaaatttaccaagctctatataagttctctacttcttaaactaaactacaaactataaaatatatatttgctagcaaagcagctgaatcatttcagggatatctgcgtgatacactagtgttaagtctgatcaagtcttgaacatgggacctggaggtccgggtggtggtcctggtggtccgggtggaggtcctggctgggggggtcctggaaaccctggtggccctggttgggggggtcctggtccaggtggccctggttggggtcctggtttttggcctggacctggtggcttcttcggtggctttgctgatggtttatgcagtatgatatcatcttggtatagattctattgagaactttgatgtgtcataatccttagtgatgatttgttaaaccataaattgtgtcttt

SEQ ID NO: 22745 - DNA, 2882 bp, Cannabis sativa
taaaaaattgacgatagtactcatttttaaaataaaaattgtacaaaataaattttagttggtttttattataaatttagtattatcatgggcatttgtaatggagattatatatgtataagggtataattggcatttgcacaatactatctaaataatattcaatgaaaataatataacaagttaagttgataactgttcccaaccaattgattgtcaattagacgtattaatgttcattttttttttttttatattaatgcattattgtaagttgaattagccagcaattagaactaggttgagcctacctaatttacaaatacaagcaattaattataatagatttatactaaacaccatataggatggttaggcaaataattaatgcaacaagctattagtatttagtatagtctcaatggtacacacctaattaatttaagattttaataaatattacaagcaagattcttcatgtaattaatagggtttaatgaataatatgtattgtgtatattaattaagtagatatgcataatattatttgtttgatcaatcaaataaatttataccactattttttttaatagaatttaaataaatctttatttatcaataaatttcgctaccaacaatggtaataattaaattgggacatctacttaattgaaaatatgatcaaggtatgaaatagatgctagtagttgatcgtttgacaagagaaatagaaatattttataatttacaatcttgaataacatatcccaaggcaaaaattatttaaacgtaactctaaaaataataataaaaaaaccattaacttaaataaaattaataaatttataccattattaactttaatttatagtcttataataaaaaatacctttgaaaatttaggtaagaaaatgattctgaaattataaatgtatttatcttaattagtgtttagtatattgtatttttaatatttaaatagttagatttttttaatatattatgattatatgtattgtaaataatttaagttgacaaaattaataatgttcaaatattatgtttcacatgaaatagttacacatacaatcattgctatatgataataaagtggcgtattgtaaatgattaacgttattttgtaatagtaattaaattaaattatgtaaaacttaatacacattgatatgacattctaaatgtggtgctcttagcatttctcaaaaatatttgagccctatttttacaacattttattattagatatatctttgttaactacaattacacaattgtagatattcatagccaaaaataagacatgagtgctacaatttagcatcttattgtatgttaaatattattttaactttttgtatatgataaataagtttaaaacagtaattctttttgcaaattttaataaatatttcaaaattatatataaatatatgtattttaaaaaatgaatgaaaatgttgaatttcgaactaatctgtcataaaaaattaaactaattttaattaaatactttattgattttaagacaaatgatatcaaagtagtctatttaatatttataatttaatttatttatgatagttgtatatctatatttatatatatttttttttgggtaatttaattgtgtcattgacagatggtaacgaagctttattttgatttggcatgattttttttgtcagtgcagttattattgaattaattatcattaaattcaaatccccatgtttaagacacaaatcaataattaataaattgaatatatatttcaaaaaaatcaataattatacttagagtaatcaaaattgcacagttaaactgtactatactctaagttattttgaattcaaccttctaaggcttatttattttatttttttctaataaattacttttttttttttgacgtattctaataaattactttgatttttgttaaagtcatgcattgagagcttggaatatattattttgatgtcatttgcggaagcttcaaacaaagattgttctagatttcgttttaaatctattctaaataaattaatatccttaaaaaaatgtattaattgtatattatttctgaaattaatatctaattagttaattaattttgtatttattttattgtgaaatgtcaatttcatccttgtccttaaaaaacgacatcatttcaaaaccgtttcaattcactcgttccgacaaaacccgtaaaccagtggatttgtacaatgccacgtgtaacaacttaagacccgggtcaaataatccgaacgaaaaaataaagaattttattcatttttaaaaattaatattattattatttttaaattccttttgaactatgaaataattaaaaaaaaaaaaaaaatacaaatttcatctagtattttattcattttttgagacaatttattgatatgatctcaaactatgcctataagaaaatttatttatctaaaattaattataatattaaataaatgcaattgaagaagtaaattataattatttttataattcgacaagaatcttttacaaaaataaaacaaaataatgcagagaataaagcctcgtaaatgatataatataagattaaacaatattattttaaaaaaatagtagtgtaccaatgtatttttttttttgtattttccaaaaataatatcatctaaaaatgagtaattattaacataaatatttaaatttaatttttaattaaagataaatacttatgtttaatttttaacggtaataatacttaagggtttaattggtttgtgattcaaaaattgtgttttttaaaaatgtgttttggaaacaataatttaaattttgtaagtgaaaatttgtttttaaat

SEQ ID NO: 22746 - DNA, 1721 bp, Cannabis sativa
ggtccgatagggtcaaatgaaactgtgagtttgcgaggtaggagacgtaggtccgatggggggtccgatatggggtccgattgtgttcgatgaggggggtctgtgtagatgagaatgatgtaaatgagaggtattttagggatatcataagttgtcatatcctacaaatattatttattgtgagtttaggggaaaattttcaaccaaatgtaagcataaaaaatcaaatttcccaacctatattaagagatgatgaatacagccaataattctagtaactctagtgacatgattactacgcagtatttaaaatcagaataaattagaaagaaatattacaaaataacaaaaataattggaatcaatatttgtaaagataaaaaaatagagttgagaaaatgtaaaactcagctcaatgagcatgaggctattgtattgtaatttaagggttacaatttataatttgatcgttgtacaattgacaggtgtaaggtgattacaagaggaatgtagcgcagaaaataatactaacaaaatcctaactgaatttgtacaattcgtacacagggaatattctaatggtattcctcccaaaacttaggacaggttacaatgccacataagcagccaagtcaccaattatttcttgacactaccctcaactggcagggtgattccttcacttgaagtttgtcttttagaaagtgaaatcttgttggtgacaatcctttggtcaggcagttagctatttgatcatgagagggaacatatctaatttctagctgtctttgcattactttgtctcacgtcaagctctatgttcttggttcttgcatgatatactagattgtcagtcatggcatttgcactcatattatcacaccaaataatgggagttgcagacaagtgaattgccatttccttaagaagtccttaaagccaatataattctgcaacaacttgagccaatgctctgtactcagattcagtactagagcggctaccacactttgcttctttgaggaccaagagatgagggagtctcccataaaaacacagtagctagcaatagattttctattatctagatagcatgcccagttggcatcaaaaaatccaattagattcaggtgttcaccaggagaaatgtgcaattgtaacactctactagtttaggcgtgttaacgtgatttcaacttaattgtgcaactcgtttctaatcagcgagtttattaaaaattgtgattatttaaaactttatttaattacttatggataccaaaataataatgtatatataaaatcgagatcccgtttacaaaatatttacaaaagtttcacagtgcataatacaaaagttatcgcctagcgactatacaaaatacgctcagctgtcccaaagaccgtacgctccaggcctaaccgcgacatgtacaatcttcatctgctttctctcacggttgctcagccctagccttgctcttacctacacatgcaagtaataaatgtgagtcaacaaacacagttagaaaagtataatcataaacataaatatatatatatattcagaccgcaaccaggtgcccatacacttaatcacaatctactaactgattcgagaacgttctcgacaaagtatgactaattgtgaattcagcctatactcagtactctagtcgtactgatgtggtagcagttaattcatactatctagaggccta

SEQ ID NO: 22747 - DNA, 5275 bp, Cannabis sativa
  modified_base (3075)..(3106): a, c, t, g, unknown or other
atgaagtccaaataaaaagtctaacagcacacgtaaatacatacatatttttgttctatatgattttttttaaaattttacaggatgtcttaaataagtacaacgtagataatcgtaaaaaaaaattggactaaatttttttctgcacaatttacatattttcaaataatcatattcttttttataatattctctataatcaaattattttcaatacctcatatcaaacgtttacttagtagctactaagtcatcataacccaattttaataattagacaaatacaatatttggtgtgattttataaaaaaaaactccaatataattataataaagattgaaattttaaattaaacatcataaaaaatatatacatttttttttaaaataattatagtattattccaaccaataaaactgttcatctcgagaatttcgaccagccaattcacgtgacaaatgcaagttgatcgataagtctaattacagagttgtcgaccaacctgcatcaaaatggtgtttcttgactgcctcgtgttgccaattcggtggctcacaagcttgcagcttgggctgctgtgaataatgtatcacgggtttgtactgaaggggaagtagcaccctttgttgctactggtttctagtttgttgtttcaataaagttctctgttgcatcaaaaaataaataaaaatggtcgaaattctccatatgaataggaggattctaacatccaacttatccaatacattgaaggttattttttttcatcaattttttttttatttgatttagacactttatttgaataggaaagagtgtaaagaagtttgtagtgggagatggtgtaagtacatacacacaacacatgttgtcacaacgaccaagaacggagagagcgagatcctccgcccacaccaacaactctaaacgttgtcgttttgtaaaaccaatgcattgcttctagacactcttgtagcatttttaaccatcctttctaaacacgctttttaattaaaaaatgactcttatagacacaaaaatattagactactctttaaaaataaaataaatattattttaaatcatctattttataaatattattaattagtatgagacaacatgacccatttttcttaaaatatgtataaatatgaatcaactttgcacgacacccacaaatttatagcactaatacactatagtgagtaaagtaagcactaaaccaaaagcaaacctacaagattgactattataagtctaataatgactacatgatgatactatgtatccttatatgcagggatgggacggacccattcacaataatgtggagctatagtcctcactaacaaaaatattgcattttaaaaaattaaatgtaaattttttaatttaataattataaaacaaaatagtagaaaaacccccataaaattagataaatttaataaaagtgattataatgtagttataaatatttttttatgataaatatgcccctacaaaataaaaattctgggtctgtcgctgtttataagcattactattatttgttattgttattaatattattatatatgagcatagcattagtagtagtagtagtacatgaaatgagaccacccccaccgacgccttctttcgttcttctatccaaaaacaaattcattaaatatttcttggcctaaaagttggtgggtccacttccactacactgttctttattctgaccaaacgtgggtgacctcttatttttggggtaccctataatatattctactctcatctcatctcatctttttcaccaccaaaattattcattattttcttttgtctctttctcatctcaaacattagcctatatcttaagaatttatttccgaaactttcactttactagcaattaaaattttaaatttaaactacttgaggctagctcaagtggccataggaggctgcgtgtgtgttgaaggtcttgggtgagtttcaatgcattgtgtaatatataaacgtttaaattaaaaaaaaaattaaatttaaattttagcgacaatttttttaaaatttgtgttccgttagtagtttaatattattaaactgttaacaaaacacgggatttagaattttgccaataaaatttaagttttgagattaatttctataattaaagtgaaagttttaaaaattttgccaatttaccttatatgttaattacataattaacatgtttaacattgtatatatgttactttcttctgtttgagaagaaaaagaaaaaacattgtatatatgttaattatgtaactcttttgtttcttatctcattttaaagaaacaaaacaaaaatgataattttttttttttgtagtataaacaaaaatgataaacattttattacaatttacttaaaataataatttaactgtgttgagttcgaactcatacactctcaccaatctaatcttagtagtgtaaatgttaaactaaatctacaattccgactaagctgtacttaaattcaaaaaaggccgacaagcttatcggaagaaaaaagacaacctctaataattataaatttaaaaacgaaaaaccctaacaattaattctcttctttttaaaatccttattaaattgcactaattagtgtcccaaaaacagtattaatattctatttctacacacatcaagtatagaagtacagtaccatttggtgtttttaatttatttatttaatgaacacattgtaacatttatatatatatatatagcttattacataagtttattatcaatcattaatttaatgatactaataattaatcgatcattatgttgtgattctatatataatgatgatgatgatgatgaccatctaagagttttgctctgagcatgtaataatatatgagtatataatatcatatttatatatgtatatatgtactatatatatatatagtatctttattttgagccgacaccaactatttaaatatgcttcaataataacatgtggttgctatactatctctctgcctcatttttttaatttatttattattattattatnnnnnnnnnnnnnnnnnnnnnnnnnnnnnnnnttattattattattactactttaatttaatgagacactcatcacttattgatacaaattatataaagttaattatgtcaaatttagtgttgactgaatgcttaccgtatatctatgtgttttgcagccaatgttagacactagctaggcattccttataatatggtaataatattaaattataaatatctactttcgaaaaaagaaaaaaaaaaacttaattatgtacatttagtcacaataaatattaaagagcactcttatagggtgtaatattattattagtgtaatttaatatctagtctcacttgtttaactttaataaatattagactagctaattagaatatttgtactctaaactttaatttgtactaaatcatggtactgaatttttctaactattaaaaatcttttctgatctattaagattgttagttttaaatttttttgtctaattttatttaattttactgattcagtaattgtttatgtactaaatcatgctccccggattttaatatctatttaattatgtttctcgaactttgacatatactaaattatatctcctgaatttttatctatattagaatttctttactaaattgaataaaagttcttaatttaaacaatctcaacagctaaagagagatttttaaaaggaaatttttaatggtcttaaaaatttaagatgtatgatttgatatatgttaaagtttaaagggcagaaatttaattagtatagtaatagcaattctctttaatcatagctcacaattttctatgtttggtaaaaatgtcttaattagttgtaagtaggagtaaatcaaatattctagcatgtttttttggtaagtaacaccctattattttggtaaattatatctcctgaataatgcattctctaaaaaaaaaaaaagtttcattattattattttgaagagtgtttaattacaacttctattataattttttagtcaatttttacgctcgaaattatatgtgccacaatctttttaattttttttttttataacgatatttattatagttacaatatcatatcaatcttgtaaatttttgaaaaattttaaataatttacagtaccaaaaatagagttccgatgatccagcctaatcatgcgtatttaaaaccctccaaaattattttcgagataaaaagttaatggtagcactaatttgttatttttgttatgagaatataattaaccaaaaaaagtatatatattataattaagcccgacttttaaagagtgttttattaatagcgatattaatgctatagttgcaaacgcactataacgtagagtacatatactaatttttcatataattaattcaaataaatatctttccttttcaataaaaaaaaataaagcaaatatcccattcaagaaaaaaaaagatggaaaatattaattttatttagacaatgatatgataacaggaattgtttgattaattaatgtccaatctagctttatgaaatgggacatgcatgcatagcattaaatcatacttatatgttgttaataaacaaattgacaaaaaaaaatatgataaatcaatatcactaataaataatgagaaatgcaatggtgcctaattcatgttttattttaatatagggttttgcttgttttatttttataaaaggtaaatagtagtataagtacttaaaattttaaaattgtaagcgtcataagtatccaatgtttgttaaattataattttctttcagttttgtcagtacactattttgaatttattaaaagaatactacatgtttttgtctagacctaataatctaaaatttatatgcgttatgtttaagacaataatagagtctgtactgacgaaattagatgaaaattatagttttataaatattaagtacttatgctgctaatattaggtttatattatttacaaacttaaatcattagatacttatgtcgatatttagtttttcataaatattataaaaaatcattaatttattaattatagaacaacactttatcgtggtgtgttagacaccctcatacaggcctggccctgggtataggcaggctaggtctgtgcagggcccacccagccccgggccccaatttttttttcctctttttaaattattcattttttt

SEQ ID NO: 22748 - DNA, 2124 bp, Cannabis sativa
aaaattgtggaaacaataacaaacaaataccagccggcagatcagtaataaatatacgtttaaacaatttgtatatatctatattgagttccatttttttttttcctttttttgtaaagatattgaattccattttattgaaattcaatttagggctttctcaagtgattaaggttaattagctcaaagagatattaatcaatcaaatatacataatataaaataaaaaaaaagtactctctgtctaattgatattgtgtacatatccatgtttattttattatttatttttttttatcatgatcagccaagtccttttgatgcagcaaaattctgaaaaaaaaaaaaaaaaaaagatttttcatcttataaaaattgaaattttattaagaaaaaatggacggaaaatatactgccaaatttatgtaggtgaaaataattatctacaaataatttcatcaaatacttaaatatcctgcacttgaactatccacacatattttatccatatgtgtaggtaaatgtgaaaagttcttacagatgttatatgtgggtaactatgtgtggatgatatccccaatttcttgccttacaaggtcgaacaacaattatttaattatttctaatatatatttaaagcacaacttttttaaaaaaataaaaaagcacaaaagttttatttatttatttatttatttattttttgcagaaaaagcacaaaaattaatttgatttgtgccaattgtataacactaagggaaaaaccatggacgtcctcttcctagttagtctctacattaataattatgaatttaattttgtaaaaaaaaagttacaataataatgatttttagactttagaggaacaattaatttgatttttattacgacaaagtaactatagtcacatggacatggggttttagaggagtgctaataataattcttttagataatttttacgtttgaaatcacatgtcagaatatttatttttaggtatccgttatacttacaatattattcttgtaaattttaaacaaatttcaatctactatgcgtgttcaaaaagttttaaacttatttttagtactgtaaaattaaaataaaattaaaaatttacaagaataatattgtaatataataataaacatcgccataaaaaaaatattccaatatacattttcgaacatgtctaaaaaattataataaaagattgatagtaacactattcaaaattataatatataatattgggatatgattttgtcccgtgatgtactttcacagaatgtattccgtggtacattaaatgggtctcagggtacattaatacaatactaaaaaatgatataaacagttcgacatttttgtataatataatagaatacttttttcaggtgaaaataatcaatttgagagactgtgtatgaaagtggagaaaaggcatgcggctatatgtattatcagaatatatttatttgttaaaggtgattgttttcatatgtgaaatccatgcacgtgaatacattccagccaaaaataaaagtcaacagcaaagaaaaatgtgtacagaaacaaaataaataaataaataaaacataagtagacaaataaaaatattgagatcgataaggaaatacataaagaaataaatatgttttatttcttaatatttgcatgcgcatgcagatagaaatagccaaaaaccaagccatttttttcacccttatatattgtattttatttttattttaatgaatttattttgtagctataaaacaagactttcaaataaatataataataaataatgtctaggtaagattatttgagaatttttatacattaaagtgctaaaagatatatattttttaagtattgtacgtgtgtatagagtgtgaataattgacattatgtatacgtatcatttgtttatatatatgaaaatgtaataaaatcttcgaaccgatcattgacttaattaaatcaaatttgatttgaactaagtaatgatctgtaatctacataatttaatagttgagtgtacgtgcaaccctaattttttaatatgttaacaaaatttcataaaagttatgtatgagagaaaactaaatatatccttt

SEQ ID NO: 22749 - DNA, 4092 bp, Cannabis sativa
gccatggacgtcgtctatgctttgaaaagacaaggccgtactctatacggattcggaggctgatgaatttaatctttgtgtaatctttctagggttgatgtgttttgttattttcaatgtgaatgaagcttttgggaaatgctctaattacaatcgatcattatattttatcttgtattattatagtttagtttgttagccttttgggtctgattttatcttagaagtgaagttaaaagaattaagaccaaattggtttagttgtattcttctaattattatatgtaatactaatgtatcatatgtttaagcctcagaaaattgagataaattgtttgcattaggctatatctttatgacattattaatagagcttagtttatcttcatgttctgagttagctttcttcactccaagtagttaaatcattcagttgtctccaaatgctgagcattaacttctgcatattctaatttcacatattgtaagagattgaattttcttccaattcagctccattcgctttcttctttaatatatagataagaccaaatacaaagaaaaagaagttatagtcaagccacattacttggggcatttgtcataaacaatgcaagctttagcttagtttaaacaagtattaatctaccccaattagggtctttaatgaagtaacgaagataattaatagccaaaatcatggaggagattgataaaaaaaagataaagagatcagctcccaagagctacttctcaattacaatacaattcttatcatggttgctttcattctttctacccttgattataatgactttgtcaacttatcagtacaaaaactcaactcagaataattgagagaaaagtctataagtttggagattgtcttgcttatcttcccaactcaagcgaaatggtgtggaacacactttgagctttgacttaaagtaggcaaagtaatcaagcgataacattttagtatgaatatcagctcacttggactatagattagatggaacatagcaaacgtcaagctcatgaagatctattttaatgtgcttggcacgagcatgaaaggcacgattggcagctagggaagccgcgccttgattatcgacccaacatgaagttcacggagaatggaggtaagccatttgatctttgctgctgtatccactcgaaactcacttttgatgttagaccaagcaatttcctgctgttttttgttagaccaaaagacagatattacgaccaaagaagatagcagcataaaagtatagaagccaccttgagatactgcagaagtcatttacaagtatcccaatgaacaaatgttgaattggaacatgactgaattgactaattttgttgataataaacataacatcaggccagagtcaatgtaagatactgtagagtgcctaaaatttccgagatagagtgtggcaaggaaaaggctcactatattgtaaagaaaagatgtgagaggaactggttggactaggtcttgcttatcaatgaccatataccgttcttctaaccctatgaagaagttaaagactttgctatatgaagtccttactttatggggttcatttttttttccctttcaaggaatcataatttccatttagttatgccaaaaaaaaaaaaatggaagtattatacagaattagacaacaaaaaaatgattttattttgaaaaaaaaaattgctggaacaaaagaatgattctatcaaagttaatctctaatatatacaattactctatggtaggagaaagaaaacaaagagcattaaaaaaatgaagtgctacatacattgataaactattcaggtgagtcagagagattcgttgcagccctttcgtattatgatcaggaacaactccagataaagattgtaaattataactcatgccattgacttggggcaaattgtttccactctccattgcttctgaacaggaaacgttggaagcaaacttagacaatgacgatacttttcatcctttgatagtacatctatcacaatggcgaatgtagaagcatcaggcggcacatttttctctgccattttatggagaagttcaaccactttcgaaagctcattgttttttataaaagcattcatcagtgtgttatatgtgacaaaatttggggcacaacctttcctttccatctcaagaaacatatcatttgcttttacgaaatctctattttcgcaaagcgcatggatcaagattgaatatgtcacaacattaggcaccagtcctctttggacaaatccttgatatagctcccaagcaatctcgaatttttctgatttacacaatccatcaatgagagtattgaaaatttgaacattcagctcaaactcaccattttttagaccctgaaaaatttccaatgcctctgaaacatgcttgttcttgcacagtccacccaaaaacacagcatatgtactcgcatttggtacaagatgatgaacttgcatctcactaaacaatttgcgggcatcatcaatgttaccggtattgaagaaaccgtgtattaaggtattgtatgttactacattgggcctaactccccgcggagtcatttccctgaagagactcaaagcatcatcagtctttgatttcttgcaaagtccacgaatcaacatgttgtagctaaatgaatcaggtttaaaccctttatcttgaaaggaaagaaatagcttcttggcttgactaagcctaccagtttgacataagccatttaacaaagtgttgtaagtgatttcatcaggatgttgacctttctcaatcatcatttctagcacatcataagcttctttcatctttcccgtcttggaaagcacatcaatccacacattaaaagtcactacattaggctgcacatcttgatttgtcatctcactgaacaaagctttggcctcttcccatttatctgcgtagcacaaaccatgcatcaaagagctataaacaacaacatcaggaagaacccccttctctttcatttccaagaacagttgttgtgctttttctatcaaaccttccttacacagcccatcaatgatagccccataccaaactagatttggtgtgcacttaaaaccatctccatgatctttcccactagccatttgttcatgtaactcgagtgcaatagatgcatttccagtcctacacaacccattaatcagagtaccaaaggtgacagcattgggcttacaacccaacttgaaaatcatcttaaataacctaattgcctcaaaaatcttattctccaaacacagccctttaactaaagatgtataagtcacaatatttggattataacccttccttatcatgcttcccagtgccacaaaaccatcagaaactcggtttaaattacagtagcaattaagcaaaacattgatcattatgaaactgggcaacaacccatttgagttaatccaattataaagcttaaaaacatcagagtagtgtttgttcttagctaaaacaacaatcaaaggattaaatgaagacactggaggagtggggttcatacgaatcatctcatcaaagcaggaacgcaattcagagagagaaacattacctgagttgcggttgagtaacttttcaagtaaggtcggcatcggagccttgggtactgaacttggcgaagacttaatgggttttgttgtattaatttgaggggttttgggttgattgggtgttttccgtggcataaagaaggatgagagtttatgttttgaagagacagataaagattgttcctttgcagcagcagcagcagcagaagagtaagagggcattgatttgaacaccattggagaaggctgaacagagacgaagaagaacaaagaagagagatattttgtgtgtttggtagttataatatagtttttattttgaacaaatatataatgtaaagaaactttatttaaggtgtcaaaatgtaattgaaataatcagttgcacccgttttattttgactatttttgaactttatttttgaaatttttacactaaaaatacaaaatacatattttattactaaaatactaccacacggttaa

SEQ ID NO: 22750 - DNA, 1986 bp, Cannabis sativa
aactttgttatatttacattactttctaatttatcaacaaaatgatataataaactatttcttgatattaaatatacttctttccttgaatggtcagaaaggtggaatttagaaaacaaaatcatctaaaacttgtatacaactttagtgaatcattctcattctatctaaacaataaattgtacatctaaaagtgatctttgttgttctattttattttgttaatcgtagttttaattctgtagcggattgtgtcgccaaaaatgctagagttactagtgatatggctgttttgtatcaaggggagggaaatcgccctgtctgtgattcccatcgactttcttgatcaatgaacatgtagttctttcaaaaaaaagaaaacaaaatcatctaaaacttgtatacaactttagtgaatcattctcattctatctaaacgataaattgtcaaatttcatcaaaatcttctctacaaaattcagaagaattcgaaaatgttgcctagaatgtcacaacaattacaaaagaaaaggaattggcaaatcagctatctcttggtacttagcctgatctttgctatcagcaatttcctttaaagtagtccatgattttttccttcgtttacttgacacggtaatcgatttttcaccatttgtagggttagaactactttcagattcagattgtttcttattcactgatctgttcctctttctcttctttgcttccaacagagtggtcacagttttcaccacaggtgttgcaggactgtgactaataggaaacttttcagatgttgctggtaatggcagtaaatctggctcacccgaattctcaaccccgtctttaccttcaccggcctcctttaagctggaagggttaagagaatttgattttggggtttttgatttttcagtggttttgaccttaggtgggcaaatctgttttagatgtccttttggagtacctcccatgaaattcctatatgaacagaagtggcaagtatgaaccacaatattcttagtaaaagtaaagtggttcttacttcttcgccgtgcctttgcattatttttctcaattctaattgtgcaattgaagccaggctgaagaattgtttcacatctgcaaaacaaatagttgtttagctcatctagaatctgaaaacattctcaaactaaaccaaataatcacgagtgaattcctggacaagaatgaaaaagaaaaagttaaggagttcatgtggagtggacaggttctctaagaaatatcttcatctaaccctatttagattttaatggttaatgttataatgcagttaacaatctcaagtcatatcatatcttcacaatcacaataagtgaagaactcacaaatatcatttctaagatcaattgcagtaaatattcacctttcagttaatttatcaatgattaaatgcagactaaactatcatttaaataaatgaaaaactatggtgataaatagttaacaagggacacaatgtattaagctttaaaaccttcataggtttaaactcctaaacccaaaatcaaattaaataaaagtcaaactcgaaactaacctccggcaagaaaacagagaagggttaggagaaacacccaaagactccccaacagaagccaatcttctgccaaagaacgcagccaaggaaggcacagaaacctccccaccagtcaaaaccgctagcttctccaagtgctcaaccttcaataaatgcttgacgttggttgaagaggaccctcctttcttatggtggtgttttttccctgttgtttcttctctcagagttatgacattgttagacccaaatgacgaatttgctacccttctggcccctcctctcttgcccatactaccctgtaaacgggggtttctagtcttggaggagtttcgacgaacagttggggattgcagtgtttaggattctacaattgattgacatgggaccacaatcacatatgatat

SEQ ID NO: 22751 - DNA, 3662 bp, Cannabis sativa
ttaatcttggtgtagataactaactatacaaaggacatagaggagatggattccatgagcaaaacagaatacttgctcttaattagaaggtaattagcaatttcattaataattaattattgaattaacagaatataatatatattttgattactatgtcatttcaagctattttaattatatatagctataattagatctatttttttaaaatgctttaactagattaattactatagatcaatttaaataattataaaattacttaatataaattttttgattaattattgtaagctagcttaaacattgaattaacattaataaatacaaattatttaatttcaggagaagcgatggctttgccaagggcatatcttgctaccgtggagtttcaaggtgtatatataatataaaatatttattatatataattctattaattaatttcaatatatatatattggattaattaattacttctctgtttgtttatactcagattgagcaggaacacatgttgtaggaaatggcaatccagaatggggaaaggaaagggagttaggggaatttatctgggaacatttggtaattaattaattaattattttcactatttttccttgattacaaaaattaaatttacctaattaaatcttattattaattaattttatcgattaattatgttttaactttttgggttattagtcacataattaggctagctatatattagctatatttaagattgggcttattttcaattattattatttaagaaactataattaattaagtgttgttttttgttccattgactaattaattaaattatgaattaattatgatcagaaactgaagaggaagcagcgaaagcttatgatgttgcagtgataaggttgaaagggttgaccgcagctacaaactttgaccataataactatgatctcacaagaatttttcagagcaaatttcttccaattggcaaaggagcttccaagaagttgaggatgactaatgttgatgatcttcttcgtcgtttcaaagctaataaaaaatcatcacataaaagaaaatatacaaagaaaaacaaaaacaacaccaaaaacaagaaacagaaactcaacaactcatcctcatcatcatcattaacttcttctaccaaaacacaaaactcttcttcttcttcctcttcttctgttccaaattattccaaccaaaaccctaccaccttctcccttgttaatcatcagctcatagggttccaatctgatcatcatcatcatgagttctttgatgttaataaactatttgatgattttcatgagccaaattacccagtagctacctccacaaaccctatccctagcttgcttgatcagttcttggccagtattgatggagagtataataataataataataataataataataacatcatgaataacttggagtcatcaaaccctaggcctactgctactactacagatcaagctggaaaagaggtggccatggatcatgatcagatcatgatgaatagtacttattcatcagacgatgatttcattgatcttgataacttctttcttgatattagtaatgatcaagatttcctcagcttcctccaaaaccctatctagctagctagggtttaacagagatcatcagtttgggagatagtgacttgatcatcatcgttagggtttcgtggcatatgaaataaaacattatatatatagttaattttccctttgttaagtactgaaataaaactactaattatgaacattttattaattgggataattttaattaatgttgatggtttgtaatatatatatgtcggactaaattgaagagctttcaggcttcttcatatatatattatatatgttagttaaatgatgaatgatgatgatcacttttttaatttctatatttatatataaatatgatcaatgaaactatataactgtttttaacaaatcttaaacattgtttcagaacataatacttatctcgtttggtgtttcaaaaagaataataaatgtatttttatcggtttgtaagtaaatattgaatgtatcatcagaatttgccacttaaaaaaaaatcagatatcataaattttcagctataaaaacttcacaactgttaactaatgtatgtacgtatttgccgaaagtgattatgtctttcacaaaaaatacaaaatagaataattgtactatactaaagtatatttcgggtttgattattaatatggtaaaatatctaattcatgatgatatacttcctttttttcctcctcaaatttgacaacatatctcagacaattaaattatattaaataatgctgtataaggaagaaaatagtaaatgcacagagatattattactacagccataatccatagtatttatgatgtaatccattggaaattaaaccttttcagattttttttttctattataacccaaaaaaaaaaaaaaagaaaaaaagaagaaatgctttaaacgtgtgtctccctcctggaagaatatgaaaaaagatgctctttaattttcgttggacggccacatatacatatacatatacatatatgtatatgtgtatatatatatatcatatcacaagagtagtgttgcagtttcttagctttatttttcacttctaacttttttgtgctttaaaaagaagggccaaaattgagcaacaagtgcaaaaccttattgctccttccaggtaagaatcaaaatagtgagaatttcatgtctccaaaatcttcatttctactttcttaatttcttgtgggttttcttttttccctaagaataattcaattcaattcagctagaagagggccttagattctaatgaagctctactatatacttaaaagaaaaaaaaaaaaaaaaaaccttttttcttcacacaatttaacttgagtattttttttttcacaatctaaaatttacatggatttttttttctatgatattttaggtattatttttgtttaaaaataatgaccctatatattgctcttaattatgtgtaaaaaccagttctgccaatattgtatatggaagaactaagaagtgcaagcatgtgtagctttttcttgttcattcttttttccctttaaatttgtatggtgtaggaaattaagaggacttaaattttttaattattatgccctaattcttattatctaatggtggtctggtcttgtgtaggaaaactgttgtaattgatgagttgtgagccctagctatataaataatggaaattttcaagtcaagtagctcaaaaagcatcaacagcagcaataataataataataataagcaacagctccatccagtcaaccaagcatttgctgattttgaaaatgatcacacaccaaattttaagctcaaatcctcaaaatatcgcggtgtccaaaagtcagtatatatacttatataaatatatatatatatgtatcaataagtttaatttcgatgattttgataaaaacatgttctttcttttcatcgatctttctctttgtgggaattgtgtttaaatctacttaactattttgaaatgatagttcatattgtcttagtttgattttctttacatattagaagagagttttttttttttt

SEQ ID NO: 22752 - DNA, 7340 bp, Cannabis sativa
  modified_base (3209)..(3215): a, c, t, g, unknown or other
aaagagaaaatgcattgacatttcatcaaaacccaaataaaattccttattttctcaatggtttcaatctaaaggagctattatctcctcagaataagaggtgcccccgaggcagtaaaaggtgagtgagtaattgtatcaaacagtttaagagcatgattatgggaaacggtagttcagttacctgactcaggctcagctagtcagctctggaaatgaagctcatggtgatggctacaaaaggatcgtcgactgggatgatgccggagtgagatgaaagcgtggttttctctgagatgtcagatcacgtgttattttttttagaagttattcttatgactcaaatcagacttgatttttttataattaagtttatttattgttgtaaataatatttaagttatattaagagaatgatcacgtgttattttttgtatgggatggattgtaagacttagatacctataagaattatacaaaatcttttaattttatatttgaacttttttatttataaaaatttctttagtaaaaataataaatcgtatttttaattgtttcatagttgtcataaggttatttttagttattttataatttatttatgttttttttttgctaaataaatatttttgaaaataaaaattttaagtcgtaaaattataaataaaatatatttttaaaaattcttcttagagttatttaatttttttaataaaatatacattaatggtgaaataattttttaaatatacgagtttcacttattttaatttaataaatattataaaaaactactaattaattataaaataacatgtcatacaggtgctatatactttagtgtctcatagcaatgctttaacatatctatgacatgacatcttataattagttagcagttctataatttttattaaatttaaataagtaaaacttgatattgaattgcactaataacgatattaaaatctaagtacagattcgtcaatttaagtctaatcaattaccgttttttttaagaaataacaactttattaattaaagaacttcaaccattataatagataaaaaatcaatacgaatagtacgatatgaataaaaaaatacgagcaacacaatatgcaatcttatttacagaacgtttaacaaaataaatcttaacaaactttaaaatttctaacataactcaacaatcatgttccaaatgactaaaaggagaaggcataaaaatagtactatgcacaacttgaaccgcaactaaatagacaaattcaagttgaatatcttgccattctttccgtttagtccaatttaaagtctccttaataccaagcataccaacgaaagaaacttcctcttgaccatgaaaacacaaaaaatgcttccaataattgactagaactatcacgagccacatcaccataatattaccatatttctcaactgaagaaaaaattactccatcaatattaatcataatcgtattcaactttggtttagaccaatgctcaagtctataaaaaaaattaataaataattaaaatgctgatttttcaaattggcttgtaggaaagaaatctgaaaaatgttaaatgtgatataataatctacattttaggagtggttgttaattgtcgttttgtcgcttttgctgtcgttttaatggtgaagctggtcaaatcctctgctgccccactgcatcttcataatttaccactttggactttttcacagccggagaaatcaaagtccatacttttattattattattttcaatcacacgaaaattattaaaaataaacataaaataaatgaattatttagtcatatagtgagtaatgtgtttacaaaatattcactaaaacattataccttgtaatataatatttttgtgtatattttgtatgcatatcattacttactctttatatatataattacttaccatataatgtggctgcaaaccactcattcacaattttcacccatgtgcttgcccaccctatgtctatgctccacctggttgtatgcataaccaaacatgtctctaaattagaataaaaaaattataaaacatttaacaaaattcttaagtataggcataatttttgctctattatatctttaatttttcttttcagatgatgtatattagagttataacaaatattttatttgtttttgaattttttttgaataatttataattttaaaaataaagtccaaaataattaattacatgtgtataattaagatttttatttttgaactttaacatgtaggaaattatgtttcttgaacttttaaaaattctccccaaactactgagattgttggatagaaaaacttatgtccaatcctattcagtattttactaacgtggtaattgttcttataccaaatcatgtctctcgaactttgaaatctacaaaatcgtgcccaccaaaatttgatgtgtaccaaattttttctcataaactttcatccatatcagacttccgttggtaaaattagacaagaatctttaaatgaaacaatttcaatagttcaaaaaaaaatttaatgacctgaaaagctcaaaagttataattagtaaaattagacaaaagtaattgcaacaatttcaatagttcgggagaaattattaacgacctgaaaagttcaaaatgtataatttagtacttatcaaaactcgagtatcaaaaatcctaattagtacacgcgtacaaatgaatatttaaatcatattttcaactaagtaaactattcaaaaatgaataaaataatgtaattataatgtatactcacatataaaaataatttgaatataatttctttaggttgaagcataaatgatgccctactctattttttggtttactatatatatacataaatattaattaaaagatattagagtatggattgctttaccttctggctgaattgttgagattccaactgatgaataacattgcaaaatacatggctcctaaggagaatactaggtggaaaaactcatacttgtaaggaatctcatcttcttctttagcttcatcttttcgaaactatataatcataaacaattgttagcttttctatattatattatgagaaatgttaaagagcaccagtgatgcttagtacctttttatgtgtcaatatcgctattggtccaactaagtatcgggtttcatataatttnnnnnnntaatttttaaagagtatcgctagctaatcgcaacgcgacatgtcgcaaaggtgctaggcaccagtagtatctaatagcaatgctctaatattataatggtttgtcactatttttcatatagtaattaattagtcttcaaaatgtaatgataaatttatttgatttactactaagagaagttttgtctgacctggaatgactctgaatcaattcctgtggaaaaagttgccatgacaatggcacatattgcaatcaagaagctctgtagacacaaattaatagagatagtgtcatatttggtataattgtgttgatgaaaataatgtaaaaaaaaaacccaattagtatttaaaaggaaagacaacaaagtagaagaagagggagaaatagctcttactactatggtagtccaatcaccattttcattggctgctttaagtttgtaacacttctcattagaaggctcactgaaaaatcatctatccaaaattagggtttgaactttgtatagtgtggagtaatggttaatagaaaaataagataaatattattttgggcttcatgttttgcaaaaataataaattaaattatttattttgctaaatgataaaatggattttgtattttttaaaataatacaattaagactttgagctcaattttcgacaatttttttttaatataaccgacttgaagataatttctaacacgaacagatacaaaaatttaactaattttgtcataacacctctaagtcagattattattaagttttattttgataaaatatcagttcagaatcttatttgtactattttaaaaaaataataaatctattttattatttaacaaaataaagaatccaatatgcaattcttacaaaatacttatttaccttaaatgaataataataaaaatatgagtaatggagcaaatcggtttgaattggtaagtgtgtggtttaagatgagaaaattcaattggtaatgagattaattctaataaaatcaaataatattcatttgctatgtgcattggaatgattttttttcttttattcttaaaaaattcttatttaattaaatagtagaaatgtcatttcattttcactcgaatgatcttcaaaagctaaaaaaagtatgggctcctaagaaaaatgattcaaaaaatgggatcaaattaaaaggttatcaccttcttagagcagaccaacacaagtaaataacatatgaagccatgattcctgatgataaaagacccctattcacctgtattactataattattaatcactcaaataatatcacatgatcatgtaaatttaattattaatataaatacctttgaatgaagagatatagccatcatcacaattagaagaattccagtccaagagatgaaaaatatgttgagactacatgagctttttgtgccataagatgcaaacatgtacacaagcccacataccgaagcaatgtaaaatagcgtcgacataaacaacccgagagagcagctgcaacatcccgaaagcacgaatttaaaaactacttctaggagtgtttgggtaaaaaataaaaagacgtcttttttttttttatgataagtaaaaattttgccaaacgaagcttgatattttttttttaaaaaaaaaaacctttgtttttgttcctcgtcgcgcatccaatacttgttccaccaattaatgaattgaattacacttataagttgaagaagaagaaaaatcctagcaatgaaaacttgtgttaatttttaacataatttgagattcatagcttatgaaataattttttttttcatgaagaaaatgacaacttttagctattttggccccatgaagaaaaaatcaagaaaattaggtttgaagatctgaaggcgaattaccctgcaccgacacgagcaagttctcctgcgacaaacatcgaaaaataagttcccttaaggaaaatgtagctgtaaaaaaattaaaataagaaaaaacttaccatagagttgaatgaaatcagaaggaaaaaaaattggtaccaccaatgacacaatcaacatgaaaaactttgatgtccaccatcccgaatgccatgcattgcgattttcgaatagttttcgtgttctaaatgttgtgagaaacatcacaaaaaaatatatctgatgatttcattcatgtcaaggatgctaaatttcataacataacatttttggcatttgggactaaaactatgaagagaaaagagtaaagagtaaagagaaagatacaaagcacccgaaactcactcgaagaacacctagggtatgaacacaatctcttccattacttccacaagattttagatctgtgaaaatgaaaagaaaaatgaaacaaaactagtcaagaaaagtaataaaatacacttaaaagaaaatgttgtttaataattagttactagtaactaattagtagaatgtagtagttagttacaatggagctgaggttgaatcatttgtccataatctctaacaatccaagcacaaagatttggtataagaaagatgatgccatatgcataacgagctcgcattgatttcttcttttcgagcacaaaatccatgctcttctgcgctgaggaggttgttgctgctgctgatgctgatgctactatgacatgtattcttgtgtcttcaacttcatcagatcctctcattttggcagtttcattcactaaaacagaacacttttttcacttgattctttctaacaaaaagtgatgaagaacacaagtcaagtaacaggttacttgtaacaagttactttttcacttgcttatgtatgaatgtgatataatgaaagaagtgaagaacacacctttagcaagaatgaagtgaagaaagaagcttctattgttgtcacttgtttggtaagaattaagagctaaaaagggtaccaattatgaagacagagaaaagaaaaggttcacttgaaagctgtcaaaaatttaatcaatattaaatctctcttctagactatattttagctaataataaacccaaaaaccatttgttattattgtcttctttcatgatgtcacttatgcctctttacaagtttttcttcttcttcttctttttcttttactatgcatgaaacatgcattgtgtaatatttatatttattagtacttaacatgcaagaaatacaagaaaccggctttcaagctatcactacaagacttgaaaataaaattaatatttctctttatttaaagtataataataataataataataataataataataatagtgtttttttttctaaaataataataatagtagtagtaaattaatgatattgatcattatttgaaaaaaaaataatagtaaattgagtaagtaacactctaatagttgcttacttgttggagagtgggtagtagaggtagagaagacaaagaaggcccagacaagagttcggcgttgtgggccccggcccattctaacactcctgcccctttctttattatttgatattttgaccgttaagacttgatcaatgtagtgtttttcattaaataagtcttaattttactactaatttccaattagtaaaagtttattaaatgggataaatacaatgggatggggaatgagggttcaaaatcaaatagtgttttataagcaccccataaaaagttgtaattataagaggttgaagaaaaaatttgaactaaatacgacaataaataatacaaataaataaataaaatagatatgagtacgacacaagtaaggaagcacacagagcaaagaattaggagagagtgctctccggtttttattcccgttaaaaattttaattattattcccatttattttttatcgggggcggggtgaaaaattctctaataggacggggatggagcaggaatccctaatataaaaataaagtttatattaaaattttaaaaatataaaaaaatattaaactacataaaaattaaaatattaaactttttttttattcaatatactatttattattcaaaacacaacttaaaaattagtaaaaatgatactaatatactaaaaaatataaacataaattataaaatataaaatattattaaaagata

SEQ ID NO: 22753 - DNA, 6867 bp, Cannabis sativa
tttaaaaaaaaattatttttattatttggtcttagtattttttttatgactacttttttttattattattgttaataatacattggaatatggagcattggaaaacttacaatttcttatttcacaaggaaaagaaaaattgtctgacctttacactaactttaaaagccactaataagattaaaaaataaatgaattgaaaggcactaatcaaaccaatctcaactcagtatctaaaacaaagcacacaacaatctcatgactaaattatcatatttattaaaaataactaaataatgtaagaaagaaccgaccccgaattctcatccgtacgatataagctcggaaatggatcaacttgataatcaaccgtcgatcattaaattgagggcaacggcaacgttgtgttgtccaagcttgtccacgtcttccgtaccagctgtacaccaatatctctctttctattggtttaattaatgttaagcaaaataattagacactaattaattaaaatttgttagggccaaagtcggtgattaatatttacaataactttaaattactgaaacaaccctaaaagcggaagcgcgttgcttagttacttttgactctttctaactaacaaacataaagagtggttgacttcgttctagtcgcaaggttattttcggtaatttaaaatgccttatctgaatgaggaattataattgtctaaattggcctgggtagcagcgaattgagattaaaaaagtgaaatagatatttagaagatcaaaaatatctggctaagtcgtccacgttggcacaatcactagacccaggtggaatgagatattgcactttttcacaaagcgtaataagaaaattaatactaatttttcttcctcattttcttttctcccaaacacacactcctcaatcccccgaatctcacgaaaatatcttcgaaactctgaaactcgttaattgtcttcttcttagtctgaccttctccttgtttttctctgattcgatctaattccgaactagactctcaaaccctaaactaaacctcaagacgtttctttatataataattaattggttcaaaagaaaaattgaaacggtgacgaactgaagaagtaattttggattttgatatgggtgaggaggtgaggatgggtgaatatgagggcggtatagacgatggtggtgctgatgaagagcgagttctggaatgggaagctgggttaccgagcgttgacgatctaacgcctttgtcgcagccgttgatccctccggagctggcgtcagcgtttagtatttcgccggtgcagtgtcggtcgctggtcgatgtcaatcgcgcgtcgagggatacgttatcgtcgcttcgtggtatgcaatcgcaggctttctcgtcgaataatttcaagtcatttggtgacagccctgattctatggtagttgagaacgacgagaatgagaacgagaacgagaacgatgatgatgataatcgagatggttctggatccgattcaaggaaatctaggaaaattgactctgtcgaggaggctgatttagctctcccgactgataattcgaccgacgacccttcagctcggaccctcaagaggcctcgccttgtatggactcctcagctccataagcggttcgtcgatgtcgtggcacatctgggtatcaagaacgcggttcctaagaccattatgcagttgatgaacgtggagggcttgacccgtgagaacgtggctagccatttgcagaagtaccggctctacttaaagaggatgcagggtttatcgaacgatgatccttcgtcttcggaccagctcttttcttccacaccggtgccgcagagctttaacgaatccggtgggagcggtcactcgcatggaaacggacacttgcagataccgatgccgattccataccagtcgatgatgtctatgccggttttaggaatgagtcatggtggccatggacaaatgggcattcccgttggggctcccaatggtgccgtgggttaccatgggttcgagtcgcatcatccgtacagcatgttgcagcagcgagattggtctggaaataagtacggttcagtggtaacttacccacatgttgctccaagtgagaaatagaactcttgatatattattgacaccataacctgaggtgagttggtttcctcgtagccaaactctgttgtagatgtcatcatagttgtctgatattgccttttgtgtactcgattatgtatttaaaatacataatgaatgagtttgattttgagaaatatttttttattcgtttattatgttatctaagattatgcttcatgaattgaaccaatcagtatgattacttaaactgttggtatctggcttccaaagatatagctatagggatgcagcgtttatgtaaattggttttatcccacagcgttgctgtttggtagctattgaactttgagtctcctgtcttgttcatactgtatctgtatctatatttgtatttttaccctctataattttaccctttctaggacaaattttcactttcctgtcttgttctattcgtatttttaccctttttaggataatttttttttacgattgcatgtatgtgcagtggtatttagatgagtgcgtattgatagcagtaaaagaaatacctttttatagtctgcccattttgaactaggtcaatatcattactttttggggctcccacacctgctgttcgcctttaattggcgaaactttctgctgaaggtggcaaaagaatttcaagatgatttattatatgtttttgtgtagattcagaagttgagcaagttggttgaagttaactcttggtgctcaactagtaaggttgctagattgctaatcttgaacttgacaggcatgtgaagggaagggttgttaggtactacatgaagacactagatgcatacttgatatgatatgggatcacaaaacgtgcttaaatacatacatatcaaatatattatataaattctttatagtgcaggagatacacggagttgtacttctagtcctcatgttgacagctcgtcattaggtctacattaaatctgtttttcaatttatatgtgccattcgctttttctattaatcaatgtatgaaacttctttctcagcagcaaagcaaaagttcagctgttctacctggctgagttgaatgctttatcaacttttagcctcttgtcatgtacgaaattccttccaattctatatatgtgcaaattagctgattataatatcaattgcttctctaaggttgacctgttaggagtttctgctttcttttgatggtactctgaattgcaagtttgtataattcctagtacatttgttgaagaccttataacagaatagtttaaaaatcaacatatcataatatgttcactcctaatcttctcataaactaaaatgaacattattaaatgcactttcagaccacatttgtaaaattttcagctctcgaggaacttcctaaaagaagcttttgcattgttttgatttagctggtccctgatgtggttgttggaaaacttataatatctttgaccattcacagtgtgtataatcaaggaacttttttcaaaatttttagctttctcttgttcaaatgtaaaatgtatattatgtgtgtactggagggtgcatttgtgatgtagatgcattgatctatttcgttgaactaaattgactggtgtcgctgttctttttctgcctgaagtatgtggaaattggtaaacatagccaattcagtgaataatgctgagggttccctctagtatgtttttgtattttcattgaaggtcacatactctttaacccaatggtattgcatttttttgtcatgctttgcctccaattatggtggtagtaagaaataattccatttgaaatacagaactcagaaagattaaagaaatcttttgctcatgattctggattttggagcattttccaaaatgtgttcttcattttagctaggaaccacactttagataactgttttagttaaggagataagaaagtaagtgggttagatatggaaaaattatacaacatcgattaatagagaactttgaaaacgattcttcgtcatgaacttttactggagctcttctcttcattatgtattttacctgagtgggttgttcattggtggtatccaattgctaatctggagtgaatgtttaaggagggtgagtgaattatttcaaagttgagtttagatctacgtttttttctttccaagtgtgagtttagatccatgtgtttttcttttcaagtgtttgagtacattgtgtgctctcttatgattgctgaattaatatcgtgtgtacgttgcttgcagatgcttattgttcgacattattatggagggcagttcattcaagtctgcgagccctctacaatgttaattacttatgaattgctgatatagaaatcaacgtagtgctgttgttactgtatttttgtgatgatatttgaaataattaccattgtgtttttactgttattttcttttcgatttgtgatcatgttattatattttacggggacttaacttgctagatgtgtttgaagaagatttcaagctaaagtttagtaaagaaacaggtgctgaacttactctgtacgagcttcgactgttacaagatcgacttgttacttttctgcttaaaatgtgttgctgatgttggtcttggtggatatttggtttagtattttcattgcttctaaagaatgtatttttcactcgtagcaataaaggaataggcatgactttatatttgtgtgacaaaatcatcttgaaattgtttgatacaagaatgactctactatcatttaagcaaatattacatgtaattctgtactaattacatgtcaggtctctatccaactgcagccaggaaactttctcaacttttttctgtttatagttttcttcaaccttgctacatttgcccagttacctgcatcagcatatagatttgatagcagtagtttgttgcctgcactctcaggctctagctccctcaaatgcttagctgctatttcagcaatatctatattcccgtagttcctgcaagccccaagtaatgctccccatataaacaaatctggctcaattggcattgtcttaaccatgtcataagcttcagtgagttttccagctcgaccgaggagatcaacaacacaagcataatgctcaagtcttggattgattttgtactcttcttgcatcaagttgaacagactttgtccaagatcaaccatgcccatatggctacaagcagtgagaactgcagtgaaagtcaggtgatcaagtttcttctcgtcttcctccatcatctgtttgaaaagctcaattgcttcaccgcagaatccattatttgcgtacccaaaaatcattgagttccaagttactgtgtttctttctgtcatcttgaagaacaatgcccttgcatcatctatgaatccacatttagcatacatgtcaactaaagcacttcttacgaatatattatcttcaacaccagtcaccaatgcataaccatgaatctccttccctcgcgcaacatttgccacaaccgaacaggcagacaagagactactcatagtagctgaagtaggagataacccatgagccaacatctccttaaaagtatcaaatgcttcatcattacgaaaattcttcaccaatccagatataattgaagtccaagacacaacatcaggtttgatctctcgatcaaccatcttcttaaaaagttgggaaaccattacctcatcacccttttgagaaaacccagctaccaaagtgttccaagttactatattaggtgttactgctccttctatttgcattttccctaccaaatctaacgcttgttcaggtaatccacgttgagcatagcctgaaagaagagcattaaacgccaccaaatctttttcctccatggtatcaaaaaccccgcgtgctttctctacttgtccaatctttgagtacatatcaatgagtgaactgttaacaaaaatatcatagtcaaacgagtgtttgagtatcacagcgtgaagattctctcctattcgtgaattggagaggtgaccgcaggctttgagaacgctaggaacgataaatatgttgggcttaatacccattttttgcatttctctgtacagattgagtgcctgttgatgaaatccatatcgagcataggccccaataaggacaatataacggcgaatatttgtttcaggaattttgtcgaacacttttcgtgcattgtttagtttgccacaaacaacgtataatgctataagcttagaagcgatatgggtgcgacgaatcaacccattaataattaggtgagagtggagcactcttcctgagttcaagtctcgatcacggtcatagatttcgatgaccttcgcatatgtatcaactgatgtctgaaacaatttacggtggattatgatgggattgctccgatggattacgaacaacgtcggccctcggatgcaacggcgcattgcataagcagttaccggtggtgaaaactaaagaattaagaacccaacactagaattctgtcagaacgaaaaagaactcattttggcttgttttgacataaaggcaggactcgcatccacctaaaaaaaagaatcagaatcattagatcaatcacaggatcatggactagaaacatcaaattaggaatgtcaatcgggttgagttgggtcggacccagcccaatatcactttggcccgacccgccccggcccgactacacccttcaacctgtcgggtcaggctcggttcgatataaat

SEQ ID NO: 22754 - DNA, 7265 bp, Cannabis sativa
atagtgacataagtagctcgtggttaacgagtgtaagggtactttataaagtaccagtattgtgtgattacgaagttgtgaaatgacttaagaatgttattatgtgataattggtcactggatatatctttgttataatgtgaatgaatggatttttatattgcttaagaaatgtaatcctcaagctactatatataccgctcgaatcctatggattaagggtttaactctctaggaaactttgctaaggcaaacttatattcttaaaggctttttcaagctaaaggaaatactaaataataatgactcgtggactgaggctaattaatgccccaacaacgtaaaaaactatttggctctcattgttcattctcttttgattatttgttcttcaattcttattatttatattttgtttctgaaaatcttagtaaacaatatatatattttaaaagataaatttctatatttagagttgaagtaattataataaaccatgcaattttaaataaattaatttagtcaaattattaaataagatctttttttttttttgaaaagaaacttttattaaacaacaccaacaaacttacaaagaattggagaggttagccttacaaacaatagctaaccaatctggaaaagaattgtaaaaagaatgggttaattttgtttctaggcttctcttagctaagctatgagcacctacattatggactctttttacatgaatgaactttgtacaaaagaaaaaccagggtgtctcttaatttgattaacaatcggctgaatatcaccaagaaagctgtcatttgctgagattttatcaaccagctgcttgcaatccaatttgatctcataaggattgtgcatattcttcggcctatcctgcagagcagcaacaacagcttttgcttcagctacaggcacagtgcagcaaacagggagataatgcataccagcagaaacaatgttgcccgaccaatcacgccaaatatagcccagccccacccctacttggttcggttggatggctgcatcacagtgaacacagtaagtgccaacaggaggggccggccactgatcttttggagcagcagagtgcacagtaggaagactctctttcccactgatatctctcgggtagctactgaaaacctagtccagcaagcgagccccattcatataaggttgattgttccattgtctatttcgattctctcagattgcccaaagaaccttgatcacgtcttcaaactcctccctagctagcttttgtctaaattccactagcaaatccatcattgaatgccttctgctttccttgattaacttgtaataaggcaaaagtttccaaacttttttgaccttttcacaagtccaaagagcatgggatagtgattcctcaaacctgccacagttattacaagtagggtcgattttcgtacctctatgacatagattggactttaccgggagccaatttctacacattttccatccaaatagcttcattcgtggaggcaaattcagattccaccacatcttccaccaagcatgagtttgatccatattagagcagcgggtaggagcaagatttatctccctagcaactctatatccaatcttcactatgtagtgaccatccttagtgaaaggccaaaccagaatgtcctccgagtgattgtcgattgggattcctaatatccaaggaacatcctccttatgaaagtatttgtttagtatagtctcattccaatcttccttagtattaaacaggctgctcactgtggtattggggtttgcatccaaaggccgatgtataattgtgccattaggccgtggcagccacttatcttgccaaactcgaatggttctaccattcccaactctccaccaggaaccttcattgataatatcccttccccaaacaatacctttccatatgcaagatgcattttgggggcattttgcattaagaaaggaggagttagggtagtagctatttttcaaaactctcgctaataaagagtgaggcttatgaatgaggcgccacccttgtttggccaataaagcttgattgaaatcagagagactgcggaatcccaaacctccctcttcctttggtttatacagcttgtcccaagtgctccaatggagttttttattttcctttgtgtctccccaccaaaaattggctgccaaagagtggagatttttgatcaatttctatggaagacgaaagcaactcatgaaatagctaggaagagcctggatcaccgcttttataagaatttctttccccgcttgggagaacattgatgctttccagcctttgagtttattccaaactttatctttgatgacctcaaaaacctctttctttttccttcctaggtagcttggcagccccagataaatggcatgattagggaccagccgaaccccaagtgtattcgcaagatgttgacccaactgcttggatatactgctgcccatactaacttccgacttctcaagatttattttttgtcccgatagccttgtataccgctggaaaatctgtgtcatagtctcacattctgtctccttcccttcaaagaatacaaaactatcgtccccaaagaaaagatgagacactttaacatcattcttaccaaaccgaacccctgttattttcccagccttctcggcttcttgaattaggcatgaaaggccctccgaacaaataaggaagaggtatggggataaagaatcaccttcgtgaagaccctgggatggatggaagttcccaatctttccccattgattaacatcgaaaaggagacactagttacgcacctcatgattttctcaatccaaatctcatcatatcccaaccctcgcatcatagtcataaggaagctccactcaacacgatcatatgctttggacatgtctaactttaaggccattttcttcccattaccaaatcttctcatcttcatactatggaggctttcatacccgatgacagcattgtcttggatcagccttccacctacaaacgcactttgaacctcagatatggcttgatgaagactatgtttcatatgacccgctaaacacttcgctactatcttatagatcacattgcataagctaatgggtcgaaattctgacatttggataggcttaggtagtttagggataagacaaataagggtatcattaatagcttcaacactcttcccctcattaagaattcccaaacaaactgtagtgacttcttctccaatgattggccaaaatttcctataaaatagacccggcattccatcattgcccggggctttgtgcggatgaatatctctcatagcttgtaacacatcgtcctttgtaaaaggagcaataaggtactcattgatttcccgggagattttgtttggcaccatgctttgaaactcttttaaatcagctgcggaagccggttgggcagtgaacaattgttggaagtagttacacgccacccgtcccaccattctatttccataaacccatcgagcattttgatcaagcaatcccgtaatcgaattcttcttcttccttgaattcgctttcctgtggaaaaactttgtatttcggtccccttccttcagccataaagctcgacttctttgtttccaaaatttctcctctttgtccaaatacacattgtaggtccgctccaattccttcaattgactccagcttgtgtgatctgtttgtttagataaggtggcaatcttatcttcaaattcctttatcctcatattcatttccttcttgcgagacttattccaattgttaagagctgctccgcatttagccaattagtcttttagctccctagccgtggtgcttatagtgccagccccccaggatttcgtaaccaactccacacaggtttcttcctctgcccaggcatgttcaaaatgaaaccgagagtgccatcgaacccccttaactccatccagttgttgtttagcacaagtgagtaataacggacaatgatcggaattgattcgttcaagatgaaatacttttgcagcagggaacatatcaaaccagtcagaattcccacaagctctatccaatctctcaaagataaggttgtcttgtctcccactgcaccaagtgtacaagttgccttcaaactccacttcccaaagataagactcatttaaagctttcctgaaattattcatgagatatcccggtttcggttgtcctccctttttctcttttttcctcagaatctcattaaagtctcccccaaccagccaaggtcccgtatacatcctaccgactctcttgagaagtgtccaagaatcgcatcgtttacttggatccgggtctccatagaaacctgtaaaccgccacccttgatcctcctctttccgaatgaaagaatcaatatggaaggaggagaacgaaagaatattgcaagttatcttatctgaccacatcagaacaagacctccacttttgcctttcgcctccataacaaagcaaccaacaaaacccaaagcaacacgcaaattttcagctcgcatcttattgagtctagattccgctatgataaccaaattcgaacaccaacactgcactagggacttcaaagtacagatcgttcaagggttccccatcccttgaacattccacaataaggcattcattgctgcaggcgaccccggctcgcagggttcgcctcttccacattctgagcgattgtcaaatctccattctgagaaagttcaatcggtttttcatctttcccgccctttcttttctttgcatctttcttcacagccacttttcttctctgctctttggggattgaatttttacccgagccaaaggcaaaggggagactttcctttaacccgggtatgtccattgagaaaccaatcggaacatcaattagagtttggctttcattcatcaccattggattgtttgctgtcctttgaagtttaccagcccccactacttctcgatcctccaccaatcttcgtttcccacgcccatcttgtaacatatcatgtgtctccaacccggtttgctcctgctgaggcttctcagttgttgtattttgcagcttgcttatgtccttgttaccgtggtgttgttctgtcccttttgttacttcacttctcaactgtacatattcttccccttcattcaataatggatcaaaagagttacccatacagagattgagactttgcctaattccaccttgtaggttctgttcttgtaaaattacatttttcagtattgccaccttttcccccttggaatccatctctaactccgttgtcaacttacagccatgttccatgcgccattgccgtcatgccattctcccctatgatttccttaatgtcaagagaacaatctttttgactatgaccaattaatccatccacatcgaaaacacataaatggtagttcatcatacttgaatgtcacccacttcttggagccactacacggtaataaatatcctgggcatatcggtttggttgttgacatccacatctgaaaccgaaagaatccatccaccaccattcgagacacatcagaattctagactgtaataaccgaaccagccatagatgccagtcttgaagtatttttctctgtcggataatcaattggaacccccaaagctctaccccaaatcggaaagacattcagatcattcttccaagattcactagagttccccatcttacccaaaatcagcaccccattcgataaataccacgacattcttgctaagattcgagattgagtttgttctgaattaaaagaaaaggtaaggaacataccagtgctgactttttcttgaatcttgatgttccattccgattccttcaatctccatattcgccgcagcaggttcttcaagaagcccctgctatggtccaccttcgaacacaatctcccccgaaggttgtattttgcaatcatggtggatagactgtgatccacctcccattcttcttcatccgagacatgaagtttatttgttttagctagcagttcttccatagtaatggcgagtacacaccagtctgatcaccggaacctcttcgtctccgagggtaaaagaatggcaaagcctcacaccccgagccctagcagagagcgcgcaataattccttaaatcttaattttcaataatcaaattttaaataagatctttttataaattgatatatatatatatatataaatttttttattttgataaatttaagtccttaatttaatattttatcacactaattttttaactataatatttaaatttgtggcaaaaatttttatcttttcacaaaagttagacttatacaagttataaatatttttttaatttaatattaattaatttaaaattaaattttcaatacatgttaaaatattacaataatataacaatttttttgaaaaaaataataaaaaaaactaaactcttaatcttttttaatcaagtcacgacaaaatttaacttaaaataaaataaaagttaaatagaaacctaaacgaagagggaaaaaaatgaatcatcaatcaacatgagcattagacaaattctttacaagaaaaaaaaaagagcattagataaaataaaatattatttagtcaaaagtaattttacataattacactatgtattgcaaaaacactaaataaataccaaacacatcaattaacatgaacattttaaaaaaaatactaatcttaaacaaaataataatatagaagaagataaatatttaaattcacagtttcaaaaggacaacgacatcaataaatttatacaaaaataaaataacttttaaaatctaagaataagatggtaaattaatttgtctcgttgagtggtgggcgcacattcctccatcgactatgcttgtcaaccgtaatccaatttgcccatatgtttgtcgtgctaaagttcactgaaacaataactatactagtccgttcaaggtcgtgaacaataggagctatcttaagagttgggtctgggaatcgaggagaaagatcttgtaggttaaatctgggtattggagagaaagaaaaagttttttagtgagattgcgtctctgtattaagagaaaaaagatgaaaatgatgtaatgggtaaagagaagaaaaagttattattttttggaataattacataaggcaccattttttgtaaaataattatatttttacgttcaaagaat

SEQ ID NO: 22755 - DNA, 1706 bp, Cannabis sativa
ttttaatacctcgggtgcaatatatgcagcgtctcgttttcttttggtttcggcagtcttttctgcttgcttctcctgcttctcctgccacttctttgctgattttgtcttgtcactcaagaaatattctccagtttccaattgcatatcaatctgtttttacatatttttcaaacatgacttgttaatatatgtttatccctttaataacgaaaaaactcgattacatgtatatttgcatccactatcagaaacgaaaagctaacatgcaatcagtacattgtgattttattaaacataaacaaatgaacaatgctattaaactctttcaagaaccgagtagtaatcatgcaccttgctaggttgttgaggaggagggaatggtgtatatggtttcttctctttacttttaactttcttttgctgaacatttttcctaaagaaacaaaaataagttcagtaaatagcacaaaacaaggacccaaaaaaaaaggcaaagagagaatatgtcgtacttcttgaattttggaagaaacctatcccagttttcatttgcaagagcaggatctttctcaagttctttcctcatcatcaaaatctacaaaatgagaagcgagaggttgagtaccgatgaaaagtcaacaatatataagtaaaattaccaagataagtaccttaatatggtacacaggatgcattttattttgaatgcaatcttccactatcttcctaacttgctttaaccctttaaatgaacccatagcagcaacagtgtttccctattcatttagcatcaacaacaaaaaaaaaaaccactttattaattatacagagccttggcatatgacacatgaaataataaggaaattggataattacttgaaccagaatatagcatccagttagtatttcaagtgcctgcaagccattaaataaacatgtgtaacatcagtatccaatattgaaaagcatctaatagtcacagataatattcatttatctgaagaaaaaaaacagataacatactttatttcttaagtacagataacagctaacatatcatattaaaataaagaaacacacctttaaagtggaagaattgggaccgataagatgttgccttcgtttaacaaaccgttcctgcataccattagcccaccaaccaccgattaaatggattttgaggtctgatagaattttaaaaatttgcactccccacccagccagtagagggagagaaagaaagaaagagagctttattcatgaaagaaatccatacaacataccatattgcacaacttcaactataatattttcaataccaatagggtacacacctaaacaataatctcaggtaataaatctaaggtgggcacaatattgaaaatactacattttaatggtgttcgtcaagtttgaaaactgcagctcttaactgatccatttgcttaaagaacagatttatcaacaatttagtctggattgattacttttcttctaatatatatgtatgtgcagtttgggcattaatatcctttgtgttacatctttcaacctcaaaaatattaaattttataaaatcatgtctttgccactagagaagtaaaacacaactaagcactcattccattagaattaagaaggaaacacaacatcaactaatgatgattcaaagaaaagaaacagataaatatacatctacttta

SEQ ID NO: 22756 - DNA, 2284 bp, Cannabis sativa
accaccgtgcaaacaaaaaaaaaaggccgtcgtgcaaacaaccaccaagtgaaccacctgcacacgttgatggaaaaaaatgagatatgagaaaaagaaaaataagatgacaaaggagtgatagagagagaataaagagaaagagagggagaaagtaggtcatcggggcttggggtcatcggagcgggtcattgggtcttgggggccatcaacgctgggtcatcgaggcttggagtcgttgggcatgggatgcgttgggcttagggtcattgggcataggaacccccattcttggtagccgtgggttcatgggggtcgtcaatgctagggtttcgtctcgggtggttgttacggacttggttgggagagacccaaaaaagagaaagagtgaaggggttggctgacagttgatattcaaataagacaagtgtgtatttaggggtagggttttttctagggtttgtagaatgggctttggccgaatatttaatatttcagactttttttaagtatttgttgcgttaattagttataaactgacgctactttgcgtcagtttaaaaccaatacaaaattgaaaatggggtttttaataggcgcaaacatgcattgttacaaaatagacaaaaataatttaaagtggtctcttcccgtcgattatgggcattgattgacgtgttgacagatgcaaaagaccatttcatagtagtgtggatttttattgctttttttttcttctcccttgttgaatttgttaggtaaaaataaattacaatatttgaatgacgtaacctgtagattaaaagaactagaagtcaagtaataaaataacaattaatgatataaaatgaccttaaaattaaatatactacatagggtagttgaaggttgctaatagccaaaggttatgatgaatcttaaaaatataaaattatagtttgaaaattttcaaacttgtctttatagctaaagttttctaacactagttagcccaacgttattaactaaccttaattaagctttacctttttctacttagaaaaatagtacaaaagtgatgatcaaactctcgagagcataatatgagcgttgctattgggcaccagcagtgtccaacactttctataggtgacattctataattagttagcgatattctttaaaatctattttttaagttatatgagagtcgataattaattacactaatagcagtatgacaccgcgagaagggtgctagacacaactagtactttttaacaattctctatttatattcatatgtttatatagtataattaagtactcgattttcttaaggcaaaatttcattcaatgtaattagcaaagggacaaagccctacaaatcactaactactagaaatataggctttttcttcggttcttttaagttggtttatctttggttaaaaaaattctcgctaccgaagacaattgaggcgaagacataggtcccgaagacatggggaacatatgtgtttggttatttcataataaccggagacgaaggtattttttatatgtatattatatacaaagcgatatttataccctaaatcgttgtcaccgttaagactgcttccactgagccccaaacctacaacaacctaaaataaaaatacttaaagaacattatttttcaatcaccactgtttaacaccaccatatatctgagcaccttccaacaaccaccgtagattttttgaccaccacctcaatatccaaactctgtatcatacacactaaaaactaaaatataagctaaaaggcatatattaaagtgatgtataccttaattcaagctaaaagacaacgtcgaacgcctcaaagtcgccaccattagtcgagcgtcatcgttcagaaaccctaaaaaaattgtcgacctaaaatctcacattaaccctcttatcctataataaattaatttttatagtgtatatgtattacgggtgagaaaactagaaagaaaaatgaggaaaatgatggtgtatggaaaatatggaatcgtaagagagatagcggcaacatttttttttgttgagagaaaagataaataagaaagaagaattgagagtttcagatctgaaattaggattttgtagacctatgtcttcgttatttttcaaaaaaaaaaaacgaagacttaggcctccacgtatatctgatatggagctagggtaatggagacctatgtcttcggttatttcaaaataataggtctgcgaattttttctttttttttttctccttacttttatctttg

SEQ ID NO: 22757 - DNA, 2108 bp, Cannabis sativa
ccgacataattaaaaaaaatactatataaaaatatttctaaatgtagattatatgtgttccaccaagtctgtgaagattgtagtaaatgtttctgtcacgaatttcaacatatctttgaagcataattgggaagtcagaaacaagttcatggcatactttagctgttggaatatcggtggagccttcatcataattaaaatcaaacaacttttatgcttctctttcatccttgagagtcgtgttgtgcaatatgatacatgcatacataatgtatttaagaacatctctttgccagaactgtgtcagtcctcgtataatagcataagtactccaaatgctcgctcaacatctttgcgtacagctttttgattttgggcaaataattttctcttctctccttaatgcaaatgtacctataacgccctgcttgcttaggcacgctacaataattttccaattattgtgcatacatttgctaatcaaagggtttctcaaaaaatatgacaaattaaaactttgattaaattttaacttttataaatacatatattcacataacttcaggatccgttaaaagtttacaataatactcaaaatatattttccacaaaaggtgttgcccaacaactacaaaatatgagccccatgttgtcccgaagaaccgagcactctaggtttaaccatcccgatatgtacaatcacccacaaactttagactcactactgcttagcatttgcttttcttttacctacatatgaaaacataattataagtcaacagactcagtaagaaaaatctaaaacatataacatataatttgtctcgttgctcagacgtccatacacctagttataagtttaacatgcgtcctatgcgtcttatgagttttgaatgtttgtaatagaagtatgtcatctacaccacatgcactaagtatctttctaatactagtattggtgggatctgctcacacttcgagtacaactgtttgttataccccatacacttcgtactcgtcacgtactagtgtgggtaacactatgtcatatcccataattatatattttaccacatatactcggtacctcaaccgtaccagtgtcagtagtatataattcatataatctaatatgtataacacatgcacatataaatatatatatatatatatatctttatactaattttacctcgtttctagatccaattgtcggtcaacttgaatgaaaatgtcgcttgttgaatggaggccctatgtcacattcatgtaaaaccgataagagtctactctagagcactttttaatactcatataaacttatagttttctaccaaactctaaggtgaaaacatcttcaaataaattcagctcaaatataaattccagactataaagctcgttacaagctttaaaatggtataaaaaaatatccaaaataaacacccgagtgaaaagttatggccaaaatactaaaattgaccttctcggtaaaaccttacctaaaagccccccaatctggaagcccctaatctgaaaaacaccccaattcgaaaaccccttattcggaagacccccaatccagaagccccttaaccataagtctcttctctggaagccccatgtccggaagtcccttgtccagaaggaccttattgggaaggaccttatctggaagcttccttctggaaccttttcctgggctattagggctcaaaaatttctattttaaggcccttaaatcaagctcccaccttaaccaaaagctaccaaactttccataacaaaaaaatgggtattccaaacataaaccacaactcaaaagcatttaaaacaacatgcattaaattttacaatgagcaaagcttgagttttaaaatccaaactcgctcgcaaccttccatagctgctacaaatccttaaaaccaaccacaacaaaccataaaccaaactcaaacagtagtaattcccaaattcatacataaaaaaccaacctgtaattcttttaaaatataaagaagaattaatttgaaaactctcttaggatacttagttctctttggtttggattagggtcgaaagagaagagagaatttagagagagagag

SEQ ID NO: 22758 - DNA, 4851 bp, Cannabis sativa
  modified_base (358)..(367): a, c, t, g, unknown or other
  modified_base (4713)..(4725): a, c, t, g, unknown or other
  modified_base (4771)..(4772): a, c, t, g, unknown or other
gtaatctttatcctttaaatatcacaaaagaaacagaagtatttttcacttatttgtgtgtcatttggttcatgttatcatttaattgtttatttgatttataatgtaattagagtacttttattatcttctttactatatttttaaaatacttcacaaaatactacaaaaaaacaattacatttagtgataactttttagttgcagcataaattttttgtaacaaaatgtaacatttagtcacaacaaaaagttacttgtgaccaaaacatagtatttagatacaagttgtcactaaattagttttagtcacaacaagtattgtgagttaaaataaatttagtcacaacaaattgtnnnnnnnnnnactaatacttttagccacagatcttttagtcacaacataataatgataatttataattagtcacaagtttttacttttagttacaaattttgttgtaactaaaagtaagattttttgcagtgaaaatttcattttttttattttacatcaaacttttactttataccatatatagctttcaccttatggtataaacagggctaagcatatgcctagtatttatatcaaacctaggggccaaaaaaagaatttttctcttttaaaataatacattttccttactaatttttttaaaccatcacaattttttttttctaaacaatggctaaaaataaaatttttttggcccactaaatttcaataccaactttatttttttacttaaaaaaaattattttagaacatttattgtgagtgctggtaaaagtgtacataaatttggtgttaatgattgggcttgctttaatgatgattggatgtatgtgtcaaaattctaaattaggttactattaaaaatataataaacaatacgctagaaggaggggtcgaacctccgaccttatggttaacagccatacgctctaaccaactgagctattccagctacatatcatcctgcaacactaaataaaatattataattagacattcatttccacgtcaatggcaaattttaattttactgaaatatattttaaaatttcaaaataagcacacatattcttgttttttccattcaatatatttccaaatatattctatacattattgggccatataatccctttaaataaattacttgtttttttttttttcaattcatccgagtatacatgtacatttatatttatatatttatcttattttataacatattgttaatttgaaaaattttcatagacatgaaagtttgacacctagtaagaaagataatatctcggagttgagtagtcccaacttagaagggattcttagtcctacgcccaagttgacttccggaactctgaaatggaaattcaaatttcaataactctttttcaactcactaacttttagcattatgtaccatgaaaacatggagaaatcaaatccaggcccaaggagctaaaattacatgaacctgtaccccagaattcaacctaggcaccaagggcttcacccagcgcccaagttgacatcctcaactaaggtttcagtttacaggactgtcttaacgtaaatgggtcaaactttacattggaacacgaactagacataccacatacatatttgaggcatcataattggattcagagaaagtttatttttgagcacccggagcactcggtgccctaagtgcccaggttgataatttgtcaatctgggcgacttccaagtattagaccgatgattcgaattttgcatcttctttgtcttcattaaaaatagggaaacaactacttccaaggaagaaatagcacttcttgggtgccagaagcaaggccaatgcacaggttgacattttatcaacctcggccaattccaaggatgttttctgagaactctttaatgatattgtccattttcagcaaagattaagattcaactatatctagggaccaaacgaaacttccaaggggccaaaactgggacctagcgcccaagttgacacctaacactaggcccagtacacaggtttacatattgtcaacatgggctgcttccaatcaatttctcaaaaaaagtgttccgagaattttctccgtcatcagaaataacaatattcaagaaaactcggggagaaaaccacaaacctaagggcctcaaaactgagcccagcacccaagttgacctggtgctgggccgagcacccaggttgacaatcaacctagtgtgctggtttcaaacattcaaatgtcaaatatgatatgatcatctctctagaatggccaaaaatagggtaggagacctcgttctcaagttctaagaccttgaaagtatcaaaacaacatctcagaagctctgaataagcacctaatgcctaagttgacaaatggcctgatgcattgggttctgcttatctgattcagattctgtgtcgaccgtccatctcacttaggcatcaaaaaatacattcccatgacattctcccactcacccagtgtccaggttgacgtcatatgtcaacctgggcgttaagcccagaataactttcagtacaatggtcataactcactcaatattaatctaattcacacgattcaacttgtgttttaaagctatttcaatgctctattaagccatggctcacacttcaatcacaattctaaagttatcaactccaaattttaccccaagggagttatgaaaataagccacagcttacctggagcaggtcccgccgtcgcgacctgggctccaaaaattgaatatcaacctcagaagttaattttaaccaatagatcatcatatacggtcaaaaatagacaattattagttttttcatatttttggattattttattcctatttttaaggacctccttcacctataaacgaagagcttctctagctcatttttcacattcagaaaagtagccataaggttagagcatctctctctagacattcaagcttaaatacttagccattttttcgttataccatctcataagaataaaaacccaaagtaaatgtagttctattactgtcgcgatatagggagtgaagtactataaattgtcatgtctctctatttatacttaacaaatattttattctcgccaatctagcgagagagtgtggcttggaaatctttatccagattttgagtcaatattttggtactttcattgagagccacaactcaagaaagttactttcaaagatggttgcaacacactctttatgtgttgacaaaggagccccaacatctggccaaacaacttgaggcacgccagttgctaaggttgggactgggactacttttacgccctaggttccaggaagaggtcttggaactagctccacaactcgtcctccaaggccacacacttttgggactgacactgacgaatagatccacctggggagtcacgcgtggacataaaagaccctaaggagactgatcctcaagtttaacagcctagccaaactatgattgatctacaagaattgttatgatactctctcgacaagcaacacgagaattcgcaacactggtttgtggaaagctaacgaaacattgaaagccaaaaattttagcaataatagcagagagcttacttgtcccaatggatcagagaatcttatcactctggtcgtggaactaccccgacaggggtctttctgagttggtgagagagactccctgtcgaccaactagtcatgtggaagctagtgctcaaggggaaacccataatgcacaaaatgttgctaccacacttagtaaccgtgcaagcactaagaaaacaccaggtaatgaggctccccggagggaaactacctttgagtaagagtctaaaaggactcaaactcgtgggtgctaaccaatggaccctcaacttgatgtagaacgacctcagaacattgacagagacaacaagactcctccaccaagtcattatcaacactctcatgacacaaggccccaagacacaggggaaagggacctgccactcaagacaatggaggtagttgaaggctttacttcaaaattggaggctatgaaatccagcgagtaaaatgaactgtttcatactcaaaattacttctaagatgaaaagggtgagttgagttgttacttttcctgtggccccgatggccagcagtatgagtacttccctcgagtgcattggggagagttaaacttgagcaactaattaaactctctccgtacttgtgatctagctaaagactatatttaatactttaaaaatatatattaaaaagtaattaaatttaatttagataatacttttgccaacagttataaacaatcatttaatgtgattttttccaacagttgtaaaccatcatttaaattgatttttcccaacaattataaattatcttttaaagttctgtatttttatgacacccacatagccaacggttttaggaattgatggaaaaaagtataaaaagacagttataaactgttgagaaaagccaattttgtagtagtgttgcttccatgacagaatcttgctctgcagtgacaaggttcacattgagatcaacttcttttcttgatttttcaattctcgattcaaaaaccaagagcatacctcggtttcttcgattgtataattttcgatccgtgtgtttgaagagatgataaaggttgttggaatatattttaccannnnnnnnnnnnnctaacaagtatatttttaacattcctaaacatgaacttctaaaacnntataaaataaacacataaaaggtagtagaaaccttatattggttgtagcggaattaaatgactccttccgctcagatct

SEQ ID NO: 22759 - DNA, 3619 bp, Cannabis sativa
  modified_base (3388)..(3390): a, c, t, g, unknown or other
atttttttataagtgtcatactgcagtatattgtgttaaattttcactggtgttctactagtgttttttagttgttccactgttgttttgagttgttctggtctgtgttctataaaaacacggtatttttgaaaacttttagtgtgacagtatttttataaaaagtaactaaaattttagtatttttgtaagttttccttttttttttttttgaaagccaacaattcaattttggtattaataaaagaggcaataaaattttcttgattttgtaaaaagatgcgaaattaacatatgattgtatgcattttttttttattctagatgaaaaagaaattcaagaaaatttatacattgccaatttatatgtgtttatcaataattattttaaaaatacaacatgatttctaactaccaaagatatacatatttataatttagtttgcatttcattattagaaagcacaccaatagaccatcgttctttaatactgtatattaacattaatatataacagaacttatatatgtatattttaactgaaaatatcgaaacctaactacgtacaagttacaagttttcatcatatatattacgacacacggaaagtacctcaaattttgatatatattatttgtcagtgaacaagtaaaactgtacataaattaaatctatataacatgcatatatactttacttaatatgtatagatatcttgagacgtactggctttagctcaacgaaccaacaattttatttaagacaaacaatttcagaatatattaatctaattgcatgcataaaattaagggccgtatatataccatagtttgatgaattttttcttcataggtttgcatgcgaaacaaaaggagtatgtctctgtactttataaatgaatagtggtatttctagctaatttataataattaattatatagtagtggatatttgtatattaagcaccactacttatatagcaattattaaacaaaaataatacagatcgatcacagatagttttgggcctaataataacatcctattataaatatatagatgcgcgcgcgggtagttaaagaaacatataaattcaacaaagaaataattaatatatatggtgcatgctaaatgagagtgaactttccattagattgattttgcatgtgttgactttccaaaaaagtacatcatttgattgatattaacctaaaaactatatcctactatattattatacgccaggccactactataacggcgtttacatatcgatcggtacatatatatatatgtgtgtgtggcttctaattaagattcaagcagtctcttgctttttattacccaaaaaaatatagcaccatccatcatattacttggagcggcatgcagcctgaccatgtccaacttgtcttttcatctgaataatttatatttaagtaattaaataaaagtaattataagaaaattaatgaaaatataatcaatgggtaataatgcatgcgcgcttaattattattctcacctgaaaaaatgtttcaagcttctttttcaacagagcatactctctcttcagctgttgaaatgtcctgatgcatctgcattataatgtgatattaataacgcacactaatattaattcgcaagagttaacatcttaatttgcatatatagagaattcatattaataaatttaccaacctttttcctgttactttttttggatatttatatatatatagatgtagagtttgataggaaatatttaaagtgcatataaataataattgtataaaacactcaaattacacacattttttacacgtctttatatatatacacccattacaatattttacttttattattttatttttctcctttttctctctatataaaattactctgtactatatatcctttttgagagaatatatagtataactctcttgaaaacttgtactatatatagtacttgacttataatgttcaagcggcccccaaaccccgaagtgttaatgttaactctagctaggctatttattacgtatatttaaataattataaaaatataatatattctcttccatatatatatatgcttaatcctatggtactgtgaagatgaaagaatgaagtgaagtggagtactggaggattacccttctccatttgctgtcctacaatattccctaaactgagtgcactctgctttaacctttttggctccaatgctgcaatgcaataaaccaataaaaaattaaagacctggtttctgattaaagcttgtcgtttaaaatcaccaccgaatatactaattaaatatatatatatatttaaataataacataaacaaattaattaattaattaattaattaccttgtgctacttcccttcagttggtgcatatagttgtctaacttattgaaatccagaggacttttctctctgtatccataattaataaatgatgatatcaaacataaatcttttaattagattattaatgatgaatatatttatatataatagttaattataattaaggaattaagtagtagtactgacagtgcctggtcgaggttatagatgagtctagatgaatctcggtagtataatgtagcaacttcctctacaaagttaggattagcatcatcttgcaactcctccaattggatgaattgttcatctagaaacccctaattaaaatcattatatatatattaaaaaaaattatataataaatggggtagtaaagaaatataataatcatggcatgcatatgcatgcattcctattagagcacgtagttatgcattaattaatttcttgcttatatatatattgataactaatgatgaatattatatcctttatatccatgaactaattccattccattcatgtatacacatagagaaagagagagaagagagaataccagatatataaatatagatgtatatatataaaatatgtataaatatgatcatatgtacataagtgtgaaaaaaaaaaaaaaaaataggcgcgcaatttacctgatcaaagagagattgcctcattgcggcaatctgcctgcgcatctgattatttctatccattatgtataatatatatgaatctgaagagatgagaaagggagaaatatatgtagaaagagagagatggaattaatttagagttaaagtgaattatatgaaaaatgaggaaggggtgaggaggctatatataatggaaagagtagagagagaaagagaagaggtatataagatggttgccttgtgggcgtaaagcagtacgtgttaccaaaagtttgtatattaatattttatgaattttgtgtagtgtgtgtgagcatgcaatattattattattattattnnnattattattattattatgttaaataccatttttagtttttgtgttttgcaaaagttatatttaattggactttctgttttgttaaatgacaaagtaaatcttgtatttttttataattgtataaataagggtctgaactgatttttttgtcaaaataaaacttaataataatcttttctagtgatgttatgataaaactagttatatttttttttttgtatctgttcgt

SEQ ID NO: 22760 - DNA, 1818 bp, Cannabis sativa
gtaaaacaaataaaaatacatcagtagaccgataagggtgcattgtagaaatatcttatactttatactttgatagttattacatccaatattttaatttaaagataaatataccaattcaatgaaaaaaaaccatttcaaatttgaaaataaatacaataatttttttttaattgaaaagttaaaataagtaaaaataatatatattttaaaaatgctaagtatttgagccactaaaaaaatttaatacaataaaaacaagatttttaattgaaaaaacctcgattcacccctaactggcttatttacaacgagactttgttactcctaacactatgttttgttatactgattaaatatattatagctaaagaaaaagattgtatataataaaaatattttgaaaatattaaatatgttctccaactctttggggtttagtgctatgtgatttatatacggattcttatttttcagataaaattgtaactgtttctgatcaccagaagagcttattgccgtttaagtatcttgacatgaagatatcttctaaaaagatttctaagggagattgtgattgcttagttgatagaatggttaagcgtatcagaatttggagcggtaggaatttatcctatgtgcataggactgtattgattaaatctcacaataaacttttattagtcctaaataattatcctccataagaaagtttattcaaaagataaataaaatttttttgtgcttttctttggaagggcagtgagatgtaaaatggtccggggcatgtttgcttggtctgaaatttgtcgtgataaaaaaaaagtggtcttggctttaaagatattgcttttatggaattcttgtgccataagaaatatgtgtgggcaatcactaagaccgaaaataacatttgggttaagtgatcaactatgtttatataaagcaagttgattggtggaaaggttccacttgatgttagctggtattggggggaaatagtgcaaaaatgaaagataagataaagacaattttttctcaaacagagtttttgaagcttgatttttctctctggtttatataaactaatgcagcagggaataatgaagagattgaagtatgccatgattagggatagatttattgtcccgaagcatagagtaatcatttggctggctctgcgtgatagactcccaactagagacagattatcaagatttggtagaatcccggattctacttgtcttctttgtgaaaatgtaactgaagagtaccatcatattattctttacttgcagtaggaaaatcattgaagaaattgctttgttgtgtggcctgccctacaaaggggctgatttaaagaagctcatccattgagtgttatttctgttgttgtgtatgggatttgacatagtagaaattcagtttcatgagataaaaaccttctaatgatatacatgtcgtagtaaaagatataattcttacagtttgtaatatatagatttcaatttactcggctttgccttattgttgtaaaaataaaacttactaaattaccaaaatatatatatatatatatatatattaagtatgttagtcacattttattctttttacattatattttagacatctttaactttaaatatttactataaatatgatagctaacttatacttaaattttagcttaagtagtttctaaatatcaaatatatatttcattaacttttaactgccaactattttaatcgtttaacgatgattaagtgtaactttataaaaatataattgaaagttgcaatacggaaaaattaa

SEQ ID NO: 22761 - DNA, 1540 bp, Cannabis sativa
cattaaaaattaaacttaagtactgatttataactgaaaattaaactcaaatatttacaccgaaattactttttatttaaataatattaaacactaactaatcatatgatgcctaataccaatactcatcaattaataaatccatcaacatacactccacatcttaattaaaaaattaaataaaataaaagagagagggaagaagaaaaagggaaaaagtgggagccaatcaagaatttgtctgccatgaaaaagaaaaaaagggcaaaaaataaagtgattgagttaaagcaagacaggggtaaattagtaatttcacatgcattgtattgccaggcaatctttgtctcttataagcaactattccttcttcattttttctttttaaataacagagagaaaaaaaatatatatattaacaattcaatatttccgagaacgaaagcagtgattctctgtattccttaacaggtttcagagattcaccgtcttcatcttcttcggaatcagttttctgtgaaaagctcagctttacccagaaaaggaaccatttttctgtattttttgcatggatttttagtattatacatttatatatatgtacaatatttaattcgaatttttagtctttgatttgttaaaaaagttgggatttttcgaaatgggttcttctcaaattgatggaagaatggagggttggttgtatctcattaggtccaatcggtttgggttgcagtactcaaggaaacggtattttgttcttgaagatcaccatctcagaagttttaagtcagttccttcttcaaatgatgaggtttttctttgcttcaattcattgagttttgtttggattagttggtgttgttcattcagctctttggaatttttggattctaagcttgtgtgtgattgtatttatggtgttgaatttgaaaatggtattgtaggataatagaactgaagatgtcattattgagtggtggagttctcttcttgaagtgctgatgattgatgtatttatttcactttcttagcttatgtgtttgaagattctatttattatattagttcaattttaatggaagatcaagattgggattaaactaaggccaagcttgtttcaatttaaatagttttacatttgtggtatttgtgttgtttgtcattgttttcccatgtttataaaatatgatgtatttagctaatgttactatgtacatagaataggcattattatgtgagagttatccataggttatcatttgaggtgtttggaagtatttatccaactatggagcattactattaggtatcagtcgcatctaatgccactatgaggtgacaccttaagaatggttagcaatattccataaaagtcattatattaagttatttgggaccagatacttatctgagacccgatacttaattgtactgaaaaatctcttagtatatcttgaggaagatcttgcattttattacaattactctttcaaaatcaatttatggagtaagtaaagttatggcatgaggagacttt

SEQ ID NO: 22762 - DNA, 2486 bp, Cannabis sativa
cttcttctctttgttttcttcattattcttttgctttaaaatagataatctaaacaagtgttgtttcattctgttagtatataattgcattgcactggtgtctgtgtgtgtgcttttctgaaagtttttctacttttccgtctacttgtattttatatgtttgagaactttatataaaagatccaaaaaggaggaattataaatcattcaaataggtaaaaggacaaactaaataataccatttacatgcaagacaaattaagatagaaacgacatgatagctgacagtattctctccttgctttggaaagattccatcaaaacgacaagatttttatttttaggcgcaaaatacaactttttttaaaaaaaatcaaaatatgcatacttcattatatagaatcagctatcgaaatagcttgtaaaccaacaaggacaatcccccactaaagatacgaccaagataagaacccgaatagcgagctaacccgcttagttctcggatcctttaacaaaagaattgaaacaatagtgagattttgaagaattctcctacaatcatcaatgacaagactataaggggaagaaatagaaacaaaattagtagtgtgaatcaccccttcacagttagagaatgagcttaaatccgtcctgagatcagcccagctgcatctctctctttgatctagatcaatacttccttcaacccaaccgcttctgccatgtgaggatccaccttccccattcaaacctcagccaaagcctccaccagctgaccttgcgagtcctgagccactcaccccagcccaaaccgaggttctgaaccaaataaagcagcgtcacaattaaccttgatgttatttccttcgaacctatcacaatcagagcttttattattccaaacaagctcattcctcgcacaccaaatagaccaacagatcatgtagattttctcaatcaaatctgcagaaatagagaaagagagtgcaccaacctccaaacgagagccacccatccaaggaaaaacccacaacaatctttgttaaccattgtcgagcaaaattcaacaagacaatgaaacagtctccctaaccgaatgacaaacaagacaatcctcagttattagtactcttctactagacaaccgagttggagaaccataagattttaatcgttaggtgcataataagaccatggtgagcttatggaccagggcgggcttaagattttgatttttgattaattcttgaaaagtaaaattaataataatgatgattgcatcatttaaaacactgaacttaatggcgacaataaatggaattacaaaattatgtgtatgcgtcattttacacatgtggttttccatcaaaatcgattttgtatagtataagcatgtcaattaagataaagcgatttacactgcctactgtaaagtaacataaattagagaactaaagaaacgacacacaacgtatatgagccacactctcactcaacaccaagcacaattcatcataattcgtgctaatttataaataagcatttcattttccttgtagtactttcttgcgtataataagcgacccttaaggggtagtaacgtggtgattaggcaaaaacgctataaacagatgccagaaagaaaagaactacgtatgataatgagactgtcattggacagtagattttggtgcaatagtagaagtggaatcctgatcgatttctttgcgagacgcttcccagagtcggtgctcgatccccaattttctgagctccattaaaccttgctcaactgatcaacaacatccacaattaccaataagcaaaataaataaatacatagagataaaagttggagaaggggggccataattctaagtaccatcaacagcatcatgtgaggttggtgagtgtgcactgcggtttatccaaaattgaagtctttctttggcgatttcctgctcaataccatgaacttgggcccttctccagaaatatgtaagccatgcctgtacaacaatttatttaataatgtagctatcatctcttaatgcggttaaagaaagaaaaaaagaaccaatattgaacaagtagagatgtttagccaaaatccattgttaatcactcgatacttctgacagaggagtatcactgacactgtgatactaattgcttgaggatgcacgtctactctaataaatgtcaagagcaacctccaaaccaaatgacatgctaatggagatacaattaaaggaaatgtcatacctccttgaaaagaacatcctctgactcctccgggctcaactctgcaagaatattgatatcaatatgataccagtgctcatgatgtcaatcattataatgcattgaaccattaacttcaaaggattaaaaatagagaatgtaacctcccctactccctatgtgtagtcagagacagaaagaagaaacagaagtattcaataataacaatatgacttaccaat

SEQ ID NO: 22763 - DNA, 1186 bp, Cannabis sativa
atttagatttgagttagggtttgataagtttgagtttgagtttcaaacctgaattaaattgaagataaaattgatttttaaattttattgtttgtgtttgaatataagataatttatgtgttgattttagatttaaaatgggttgttaagagggggttgtaatggtcgtagcatttattaacattattgagaatgatagtagctcagaagaagaaggaaaaggaaatttaggtgtatctcaatattttattgttggggagaaaaaggaaaatatataaagattggaaaattaatgaaaaatactagatttgtgagaaagagaataaagaaaaaagaaaaaattaaagaaattaaaaaatatatattttttcaaattatttgttttaattttaaaatgttttttttaaaaaaaactaattatatgactagtaaaattgtgccacgtgtgaactggtacacgtggacaatccagtatgtcacttaacaaatgaaaatggatggaaaagctcaatttctaacagaacatgagttttgggggttttgatgccaaaaaatgagttataggggttaattgttagcgaggtgaaagtattgacggttttgacacaatttactctaatgtattttaccctattagtgagcttattttacacatgtaaaccttaacgggtcggatccacccaagaaccccgagtgcagcttataaatattcattttcatgcaaatggttaggaatttttgcaagaacactcttatgtaaaatacttcatagccaaagagctcaataatattgaattgtggactaaggttcattaatgccccaggaagcgtgcgagtgaggacaaagtacgctggaaatactcgtgttggtttgcaggaccagtcgtcattccaagaagcagccagagtaacatgcccttatataagagtcgtaattttgtgggcaaaggcccaatagaggtttgaagcagaggcgttgcatgtcaaatctgatttgtaacaactctactttaagcctccattaggtccttacactcactgaatgatggctcttatacacgagtacgtcactttagttgcttcctggactggcgactgaccctacaagccaacacgagtgtttccagcatgatttgtcctcacttgcatgcttcctagaaaaacttcctaggatgtcacccatcct

SEQ ID NO: 22764 - DNA, 3426 bp, Cannabis sativa
ttttaaggattcgccaagcctgcttaggaagcatagcctgattgaaatgaacaagtgatcgaaaacccaggccacctagaaattttgattgacacaaaaccttccaagattttcaatgaattttcctggataccctagccccaccaaaatctggccattatagcctcaatacccttaccaagtttaataggtaacctgaagcaagccattgcataagctggaatagcttgaatcacggctttcaaaagaacctccttacccgccctagaaaaacatttggaagaccaacctctaagaacagaagcaaccttatcctgaaggaaagcaaaagaatgatatttagatctagagagacattggggaaggcccaagtacttacagataaagggtcgatcttcaaggataaaagttccaaaaaaacaaatttcgaacctcctgcaaagtgttaggagaaaatagaattgaggatttagaaaaatcaatagcctgacccgaagccctaaaatagacaataaagacctcttgaagagcaaagcaagagcttctattaacagagcaaaaaagaaggctatcatcagcaaaaaaaaaaaaagatgagagataagagagcatttctagagatagcaattcctttaagaagaccaacttcctgcctaaccctaagaagagaagacaaaccttcatcacagagaataaaaaggtaaggggataaaggatacccttgcctaagacccctacaaggtttaataagggaacccttcacaacaccattaataagaaaggaaagattagtagtagaaatgcacctcataaccaaagtaacaaaattaatagggaaattaaagtggaacataatgctttccgaacatttccattcagctcgatcaaaagtcttagccatatatatcaagtttatgagcagcccaacccctcttaccattcttccgagagctaatggcatgaacaatttcttgagcaataagaatattatcagaaataattctagcagaaacaaaagcactttgaaaggggagataattttatcaagtaccaccttaagacgattagctaaaaccataataaccttatacatagtagtacaaagactaataggcctagtccttcatagaatttgcatgttgtttcttagggatgagggcaataagagaagtattaatatccgagaaataaacattattattcaaacagtccaagacagcatgaacaaaatcaggacaaggagtggcccaatttttctagtagaaataagcattgaggtcatcaaggcctcgagctttatccgcagaatgactaaaaacagcttttttcacttcatgagctgtgaaaggctggccaagaaaatcaatctaaggatccttgagagagggtcataaacagtctaaaatttgactagtagccttagcatcacagccctcaaaatgaaagagattagaaaaaagaaaagaaaaaaataagatcatacatagcctcaaggtcattaacactattaccaaagtcatccttcaaatacttaatagtactagtctttttcttatgagacgcaaaccggtgaaaaaaaacttagtatttttatcaccagctttaagccaagaatgtgcccaaccggcagaccggttcccaaccggaattccaattccctggggaccaatcggtcgaccagttgctacaggtccccctgaaccggaatttcggttcagagctaggaacctcaaaaatgtcccccacaactcaaatcaaacccaaacttcctaaaagcttcccaaacacctgcatacatcatactaagctcaattcaagcaattaatcacaattttaaacccagaaattcaattctaaactcaaactttgccaaaacatcaccacaacaaagaaaaccaacataatccaactcaaactacctcaatctaacctcagaacaccaaattaaaccccaattcccaacacagcagcctagagttaaaatttaaacattaagacctaacttgagcttgaagaaaaatgaagagggaaaagctaaaagatttttaccttgatttagaatactcacaacctgctagaatctcacaattgatgtagaaaatcccagccctagttgttttcctagagaatttgagagagagggggtgggtgtggagagaaagtttaacttaattctaagtttttcttctaatttagatatatgttaataatataataaaatgagttataatctgaatattatcctcaaaataaactcacaaaaagacaaaaggaaatcttagcaaaatgaccattttgcaatttgacttaaaccaaaggttaaaagttactcaatggtaatttagtcattaccaactcccgacacattaccgatattccaaagcctaactaggatgtcccgctattgacattctaaatcatacaaaacgtgactctctaatggcctagcgtagcgttccaccgctaccgaacacaaacacaggaaaacaagaaatatacatatagcataattattctgaatttaaataaatctccacaaacatgcaaatcataaataataacttaatattacgatcaattctaattatttaataattcaatatatgttgaatttaagcggtcttcacagtcacaatatctcgaataaaaatctggtggaaacacatttttttatttatttttcattaaaatataatatacaaacaagattattatttaccaagaaaaatagctagagtatgattcagcaaatataattacacatacaaaacaaacatttagtacatatatttattgcccatatgcattacatcttactccgacgagccccatatgaagaggaagaagaggaagaatatcccatacttttaacaatctctttcaacgtaaacttttgaatcttcccagtcgatgttttcggcaactgatctctaaaaacaaccactttaggtaccataaaatgagccaacttctctctctctacaatactccaataaatatctccttctccgttaccgttactctcactgctcctttcttcaatgtcacaaaagctaacggcgtttcaccccaatactcatctggacaagccaccactgccgcttcatccactgccggatgactataaagagctgactcaatctccacactgctcacattctctcccccacttatgattacatcttttgatcgatctttaatctccaaatacccatctggatgcataaccgccatatctcctgtatagagccacccgtcgtctcttatacaattcgcggtggcggttgagtttttcagataacctaacatgacacaactccctttgagtacaatttcacccattgttaaaccatctctcttaacactaacgccggagttcggatcaacaacatcaacctcagtcatcgccgccgtcctaaccccttg

SEQ ID NO: 22765 - DNA, 6034 bp, Cannabis sativa
  modified_base (2499)..(2499): a, c, t, g, unknown or other
  modified_base (3056)..(3058): a, c, t, g, unknown or other
gattagtatccaattctttaacaatcattcctttacccgattgccaaagagatgccatcaaatgttgcataacatcaaaatcaatggatctttctatcaagaaccttccaacaatgcaccatcgatcatcataatcattccccgtagtatcactagcatcgtaggacaagaccgcctcttcttcatcgtcgatacgcgccatattctccgctacctccattcgttgataactgctcgacgccatggacaactgaacaaacccagaatcaagaaccaataactaacgccagaaaccaaaaaacaaaaccgatgagagaaactatagaaccatgtcaaaagacaagacttttatatgaaaacccttagtttaataattaattctgcattagcagaaacaaaatcagtaaattgcctccctaaaattgtcatccgtccaccgtcctctgtcgagcgcctaaacgagcagggaagaaactccatcctctgtcgtcgtccaacatggatagcagtagcaagaaaccaacgtccgtcatcgactgcgagcagaggagaaaccaacgtccatctgtcgtcaccaacgagcagagcctacaatcgccgtgaaccctccagagacgattgagttgtactccctgaatcggcgacctgcgagagaaagaaaaccctaccccttcgtatacgcaagagagagagagaaacccataagcttcgtatacaatctatctatatatatatatatgaaggagaaatatgaggcagtgacatgtcaccccgaaatcactctaaaagcctctatctattctcttctttattttctcattttttattagctttattaatattgatgattgatatttaataattttttattcatactttttaaaaactgttaattaataataatttaaaaaattaaaaaaaaaaatctaaatcatactttctctaagaaattaggtatggtgttatgttttttatatttaatttaaaaaaactaaaatatctaatcctaaactttctctaattttcttttattttattttatgcaaattaatctactcccttttctataaattaagactaccataacaaaattctacctaaaaatatatttctacctctctctcaatcgctctcccatattctattttttttttttgtaaattgatctatttgatggtgtatacatatctctctcccaacaactctctcatcttttactgttctcctttatttttatgcaaattgatttatttaattgtatatatacaattataaattacaatcttagttatttctttgttttcaaaaagttatgattatttctcttacttttaagtgtgtttattttttcttctaattcctttcttattggtcaatatttgaattatctttatttgttttctttttttatttattttgtagatgggattgctcgacctttctgatacttgaaagcttttgtatgtggtgagaattgagtgactcaaggtaaatagtcgtaaagccaacgtgaaagttcatgttcagtgcggcaagactatgagagttaagaaggatattgttaagttataaaacatttttttaagacgcttcttattgatttcttagtctttacttattttcataccattttgtattataattagtggagtgattgtagatgttgatataattatactgcactttataattatgatataatgataaaatcttaattcaattgctataatcataaaatcttaattaagtgtcatctatgtattttgttttttttcttttcaatttatttagtttctttttatttaatattgaaattaattattcaaacaatacctatatttttcatttgaagcatgtttatatatattttttttcaacggaatataaatccaaatattaaatttggtggctttagaatagtttataataattacatgcacatataaatttccacaattttgcatatctatttatttatttttttaaaatttttttaatcattttttaatattaattatctttcaaaaattttaaatataaagatttttaatttaaagatttaaatcgatttcaaaaataaatgaagaaataatatataaaaaataaaaaattattcgaattaactaaatttaacaaatattaatttaaaatcttacgatatataatttgaattcaataacaatgactacaagtgagatacggtgataacaccagctttaaatgtaatagtaattataagtcaattacagtaacaacaacggttttaaaatcaaatgaaagtattatatagatttattttattatttttttcctatagatctctattttgtgtgagaattctgttctaatattcttttttcactataactttaaagaaatataattttgtgctttttttgttgataagaaatagtacgataattatatatatatttatatatgaaacacttcttaatgagtattactcattgatcggtactaaataaatttaactataantattaattttaaaaatattaaatcattagattttgatttgacgacaaataataatagagaaatttgaatttctatgtttaatttagttacttaattaaaaatatatcaaaaagtacctctttttacactatataatatatataaaatatttaagtcaaactcatctttttttatcttttttttttgtgaaagaatttattttattattttttttttcaaccgatggaataacctcagtccatataatgtaaaaatgagagaattttctaagtaaatataaaaattaagcataaaaactcaaattttcctaatattacctatgaatgggtaatacccattaagagtgcacccatatatatatttctataaactcctctgtagatttatcttttttttttaatacttgattttttattataacctttaagaatgctgataaattaatatattgtaaaagaaataatatatagactaattatgatttttgccttttgaaatttgacttgtaccaaatcatgtctcatgaactttccaggtcgttaaaaattcctcctgannnattgagattgttgtatttaaggatttgtaactaatttcattcaattttggtaatgtgtcgattatccttatactaaattgtaccccttgaactttgatatctactaaatcatgcactggaacattaacatgtaacaaattatgctcctaaattttcattcacgtcagattttttttagtaaaattagacaaaagttcttaaatccaacgatttcaatagtttgaggagactttttatcgactttaaaagttcacgagccatgatttggtacatatcaaagttcagagagcaaaaatctaaactagcctaatatataattctttataaaattttaaaagtaagaaaaaaaaattaataaggattacaatgaagtgatgatatgttgatgtgtttcacttattatttattattgaattttcattaatattattagtaaaaaaattcaaagaaccgcttgcgaagcgcgacatgtttcctagtatatatataaaggagaagtattaggcggtgacgtgacagtctaaaattacttgtaagtattaaatgattaattaatttaaaatattaatctataaattactctacgttattttcttgaaatcactttaaatatatattttattaggtttattaggtttataagtattaaatgattaagtaatttaaaatattaatctataaattactataggttattttcttgaaatcactttaaatacatatttttaatattctatatatttttttttattaattctcttatttttttaattattctaattaaaaaaatcgtatacactcatttgtttttttttaaaaaaaaataagtcgtatacactcatttttttttaaaacggtagacatgctaatacaactaacaataaacatataactttctctctttttatttaatattattatatttttttaaaattatttaatattattttattgctcaattaatatttatatataatttaaaaattaataaaataaactattcacatatctcttaaaaatatctctaactaaacctaataaaaatctcataaaatttttctaaaaaatatcctaagtgaaatataatagtaatttttctaaaaaatatgaaatataatagtgattacaagtgaaatacggtaatgacaacaatgactttgaatataatgatgactataagagatgagatatgatgataacggttttaaatgtaaatatcgactgcaagacgatgattacatcaattttaaaatatatgattttttttttataagatttctattttatttaaggatttttttttaaatttttactctctttttctctatataacaattgaaaatatatcttttttcatttttttttattagataagaaattgtatgcttgctttttttttacaatatttattaatttgtcttaattaaaaaagtgaaagtttatattattaaaaaaatatatataaaatatcaaaatttaaaatttaatatttattactaaataaaatatacaactgcacgtgaagcgaattaaacagtattaaaaaagtagtcattttaagtggaaaaaaataaaataacaaataacattaattaaaaatttatactcaacttaaatatattaataattaaataatatatatgaaaaaattaaattctaataataaaaattataatttacacaaaattatcaagttgaaaaaaatttataagaagacgccagcataaagaccctatggccgtcgtcgccaaaactgaagctgtaagtccaaaaataaaaaaaaaaactgcctctataattttgcgagcacttttattttagattatatacatgcaaaatataccaaaaactacagaaaaaagtccttcgctggtgactttgccagaaacgacattataatagacggcatacgacacgagcaataattaatctatgcacataaaatttgtgccaatacattgcacagtcaaatcttctatatgttattaggatttagacagaggaaaattgatttgattttattcaatttgagaattaatgaaatgggatacaatgacctactatatatagcagtaaaataaaagggttgtttggtaaaacaacatgaataacaaagagtaactaacatccttaacagtcctaactcactaactaatcttgaatttaatagtccccctcaagatgagctgtagaagttggttaagttcatcttggatacaagctggtggaactgagatggtagtagtggcttggtaaggatgtcagcaatatttgattttgaagagacatgattcattttgatggtgccattgttgatcttttcccgaatgagatgacagtcgatttccacatgtttggtgcgctcatggtagacaggattttcagagatatgtattgctgcagcattgtcacaaaacagggtagatggtagtttgttgtggattccaaagtcatgaagaatggagtgaagccaagtaatttcacaagcagcgtttgccatggatcgatattctgcttcagctgatgatcgtgatacagtaggctgctttttagatttccatgatatgagtgatttgccaaggaaaacacaatatcctgaaattgaacgtctagtgtcaatgcaggcagcccaatcagcatcagcgaatgcttgtaaatgaataggttcgggagtggaagcatgaaagaagagtccttgaccaggagtgctttttaagtactgaagaattctggtagctgcatgaaggtgaggttcccttggattttgatattggcttaatttgttgactgaaaaagatatgtctggccgtgtaatagtgaggtagataagtttgccaattagacttcggtattgtgtgggattggtaagcaatttgccagtttcattattgagtttgatgttggtctccataggagtggaaactggtttgatagcaagacagccagcttcttgtaataattgaagtgtgaagggtc

SEQ ID NO: 22766 - DNA, 3948 bp, Cannabis sativa
  modified_base (2587)..(2590): a, c, t, g, unknown or other
tcatagagaaaaaactccagtgtccttttcgatttttcttttatctgtcgcatatccacattatctctcttatattttcttcaagtttctaccactatttttttgaaattgagatcgcgttacataccaagactcttggtatcggaggttcccagtgaagaatatcatcaaggttaccttttattccaaaagtcagtaagcatcaacacttttttatttatggaattatttttgtgtttttattttataagttttttttatatggttttattatagttttatttgaactaagtagatattgagattgcttcatacttattattatgaatttagtttcaaattttacaaaatctaacgacatttatttagaaaaaatgtcttcagattctaaatgtgaaaacccataattttgctcactataggcactttatagatgagatagttgaggataagtatcattatttacgagaagcagcttggcctaagttacccgacttgattgagtttcccaaagccaaattattatttttaccttctgtcactgttgcttttttgccatgtgatttagatattcagatcatgtctcctcctaaatctcgtaaatctaagataccccaaaaccctttagtgaagtttgagatttcattcagtccaaggtcacttttattgcctcatatgttggtccctgatggtcactgtgcgacatcaagtaagggaatagatttgtaagttgatacgtacaacctaacgagaaaggttactaccattctcattgttttaatggggatgcaaagtataacacaagcgattcttctaagatcgaggcttggagtgtagaacacatctgagttagagttgtccttcccttgaaggattacttaaaaaaataatgcaattgctcattccatcccgaatggatataggatattagccttgttatcctaaaaaaatgaaggatgatgtggcattaatttttgtcctagatatgggagaggtcacatcacctcatcacaattttaaaaaccttggccaagcctcattagttcatcacatcaccttgacattcttccttgtgcatccacttggtacaacatcaaaggcatcgtcttagcccaagccgagatgacaaccccaacatgctacttcggcccaaacttagatgacaactccaacatatcatctcgtcattagttgggaatatcctcactaagaaccatcccggagctcaccaacaagtattatctctcggtcctagctgagatgctccttaccttgacaggtgcttctcacgactcattaccatcatgatcttagcatgtgctctttatcaacatacttgtgctccttgtgacaaaaattataagctagcacgtgtggatcaaagatatcttcagcatttattattttttagatatttattttgaaatatgattttgttatcattttgtattttaaacctaacttgactatagtttgggaaaggtgcgtcttgggttaagagattttaaaccttaaaagagtcctagatgaaaccctatataaaaggtgatatcaatcgtaaaggactccaactcattctcacaaactcacgttctctcattctaaataactcacttgaggacttaattctttgagaacataattttggagaactatcctcaagcattgagaccaatatcaagtggattagcctattaccgccgaaagggggtgaaccactataaaatcctcatgttcatctttgttaaattactttttggtaaacgagattactttgattgataaatacttgtgttcatcttgcttgtttatcttcttagatctgtttacaaaaaatctcgtcaacaagcctctttgaggtccctataccacatgattggatgggaagggcccgatccatacaaattacatgcatatatacattgaaagcgactcgagtgaggaaaaattactctgtgagattaatagaaaaaatatcattacataaaaactttaacacgcattcaataacatttggacaatatccattattcacaataaattattacaattactttctttttatttacgatcaatcaatatcattactgtttttgaaaattaatagaaacgatagaaatgaaattgttaataataatataagataagaaggaaatgtgagagaaatgcatgatgaagatatattcttcttattaaaagaaacaaatgaagaatggaaagaaaaaaaaatgaaatatattgagttgtacaatatatagactgaatatataacaatctataatgagagaaacaaacaatttttcatagagtaaacccaccagaggaggttggtacaaatagtaaaacaatggaactcaatggccctctctaaatggtcaacttggctaaatttgaaagagaaatgttaagatatcaagcaatataagaattgtggtgcattttaatatcggtatagtgttaaacaaattaagatataaaataacatatgctcaatctaaaatgttcaagaagatactagttggaattaaggtgtgaattaatgtttgataattaaaacttaaccccaccaataataataataataatnnnnataataataataaaataataaatggtattctccaacctcatcatttcatgtttctgtcatattgtaccatctcataaaggcctttcgtggtttaggtgtattggcatttcgcattcccttcgtattgcctatttattgtccaggaatatgtatagtagatagatcgtaccaactaggttcaaataaatacacaaaaatatataattgcaacattttattttattttttaaaaaaaaagagtagtaatatttacacatttttttggaggtacaaaacaaaaatccaagccaaagccagagtagtcgcttgacccattatcagtattgaatattgattatgcaaataaaaaaggtaagttacactcttgccaaagtatatataggaaaatcttcccctcaaaaaaatgaaaacaaacagaaacacctttctctacctagtaaacaaaaatatcatgtaaatagtagtaataagtttcaatgtttcattactctaccaactacactaacagctaaattacagacaaacctaattgtatttagtcccaaacagtttacttagaggttttgttttgcctaccaaaagaggtatttttactaatttgtataattaccacacgtatttataaagttgctaagctgtctttgcataaaatatttctttttaaggccaagcgtcaaaggatgtaatatatgttccaaataatttaaccatatatacattcccatattttagttttactatatttaaaaaaaccaatctagtcttcgttgaacaatgataaaaatataatgtgtccctttttgcttgggaaaaatatacaataaataaaaagaaataaagaacaaaaagaaaacaaaataccataattgcatgcaaatatggcatacatgatcgaaaaaacagtcaagaaaaaaaaaaagaaaaatattgagtggcccacgcgaatcaatgtgtgcctaattttgttactttgtttagaatacgtacaaactttttccgtagcataggtttaaaaaatacataacgatacaagttccccataaaagttcaattttaatatgctcaaaagaaaatatagtcaattgagtttctcttctcaaacaaagcgtcatattggagaaggaataaaaaagaagaggaaaagattaatccaaagaaaaaagttaaaatagtaaaatgactatttctattagaaaaatgatagagtgcaactggcaacatcatattatattattaatacaatttatattcaatatttatatattaattttgtatattttataaaaaaaaaatggttaactacttctaaaatatcacatcatagaggtatgttaaacacttgtgcttatttaataacc

SEQ ID NO: 22767 - DNA, 2048 bp, Cannabis sativa
aactgtgtagtcccatacctacacagtctcagaatcatccacttgaccttctccaggaaatgtaggattgtacaacttactcgatattttcccttacagattacgggactactcactgtcacagagggaatgattgaaaaagattcttgttcatcataaagttgtaaaggcactcaagccgaaggaggaattgagttagaaattgaataaggaagagatcgaggacatgaaaaagatggcttactatgccattataatgtacctgtcaaatatagtgagaagaaaagttcaaggattgaagacagcgagagagttatgggttaaactcgaggagatctacatgaaccctctttactaacaagattaatttattggaatcattatatggctttaaaatgatttcaaacctgtctttagatgataatcttgatgtttttaatcaaaatataattttttttgaagaattaatcaaaatataattagtttagctaagttgaaatatattgtagatgaagaaagtcaagtagtgatcatcctttgatatgtaccaactacataccaagaactgaaagcagtgatcaagtatggaagagacactcttacacttgatgatgttcttggagctctcaatacaaaggaataagaactgaacaaagagaaggacaagatgaaagatgagctgtttatggctataggaagagataactcatggggaggagatccaaattgaagggaccattccagggggcatcgcatatctcaattgagaaaaataccacatggagaggaagtgttatttctgtggcaagattgatcgcattagaagattctgcaatgaattcaagaacaagcaaaaagaagagaaagaccaaaagcatgatctatgtcaattgcagaagatacaaaccaatgctctttagatggtgacctgtagatgatttctgattaaagaatcacaagagaatggattcttgattctggttgcacattctacatatgtctaaccattaaaaatttcattgattatcaaaaatttgatcgtggcacttttctgatgggtaattccaattattgtagggtcattagcataggccaggtggcaatcaagcactttgttggcataattaggatgctgaacaatatcaggcacataccagatttgaagaggaattaggtgtactagaagatgaaggcatcaattatagatcaacaaatggtcacatgaagatctcaaaagggccagttaatgtgatgaaaggggaaaagagaaatggattatacatcctgcaagctagatgagaccattttgtcctttgaagctgatactgtcaagcaccaagaatcaaggtgtggcacaagagaatggggcacatgagtgaataaggcatcaaagaattgaacaaacaaagtttgttgggaaaatttaaatcaagttcactcccattctgtgaagcctgcatattacggaagcactacagactaaaattcaacactgtaatacatgtgtctaaaagatctttggaatatgtacatgctaacttgtggggatctcacaaagttgcaactcactcaagtaaacgctaattcttgtccatagtagataattttagtatacatgtttgagtttacttgcttaaaacaaagaaagaatttttgctaagatttactgaatgcaaaactaaagttgagaacaaatatgatagaaaattgaaagtaatgagaactaacaatggcttgggatttgttaatactgaattcaatattgtgttatgagtatggcactgttagacacagaactgtgaagcacacacacctcagcagaatggtgttgctgtgagattgaataggactttttcaaacaaagtaatttatggattggattagatctaaagtatggtatttgtacttagtgcggaacagatacacccctagttttttttttttttttttttatatatccatttttttttgaacaagtagtttgaatacatattttgagttcacacatgtactctattaaaaaataatgatgtgagcaagttagccga

SEQ ID NO: 22768 - DNA, 1634 bp, Cannabis sativa
acattaacaatgtgagactctttatccgaaaagaaccaccaaaaattcaaagtgaatgagttgtccgagttggtgaaccaaaaattgctacttaaaaagatgttagagcgtcccacattgtttatgtgtgaaaagataatagaaatatataaaattcacgagctactcctctcattgccaattggctatgagtggattagcctatcttcttatatatagctcaatatttttacatttaatccacgtacgacaatgtttgtcgaatacactagattttctattccatctcctttgacattatttgattttgatgattgtgttattgctagtttctcagtttgttcagttattaaaaattgtaactaagtatctatatctcagaaagttattccttttttttttatcccatctactttcaacttgaaagaagaaaacactttagaggtgagattgggaacttttgtattggtaattactttcttagttggcttgtgattgactttactattgttgaagttagtggatttagctactgtgtaaaagtttgctgtttttgtttgttttgttttgaaaccattgtttgctactgaggttatctatactttgtctgctttagtctatttcaatctaaacttagtggtgatcttttgctgctgtgctaccatggacggtttttcatgttttgatagttattaaagctttaattagatgataaattgcagccattgcattgctgatcttgtgagttgtaatagtttgacatagcttataagaaaatcacattactcatcagagactactcttacaaaagatttatcttcattgaaggtacctatggtaactacagaatctggtttgcagtacaaggacatcaaagttggtaggggtcctagtccgccggttggttttcaggtgtgttaaatggctttatgaaaccttagaagtccttttactactcatacactactttgtctcaaattttgagaataatattttctttgttgtgaacctttttgcctgcacatttttcttggttgccattgtcattgactctcttaacttcaggtggcagctaattatgtagccatggttccatctggacaaatatttgataggtaataaaaattaagcacatgaaatcatatgccccttttgctgaatttgttttcactaaaactggtttgtgttcattggcagctctcttgagaagggtcaggtttatatttttcgagttggctctggtcaggtatgacagataaaggaatatgatttatcggaatcatcaatgtaaccaaaaatcaaaatagtaatcctattatttgctaacataaactagtaaatcaggtgattaagggacttgatgaaggcctgctgagtatgaaagcaggaggaaagcgacgactctacattccgggatcagtaagaccgttgacttattatttaggctaattagaatttttattctgaattttgacatgtaccaaatcgtacacctgaactttgacatgtactaaatcgcacctttaaactttcattcacgttaggggtccgtttataaaattgggcggaagtctttggatctaacaatctcaatagttcaaagagaacttttagccattttactcagcatgtga

SEQ ID NO: 22769 - DNA, 8703 bp, Cannabis sativa
taagatcctagtaaaataaattccaacagagattacattgaattagagtcttctttagggcacaaagtccaacatatgctggcgtggagactttgcaaaaagagtagttggttaagttagttatttctaactagcttaatctcattttctagcagccaccgactttaagatcttgatcctaagcctataaataccaccttgactcaacatttaaagacatgattaagttacgagtttgagtactctgttcaaatgagattgagaggtagagagagaaaaaaattgagtgatacagagagaggtaaagagtaaagagagagattggatttgggttttttgtaagaagaatcttctggagatgaaaaaaaaaaatgggtgaaagtgtgagagttgaaacactttgtgagaactcattagagaatctcgtctcgactgtattgtacatattcttgttcaatcaataaagaaggattacagtggtgttccagaactagagtagaatcataggtcgcatcgatctatcagacttgaatcagtttatatcttggtgttgatatttttattttctgtactcagtgttttttggttttaaccctctgtttgctcctgtttcttatttgattattgttcttgtttgttaatctcttcattgctaattgtttaattgtttaaagttttcattgatttgattctgtaccattagtcttaatttttccacatggttatttttattggttatctgatgagtaagcttagtttttgtttctttcttatgttttcaatttcacttggaaaaggaaaacaacattggggatatgaaattaatcccatgaaaacaagtttgtaatttaaagagatctgaatatgttctgccattatattatcactttgtcagtttaaagagtatgagtcatgtgaatataataaaaaagtagttattgacaaaatctatatggttgaatggtggatgaatattgtttactgtatgataattaaaatacttattgcttagcatttacgcaagtaaacatcataaataagtaatatattcatcaaagaaatgaaaagtaaagaaccaaattcaataggagaaataagtataatataatatttggaaagcctaaacaatatctgaatttagtgtcaacaaaaatcaagtaaatcccatgtgatgctagggaatggttgttggtggcagcggcaaagaagacggtggcggcggcagtggctgttgttgttgctgtggtggaggaggggtctgtaagagctttgggggattacgtttaggagctggtggtggagaacggtcacctactttatgtactaccacactcaatgatggagttggatgatgagcataatgggagactaaaacaagtccatgaatcctacctccatagcaagagcttgaatggaatactaagccttggatcaataccactaaactaaataagaatgcagatctaatcctcattaattttatagatatacaaaaacaatcttcttaatatgacttttaattttatttttgggatacttcaattagagctctgtagctttttatagttgtcttctaagttgaatattgtcaaaagtctttacttaatgcaaaacgggtccaatctattaggcggacgcggcatgcaatgttagattgagtgtttattaacaatgtttaaatatttcaatcttatgtcattttaatcttggcaaactttattttaaatgattaaaaatacagtacttaaatcttttttattgtttattaactatattttaaggtttatttaaaaaaaaatgattaaaaattctaagtagtatatgataaattagaattactaaaaaaaaattatcatactactattaagatgacatttggttagtagttaaagaaaatatattttttttttattttattttaaagtattggaatctcattccaatagaataattttttcattattttaatagaatgactattctattttaaaataaaaggaaagatcattccaatacaaaacaaaaagaaaaattaataattcttttatacactataaatcttatttcatttcattcttatttctattctcattcacgtttacatttttatttttatgtttttattacttcaaccaaatttcacttcagtaaaatttaatatagattatcaaatttcaagacactttctaaacgtgttagacatcaaaagtacataataactatggtatcttaaattcttctatgtccatacaagttttttaaaaatatatatatatatataatattacattttacatcttgagtatataaaaataaataatcactattttgaaactattaacaagaaaataatataaaaagtaacactagctagcttttattttgttttttcaaaaaaacaaaaataatctgaatatatataggatcatagatgatgatattatttgtgaggagatgagaatatatgaaaattgtgtccttcaaatgagtaaatttaaagaaaatattattaaaaaaatgactaaaaaattaatgacactagtccacatggattaaaaaaactcacatgtagaataacacatcataaaatattatggtgtgtattagtaatactcaaaaaatttaagttctaatatactaattctcattaccaaaacaaaaagatagcaacctataataatagtttatttaaattagtagtttttttttttagtaaaaaactgttattattgattaagagagccttcaataacaacagatttaaattagtagtttaaagtatattttttaaacaattaaatatttccacatataacctatactttagaaaaaaaaaatcaattttacacttcaaaagtaatttttttcacatttttaaagaaatccatatataacaaccatggagcaacataaattcacatagcaatccatatagaaaccattgcaacaattcaacctgtaaatttaaaaaaaaataaataaataaaaaatagtatataagataattccctttaaaaaatcactaacaacttttctatatatatatacactacaagataaattttatcaacagtgacagttttttttgtctttttttttcaaattaattaaaaggataaaaatggcatgttgaacttacactctttcttagttacaaggcactccaagtactggcgtaggagttgaatgattgaacaagtttcaataaactaatagcctcaaaagtcaaaagtcatttgattgttcaatgttcatacgggagtgtggatgaaatattataaacattcaaatcttgtcaccttttaagaaaggtattaaaattgtaaataattttcagaccgaaacaaaaaaaaaaaaaaaaacaaggtcaatcagagaagtgaatagaataatcattaagacgataattgccaaggaaaataatgtttcactgaacttcactccaaagggtacagagattatatatagatcacacttattagtattacaagatttgaagcaactattcttgataactaattaaagtacaacaaagctctaaaacaaattgccatgaaagaagtaaatgttaaatcaagcatgaagattcatccttgaatattcttctgccatgaaagttgaataacttactgatattggtttatttacagagttacttaatgcagagaagatatgggaagactcatggtggcttaagccctctcagtgcagcagcaaaaatctacaaattcattaaaaccttgtataagaaattcataataactaacctcgagcaattgaaaatttaagtatttgagtttgacacttctttttcacatcactttcaagcatttgatcaaattaactacaaaactttccaactagcaggtctttttagtataaaataggccaaagtttgtttcatttccacgagatatattataatttcatgccaaatgctgacagtttcaatctgcgtatgttcacccataacaactactgaatgaaaaaagactagatttgtgattgatattcgtggtaagctaataaaattactaaaaccctctatagaactgaccacatatatctctcttatttaccttagaaggtgctccagagcgaggtctggaatcaggagaaggttgaaagtcactactgcttccctcgagcataatctgacttgttttcttttcattatctgaagtagattctccatcaaggttcattgtgtgtgttccttcttctttttcttcagatgatctgtttttcatctgttttgtcatgtctccgttgggtgtgatattctgtgtggttggggatgtttgatttttctttgtgaactgtgtagccgcagctcgtgccccagctattgcagcatcaagatttaatgacttctgcacttcagctccttttgatctagggtagtgtgcagcaatagagccaggtttcaaggaaaatcgatcccttggatccggaataggaaattttactggtaatggacattcaactggtgtaagacctctaattgcagcctcgtatatctagaataagttttcaagttagcccactaaaataattagatggaaaaaagaatcatatgagatgcatatacagagtatgttttgcataacatgcacctttttctccaaattatagacgccttgataaccgcgcatttcaaatggaattaacagtctctgcatgaaccaaaattatagaagtaaaaggcctactcgcagcatacactattcatctgaaaagaaaaaatacaatagcgcgataaatcacctgtggctgctcacaaagccaacacatatcagtttgtgcttctagtctcacctgcattgaagataaaatatcagccaacagtactgagaaacaatgctttgtcaaaacatgaaaaaactatatctcaccccttcaggtaccaactcccagccacttaattcttcgcgctcaagacatccaaccacttcaacacaacctgtattttaaaagaaaccacacataactggaagaaaaagaaaaaccttccaaactagcatagttaattaagaataggttttttgcccccactctcaaatcgtgaccttaaattaatttttcccgttgttaaaaatttccctcaaactattccttgactattacgtctatcaaatcatgtcccttggcaaattaaggaaattgtcatatgcaactttttcacaccaccaatatagagttgggtccagaattattataaaattgtaaacttgtgccccgaatttcagacaaagaggcacgatttagtagtggtaatagtatggaggagtttttaataatgtgaaaaaattctaggagcacgatttgaaagccatataatttggagggtaataatcctattttccaaaatgtaaatttcagtcgttcatcaaattcccttttgggatctttggagatctcactattatttaagaggtgccttatcccataacagaaatccatagaacacttcattgttctgaaaaccaaaaacatagtctataacaattgaactgtaagaacatgcctgatcagaaccaaagctatagctatgacactattttctgcatttctaaagtagcctaaaaaatactggaacaatataaacaagctaaagattagaaaaagcatcattgtacaatttgccaaaactggttattgccactagtagggaaaagtggaaacattcaatcgagaaaccatcagagatgtacaaacattacatataactgttcaaaatgtagagtacctataagccttgaaacaggataatgttcaggaaattttagatcttcaactccattcagtgcataaatttccctgtaaaattgctccatagctttgatagttgcttcatcaggaactttactggcagcatgaatccataatcgaccttcaaatacataataaaattcatccattaaatctctaacaccaacaatcacttgaatccatcaaaaattattaattcaaagaaacataatcaaacaggtgagacaaaacaattcatacgcggaaagtaaacaaaagataaacacactccacgctaaacccgagttgatcaagtcactttgatatgcattcagtttagctcaattaaagcaacaaacaagtcccaaaagcaaaaaaacggaaaagggtgtaaagggttttgatagaaaaataaatttagaaggatggataggtttgggtacctctaattggagcaggccatgaccgaccctcaatgcgctttattccataaacaagcaaagaagcccaaggttgatgcatagtcaaacatgggtttgtatagttcccatgaaaatttcttcctcttcctcctcctctcatctcacaaaacacgattccaacaaggcgttccccgtcgattaatttcagttaccgactcacccaggaataacaaataactgctaactagcttagaaattattagatggaaatagctaactgatgatctttacttatgagcgattaaaagattataaccttgccagaatcctattccttaatcctaattcccttggtattagaactttgtcctacaataattatttaagtttttttatcctatttttgaaattattttttctcctacatatatacctcacattctctttctctaacttttttttacatcatttaaatatgggggtaaaagtggcaacaagtaaaatcaatgtaatatcaatgtaattctacactattataaaaggtaaaagtggcaacaaactatcacactattatgtctcttttataatagtaagatatatatattttaaataaaaaatgtaactttattaaatcaattcttgaacaattacatcaaaaatattactcggaataaaagtagccgagtaactacaatcagcatataaccatgagactcgagctaaatcatgagcaacacgattaataaatcgtttaacaaaacgtaaactaacattgttcaaaccaaaaaaattgtttcttacactccttaatgcaactgccaaacggagagtacgtggtcactaagcttcaaaaagcttgaacattgataaggctatccatttcaacggtgacactggagacattcgacttctttatccagctaagaacctccttcactcatagagcctcaggaagacctgggttgacacaaccaagcgaagaaccagtctgtgtctgcaggacatagcctattgcgtcacgaagcacccaaccatacccaaatttgtttttatctgcaactgttaccgcatccatattgatcttgtaattatccattgttggagcacactattgttcatccccttcccctacctaaactgagaaaggagagggtgaaaaagtattttcttgagcaaacaaccattgttcaagatcacattttgcaaaggcaacaatattctagaccgatttatttatcccattccaaactttgttatttctatcttgccaaattgcccaacagaacatggccctcacttgtttgtccttcttgctccaacgttgaaactagtttaaaaaccaatcaccaaagaaagaatcaccaatgctcccaccatacaaatctgcaacatgccaacaggcagtggaaaacttgcaggaaacaagacaatgagcaattgactcaagctctcaggtacatctggggcatgaggaagaaatcttaatatgtctttgaatgagttgcagtcgagttgttaaaaaattggacaaagctctccatatttcctttaccttcggagggatcctcaaattccacaactctatccaaaaactagaattactagaaggagcatgagaaatcttcagttcttggataaagttataagcatatttgagagagtaattaccttaaattttcttaccccaataccaagttccagccaaatttaaagaggatataggaatatttagaattaggtctctgtctctattcttgaacaaatttgatatgacctcaagatcccaacatttgtcatccacaaccattaaacatctcactttttgatcacataagcttggatgggaagatgtaatatagggattttcaatatcaggcacccaaggatctttaataatagagatatcctcacctgatccaacaagcaaacaaccacctttgataatcgcatctttggcttcgagaatacttctccaaatatagctaggattactacccaattcaacttcaataaatgatccacaaggatagtatctagctttgaacagctgttaggctatttctagcctatattttggatcaattttatgttcgcttttcattgttttaggacggaattatgcttattttctatgttttcaggttcctcatagtcatggaggcctcgggatgcaaaagtacaataaacgacaagcgaagccacgaaaaatgccaaatttcagcttgacgcacttctggccgtggctagatcattgtcgtcgcggccataactcgagaacagagaaggggatttttgatgtcccagtcgccgcagcgagatacaccttcgtcgcggccataaagtcagagcagaggcgttgttttatgaagcccatctggctgcggcgaggaatcttgtggccgcggcgagcgcccgtacgagcaggggaaatttcgtccgacgaaccctaaaaattagttataaatagaaaactgcgattgcaaaattaggggaagcgattgggagacctaaaacacagtagaaagcggca

SEQ ID NO: 22770 - DNA, 1715 bp, Cannabis sativa
atatatctctgaagtagcaaagtacaccctaacctcagaagaagctctaccaatgggcctgtggaccaacaaaaatcaatcattactatgaactacggataggtattaaaaaagcacacagtacaacatcaatcaggtttctacatacaattgtctactctttcacccaacctaccttgtcatcaaaaccttagaagcatccatcaaacctaactgatttgcaacagcatccaggtaatatcctgatgaagaaacatcaaggtttacggtgtaagctgccttctcatttgaacatggtatatgtacggctccaaccgagcaacttcctggagagacagattgttgcatatctaaatccataatttcaagagggtatggatctttcctcttgacccaaagctgttcgtcagaagtatcaacgatctcagataatccagcaacagccttcttaacataagatatgcccatatatggatgtaactccaccttaggatctattgacctacttagatttgagacttttggatcaatcaaagcaatgactgaaacagggacacgaccgtagagatcaccttctctctgcaaaactgctctgaggtgaccacttagaggatgaagagtagttaggaactgaaacagtgacacataaatatcaacaacagcaaaagaaagtagaatacaaattaatctcaatgtcgaaaagaaaaacaaaaacaaaaaactcacaacagcaagtaatcgagagccaactgaggtcaattgaatagaacataacatagaagtcatcctctcttcacataacataatgttcttgttcagttttgaataaaaatttcttttgttcaaaaaaaaagagagaagaaaagaaaagacatacaaaatacagcactaacttacccaaatgaaaatgaaattcaaagcaaaaacgaaaaatacagtgattatcaaatatggagaaaaaattaatcaaaccagtcatatgataattgaaaatgtaacatatataacattatcgaaaagtttcaatgaaactaataagaatcaaaacaaagtcaattctcgagcaaagaattacaagcatcaataagttcacaaaaaccaacctcatttgagaacgaaaacttgatacgattaactaaagcgttccatggatcttcttcagcaatgttgtaagttaaaggatcaatacccagctgcaaccaaaaaacaactgttaaacataaatattttgtagtatctaaacctcctgatccatgtatcaaacagtaattacagataaacatttataatgaaattaaggacagggtaatatgttaaagatagaaataaaaaaggaaaccttttgtaaggccaattcagaggctgcttgctcagcttccttcttcttcttaaatgttcctgaccttacagaaatctcagggagctgcaatgagcaacggtaaaggcaaggacctctctgtataatagccaatcccgggcattcattttgattagattcctgtacttcctcaaccttatagcaggcatcattaccaaacttctgatatataatagccttaggtgtgaggacactctttctcactacaacatctgtagattctccattttccatagctaacctctaggagtctgattatatgaattggtacaacaaaaatattagcaaaaaccttgttgagtaccacacattgttaatttcaacattaatctagcta

SEQ ID NO: 22771 - DNA, 6252 bp, Cannabis sativa
atggaatgaaaattgttttctttttccattctattttattttattacctccaaccaaacgccaccgtaatattacatgtaatgcattctgatagaacataattaaaaatatttatgaaaaaaaataagaaggtacaacatacataattgtatttgtacatgatgtataaagcaataaagacaatttcttgttaatgcaaattgttcgattgaggatcaattaactcatctttatagagtaaatggtaacattattgatgaagaggatgtctcttgaccatgattattattacacttctcagttgacatagttagggtcaaaattttcaaataaaatcaacttttcataagagaaataagtttccaaaataagaaaagaaacagttaaaaagaaaactttcctttgaaagaaaagaccaataaagacacgaaatcaatgtaggcaaataaaattaattgcataaagaaattacagtaaaaaatattttgacacttaaattgtcaaaaaatgactttacaatatccccatttgataccttagataatcaaaatatttttaactaaaatgtacctacaagacaaagttagccacaccatacaatcaaactctccttgagaaacacatcattaaactaaaataaaatgctaattttaaaccaaagttcaacacacattttgacaactaaattgccaaaaaaatgaatgtacaatctttttctttagcactttaaataattaaaatatttttaactaagatgtacctgcaaaacaaggttagccacaccatacaatgaaactccccatgagaaacacatcattcaaccaaaatagaactctaactttaaaccaaaatttaacacaaataccaacctcagctccccctaaacaagggttcggagttgagaatataaaatacgaatttttaacctttgtaataagatgattcttgtagaacataataaacatttatgaaaaaaaaaaattaagaaggtacaacatagtataacataattgtatttatacatatataaagcaataaaaacaacttcttgtagatgtaaattgttcgattgaggatcaattaactcatctttatagagtgaatggtaacattgttgatgaagaggatgtctcttgaccatgatcatcattgggcttctcacttaacatagttagagatggtttgggaggcatttcaagagattcaacttctgcttcgagcatttctatgacttcgttcattgtaggacgatcaattggcttcaattgtatgcaccataatgcaactataatcatcttttttgtgatttttaaatccatcgtatctatatctatatctgctgtttggtttataaattttccttctcttaattgatcatgtacccacgaaggaaaataaatttgactcgaattttcagcaattgcattcacattttttcttctacttgccatttccattaataacattccaaaactataaacatcggctttgttagaaatccttccaatatttttgtaaaattgttccggagctatatatcccaaggttcctcttgctgtagtcaaggatattgtgttattttccaatgggcataatcttgccaatccaaaatcagatacttttggagtaaaattttcatccaaaagaatattgtgaggtttgatatcaaagtgcaaaatttgcatatgacatccttggtgcaagtattcaattcctcgtgccacaccaagtgcaatttcaaatatttgattgcaacttaaagaggaaaatccttcttgagagaagatatatttttctagtgatccattagccatgaaatcgtatacaatagcatactttgaggagtggacacaaaagccaatcaaatgaactacattaacatgatgtattcttccaattgtagcaatttcattgatgaaatcttgtccatttctttgggatttattcaatttcagtaccttaactgctacaatacgaccacttcgaagctttcctttgaatacagtaccataacccccttcacctaatttgttcttaaaatttttggtcatttttcttatttctctataagaatatcttacgggtgtgatattattatcactgtgaaggaactcttccatgaagttgctgtatgcagaaatgcgacacccaagaatcaagcagcatcacttcactaaacaccacgactctattcagaatcaacgaagatgcgacacccaagaatcaagcaacatcacctaaggtcttttactttctaaccaactctaatggtataatacaattctatacctacggtttttataaaaaaaaaaaccgcctttaaaggtcaattttcaataaacggatatttttacaccctttagcttccctttttataaaatgagttgaaaaaagaagctaaaaactcattttgtagtagtgtgcctttatcacatttggcttccgtccctgaatcatctcatttctgcacttcaagacaacttcgaagagggacgcagcgtgcatcataagaccgtcatcatgtcgattacagagccacataaaaaattctttgaaagagagatatatagctaatacaatggtaatgtagtatatatatatagctaaattcttgtgcttgccctcaaagaaatacataaaaccggtgttaaaatataaaataaagaaaaagattgctcttattgtaatttgaaaacacaaagctaatacaagtcataatcttgctaattttgttttaatatacaaaacacttgaattaatattgatagacaatgaaactttcatatgtagagaacatttttaaactaatatctcatgatactcactccaattcgggtatagattttaactcaattgtttttgttggacctgtagagccgaaaggattcggcggaatggttaggttttcttctccttccaacatttgaaccacaactttcatagaaggacgatctgatggatgccattgaatgcaccatagtcctacaattgctaatttcttagctatgttagcatcttctattatgttaatatgaatgcgtagatcttctcctccttctaaaagattataaatccaatctggataataaacttgactaattttattttcttccatgtcatttgtaatttttttcccaccaaccatttcaagcactaccattccaaaactgtaaacatccgacttgtatgacacatttccaaagtttctagagaaaacctcaggtgcaatgtaccctaacgtccctctagctgtagtcatcgacactatactttgatccttagaacataacttggccaaaccaaaatctgaaatttttggagtgaagttgttgtccaacaaaacattatgaggttttatatcgaaatgaagaattcgttgatcacacccttggtgaagatattcaattcctttggctatacctaaagtaatatgttgcaacttttcccaaccaagaaaatgttcagaatccgaagaagatatgcatcgttgcaatgacccatttggggagaactcgtaaacaagagctcttctagctccatcagcacaatatccaaccaagcgaaccacattgatatggtgaatttgacctattataccaacttcattaataaactcttctccattaccttttgaactatgaagcattttcacagcaactaaaaaatcagcagagagttttcctttgtaaaccgtcccataagctccttcccccaatttttccatgaattgatttgtgatttgcttgatatcagcatatgtatacctgcttggctttagagccttgtaatcctccaaaaaactctctattctcagtttatgctccttttcctctttattagaattgtaagcacgataaactagaacaattactactatcataactgctgtaccaagggtagcccctgtgcaaaaacaaaaatcaaagttataagagaaaaaaaaattctattatcgatcagtcaaataatatatgaggagtgctaataattacaacctcctattataatcttttaatcgattttcacgctcgaaattatatggcagaatatttttttcatagcggtattcgttatagttacagtattatctctgtaaatttttcaaaaattctgaattgtttaccatgtcgaaaacagaattcctgatatttcagtttataatgaactttcaaaaaactttaaacgtattttcggtactataaattattcaaaaaattttataaatctacagaaataatgttttaagcataacgaacacgaaaaaaaattaaaaagaaatattctgacatgtgtttctaagtacggaagttgactaaaaaattgtaataagaggttgaaagtagccctcgtcgtaatatatataccactcaccgacagccacatttttcttcttttcacctgaaacatacaaatacagaatcagcataagacactgtggtctggtctcttaacatatattaggattattgaatgtcttagccactgaaacaaacattcagagaaagcaaaaacgtaaggaagagaaagggaacgagaagaaaagtgtggattcatttcattagagctcgaacagagtttatataatacaagccactaactaaatgggctgaccaatcttatacccttaacaacatataagagatcaaatgaaaaattgtctacagtaccataatcttgcccaaaaattttatgaattagtattaaagaaagagaaatactaaaaggtactagtggtgcaattaagtatcgaatcttatataatttaatgtaatatattttaaagaatatcgctagtgaattataagatgacaggtttattagtaatgatcttataaaaaaaatacaataatattgttacctttgggatgaaaacattcaattaatgggaagtcggtggcattattattgtattttgggcgacacctcttccctcgtgcttcacaatgaccgcagtcgggttcaaaccatttcaaccgcaatttgttgttgtatactctgttggaaagatccccataatcttcatttggaaggggtagagtgttgtactccttagtacaatataagggcaagtcttcaattacagcatattgagattcagaaagcaaaatattaaatccttggccaccaaggcaagggatcatggctttgtaataaagactattactattactactactatctacttcatcgaggatagaacaattgaacaaggtataattagtgagcaaatctttggcgaaaccaaatggtgagattgacgataagtcatggatttttagaagttgtctgtaaatgcaattatttgggtcgtaaacttcaattacttgagctctgtagtcgatatgttttacgaagaatttcaatgatgattttgggaactcaagaactgtgtggttgccactgcaagatagctcgaacccagggtaggcataggttgagtagtagtgatgattttggtgatttttgagtccaaatgggaatctgatgtttgagcttttctcatcacaattagctccaacttctaccaataacgccagcaacaacaacgacaccatgcatgaccaatacatcatttgatcaaattcagtcttttgttaaagttaataattatgtatgataaaatctcaccgtttgtagctatataaggcatattttgtttttacaattaataagcaattccaccacatatatttatttatcttaaattgaagagtattttttttagttaaaagaaacacaacatttgccaaattataaaaaatgtaatataaaccttacaaaccattaccacatgtgggagttccgctttctgaggggttactagttacctgtttttatattatgtattaaaagtatacccaatattaaattagactaatgacaatattatatagttatttgtagttgaataagttaggatacttttatatatttttttcaattaaatatatgagaaagaatttgtagtatgagtgcgaggtacacttatgtattattaatttatttctacctttattatttaatcttaatctatggttctacttctacggtcatatataaagctgggtgatagacccgaagaaactgctgcttgtctgaaaaccacatgctggttaataatgcatttatttttatttgtttttttaaaaaaattctctttgaataaagcaaaataaaatatttcagtcgtctaacaaaataaaaaaataaaatttgtgacaacttttttatcacaacataaattttttgtga

SEQ ID NO: 22772 - DNA, 3062 bp, Cannabis sativa
acaaatctggaaacggaacagaaaatttaggaaagaattttttttcaatttgacaaacccaaaatgcacaagttagagactgtgtttaactcactggcagtataggtcagaaagctctgcattaaaagcttcgttctgcttgctgacaccgtatctgacaacaaaaaattgaacagaaaatgagactataaaaacacaggaatcatagttagctactacaacaatacataacattgcgtgcttgtcacaatcataggaatttcccaaatcaacagtctaaacaatgaccaactcaagcatataaagccctcaaccaaccccatcaatgatcgttatccaaattctacacaacactaacattcatagaactatcacgtaacaaacaattccatcattattattgacttcactgaaattagaaaaaactagtcacaattaaaataaataaaaaaaaaacgcaacgcatatgaaaacttacttcttggcaatcgcctcaatctcctcctttttcacagctttggggtcgtcgctcccggccacataattgtgcaattcaacggcagcaacctcaggaacacacgcgttaagagcataagcagcagctccacccgcagccccgagggccacggccccgcccaaagccgcatttcgagactgaccgaaccggaaccccaacccgtacccagccgcaacagcaccagctactaaaattgccgaagtagctagtctaaccggcggcgacaacttctcaaccaagggttgaatccctgttagctcctttgagcctccgaaaacattgggaggtggcgaggtggcgacggttgattggtcggaggaagaaggggttgccgcactccggggaacggataccttaaaacggcgtcttcgtgaatgggtagtgtcgcgggaggtagttgttcgaatagggatggggttaaggaagggagagcggagaagagaaggaggggaatgagtggaaggaggagtgaggagggaagagatattcatggctcccctgagaagaagggagggaagaagaagaagacgacgtcgtttgagagggttggaatctggatggagttgaattgaatgaaggtccctcccagctggggctaagggaaaaggattatatagggtttaacgaagaagaagataaaaggatagaagcgaaaatgaagaagacaaacacagcacaaggaaggagacaatattattagttactttacattacagtgaatattgctgtatgaagtatggacgggccggtttggtctaaatgagccttttcttaggggtctaaatgggccttcatgggctctattttttcaataaaataataaataaatcaaaacataatttaccaaactactaacattggatagaatctagcctaacaacctctctcaatttattaatataggaataattaaggcatcatttttataaaaaaaaaaaatatataatttatatttaaagaattttttttatatatttttactattttctataaaaacaacactaaaataataagaaaattacataaaaaaataacatctaaataacatcaaaacaaaaataaaaaataatatacggataacaaaaaatcaataacaaattaacaagagtacaacataaaaagactatatcttcggtaaataaaattaaaaaaatcgtaaaaatatttaaaatttcgtaatactgtatttttgtaattattttgttgttattggtatgtatttgtgaaataatcactctattctaagctttctctcattttttattagttttaagctttccccttcaactgaacacgcccctagcttttctttttgatttggaccatgttgttgtctagcacgtaaacggcccatttggcatccaactcactcgctgtccctaatctacaccactgacagacactcactcgctgcacttgcccgaagctccaccaatggctatctcatctctccgacttccattatcaccttggcttacaaaatcctcaactcgtttcttcagaatttattcaattccaacaacacccctaccactgagaccaatttactgttgcttctctacttcttcttctgcgtcctctagcacccaagatacagtaaccgatttgggcaaatgggaacccttacgaaagaagaaagtagttatgcgagttggctacgttggtactgattacagaggttcgtttcatatcatatgaaattatcaattggttcccgatattttcaccaactctaatggtttttcattttgtatataaaattatttccaggcttacaaatgcaacgagacgagcattcattatccagtaagcttattttcatttcgtgagattgatgcattgttcgttattgtcttttttgttgctacgatcgtggtgtattggggggaaagtatggtgtttgtatatgttttttgtattgaccatagtcatataattcattcagcttaagattggtggattggggtctcgctaaacaagcattacaattttgaaatgtagctatagaaaaagaactggaaactgccatttttaaggccggtggtattcgagatagtaattatgggaaccttcagaaaatcgcatgggcaagaagtagcagaacagataaaggagtaattaactcatgaccttcatttttctatctcttttattggagtttttattgtttgtgttcttgcattgtattaattatgtttgtttcactcattgtttaaggtggttttgataatgatctttaattgtttggtgttaatgcaacaggttcactcgttggcaacaacgatatcattgaaactggaaatccctggagatgcatgggagaatgaccctaatggcattgctctagctaatcgcatcaattcgtttcttccttgtaatgtcaaagtttttagtatcttaccttcccagaggtgagagcttaaccctgcttcctcggatttcggaatgtaaaagtagcatgaatgattatccttggtgggctcttctggtgtttgattggagtaataacttgcaatttaggaacaaaaacaaaaagaaaaaagaa

SEQ ID NO: 22773 - DNA, 8057 bp, Cannabis sativa
  modified_base (768)..(769): a, c, t, g, unknown or other
taaatatttaagacattttataaatgttttaaaaaattatgaataatttacgaaatgaaaacaaagttcaatcaatctatttcacatgtgtatacgtataaaataaaagtagcacgtatataagatatagattgtttgaatattcttttcggtgtattaaatatttatgaacttctaaaaaaaattacaaaacgtcttaaataattaaaattgtatactgttatacaaagaaatttaaaagtaaaattatttggatgccaaaaagatattataatgggtttgacaaaaaattcctatcgatataggacacatttttattgatgtattttatgatgatgttttttgcaattatatatagtaaatctttttaatttttcttagaaattttgaatagtttattgtgctcaatcagtattagaatgaactttgattggtatacaaaatttttaaaaatattaaagaggacttactataacactttcatatattgtttttgaacaaaataatatcttaattatctcaattaccaaaggttttgtccctatatattgattctagtagtgtttttggtatgcttttagtaggttttatatgatgatgtatattttataccttattttatcatcgtaaattatttaaaaaattacaggatgcttgcaacataatattactacaaaaaacaattatttttaagagataattttttaattacaacataaattttttgtaactaaatgtaacttttagtcacaacaaaaaattacttgnnactaaaacatagtatttagatataagttgttactaattaatttagttttagtcacaacaagtattgtgactaaaaatacatttagccacagatcttttaacatatgaatattgatttataattagtcacaactttttaatttttagtcataaattttgttgtgactaaaaataaaattttttgtagtgtttttatgaaaatcagagaataccaataaaagttagaagattaaactacatgaactttattagacatgcaatttcatgtatttgttctacatttgttatttagttagattagtgacttaattttctttctctacaattcaaaacatgcacaacagcctcagatctcataaaaaatgtacaagtacaagcaatcctagggccacaaagttcaactcaagcaaaattcattatcgacttaggccagaaagctcaagtgccaataatatcattttcagcaacaagtccttctcttaaaatgtcaagtcaacaaagctcatactttttccaaacagcaacgggtgactcgtctcaagtcatggccattagttctatagtcaaagcttttggatggcgaaaaattgtccccatctatactgccaatgaatatggagaaggaattattccttacttaggtgacgccttaagaacagttaatgctgaaataccttatcgaagtgtcatttcgccatttgccactgacgatcaaatcaaggtcgagctttacaagttagagaccatgcaaacgagggtttttattgtgcacatgtggtacgacctagggtcaagattatttaccatagctaagaagattggaatgttgggacaaggttatgtttggatcataacacaagatttcactaatcttttaaactcattaaattccatggaattgaattcaatggaaggggttttgggaattatgagttttgtgccacaaacaaaagaactcaatagcattaaagccagatggagaaataagttctacaaagatactattaatgatccttcttttcatgctaaactcaatattatgggcatgtgggcttatgattcagtctatgcattagctttagcaatagagagaattagtaatacaaccacattaaatagtaatgtaactattggtccaaaattattagaagctatatcaagtacaaaatttaagggtatagctggaaatttcatattggataataatgggcaattagaaacgtcgacgtttaaaatagtaaatattgtgaacggtggtggaggaagagagatagggttttggacacgaaaagatggcctaataagaaagttattattggagtccaataatgacaaatattcaacttcaaaatcgaatctaggtcttattatatggccaggtgagtcgattttacctccaaaaggttgggagatcccaacaaatgggaagaggctaaaaattggaattcctgttaaaagtggtttcaatgagtttgtaaaagtgatgaactttgattcaagtactaacaaatctgatgccactggcttcaccattgatgtgtttaaggctgcacttaatgttttaccatatgctcttccttacgattttttcccgtttgtcaaacctgatggtacgagtgcaggcacgtatgatgatttggtctatcaagtatttgtcagtgtaagtattttgtgaaaatattattttgactttggtctaatatatttaggtaaggaaaattatttttgttttaattgtagcagcatttcttagtttttctatatggatcaattataattcaatatatagttataattgggagatcttacttattttctgataaattctgaataacttaaaatgctaaaaaaagattcaaacagtaaatgtacagttgattattttgaactttatttttagcattttaaattatcaaagtttttcaaaaatagataggacgtactctagtaatagctataatttataattccataaaataaaatttctctgatactaaaaattacctctatgataagagcaaaactgatggtactcttactaaagaagtttccctatagtatacatgtaactatagtaatgtgtataattaatctttgctattgtactttatagaactatgatgcagtggtggcagacataacaattagagcaaatcggtcgcaatatgtagatttcacattgccatacacagattcaggtgtagtaatggtggttccaatgaaagatcataagaggaaaagtccttggattttcttgaaacctttgacttgggatttatgggttacaacctttggtttcttcctcttcactggtttcgtcgtttgggttttagagcaccaaataaatgaagaatttcgcggaccaccttctcatcaaattggcacaagtttttggttctccttttccaccatggtttttgcacatagtaagtatttccatttattaccattatacatatataggaaaattttaaagtagggcattgttttatctcaatcggtaaggatatgtcatttactttagcatttagagaaaatattatttaaattttaatatatgattaatgtgtgcattgtatttatattatacatttcacttatttttaaaaaatttaaaataatttacattgtcgaaagaaaagtttaaatattcaattggcactagtgcaattgactatttcaaactcaattttcgatacagtaatataaattgaaattatataaaagaaaaaatagatgataacttccttaaataccaaatattttttccgataggaaccaaaatgatacctctactatagttactctatatatggatatatatatatatatagatattattatagtttgattgttttttttttattaaaatataatttatgtacaggggagaatgtggtgagtaacttgggtagattcgtggtgattatatgggtgtttgtggtgttagtattgactcaaagttacacagcaagtttaacatcacttttaactgtggaacaacttgaaccaacaatcactaatttaaaccaagtgttgaagagtggagaaagagttgggtatttaagagagtcctttgtgtatggattgttgagacaaacaggttttccagattcacaaattgtagcttatgattctatcgaacattgtgaccaactcttgtccatggaaaatgcaaaaggtggcattgctgctgttgtggatgaaaccccttatatgaaggtttttcttgcacaatattgctcgaaatataccatgattggccctatattcataactactggctttggttttgtaagtatactcactttctcatcttcattaataaattacgagtaatgattattttagacgatgtgttttgcaaaaggtactaactggactttttgttttgttaaatgacactttagatctttatttttcaaaatgatacttcatagacattatattcataatttctttatttaatcactgttattaattatgttctttccttaattatattaattgctaaatgacgtgtttcattttttttgaaggcgttcccaaaagggtctccacttgtaggtgatatttcaacagctattcttaatgtgacagaaagagacgacatgaagaacattgaaaacaaatggtttgagccgatggacaagagttgtttagactctaaccctaaaatctcatcaaacaggcttagtcttggtagcttttggggcctattcataatagccggagtctcttcattatttgcactcataatctttatcgttatgttccttcataagaacagacaagtcttgttagattctaatgattcgatcgagaaaagaattaaggtttttttaaaaatttttgaccaaaaagacctcaacttccatcattttagaaagagtaatagcaacaacaacaacaacattaatattaatcaacttaacaatgatggatatggtggtacaaacatggtggagttatcaaataataatgctgagtgtccttcgagcccatcagactcaaactcgtcgacagactcaatggtagaacaaaaatcaactatagtgccggccattgatgaacttcttgttcaaattaacgaagatcactagcttacccagaatactagaaaaaataattcaaaatcatattttttatgtatgtgtaaaaattatatttctttttttttactctatgttattggacagacgtatattcaaaaaatcaaaagaaaaagaaaaaagaggtgatacgattattttttttgatgtattgcaacatcaattcctttacatcctaataacactctataaagagcctttggatcaattgatgatggatcagatggtaaaatttaacatataattggatcaaatttggatacgcctcaatacattggatgtggtccgataaacacctctacaactagaacccctacagattcatatccatatgcaatatcaacttctcattggttcttgttcttgttcttcccttgagtgttatctctattcaatttagcctttaatgcttgacattcatcttggaagtgtctatctttcttgcagtaataaaacatctttccagttggtgtttttgaatttgaccttggcttgtacccattcttgagtttcttgaattctttcttttatgttcttccatgaacaaacagaccatcaccacttgattcaggtctttcataaactttctcttgaatttctttcaaatcgaaggctgctttaacctcaaacatagttaatgtatcttttcaataaagtatagtatcgacaaagtgttcatataccttagggagtgaactaagtagaagtattgcttagccttcttctttaattctgacctaaatattattcaggtctagaattaacttgtcgaaatcatatagatgccttcgaagctcattagtttcatccatgttcattgtgtaattaatatcttttcttcaagtggagcttattggccaatgatttctacatgtaaattgatccaagcttgttccataatcccaggacagattcttcatcagcaacttctctaaggacttcatctcctaaacttaaaagaatagcactacgtgttttcacattgatctcttgagaaaccttcttgacatcttcttcttccttagaactagtcaccatgattgcatacgcaagtccttgatgaacaaagaatgctttcatcttaatcctccatatctcaaagtcattaaaacctaaaaaacttgtctttttcatatctggtagtagccattctaaatgagtacttcttgaatcttgatgacttcttgaaacttcaaaacttgactcttgaatcctcgaactagccgtgacgctctgatactatttgtggtgaattaacacctatcaagaatgaatataaaacaagaactgaagtactagaatggatgaatcaaacaatgacaaaagccagaaataaatatggaataaactaaatgaaataaacaagatataatgaggttcatcaccatttttgtggtgactcttaattctcggaaggaactgccctttggccaagctttatttgatcttcactaatagaggaatacagaggagaatacaagagttgagctcatcaacaatggtgtcttgcaccttacaaatcaactcacttgagggagatgtgatcaaacatcctctttaaccctcctcacttagcataaatataattatcatctaaatttctctctagatcgtcacctaaagaagtagtacacgaagccttatataggtaactcaaaataaggggtacccgagttagttataactaaaaaacaaaaactaactcaggagctaactggacaaacttgcaacatctaacaaatctaacaggtcattagaagagactaatagtagcagtaccaccaagttactaaaatcttccacaccaaaagagagtgatatacatttataaagacattaaggtggtgtttggttaggagaaatgaaaatataagaatagaaatgggaacaagttttgaatggaatcaaatttacaatgcataaaaaaattgataaaaaattattaattttttctcatcttacattggaatgatcattctttctattttaaaatggaatagtcattctactaaaatattgaaaaactcattccattggaataacatttcaatacttcagaatgcaaccaaacaaaggaatgaaataaaaataatttctgttctattccgttctattttattacttccaaccaaacgctacctaagttaccaaagagcttagttaacacactaggggctcgtttatgtcatattaggtcgtattgtattgtattacattatattaaattgagttatatatatatcatatttttatataatactatgttaaattttaatttatactatatatttatatacccataaaaatcaataccacatatagttttatataaaaatattatataaaatacaattcaatactatacaatacaatacaatataatacaatgcggtgtatacaacatactaagcgaaccctaaacgaactaaatattttattataatgttttgcaagtagaattataatacattcattaactatttaataagtctagaagattagtccctcatgtacccagttattattattattatttaattaagtatcaagcttgtttagatggtcatctctccaatgatgttgataagtttaccgtggcacaaccatgtgcactagaaagtatgttcgagttgtaatgagattgaactcgcgtgatttaatccttaacaataaattaaattattattggagtattgttattagacaccttaaaatacaaaatgatgcttaattttggggccttttccaataagtttcaatgtagatttgaagtactatagaaagccataacttatttaattcaaggaaatttcctatgttaataattaattacagtgttttaagttgagtcattgtagtttgacatgttctactttataatttaggtacgatggatgtgtttatgtatatactaaattagaatgattacgtatataactaatgcttaatggagaatataatatacaactttgaacttgaagtaattaattatatttaaataattatagaagagtaagattttattaatatatacattgattaattgtatattaattgtcctattatttgaacctgtctttagcaataaattcaataacacagctataatattattgtttctctaaaccctagctatatacgtatgtgtatgacgaggcttttagtattatataatat

SEQ ID NO: 22774 - DNA, 1535 bp, Cannabis sativa
ttttaagctataaattaatcttttaatgtatggtactatgatagtctataccacaaaatatgaattgatgctcaagcaaaaaacaaagcttaatttaaaattgaattaatgttttgtaaataaaaataatcgagaaaagtatatactttctaaataacacaaataccatatatatataatttttaagaaaattaatcaataatagaaattatacatacacatacaaaaatgtagatcaattttgagaatctgtatgtgattgagaaagtgaaaaaaaaaatactggaccagacatatgaacaataaattaatataaaaatataaattatgtatatagcgcatagtgaaagtggcctttgggatgtttccattgaaaatgtacctaatgttgtagttaaggccccataatcatttctaaccttcattaatgattgaataagtacataaactctcaataaaagaaaaacatattatgaaaaaatcactaacaaaaaataaattttttttaaaaaaatgttaataaatctaataaaatattaaaactgagaaaaaaaaaaatagatgtatacattttatgtcaattagcatttataaaaatgagagaattaattaaagagaaagcaaagaactaatgataattagatagattttagaccgctcatacatcttttatatatatatatagattgtcgtgtgataaagattctaaatattgaggattcatttggtacactgtatcacatcgtattgtattgtatagtattatcttgaattgtattttatgtaatatttttatgtaaaactatatatgtggtattgacatgtatgagtatataagtatataatattttaacataaattaaagtttaatatagtattatataaaaatatgatatataatccaatttaatataatacaatataacgtactaaacgagtcctgaatgtatatgaaatctcttttaactgattccttgtgtccaagtatttttgtcctactttttcatagagggtagcatctaaattaaaatttaaaagattattaaaaaaaaaaattacaagaagctttgcacaagagatccacgagactaaccacaccataatttaattaacaataaaacaaatatatatttttatagtagcttgagagaagataacagttagatcgttaatattgtataaatatatagcttaaaatacataataatatattaattattttagttctctaattgaagtgcagataacaaaactctgctcaagaaagaggatcctatctattgaaataggaatcttttgaatcaactatgtctgatccgttttctataccttaaactatttgatggtggaaattagatttggaatttcattgatatttaaaaagtcaacaatattaacatagatttgggtcatgaaaaaaaaatatatatatatatatataaaaagaatattttgcaaaaaaaatttagtgatttataagaaataatataataattgaaaattttttggtgcacccacaaaaaataagtaaattg

SEQ ID NO: 22775 - DNA, 3029 bp, Cannabis sativa
caaagagcccacaaaaaataatataagataccaatactatctttatccaaatcttgtacaatactaattaatatctagatgtttattattattattattataatatgtagcaaacctggaagatcgccaagcttttctggatctggagcaatctagcatagcatgcttggtagtttcaggttcaagtttacaaagaggacacaatggagaattaatcacacatctgcttaaaagggaggatgctacaggaagggcattagacaacaatctccaaacaaagagcttaacttttgggggggtaacagaggtccagattttagaccaaaactttttggaggcagagaaggaagaagaagaggggagatcttgttgtgaaaaagccaaatggttaatagatttaacaatgaaaataccagaactttccctttcctaaatcatatcatcatggccataacacctagaaacaggaacctcaagaatgtcattaatcatagattcatcaaaataggatcttaatttagctacatcccaagttcctgagtcattaataaagtaggacaataagcaagaagagggagaatcattgttattaaaaaacttatgtttgtggttaaggagccaatgatcatccagaattctaatacaacttccatcacctactttccaaatgatccctgaagccattaagtctcttccccataaaatacttctccatgtataagaagggttatgaccagggacaacctcaagaatagaagagtgaggaaatgaacgagccttaagaaccaaaataaggaggaaagtgatatttttaagaatttgccaagcctgcttagcaagcatagcttgattgaaatgaacaagagaccgaaaaacccaggccaccgcaaaattttgattgacacaaaatcttctgggatttccaatgaattttcttggacaccccagtggagccccaccagaatctgttcatcgcagcctcaatacccttacaaagcttaataggtaacctgaaacaagtcatcgcataagcagggatagcttgaatcacagctttcaaaagaacctctttacttgccctagaaaaacactttaaagaccaacttctaaggacaaaagcaaccttatcctgaaaaaaaaaaaaaagcaaaagaatgatatttagatctagagagacattgggggaggcccaagtacttacagaatggctgatcttctaggttaaaagtttcaaaaaaacaaattacaaacctcctgcaaagtgctgggagaaaatagaattgaggatttaaaaaaattaatagcctaacccgaagccctagcatagacattaaagacctcttgaagagctaagcaagagcttctatcagcagaacaaaaaagaaggctatcatcagcaaaaaagagatgagcgataggggagcatgcctagagatagcaattcctttaagaataccagcttcttgcctaaccctaaggagagaagacaaaccttcagcacagagaataaaaaggaaaggggataaaggatctccttgccgaagacccctagaaggtttaagggaacccttaacaacaccattaataagaaaggaaatatgagtagtggaacataatgctttccaaaaattgccattcaactcgatcaaaagccttagccatatcaagttttagagcagcccaaccccttttaccattcttccgagagttaatggcatgaacaatttcttgagcaataagaatattatcaaaaataattctcccgttaacaaaagtactttgaaaaggagagataattttatcaagtatcaccttaagacgattagctaacaccttagaaataactttatacatagtagtacaaagactaataggactaaaatccttcatagaattcgcatgttgttttttagggatgagggcaataagagtagtattgaaatctgagaaatcaacattattattcaaacagtctaaaacagcatgaacaaaatcacgaccaaagggtggcctaatttttctggtagaaaaaaaagcattaaggccatcaagactaggagctttatccccagagagattaaaaatagcttttttcacttcctaagctgtgaaaggctgagcaagaaaatcaatctcaggttttcctaaggagggtcctaaacagtctaaaattcgactggtagcctcacagaacgaaagaaagtagagaaaaatgaaaaaataatatcaaacatagcctcaggatcattagtgttattgccaaaatcatccttcaagtatataatagtattattatttttcctatgagaagcaaactgatgaaaaaatttagtatttttatcgccagctttaagccaatgaaccctagcccattgcctccaatagatttcttccttataaagaagagcgtcaagatgggagtgaaggtatttaagacgaaggccagtctctctactatcagaagtagagatctgaaggctagcaatctccttttgagtatcctggatttgagtttggaaaatttgcttagcagatttattccaggatttcaaagtagagacataagatttttggtaagaaagaaaacggctaagagtgcccccattaagggtgaggctggacgaattaagccaagaatcttgaacagtggtataaaaattaggattctctagcccaatattttcaaactgaaatcttttttaacaaaaggatagctacttgaaatgctagtatgaaggaaaaccttaatagctcgatggtccgaaccataaaaaggcaaatgatgtaaagccgcattgggaaaaagagtcctccaagactcagaactgattgcccagtcaagacgctcacacactgagctattatgccaagtgtacttatctccctcaaaattgaggggggaaagacaaaatttatctaagaactgggcaaattgatccatatctttgtgattataataggctctaccaattttgtcatcaaaagaaagaaaacttttgaaatctcccatgataaaccaagggagattg

SEQ ID NO: 22776 - DNA, 3526 bp, Cannabis sativa
  modified_base (972)..(977): a, c, t, g, unknown or other
gaatttcaatgaagggctcaatgatagccttttttatcatcttggtaatttgatttgatttattaaaagaatttgtgtatgcatttctttgcagccaatggccaacatttccacagatattcatcaagggagagttcataggtggttcagatattattctcaatttgcaccaggttagttggttaccatagattatttatctcttttttcgtatttgaaatcgaaaacaacatgaattctctgatactatggtgaatgaatttcgccgcagactggtgaactgaaggaaaagcttaaagatgtcacgaccaatcaggaaaagtctcaatgaattgttggattcggaagagaagagactcagcagcaacgtcgatttttggccttaacatgtttctgaaagtttgagggggcgataaatttgatttgttctcatttatactctgtagagctgcatatcgaatttttatttgtttgttttattgagcatgaacacgaacatgaattgtacccaaagaagtgtcaacaacgctagctcggacctcagtggcgggcgagggaataatggatgaggtaaggtagaagtctctggtttggaactagtgagttcttgttatttttcttttactttttttttgatcataagcaccaaacaaatgtgctatttatataaaaagaaaaaaaatgtaatgaacatgtttcttggcttattatgaggacttttgtgatctaaaattctaaatagtattagatacaataataatatatgaaagtttccaaatcttgatatcaaaattgatttggtttaaacatgatggcactgtgtttgaaaattgaaatccattcaactccaaatattgtgttttttaaataaaaaaaattcttaaaaaatattgtttggcatcttgtgaaaatcatgatttcctttattttctttatttatatttatatttatattttaataataataataannnnnntaataataataataataaatgggacttttttctctaatatattgaaaactattcatacctaaaagctctcttttaaattcgaatattacaaaattataagtgataactacggagtcatcactttaggatagagctttggtaattgaattaatgttaattgaaatttatctaaaaaaaaatgtacgacttgtgtaaaatatttattttaaaattttataagcatattgttatgcttgaattttactaaaagaataaatacctattattatttctccgtaagggccctcaagctaagaataacacattgaagatataaaagtcaacaaagaaaattttgaccaagaagcgacaagagacaaaaccacatggtagagagcacgaggcatgcgactactaccctaagattgttagtagtcacactcctagggtagccttggatttgtctccttgacaaatgcgagaaagtgttgctctatagaaaccccaattcgagaagaaattcgacaaagggctcaaatgcttaatttaatgggaatacaagagtataaagacaagatgacatcaccaaatctaagagagtaggtcatacatgactactgacactcactggtgttagtagccacaaattaagaaatactcaagaaaaattaaattaacactttaaccaaaatatcacatgcatgcactaagatttgaactttaaagttaaatatgcacaaaaaaaaaaagaaaaaaaaagaggagaataatgttactagtgccgattgaagggtggggcaacaagggccactacaccaggcctcccaacacaaagaggcccattttttttttttaaaaaaaaaactgtgaaagctcacatatttgtaggtccaaatttttaataaatgatattggaacttagagttccaagagctccaacccaataaacattaaaaaatagtctaatttaatacttttttttcttatttattttaacaaatatgtattgttgcctattatttatataattaattaattgtataaagtattttttaggctccatttaaattttttgtcctaggccccctcaaagcttgagacggccctgaatgctacatgagtactgacactccctaaggattagtattcacatataccatacgagtactgacactcaggatgtgtcagtactcacccataaggaaggaagaagggatttgatggctaaatagttctttccaacatcaataattacttacaaaatgagagaaatttctaaagggtgtagaaatgtcttacatgagtattgacactttttttgtgacaatactcgtgtatgctagttcaaagaggaatcttgggttgtttgaagctcaaaaccctagaaaatatccactaactttcaaagacttgttaaagacaactcaagatggccaacaattgagacatacacgagtattgacacctacttagtgttagtactcgcccaaagagtatgccacacaaaaatttggtggcagttctgtactttggtggtagttctctccaaggaagtatgccacacgagtattgcactcttcaagtgtcagtactcgcccaaatggtcccttacatgattactgacacttctttggtgtcaatgctgataggctagttttaggtgtattttataaagtattttagaggttgttttaattgattatattcattttgtgcagaattacacttgttttttttatttattttaggtttaaatggtaaaattcataatgtgaacatgttaaatgagatgaatatattgaattatcatggaatttagagttcgaggatataagtggtaaaaaattttaagttttggatgctcaacacactccgtttgtgataaaaaatcaagtctgaagcttcaatccactttttaactattatgcgttcactttgaggaaacatattgtgaataaaagttctatatctctctttcaactttctaaaatatcttgaatcgtctaattctgagcaatattaaaattgttatggctaaaacattaatcagtcgttgcaccaggaaactcactgccaaaatcgagctttgagcgtcacaacactacaaggtagtgtaatggcccgcctcttttaaactgtgagaacattaggattttatcctcttttagctatataaaggcccccttttcaacacttttcagtagacgactttagaaaacgaaaattagaagcaagaagcggctccaaagactttcaacatttattttttgaagagttctgtctttttttctatttttttatgttcttaatttttattagatgttttcgaagattatgagtagctagactttttaatagggtattaatggagattgtttgatactttattttagttttaatgtgatttagtccttctccaattttctatatatatttattttattcgtatttaattacttttaattatgatttcaatgcaacatttgagaagtgagtgttgataatactatagtgaaatagacatagattttgatataggacgagagtacctatatggtttatgtagcatt

SEQ ID NO: 22777 - DNA, 3444 bp, Cannabis sativa
ctactactagtaaacaactgttcatcaaatctatatccactgtctagttctttatctttttattcctcaccattttaaacttctgttctaagcaagctccaattcaatgccagcctttggtagccgtgaattgatctttcttgattagaagacttatttttaacaattctttgtaacaaatagaataaataatactgcttttaatgtttcttttcattcatttatgcaaatatgattgatgaatgtattagaccggccatctattggctggttgtatacaaattcaaaagcctcgtcttagttttctgtaagataaactagttgttgtagacagttagaaacttagaagtgcacttaaatggtacctagaccatagcctcccttagggatatttacagtggtcaaagaagtccttaggaaatttcttaacttggctaacaccaagcagacaaacaccaattttttcacttgtgtacctctgttagaaggtaaacaaaaacatgagaaagtagggtaggtaatcgagactctgttactgtttttgcttttgtatgtataaatatggcaatgtggcatggtaggaagaaagtttttttatcaacatgtaaaagtgaggtgggcctatttgacacatgagctagtgaggaatcacatggaattgtcttcttattcatcattgtagtgatagaacttagacagaaaacatattattttgtggggtaaatagagccaacacagacctccactttgcattagataaaagattttgggttagagaaaaatggattaaagataagacatgattgagacatattaaggtattaatagaataaaaataaattaataaatgaatgaatgaatgactagatagactttctgcatactgcgcacggttgagaaatgtttcagctaaaagtgttatcccaatcctaaatctgtggcagctataggaatcaataaagagccatttagagaattaatctcaaatggagtggttggtataaagacaatagaaaatggtgttttctttagaaaatatgtctagagtaatcacatggaattgtcaccccccacttatgataatatttgatatatcagactagtttgctaatttgtttttgtgtgagaaaattatcatggccctcaggcctaccatgtatgaaaacagtgtacggtattgaaagttagctataaccaatgcacttacactgtttgttgatcaacattatacagaccatttggactaaaaacaataatttgagactactagacttcttgatacttgttcagcagacacattggtattcagaatttatgttttattattatcatattaacttgtaattagccattatctagcaatgttttctgacaagaagcaagtcagatgttgatagttaatgagtttgtgcctgaaatcaaagcacacataacaagctagtttagtggattgaccagcttgacctctaatattctcttccttccattcaatatttccaaacacttgacagaaacctcagctaaaacctattctgatttgatagtgatcttcaaagtagtgtcttggggattcatcttggtttaatctgtcccacaacacatgattacttggtttttaggcatgggttttagcaatgttataaacaaatttagatttttttttataattcaaccttttttcccttaaatttatatattattaaaattatcaaagattgttcctttatattggatatgcagatttgatccaactatcaaacatttttccagctggcttcagtcttgaagtagaccccaagctaccattatttggtcaaagaacctttttatcagtacctgaacatagaaaaagagaaaatgctatgatatgataagaaaatgaaatattcttgtgctgttgtgcatagaaaatggctcttgaaagatactggtttaactaaaatatgcccatgtgaggtattctagagggacccaatacaatgatatatagctagagcaggaaactatagtgaaaacagaccagggtttggataattgctaggcctaccaatcagctaaaaggcttactgattggtcctcacttgaaacttaaaaagccactaaatagtccaagaccaagttcaatgctttgatgaatgagtaagtgaatcataattacttctttattgatactgccctttatgtgtcaaggacatgcctaacacctaaaagggcagtccttattagctaaaagcaatcattacataaacaatgtatataaatatatattaatttcaagttgctccttttttttggcttcaggtttgatggtagggaaagatgtcttggaactcattaggacaagaccatgtgaatcttcagcttggctttcacttgatatgtttctaaacattctttcgttgatctctctcatcacttaccagtcctacttatttttaaggttagtagtctctcactcagtgtatatatatatatattacatatgtagccactgataaatgccaactcaattcaaagtcttgactcaatcaccacctacaacttctccatcactgtataccaaccttaaattggactcagttttctcaagatgggcattggactgaaaggaatatctcaagccaagcataaacttcagagaactctttcagcaagatatggggctatttcagccaatggtactaatgatgttccaaaaggtcatttagctgtttatgttggagaatcacaaaagaagaggtttgtcattccaatatcttacttgaaccatcctttgttccaaaatttgttaaaccgagctgaggaggaattcggatttgaccatccaacaggcggcctcacaatcccctgcagtgaagactacttcatcagtctaacttcagctctaagttgacaatattttggtctaatgaagcctatttaacttgtatcttcctcttgcttggttaaacagaaaaaaaaaaaaaaagaagccaattgagactgattaaaagccagaaaagtatcctcaattcatcctatatgtgatgtttttgtaatcttaataagctaaattcttttaccattacatcatatcacggtgtgttctccaatattgtacacattttagatatgtagccttttctgttccatatattaaatgaacaatgttaacaactcaatgaatatttgttatagtaaagtggtgatatgctgtaaatattaatgacccattagtccaaacagaaagaaaagttataagggaatactagaaagtacaaactgatgttacattttttttaactgcagacagttaccttatattcagcagtaaaacttcagcattgaataggctaattaattaaataaattcatttctcaaaattattctagcacagtagcagttacttaacaatttttacagtttttggtagtgaaatataaggttagttggggtacttaaat

SEQ ID NO: 22778 - DNA, 1548 bp, Cannabis sativa
aaaaggaaagtagagtaatcaaatagagaaagacatatgcaaaaaggacttctagtctacaacaagggcaataccattgtcaaccagaacaacttgcatgtacactaggttttagcaatttaacacaatacatggtatttcgcaataattatagtttcccacttgcatgtctttctctctaacaagaaaaaacatcaatagcgctctcatcatatttacagtgggatagacactgtgaaagaaagaaaacgtacatgttggccttattaaattggggatggacccagaaggtattttcacttgaccctttttttaaatgaggtgggttaagagatatataacaatgtatacaaagattcaaagagaattctgcagtgatcatcatttaacactcctgtatatgattattctgaatttgcacatctttctcttttaattaatatatttttttagtgtattagatatatattatttcaaaagacattgtctctaaaaaccctggtgtatcaccttcaaatatcctactgttttatcaatgcctcctacgaaagaaaatattggcattcatactagttcaaacttaccgaattatgatcggctggccttggctgagtgcaattacgcatattgcaagttgtcctaaatgaaaagttgacatttccacagctagggcaggtccaatcatcttcccttcgactacctgaaagattaaaattgcaagtttacataaaacagatatagagcaaaacaagtcataacttgaaattgaactggttctcaaaatcagagatcacataaaattttctacctatttcccccattcagtttcaataactctaagaaatccaatacattgtttccgtagaatataaaactttcgcaacaaaaacagcaccaccatatattcataaatatatacatacagtacatatgtaaaattatatagcataccatcagttcgagcacgctttgcagctgaagaatttctgttatcgacctggaaaaaaaaaagaatagagaaataaacaagtccaaataaatcaactaattccagctcgtaagaccctaattatttgtgttttaatggcggctcaattttaatattggactcccggcatcgaatgaaaagaacaaattcctcaaaatgctaacaaattctcaaacgaattgaaattaagattagttccacaatataatctgaaaaaaatatagatcaaagagactggagaaaaaaagcgaagaggaggtacctgagacatatcgccggggaggtggagtcggagatggagatcttaggagcaggtttgggctgcgaagtaggcgattattatgccctactgctactaaacaaagaagagagagactcagtcgattcgatttgaggctggaaaagcttttagcccatatactttttttttttgaggggggcctcctccgactccatacgctgcgttttattcttttcctttttcgttttttttttcttaaaaatcatttttcgttttattttaggaattataaaaaggctaattagaataatatatttat

SEQ ID NO: 22779 - DNA, 1727 bp, Cannabis sativa
atgaaaatattgttttgaactttttttgtatgctttcttagggtaattttccaggtttcaaaactctgcacccttttcttgaaagctgttagaactacacttggttctcagggttgggatgttcttgttccaggtgttgctgtgggaacattgattcaggtacctcataggcatttaatatggaaaagcatcagatgactcttcttttataaattgtaattcctgtagatgtacttcagattatttctctttgttctttgttatacatactcttatggtttaccatttcaattgatacagacatttaaataggtcaaagtatcacatgttaatcaatttaacattgttgattatccttaggttgctatttttccttcccctttgatatctttcccctgcaatctggtggtgttggaagagttatatctgacattaaatagcctatatgaactattcgcattgataaatatttttggctgttgggactttcaaagtcaaatcaccttttaacataagttatttgacatcaggttgataggattgtccctggttcaataccatcttcagtggaaggaccaattattcttctggtcaacaaagcagatggagatgaagaggttcttaagactagatgattgtacatcgccattttgtaagatagatgtcttctcatagtcaatgcattttggtttttgcaggtaacagctgcagggagtaacatagttggtgtcgtcctgttgcaagagctaccccacttatctcatcttggtgttcgggcccgacaagtaagtaccatgtctcctatgtgttattagtgttgtttgttagatcatactttgcttattaatggacgttacaggagaaggttgtctttgtgacatgtgaagattatgataaagttgctgatttgcaaaagcagattgggacatccctgaggttaatttcttggagacctcctgattcagaatacttgttcaaactcaaaattgtgtttttaaatttcattgattttacaaatatatttgatttgatttaatttgatctttttcgttttggtatttctttcatgggaaacaatgaaggctggatgcatcctcaaatggtgttgatatctatccattttcatctgataaaagcagccagaaagttgcagcaaatgatgattcatcaattgttggaacacctcgacctcaagatctttcttctgctgcaaaaaacccttccgctagtcaggtacgatcctgttcatgttcacattatactcttcttagttaggttgcagctaccctactactattatgatgtgttaatgatgaagatattttttgattattgatttgttacttgtcatgtttcccacaagggatccgctggaggagtactaccacttgctgacgcagaagctcagacttctggtgctaaggctgctgcttgtggtcgtttagcttcattggctgcagcatctaataaaggtattagcttcatttacggactttgagtaatatactctcgaaggcatagtctgattggctgatttataaccacatctcacgtaaccatgcatacctcaccaccaatatttaggcttaggtttcaaagtccaaatttgcggtcaacattttaggtgataatagattgcattttatttgtggttttaggtgataatagattgctttcttatttcattacatatgccatttaacacatgaaatggtgctactgaactt

SEQ ID NO: 22780 - DNA, 4787 bp, Cannabis sativa
caaagtaatatctcatttttataagttgtcaaccattggaactatgccattttttgctgccgtatgcaacctcaaatcataataaaatataaaataattaatttggtcatcaaattttagatacaatcaatatattcccataatatttttatgtattaaatgtcaacttcatatatgaatacaaaaaactaaaatccttataaaatctcaaattacaattttacctgttttacacttcctagttccttcccatttgaggaaaaaaaatacaaatttaaagagcaagtgtctttaatttttgtatcacacattgttgaaataataatgtattttagttaatgtgtgaacgtgtcgtattgttgaacttaaaagcttgttttggaaaagaaaagaaaagaaaattgtaagatagaagatgatttattttttttttattgaatgtaggttgaagggacaaaatagttcaaaaggaaagtacaggtaaattagttaatacgacagggtacggaaggaagattttgtttgatactaaactaccgaatgtctgtcctttgtaattgtaccctcttttattatttatttatttatttcccttatttaaagaccaaaacccgcgctgagccactttttctcagagccctttcctctctttcattttcaggggtttgggttcgtttcggttggttacctttttaacattctctctctcttttttctcttcaaagaatctttctttttccttttttgagaaataaaaaaagttatcttttttattttattttatgaggtctgggtcgatcgaggtctctcttccatggtattattgatgatgttatgactcttcaagggctttctttttgctcctcaatttcttctcttcttttacctttgaatctcgaaatcttttcttattcttcttcttctatcgatttataggtaaagtcaatcttttcgtctaaatttccaatctgtattttttatttatttaatttattgtataatataaatgttttgagcatatgggtttggcacgcgtggttgtagtgggtctcctattctgggttttattgtgatttaaattttgtgtggttttcaattttttagacaatttttttttttttggtctttggtcttcggtcatcaagtggtgggaattgaatcgttttcttaggctttccttgaacttttttatttatttatttttctgcatttattgaatatgggagaaaaagaagaaaagagaatgtaatataaatgattggtgatggtgtatttgaagttttgaagtgcaattttttttaaagggatttcttttattcctatttttttttttttttgaatttcttccttggtggcttgtaaaaacaaaattgtttttgggttatcaggtcaacaattgaggcatctatctatatgctataggctgtgtttgatattattgtgtttttactagagtatttctttttattatttatgagaagatttcttagcgaatctaattgtgttatttaataaaagccttgattttttttttttaatttcttcagaggtctgtctggtgcaaactcatctgggaatatgagaaatagtcaaatatatattttttaaatcgtggttttttttttttttttctgatataacaaaaaattagttatctctggtatattctcttttgcactccttatcgtttctagagtgaggagattaaatcttgtatctggggttgctctgtttactagacaggtgaggaggttaaagctctcaaaataatcagcaagatggatcatgcagtgggtggtgtggattcaaaggttggaggtacaggaagtattagtagcaaagatatgattttcagagcagataaaattgatttgaagaccttagatatacaattggagaagcatttcagcaaggtattttacaggaatggggacagtgagagccaaaggcctaaagaagagtgggaaattgatttatctaagatggatgtaagatatgttgtggctcagggaacctatggtattgtctataggggtacctatgacaatcaagatgttgcaggtattttttctctttttctctattttcatttttaaactttttctttacatgtgtttcaaattatctgaagtttggtcaagtttccagattgttattttttcataaatggttgacagtagttgatgtgtggaagtagatatacagtttcattaccatttgtagtaccttggtgtcaatttgagatgtgatgactagtttacatatttttatttctatatttgtaaatttaagaaatctattgtgttgaatcctatttagtttaccatctgtgcttttgaaatgaaatttaaagctaaatgttttgggtgattggctagagcatttgaatggtcatcaaattctgttaattagttttgttggtgggtaaaggctttgtttgaactgcaagaccagtgtcataagggataatggtgatttttgttactgttactataagggcattctgcatttgaatgattattcattatgtcacaatggtgtgcatatggaagatgactcgttaacttgacgtctaagttaattcattttattacattggtaaaaccatccagcttctattgaaaactgattatatacctaccgattttttgctgtatgttctattataacagtgaaggtattagactggggggaggacggtatagcaacatctgttgaaactgctgctctgcgggcatcgtttcggcaggaagttgctgtttggcacaagcttgaccaccctaacgttacaaaagtactaattcttgttctttatcttcttcgatttcataatgtcatttccttgagaaatccagctctgttattatagttgcatcttgagaattttaactttgcaatgatgtcaaaatttaatagctttgaaatcatgtacctgttctactgtaaaatttatcaatttttctggattaaatttttttatttcaggggtgtgtttttactagttggcacaattaacttttttcttgtacattttggattcagtttgttggtgcttctatgggggcctcaaatcttaagattcctgccaccaattcatcagatgagggttatggttcccatccttctaaggcatgttgtgttgttgtggagtaccttgctggtgggacgctcaaacagtttctaataagaaacacaagaaagaagcttgcttttaaagttgtgattcaacttgctttggacctttcaagagggtgggttctcttgctcttaacattttatagctatgtgaagttatattatatatttatacttttttattattaatgtttgtatgtcttctttcaatctacagacttagctatttgcattcaaagaagattgtgcatcgtgatgtcaaaacggagaatatgttgctagatgctcaaagaaatctcaaaatagccgattttggtgttgctcgagttgaagctcaaaatccaagggatatgactggtgaaactggtacccttgggtacatggctcccgaggtatatgttcatactatctttgcatgctgtcctacctctttaaagaattaatgtatcgtatggaattataaaatatttgaaccaaactgataagaattacttcttggggttgaatttcattattgtcttgtgtgagccaaactcataaggtgttctgtgtaggtcttggatggtaagccttataatagaagatgtgatgtatacagctttggaatatgcttatgggaaatttattgttgcgatatgccttacccggaccttagctttgctgacatatcatccgcagttgttcgacaggttagtataatcacaaagttcttgctagagtactactatttccaagtaatgaatgcacttttactatgcaaacaaactaaactgagattttgaaatttaccttatagcatgtttacttgcaatgctcatttctctataacctgtctgaagtgaaagtttgctcaacctatagcatctgtttttcatttaagctgttaatttttatgtttattcatttgtaacattggttggttttgtttgcagaatctacgaccggaagttccccgatgctgcccaagttctttcgtgaatattatgcgcaaatgctgggatggaaatccagataagcgcccagaaatggatgaagtggtgaaaatgttagaagcaattgatacaagtaaaggaggaggtatgatacctgatgatcaaacttctgcttgcttctgttttggccctgcgcgtggtccctgaggagcttattattgctgttcttcattgtgtatgtgttgatgaattggaagtgttgggttttttatgcccagaaaaaagataaaagaaaattggggagaaaatggtggcgcttgattggagttggaagttttcagggtttttttgatcatcttcttttcacagatttgaaattgtatttttatagtccatgaacagtgggacattgtatgatttaacataaaagtatttaccaataccattgtgttttattcctatttccaagaaaatttcacttctagacttctaggatggtttcatgctagaattttgaaggactatgactaaaattcaaagaaagatcgaagtttttattcaagtcttttagagtttgaacctttttagctactgattattttatctaatctaccaaaagtgataaagctatagtaaagaacagaaaatattaatcagaaccaatgagaagtaacatgtagagttcaatatttgggactgagttactgctcagaatttatt

SEQ ID NO: 22781 - DNA, 1450 bp, Cannabis sativa
ttgattttcttccattgttataaaatctctaacatatagagcattgcacaaggctcgaactcgttaaacctagtattattcttctctattttactattttaaattattacttggttctagacatctcttgatatattgtttttgattgtattgtgtatttattgatcaagtatattataccgtaaatcattgatttgttaacgtttagcataacaaaaacttaatttgatcctaaataaatgtctaattactctctttagatttttatttattttttaaagaaaaaagcaatgtcttgtatagaattgaagttttcttttcattaactcatttattattagtaggatttaaaaagaaaaaacagctcataaacaggtgaaaattgaaataatgttatatatattatttgactagttctatagttttgtgcaaaaattaaagcttcataactcaaaaaagagtcaatttaaattgtaatggaaagtcatagtaatttcatttatatttctttttagaagacttgtgacatatatagtactatatatagactaataataatattccatgtcgatcgttgtggaattttatttttttataaggaatatattctgtagaattttaaaaattaattatataattataagatatatattgaagacttttaaaatgcttagtgggcgaccattactcagtgtggtaataaaaaatatatataattttgtaaattcatcaagttattaattatatatgaataaaaaataatatgtatgaatgaatttatttaaaaatgcaaaactatatattaaatttatcaccataactaaaaaagctggcaaactaacaagtcatgagcctccccttcaagctttataatatatatttaaaaaactatatttttatttatgttattataaacctaaataatgatctataaattatttatatattttttagacttaacggccaatgagtatcctattatttttgctacattttataacaatacattttggggggaaatcactatttgtgtaaatttaaattatggccctcttattttttatttatatattttattttttcattattgaaagtagtatatactaaaaatgaatatagtttataaatgatatacataatttaaatggcactatatattattatctctaattaatatgatttttcactgaaaattccagtcactttaatagaaaataaaaagactaatttataattgcactaaaattttttgagaaaaaaaaatatataataaagcactaaaagtaaaaaaattggagacttgactaataaatgtgtttggtattggctttggcatctaggtttgtggatgaaggtttcttatctgaaatcgttgaagttttgactattaaaaatacggatgatgtgtagagggttattgtggggctggaatgggagtagaagtaaactt

SEQ ID NO: 22782 - DNA, 3073 bp, Cannabis sativa
acatttaccttgatactattagcctgcaatactacccataactcagttccatcaccagtctcataaagagagtgtaatgactcaaaattttgatgcttgaacctttctatatttgtcaggatactcatgtcgaagcaacaatactagtaattctagaaatcttattatttcacaccatctcattcttggctccccaaatagcccaccacaaagttgataataaatagcgtttctcattatcaacatgttgaaaatacttagtcacccactctaagacagagtcctcgattgccacatttgtccctatcccaaccctgttccaagcaagttgaacattttgacaagcgactaaacagtggagaatagactcctcttccgagttacaaatggggcataaggaactcaccttaactcccttagtaagaagttgggtcatagttggaagacagcccacaccagcacgccacacgagattcttcaccttacgagggagcttgagcttccaaaaacttgagaaatcattctcctgcctacgcccttgagttttctgcagaaggttgtagacactcttgattgaatatactccaaagacttcttaattccaaacatagtgatctgccgcttgattaggatgtaaagggatgcctaagatgagattaatgtcacgctagtcaaacaggtccataaacagctcctcatcccaactactcccatccatattcatcaaattactaactttagcatgaaataaggttgggtgtgaggataaaccatcaggtttgcttcaatggtaagccatggagaatttagaacattaaagttttcactattgcacacacacaccaacggatcccttcctttacaaacgactgagcctcacaaatgcttctccaaatgaaacttgggttagcaccaagttaggcagtaagatatgtgtcattgggaaagtacattgcttttaaaattcttgcagccaaagatgatggccttgtgaaaggacgccaaccttgcttgcccagaatagaaagattaaaatctcgcaagcaacagaaacctaattgatacccttacctctctaaaataaattgcccatttgttgttccatatcccggtgatcaaacacaataattttggaaaaaatcaccctaaaacttgggctacatccttatgagctctccttaggaagatttagctattttccactatgatgaagcttcgacagttacaataatgttggagattccttgtcaaaaactttgacaagtaatctcaattcactctctttatatttatggttttggtttcctctcttttcttacagaaaaccaaatttctaactatgtttcttttcctcactttctctctctattattcttggagcttctctcactagctttcagagaaaaattcttgctttgatctaattaatgtcattaaggtatttaatctcatctactgaggtcggttgagtgactaggttggtggttggagttagttatgccagcttggatcttgttattttagttgagaccaaattgatgtggctttagttgagtctaagctagtcttgagtgatcaagtgtggaaaagtgcattgtaagtttgtccttgcttatgatggtgttcaattcaacaatttccaccttgaactccttcaaaagcatcttggttgagtattcttctcttccttcttctttttgctaaggatcttaactctttatggtaatggtcaacctccattaccttatcctagcaaatccaaacagtgcttgaacttggctaggtttagaattttagtccctacacctatagggttctcttttgttggaactttcttaatctaaatctgctcttgtgtcactttatctctgatgaagtggtacttgatctccacatgcatagttctatcatgaaagacatgatttttacacaaatagatacaactctagctctcacggtacacagtgggaacttcattgagtagatgcaactcttataatatgcatttaatccagatagcttcctttatagcctctgtgactacaaaatactcaacttctgttgtagataatgctacaacaggctgtagctagactctcaagctgatgcaattcccaccaattaagaaaaaataggctgagatagacttcctgtaacgccctattccatagggacgctacatgtatgactttacaaactagtttaatactaatatattaattaattattaaaaaccgcgagaatattaaaaacttgactaaaagaaaacactgaaaacggacattataacggcagtaaaaggtgtttcagggatctgtaattacaaaaggactatatacaacgacacctcaaaaacataaaactaaaaacacaataaatacaacccaaaacaactcttgacagcccaacacacaagccggtgaggtcaatatgtacattactggagaagactatcatctcatgattgttctaattttccttgcccttacttgtacagctgtaccacagagcacccgtgagtcacatagactccacaagaaaagtaataaagaaggatacattaattaactaattaaatatttcattatcataaaataattaaaccataactttcaacagtaagtaatataaccagccaaatgcatagaaatagatttgctcatatatttatattgcctaatcaagcaagcccatgtcataatataatatcatatataataccattgcaccacctaatcaaatgagctcgtgccacgacctggcaccattataacgcatcacctaatcagacgagcccgtacctatgcccaatactcatatgtcactaacgcccgtacctacgctcgatacgtcgccaggagaaaaccctacaacggttcattttgtgccataacctgacaattttcatattactatcgcccatatctgataaggtacgctaccagttggaaacctaacaactattttgatctatgccataaccatgcattttcatattattgtcgcccgtatctaataaggtacgtcgccagttggaaacctaacagcagtttcgatctatgcaataactaag

SEQ ID NO: 22783 - DNA, 2663 bp, Cannabis sativa
aaattaatacaaatgtgaaaagaaatcaaataaatatcattttcttttcttttagtctgctctcctccttatttggtaagtggtaaacgaccagtacggcaattttattagaacgacaaattcttggaaaacgacaactgccttctataaacgacaaaatatctgagaaaaggacagttatcttgaaaacgacaaacgactattgtcatggaaaaacgacggaatttatcgttcaaaatttaagactgtattgaattaggtagacattacatacaattgaacgacggaagagggtggtggtcgtggtcggtgataatggagttgccggaatgccctgtctgcttacaaaactacgatggccacgctacgattcctcgggtactcggttgcggtcactcggtctgcgaggtttgtctccttaaacttcccccacgcttccctcaaaccattcgatgccctgcttgtacacaactcgtcaagttccctcctcaaggcccttctgttctccccaagaacattgatctcctctctctttgtacctcccaaaaccctatccctaattctattacctttgacgatccccgaaagtctccctccgaacacttctttgactttttgcctaagttttggtctgatgagttttactctgcgtggaaggactggatcctccccgaagaagccgttttggtggatgaaggagaaaaaggaggtgctgtttctgtgattggtgggagaattggtaatattgattcttcactgtgtactggtcggttttgttttgggaaggatcagagggtgagtcttgttcgggttgtttctttgcctggtttggatgattcgaacttgaaacttagttatgttgtgcgagttatgaaatgcttgagtggattgagtgaggagcagagagacgaattgggtgtgattctcagagcttcattgaggcaaagtagaagggtgagtaaagtttatggcttgtgggggaacttggaagatgggtttttgtatattgtcagtgagagaatgaatgggagttttggggacttgaaaaatgaacttgactctgatgaggggaatggtctgagtaaagatgggttgtatgcttttgcatttattggcactgaagttattgagtcactagttagtttgcattcagaaggtttaattgcaggttgtgttggtctttcgtgctttagttttgatgattttggtcatgcatatgtagacttgaatggggttttggtgatggggaggaagattcgcaataccattgctgaagaagaattggatgtggctataagcaatctgttggaagataatacattcgtgagtccagagctattggttgaattgttgcacagtgagggtattgtacttgaggatgagaagtctagatattcaattagatttagttcagatacatggtcattagcttgtctattgctgagacttcttattggaaaagcattcactgaggagttccctaagatgattgaaaaagatggttctgattatttgagactctattcaatctggactgaaagagttagttccttgttggatactcaattggtttcagaatatgcaggagtgaaggatatgctcttgaaatgcttggcttatgatccagcatgtcgcccacacttgactgaagtgaggaaatgcattagggaactgatagctaaacctcaatttgatatggctaatttgcatttgggtgaggaagtttatgttggaagaagccgttgtttgttgataggggaaatgtgtcaacttcccaaggcaatgccaaaagaagacaacttgcagggaagaaaagaggttggtgagggagattttggttcagtgaagcaggatagagctgataagaattttcttgatggcctttctgagggattggtcaagtctaaagatctgcagggacatcgtgactgtatcacaggaataactgtgggaggtataatttatggtgtcagtgaacttataaatcaaaagtttatttatttatatattatttttttttataatgttttgatgattgggtggattcgttgcatgtatctctagctgatcatatcttcttttttgatttttttttttattctgtaggcggttttctttttacctcctcatttgataaaactatccgtgtatggtctttgcaggtatgcagcctatttgtcctgattacttgtttactgttaaaagaggatatgtccctaaacatatgttcctattggtgcagtataatttttaatgagcgtatgttcctaaaattttggacctgctttccaattgtttcccattcttactttgtagtgagtcactaactcccatgattatggcaatcgtagaaattggtggtttgttttcaattctttaagatgccaatataagcttaaatgtcgtttgttgcctctaattcattctagtgctctatatgttcaacatggaaaaataaactggtattgtttttctcagttatttttgttaatctaggtttctttggtgcaaatttatgcaggacttttcttacgtgcatacatttgagggccatgaacataaagttatggctatagtttatgtggatcaagtacaacccttgtgcataagtggcgatagtggtggtggagtatttgtatggagtatcaataccacacttaggc

SEQ ID NO: 22784 - DNA, 3367 bp, Cannabis sativa
  modified_base (3306)..(3309): a, c, t, g, unknown or other
tcttttaccttggcttgtgattggtgattttaatgagatactttccaacaataataagcaaggtggtgcattacgatgtgaatctcaaatggatgactttcgtaacacattatatttttgctctttgacagagttgccttacattggagatcctttcacttgggttaagaacagacataaggcagacacaattaaggagagattagattggtgttttgtcaatgataattggctaacaagtttcgagcaaattacaacttcccatttggatttctacaggtttgaccatcgtgctatatcagttatggttcaacaaataaaccaacaacctgatcatgtactaaggaaaacacaattcagatttgaaaagatgtgccttaatgatgatgaagctgctgctatcattcaacagaattggagcgcacaatgtgcaacaacaagtattgatctttttcttgataacatgcaagattgtacaacttccttacaacattggcatgctcacaagtttgggaacatgaagcaacagatttccaaagttcctgaagatattgctgcactcaataattctgccaccaggacacaacaaacaatgacaggtttaagaaaatcaaagtcaattttggatgatttacttgcacaagaagagatctattggcaacaaagatcaaggatagattggatgcaaagtggagattaaaatacaaagttctttcatgctcatgctacttcaaggaagcaaaataacaccattaaatcactcacaaattcagcatgtattactcacaattctaaggaggaaatgacaactattatcacttcctattttcaagaactctttactacttccacaattgacacaagctctctcaaccacaccattgacaccattccaacaacagttactgctcccacgaagttgcaacttacacagccatttacaccatatgagatatattaagctttgaaaataatgagttcgaataaaagtcctggtagtgatggaatgtcagccatgttttatcaacaatattgagagataattgggccttttgttacggatgtgattttgggagttcttaacaatggacaagatatggatttaattaataaatacatcatcactttaattcctaaaatcaataatcatgctggtatgagtgactataggccaataagtctttacaatgttatctacaaactcatctcgaaagtgttggtactcaggttcaaagatgttcttccttctattatttttgaaactcaaagtgcattcctttccgaccgtctcatcacagataatatcttgattgcttttgagttagtccatcatctcaaacataaaactcagtgaaggaaaggttattcagctctcaagttagatgtgagcaaggcatttgatcgtgtcgaatggagctatattaaagcggtgatggctaagaggggtgtcgatgcttgttggatttctctcatcatgaaatgcctctcttcaacgagtttttcattctcttcaaacgatgaaatggttgggaatgttattccaagtagaggtcttcgacagggggatcctttatctccctatttatttctgatgtgttctaaaggtttatcccgcttgttgaatcatgaagaatcttcaggtaatcttcaaggattttgtctcacacggcaagccccaccaattacacacttgttgttagcggatgatagcctcttgttctgccatgcttccaactcgtctgccatagctattcagcgtgttctacatatctataaccgtgtatttggtcagctacttaacactcaaaagtcggttatgtctttctcaccaaacacaccaatcgcaactcaacaattttttcaaggaacattgaacatgcctattagcgattgtcatgaaagatatcttgggctaccaacttattctggaagagataaaaaagaaatgttcagttccataaaagaacgaatatggaaattgcttaatgcttggaaggaaaaactgttttcaattggagggaaggaggttcttttgaaggtggtgattcaatctatacccacatatgctatgagctgcttcagattaccacaaaagttttgtcaccaaattgaatcgatgatggctaatttttggtggggatcaaataaaaatggtaacaaaatacattgggaaagttggaatttgttgtgcaaataaaagtttaaaggtggtatggggtttcattctttcatacattttaatcatgcattattggctaaacaagcatggcgcatctttgaaatgccaaactctcttctcatcagtttaattcaatacagatacttttccaatacatcttttttggactcaatcattggccattccccttctcttacttggcaaggaatctattggggttgtgaattgttgctcaaaggccttcgatataaagttgggaatggaatgcatattaatgctgggacatcaccatggatacctggccatgttcaacacaaaccagtctcttattcaggatcctcaaacctgccagtttcatactacataacagagacaagagaatggaactcgacattgttggaagctcacttcaaggagattgatatagacagaatcctttcaattcctctaaacttttttgcaggtgttgataggcttatatggcaccatacaactgctggtgtatacaaggttaaaagtggtttccaccttgctactgatcttgaaaatgctgataaagaatcttccttgagctcccataaagactggtggaaattattatggaatttcaaactacagccgacgattaagattttgcgtggcgtgtaattcaaaactatcttccagtggctgctgcactttttaagaaaaaagtactcacttctgcagtgtgctctttatgttcacaagcttgggaatcgattggccatgctttgttccaatgcagtcatgccaaaactgtttagagacacttcaatttcccaattgatttcaacaaagcacgccgtatggttagtggagattctattttttatcttgcaacactactaagccaacatgaattagaattgttatttgtcatcatgtgggtaatttggactgaccggaacaaactaaatcatggtgaatcaaggcgtgatggtttttctctagctaattatgctacaaaatacatggagaattatcaaaaagcaaaaaaccattccattgctgttagtgaaccgactgtaccaacatccactacaactataccaactgaaggaattcattggaaaccacctgatatgcatgttgggttttgtgccctnnnnaaaacccatttcaatataatcaagtttactaattaataaagatcagaaatcattttat

SEQ ID NO: 22785 - DNA, 9298 bp, Cannabis sativa
aaattgcagaagcttagaaaaggatctctgtcattaaatgattacctgctaaaagtgaagcagcatgtggatctacttgcctcagttggagaagtcttgagctcaagggatcacatagctgctatttttaagggcttgcctcctgagtatgacacattcattatatcgaccaatacaagaatcgaagagtactcagtagcagaaattgaagctctcttgcttgcttctgagtctcgaattgaaaagaccgactttgatcaagaaaatgatctaagtgtcaatctcacaaccactgatattgatcagtttgctgaagctaatatcgcataccagaatggtcaaaatcgcaccagcaggttctcaaacacaaatcgattttcaccttctagtttaacacgaggaactggtcgaggctttccaaatcgaggcacaactactggaggtaactatcctaattcatctccttatttcaacactaatggccgtggcatgactggttacagcagagggggcagattcactccttcctcaaatcgagttcaatgccaactatgccacaagcttgggcatactgtccttgactgtttttacaggtttgacaagagtttcacaggagtatttccccccaccaatccccccaatgctcaagccaacatagcagccaccaccactgttgatgatagtaactggtatccggattctggagcatcgaatcattgcactcctaatgtgcaaaacctgaatataagcactgagtatgaaggagcagatcaactatatgtcggagatggctcaggtctgtccattaaacacataggcaaatcttttattcatacacataattctcatcctcttgttttaaacaaccttttacatgtcccagaaattaccaagaatttgcttagtgtttctaaattttctcatgataataatgtattctttgagtttcatgctgataaatgttttgttaaggatcaggaaactcaagcaatccttctcactgggatacaccagaatggcctctatatttttaagccatctcaatttcatgtgcaagcctctgccccagccactgttccatgtgctttcactactactgtgtctgctaataaagagtctgatccttcctcttgtactcactgtcacagatctaccttatctgagtatgatttatggcacaatagacttggccatccatcagaaaagatagttaaatctgtccttcactcttgtaatattaccatcaataataaaagacctttttcagtttgctcatcatgttgtttaggcaaaattcataagctgccattcccttaatcatctcttactgtctatagtgaaccattacagcttgtggttgctgatttatggggacctgccaaaactacatctataaatggatacaaatattatatccatttcattgatgcttactctaaattcacttggatttacatgctcaaaaacaaatttgaggctttaaaaaccttcttgcaattcaaaaccgaagctgaattacaacttggtaaaaggataaaatgccttcaaacagattggggaggggaatttaggtcctttactgatcatctcaaacaatttggcatcactcatagacacccatgtcccataactcatgagcaaaatggcttagttgagaggaagcatagacatgttgttgagaatggtctcacccttcttgctcatgcctctatgcctctcaaatattgggatgaggcttttcgtacctctgtctatctgtctaacagattacctacacctactcttcaacacaagtctcccttagaaatattatacaatatttcccctgattacactaccctaaaaacatttggttgcaaatgttttcccaacattagaccatataacaaacacaaattacaatttcggtcttctccatgcacattcctagggtatagtcttaatcataagggatacaagtgtttagactcatatggcagagtatacatttcccgtgatgtcatctttgatgaaacatcatttcccttcacaacaattcccaagttgtctactgattcatactcatatgctgaatttgctacatctgcactcattcctatcacaagcacgtttagcaattctagcatgcataatgtttctgattccactaataattttgtgccacttgtggcaagtactaatgctcccactcaggaacaagttgcatctgtctcgaacccagctgagtcacttcaggacacaagtttgatcccttctgctccttctcatgctcatcacagcagtgcttcaccaccagttcccatcaacattccacatattgcagcaccacctgctataactcctgaatctgttactgtcactgcaccagaaacagcttcgactgttgcaccagaacctgcatctattactacaccagtcacagctactgctgcaactacaccagtcattccaacaaacactcatgcaatgcaaacaaggggaaaatctggaatccacaaacccaaagtttacttcactacaaagattccacgaaatgtcaaggaggctttacaacaagaacaatggaatcaagctatgaccgatgagatgcttgcattaacacgtaatgggacttacactcttgttccattaccagaaggaaggactcccataggttgtaaatgggtttttcgggaaaaagaaaactctgatggaacacacaacaaattcaaagcccgtcttgtcgccaagggctttcatcaacaaccgaggttcgattttactgagaccttcagcccagttgtgaaacccgtgacaattcgcattgtccttacacttgcaatatccaatggctggtctatcaagcaacttgacattaacaatgcatttcttaatggcacattgaatgaggaagtctatatgctacaaccccccgggtttgagatcactacagctcctaatctagtgtgcaagttgcacaaagcactatatggcttgaaacaagcaccacgtgtttggtttgataaacttcaccactgtctcctccagcttgggttcattccatctaaatcggatcactcactcttcatccgacatacatcttcacatactaccttagtgttagtatatgttgatgatatcttagttactggcagcaacaacaaagtcattcaagatcttattgtctctcttcataatcaattctctcttaaagatcttggagatttacattattttttaggcattgaagtgcaacaaactacctcaggtttacatctctctcaagctaaatacattcgagacttactgatcaaagctcagatgcatgatgcaaaaccatcccccactcctatgatcagtagtcttcgactgtctgcttatggtagtgaacctacaccagatcctcaactgtatcgctctattgttggtgcacttcaatacctcttaattacacgacctgaaatctccttcagtgtcaataaagtctgccagttcatgaaggatccccaacttagccactggttagctgtaaaacgcatcctgcgttatctgagtggcactataactcacgggttgcatcttaaacgttctcctctgaatgaaattgttgctttctgcgatgctgactgggctacagacatcgatgatcgacgttctacatcaggcttcaccatcttttatggtgataatttagttgcttggcaatgcaaaaagcaacataccatatcacgatcaagtactgaagctgagtttaggagtcttgccagtacagttgctgaacttatgtggatccattctttgttcactgaactgcgaatcaagattcctcaaccccccgtaatatggtgtgacaatcttagcactgttcttctcacagccagtcccgttcttcatgcaagaacgaagcacattgaacttgatctctactttgtgcgtgagaagattattcacaaactggttcaagttaaacatgtaccagcacctgaccaactagctgatggtctcacaaatgcaatctccaccaacaggttctctcaatttcgatccaagcttaccattgcagatatcaagtctcttgatacttccaattgtaatcttgaggggccgtgttaggagtattagttagagttagttatttctgagttagtaagtcctgattgtttgtcatagcagtctgttatgcattatcagttgtaactgatttctgttagctctaactaattctccttacttgtaatcaatggctatataaagcctttcttgatctttgatcataataagattgccctttgtttacaatcttatctttcactacctttctctctcttttcatctctttctctcttctcttcgtttctggtttatctgttctgcaagttctctgtttttgagtgttcatcaatggcgaagagattcataaagaaaataatgatcactttataatgatggaaatgtcaaaatgcttaaacaatatattttatttataagaagttatagataaaattaatttcacccagcaaaatcaacctgattagggaactataaataaaacaaaagacaatctttaaaaacttttccttccactgtcgtactcatatgtcaatcaatattaattgaacaaaaatatatataatatacctatattattaattggcttgattaagaaagtcatccctctcacaagtctaatttgtttcaataatcaaggttatgaagaccctaccaactaccaaggcgcgactaaggtctaatattattacagtataacctcagcttatttaaaatatcatacttccttgactttgttcgtgatataaaatctactgaatctatttgttttcaaattttccactataaatattcaacttgtcacaattagttgaaaaaaaaagacagaaaaaacgtttaaattaaataaactcatcttataaaataaataatccacaaatataatattaacatatagaattcagttttattagcgaaagtaaagatagattaatatctcgatacattgtccaagtttagttaaattttaccatttttcttttctatttgtctgaattaattaaaagaaaaattgaacgaggaatacgtgcataaatataattaatttgtgaagaattattagtaattatgctatgtattgtctatgatgaataattaattaaaattataacattttttaatgagtcttgggttcaacatagatagccaccgagagtgggagaggtgatgagtaatggggatgtccctattcgctccaaggatcaaataaggttagtttataagatgagttactcttttaatttatatggatcgtcgattctaattggtatatttgtgtgtaattaattcctttaaaagaaataaaattaatttagtagaagaaaaataaaaagtttggtaaatccaacaaataaagaagatttgtactagctagttggcatgtgatgtgagagtgagagtgagcacgtgaagaccccaaaacaagcaattatttggatggttcacgcttactttacacgtgtggaaggaagcacgtggaccgctgacccagatccgtttctggctcatccttttctcctgtgaacccgccccatatccctcactcaactcaacccggttccgctataaatcttttgtttgttttggctgtctctcaaccacgtgattaaccacgtcacttttttttgtttcttgctttttccttttaatttctttttttccggcttaacaattgcaataactaatatagaatatgagtttttttttatttttacattttaaaataatttatttttttttacatttttacggaattctacatagaaatttttattgtatttagcgctccaaattaaattgtaaaaaaaaaaaatcgtatagttctcctattgcaactagctctgcaaacataaactgtaaatttgaaaaaaaaaattaaaaaaaacatatatgaggtaatttccttataaaatagctgcaaaaaagtaaaaaaaaaaaaattaaataactagaaattaaaaaaaaaatatatatcaaaaaatatatctaatagatgatagtaaaaatagtttaaaaatttactctctatagttaaatatagttaagaatgttttttttttatttagctacaattttttattatttttataatatattttgttcatttgtaagtctaaagataaataaatattatataaatatataatattttattatttatgtattataaatatattattcaaatgttatagaaaaaagaataatgtatggtctaatctaaatgcgtgagctaaattaaataaaataaattttttggatatatttttaaagataaataagaaaattaatgtttatttgaaatgctaaacatatttatttcaattatattaattaaataaaaaattgcaaattaatatacatgttttatagataagtactttacccctaaacaataattgggttccttgcaagaaaaaaaaaacaacaaatgattttaaaacataaataaagcacatattttcagcctggacaaataattaaaaaaaatataggagttttggagagactattgttatataattataactatttataccttttttctaattgattataaagttaatttcttatgcttgaaagaaagtaacattaaaaaaaaataaagtgaaagtgactatagccagtgtatatgtagctttagcctttagcctatgatcgaattgggtgtccaaataaacttttcttttaaatgtttatttatgggaccaataattaagtagttcatgtactcgaaattctttgcccacatataattaatatacataaattatatataattcaatattttattttgggatgcactaattaataattaggtgagactaaaagtatatatgttgtatatattagatctttatttacagatattgaggttggaactaaaacaattcagatagttctcaagtggtctaaatttactaagtcacactctctttctctctggattgctataagaaaaagttttagaaagatactatgattcattaaaaaagttttacttccaaaaaaaaaaagaggagaaaaaccatcataaagtctaacttttatacagattttgacatgtaagtttaataattcacctaattaatcatgacatcatgtttaattgtactatagttttggaagggttaagctgataatttaaaagatactcaacacttggctaatctttaaccccaattataccccagctatgaagataacaaatatatgatccacttaaattagtcatttaaaactctcttccctttgacttttgtctttaagcacattattcacttttgacacatggaagctagcatgggaaattattgcacttaaatatatttttaaatatataaattattatagtatatatatatagcagcatgagtgggagagaaaatcaagaaataaattatttatttatttatttagatacaaaagaagacaaaagtatatgagattaaatactaaaaagtataaggtggggattattgggatcagtattttagctagatttataagaataataattaaatattgctcttgagaatgattgatagaattttttatttaattttttatagccaactgagatacggtcttttatttgtctaacaagattattcccctctaatattttagataattttcttactttattttcaataaaatatgcaacaaaaaagtttggtgtatataatctaatattgctatcttgtaccctcgttttacataatttaattaaagttgtctatactttaccttaaaatattgataaagaattgaattttcactattatatatatatatatgcatttattaaaatattaattaattatttagttttggtcgattaatagtaataccattcagccaaaagtactggttctttctaaacaaaaaagaaattattatactactaatcaatgacatggttgatttgatcaccttattagtaaaaataatgagtattagtattattttttctgaaaaaaatgagtaatattatactattgttgtgtcttttttttatgaagaaaaactagtattgaaaacaaaatattgaagaaaaaattataaataaattaccaagcaaattacatgttgacactaaaaaaaaattaactttagtgataactttttagttgtgacttttagtgacaataaaaaattatttatgactaaaatatactatttagatacaatctcactaatttagttttagttacgacaagtattatgattaaaaatagatttagtcacaacaaattgtaattattgtgactaatacatttagtcatggaccttttagttacaatataaaaatgataatctataattagtcacaactttttcatttttaatcacaagttttattgtatttaaaagtaagattttttatagtatgataatactgagccattagttcaaatataagctcttttttagcttttaaaattaaaaaagtctttctatgtgtgttcgatgaaaaatgaagagtccttttgcaagaagttaggatttgtagtttttttcaaaataattattgagaatttttttttcaaaatttaaataatttatataatttttaatttatttacaattttctttttaataatatctaaatattttaaaaagtacttatataattatccaaacaataaaaataaataaaaacttattaccttatactattagctataagtaagtaaaagtaaaaaacttaaaattaattttagcatacaattaaaaataaattaattatgaattttaattacgtttgtatatagaagagtacgtttttaaaattatatattttaatttattatcattaagaaaaagttaaagtaatagaaaagaaaaaaaaatgaagaagaaagaattgcttttcgtgtccttttattaatatgttttagtaatagaataaaaagtgtgagtggcacctaatttcctttatgtaatgaaaactattcaaactttagaacatttgtttctcaaaaaaaaaaaaaaaaagaaaaaaaaaactttataaacatattttaagtttaggtacagataataatttcttaataatccaaacatatatctatatagagctatagatatatctactacctttatatacgcatacatatatatcaatcattgtgagtcatgataatatattattgtgacacttttccttaaagaagtgcataggtatacttatacagttaatgaactcaaacgattcatactgatcattaatggtttttttttttttttt

SEQ ID NO: 22786 - DNA, 2690 bp, Cannabis sativa
  modified_base (2045)..(2048): a, c, t, g, unknown or other
tatatagtatatgttatatacaatacataatataatatatatacacataatataaattgtatacatatatatatatataccaaaatatatacatatatataatagttgagtcaggtatgagatggaccacctcggctcaccgttgtcagtggctacaagatccattatggccatagcggccatggatgtccaagtgaattaaacaacctaacaaataatactaaaaataacctaacaaagtcatagccttctatataaaaatggaattttttgatatttatatattttattcaatattaaaatattaataatttaacattcatgcatatatcaaaatagccaactcttattaaaaatcagaaaaaaaaaatttacaggcttttcaagacatgaaacctaccaaaaatctcttttggggtaagagcagctttcttcttctaaaagcagaagatgtaccatctcacaagtagacagtacacttgtggaataaagttgtataaagccactccagatactacgcagaactctgggaagcagcacctcaaagaaagatgggcacccatttccacataactccagcacagtccaggacgctttcaagcccgctctgtgtctcgtattggtggaggttgccataagttcaaacttattaacgtattgatccatctcccatgaagatgaattcaatactagcttttgagtagtagcatacactaccacgatatttttttcttcaacttcctcttactgaactttcttaaacataatggattctgaaaaaaatacaaaggagttagttacgtagactaactatgaacataagggcacaaaggaatcctcccccataacttcttggagaggtccccaccggattcactatcaagagacaatattctaaacagaataattgttctagatagttgaacggggaacaataagaagtaaaatacaagaaagctcatacactatctagaacaataaggtcttcaaacaaaggagtaaaaaaaattccagcatttttacaacaaaatagacattaccgagaacaataaaatagaggaacctggcttctactggttcttaaagctattcaagataatattcagactattctacttctatctacaacaatattccagtaacaagcctaaatcctaattctcaaacagcaaataaatcacacatattttctatattgagcactaatcttaaacatgcaacaaggttgaagaaatcaaaaaaagaagaaaagtttacttagtgatgacctaggtgatagctctagacttgagtagaaatatggcctgggagagcacacgctaacttcaaataatgattgtagagaaatttccataacagaaggttcttcaagacgatcgagcttttcttcaatggcgttggcatggtcgatgagggaatcgatctcagttatggtatcaaaatttttaatttcttctagtgacgaagttttaatcactgggggtggaacgtttgggtattcttgagccttaatttgaagaagaaggtgattgtaataatcaattttgtgctccaaattttttaattcacgatttttgctcttaaaagttctgggtttgaagaaagaaaatttgaaagttcgagtaaaagtggtaaaaggtgatgttaagccaagattaatggtccaatttcatcctccaaaaactcaaacaggatccaatgtatcgaaaacccattattcgggtacttaatgttgtatccgaaataaaggtaaatcaaatgatgatattgttggaaagtattttactatgatctagattttctggcatgtatgttgattataattctataatctaataccctaaatatgaattttctaatacgataaaataaacacataagagattaagaaatccttacattgatggcaggaggataataatgactccttccattcagatctctatcccttgattcctttctgtagcagagctttatcaagatcgaaacctagatcttctctccttcagtttggttggttttttacaatcttccacactatgatnnnntacttgacttgatatgagtgggcatgtactctatcactaattgctcaaaattgatgatgacgaagaagaggggaattcgaaatacaaaaggaggctctcactttctagttgtctgaaaaaaatgaaaactatgttatttgagttggatgagaatgagtgtaaaaatcgcttaactttaatttggaattagcagataattaggacttaattatgaaatttgaatattaattatgaattatcattttatggagatttatttgaattcagggtgtattgtttatgctatatatggaattttatatttttgcatgttttgtgcccctcaacattggaacgcggcgtttcaccaatagaatcatattttggtatttttgtagtagcgagacaatatagttagacattggaatgtcgagattatatgagttttagaaatgatcattttacccttagttcacttttctagttaagcttgaattgaagggtattttgtcatttgtatttagcgatataattagattaataatctgattatttctatttgattaagctagaaatacaaatattttatttcatttttatccaaatagataggaaatcaagtaaatcatcttttcctctccaaattctctctctctctctctc

SEQ ID NO: 22787 - DNA, 3184 bp, Cannabis sativa
aattttattaaaattgttgttatttctaatgcaacttcaagttaatatcaaatattatgggaaaaaaattaaaagacattaaataaggaaaagaaatttaggaaaaatcttctttttttttttatttggaataacaatttagtggaagattgagttaaaaaaaatcataaaaagtcatattgggcttttttaatttgtggactatgtgcattagcactccttgcacgggtaaatggtcggccctgcttagatataaataccattgatagagctcgacttgcatatttagtgatgtttagggttataaaaagttgattatatttgttttttttttattaaaaagaaaaaaagcaacgaacaatttcattgaaaatgtaataagggttatacacatcaccaagaaaatgaaaagtcatctagctaaataaaaagttgttgatttatttgaaaatcacaactaaccacgagagtaaagattaagaacactcgtagaaatctaaattaacaaaaacttgtaaaaacttctaacaattatttaaaatcattaaagtaaaaactctcatgtgtaccaaaaatcacggtttctaaacaaattggttaaagtattggaatcgaatgattttttttttcttatttttatagaatgatactattctattttaaaatagaaagaaagactatttaaatgcaagataagaaaaaaataaaaattatgtatttaaaattttattctaaattttatttcatttcagttcttattcttacttttatattttaatcatttccaattaaacgtcacctaaaagttgttttaattcaatgtgaatgtgacactatttctaatattatttaatgagtataaaatatgtcaattaatcaccaaatacaataattacaagataagtgggtagagaaaaaaataataattaaaggtgtgaataatgttaccattttgctaatttttacaggtatgatgtagctctggccactaatacaattggaattttaaatcttttgagttttgcaaagaagtgcattaaattaaagaagctactccatttgtcaactggttagtaattaatattttcattactataatttatagcaaataatattaatttttatgtataaatatatagaataatattatttttgatcatgtgctcgctataaaaaaaattacttttaatgataattttttaattacaatataatttttttgtgattaaatgtaacttttagttacaacaaaagttacttgtgactaaacactacaaaaaaattttaaagcatagtatttaaatacaagttgttacaaattaattaacaagtattgtgactaaaaacatatttagtcatagcgaattgtgattttgtgactaatacatttagttaggattttttagccacaacataggaataatataatttatacttagtcacatttatttactttcagccataaattttattgtggcaaaagtaagattttttgttgtgactttataaaaaattatttattggatattttgttttgtttaatatgaattagactatgtattttactttgagctcaatttttcatcaatattttttaatataatatgaagttaatcaatttttagcacgaacaaatacaaaaaaaaaaataaaaaaaaaataatcattcatgccataacacctacacctctataagtattattatattttagtttgacgaaaataaagctcaaattattatttcgtattaacactttttttttttaaaaaaaaaagaaggaatttaaaattgttgctaacaaaatttaatatttattacagcttacgtaagcggtgaaagagatggaataatatcagagaaagcattcgagtttggtgaaacgctaaagaagactttcaccaaacttgattttgaaatcgaacatgaactagtcacacacaaattgtctcaacttcgagaaaacgaagcttcggaagcaaccatcaatgccacaatgagagaatttggaattgaaaggtaactaaatcgaaattgcaaatctcctctttgcaagaagaagtgtagttaatttgtactacattatttttatttcaattgttattttaatactataagcttaaatattattagggcaaaccattttggatggccaaatacatatgtatttacaaaagcaatgggagaaatgtgcttagaacaattcaaagaagatgtctacactgtcatactacgtcccacaatgattttaagcacttataaagaaccatttcctggttggatcgaaggacttaggtatataaaataatttacaaaactcaaaattaatattacttttttctttaccatagaaacttttttcatatttagtgcctaaaaaaattatatactctaatttttttacataattaaatagttataactgatatctcacctatttttcaaatattattttttgtctaattaatctattaatacagaaccatagatatcataattgctagcattggaaaaggaaaaatgtcattcttcttgggcaaacctactttgatagttgacttggtaagtatatataatatataaaaatttattttattaaatgataatttatgaatttataagaaaaaaaaaagaaaaaatatatatgcttatattattatttaaaaaactaatttcaataataaatattaatgtagataccagcagatatggtggtaaatgcaatgattttgggaatggtatttggtgaaaatggaatgatttatcatgttggaagctccatcaaaaatcctatttatgtttctcaagcttatgattatgtgtataattatttcactgaaaatccactttttgatcataaagaagaaaagccaatcatagtaaccaaagtcaaacttttccaacatattttcactctaaacatctacatcgccattcgattcctcctacctctgaaggtaatgattaatttaatcatcttaattatatgattatgattattattattattgaaaattttacatggaacctctttatttctatagcacttaaaagatatattatcaatgtctaattttttatatgattatgtatactataattataataaatattatgtctattttgtagtttgtaggaatacgttggctagggctacatggtcatttccactttgcactgataaag

SEQ ID NO: 22788 - DNA, 2653 bp, Cannabis sativa
ctctttggtccagatccatttattctttccttgaccagacgggttaccccctttcaaaataggagaaatggtgtcatcatcgaaaatactcatcaatttttgaatgtcccactttacattgacagttaataggtcaaccacctagtttaagccatttgtaggacgtccgttagatgaagggtagaaacatttaccatgagccacccacgaatcttcccaattttttgtatccctgtcattagttaccagtttacacgctcctcttaagatatcatttgcttttaccatatttttccagaatcaggagtttgagtctttgtacttgcagttaagaagatccttccctttcaaatacttggctttcaaaatcttatagcaaagagattgactgttatttaacaagttccatccccatttagcaaagagattgactgttatttaacaagttccatccccattttgccaagaaggcctgattcatttctttcgttttctgaaacccaagccccgccccccaaaacttggggaggcaaagcttatcacaggcctttaagtggattccatggttccctttctcaaaatcccacgagaaatccttgaccatgctatcaattttagagacaagacggttagagagcttagtagtttgcatggcgtacataggcattggaagccccactgatttgatcaaagtagctctcactgctttcaatggcactttcgcttttcacccttgcaattttgaggtgaggttatcgagaataaagttgaaatctgcatctttttgtcttgaacgaaaagaggtagccccatgtattttatattaccttccggcctcaatccacaacacatctctaattcccttcttcaattcttctagagtattgttgctgaagaaaattgacgttgtgagcttattaacctgttgttcagaccaatcataaaatttctcaaggcagtgccgaaatcctttggcctctcccaaagaggctctccccaccaaaattaaatcatccgcaaaaaaaaaaaaatgtgagatagggtagtgcctccacgggaaagacaaatgcctatgatattacctttacctttggcctcttccaaaagtcatgacagaatctcaactgcccaaataaagagataaagggagagaagatccccttggggcagaccacacgacagagtaatcttgccaacctgacctccattaaggcaaacattcagagaagaagtagagatacattatgaaattcattttctaaacatgtccggcgcaccatagcaggatagcacatgatcaatgaactaccatctaattttatcataagctttcgtcagattgattttgatagcaaaaaatcattctttacccttcttcctattgaatgaataaataatctcttgaatgataatgttattgtcctagatattcctgactagcacaaaagcagactggataagacagataagtcttgatagaaaaagctcctattggtaattatttttgagatcacctttatgcgacacattgcaaagagaagtcagtctatagtgttgagcccttttagggcttggatcttcagaataagcactaagttagtaacattcactcccttgtgcatagtaccaatagtaaaaaaaatctaagactgcctcacaaaaatcatttcccaccaaatcccaataatactaaaagaaaagaaccaacattctatccggtccaggtgctttattgtcaccttcttaatacttatttcgcaccacccccaccctctttaattcatttccggtacttctgctaatgtttaaccaactatgcttccccctacactaattagtaatagcttatattatacgtgaccattctggttctctcttgtatctagatagccctccctttatcaacaaaacaatcaagagaataaaattctgctcattatcgaaaaacaaactgtgttctgctgtaaaatcttgtttcccttccaatgcttataaccaactcagcaagagacgctctacacacgatttcagaaagtaaataatttttttatttttctatagaatcatttctttaatatttgttttaatttactcccaacttgtagtagcatttatctcttaacaataagaaaaaaaaaaaaaaaaattgtgcacatatactgatatacaagatgacaagcatatgctctttttccttctacggagaactttaaaaaatatataaaaaaggaaagagagaatagatcatcgagtgtactcttgtagataacccgcccagcacaatgtacatggctactgatttagaagagtactcccttccttggcaagaacaaacagaccaccatctccccttgagattcgaaaatctgaatcgaggtatgttatgagaagccaggaactgttcctgtcaccaggaatgggaagtttaagaggtggttgaccagaaattgtccgggagatatttgccacaacctcctgaacgggattcagtgtttgttgcaaagaagagaggttgattttctgcccaaagacattcaattctcctgggagatcaacccttgactttatatctggaggttgaaaggtgccttccttaaaccgaacctgaacattatatatttgcaagaataattccgttagtatgtcagcaagt

SEQ ID NO: 22789 - DNA, 3426 bp, Cannabis sativa
attatatggaaatgagttttatttagggcataaaacccaacagccaccaccatcaggtaaattaaagctcaatgtagatgctgcaattgatgaaaagaaagaaaaaattagagtaggagctatagtctaaaattaacaaggaaacattattgctggttgtgctattcttatccctagtgtctataattcctacattatttatcatgggcgttgaagcattctctgtactggtgtaaagtaatttatctaccaattaattatgttgagacagactcaaatggtgtgccagatagaattaatttagaatgcaaggattgttcacctctttctgatattattgattatattaagtctactttataatatttttctaatgcttgtttttatgatgtaaataatatggcacataatgtatctaaagaggcagtaatgtttttttttttaataaaacttgcagcttcaaattaaaaacaaaaaaaaggagaatgaaagtacaaagcttacaagttcaaaaaggaaggtaaagaaccattctaaagtaactcattatctaatcctagacctaatctagctaagttgagctgcgacattagaatcacgacccacgtaccctatgttaaatcctagactataggataatgagtttttaatacaaagaagtaaatcatccaacacactaattacaaccattaagtttttctactagaactttacaatatgtcaaaattacagcaacaggcaatctgattaattgagaccattgcacagctagcagaagccctttggcttcagcaattgtgggtgagacattgccaacaattggtttaataattcctgccacattttgattggattcattaattaccacaatctccaagctgtgctttttcttggtattgtcaatagccacatttgtgtagatctgatagctaccatggaaacaatacaccaagtcagatggtgacctgttcatcaagcttgtttcaagagtacaatgttgctgagtatccaaatactttagcaaaaaactgttacagcaagcaaaaatttttgaaggatccatagtcaatcgattaaaaaatatattattctgctgattccataaagcccataagaaacaaagcaaaatatcaatagaagggttatctagattagttaatacattctgtatataatgtaaaatgccaaaatgcttatgagaattttaaaaactaacaaaatttgatgccttccaagcttttctagccctagtgcaattgagtaaagcatgtgaaaccattttagagtgaagattacataagagacacaaagaagaagaaattatatgccactgagaaagcacctcaatcacaggaatagagttacacaccaccctccaaataaaatgcttaactttagggaacaacctagaatgccaaatcttggaccaaaaggattttgaggtttgaaaggatgaggaagaggtaaggtcccttcctgataaagcaaggtgatatgctgaattaacactaaatagacaagaattctccttagctcaaataagctcatctttatcgcttaatctagagataggaacatccaaaatctcatcaaccaggcagttatcaaaatgggttttaagtttatttaaatcccaagccccagaatcctcaataaaatatgatagcttggaagaaggaggctcgggatcttgaacaaaactttaaatctttcagttgggatccagtgttcctgcaaagtatttattgtttccctgtctgcaactttctagatcaatcgtgaagccaacagatcccttccccaaaggacacttctccaagaaaatgagggattgtgactagtattagcctccagaatagaggtgttaggaaaataacaagctttgaggataagactaagcgatgagttagggttgttgaagattctccaagcttgtttagcaagcattgcttgtttaaagtgaataagagacctaaatcctaaacctcctgcaaacttagattgacaaacactttgccaacttttctaatcattcttttgtgccttagatgaagttccccatcaaaatctagccatcgcagcctcaatatccttacaaagcttgacaggcaattgaaaataggccatgacattggctggaatagcttgtaccacatcttgaagaagaatttccttactagctttaaagaagtgttttgaatgccaagactgaagaatagaagagaccctatcttttaagaaagaaaaggagtgatactttgaatgcaataggcattgagggagtcctagacacttgctaataaaaggtctatcctgtagattgaaagtggtaaagaaatcttttctaatgtcaaggggaacatttggggaaaatagaatggatgattttgcaaagtatatgacctggccagaagctctagaataaactgagagagcatcattaagttcagcacaagaggttctctcagttgagcaaaaaatgaggctatcatcagcaaaaaataaataagtgagttaaagaaggggcatgtctagaaatagagattccctttaaaagattactatcttgtttaactctaagaagagatgataaaccttcagcgcagagaataaagagataaggggataatggatccccttgcctcaagcccttagtcggcttaataggacctttgatagccccattgattagaaaagaaatagcaggggtagaaataaatttcataatcaaagagacaaaatttaaaggaaagttaaaatgaaacatgatactctcaaagaaatgccatccgaccctatcaaaggctttggtttaagggcagcccaaccagttttgccttgccttctagagttaattgcatgaataacctcttgagcaagaaggatgttatcaaaaataaccctacccgagacaaaaacactttgggaaggggatataattttatcaagaacaaccttcaagtggttagcaaggaccttagagatgaccttgtaaagtgtggtgcacaagctgataggtcaaaagtttaggatggagtgagcatgttgcttttttggaatgggaataatgagggtggagtttatggtagaaaagtttgtaccattattaagacaatcaagggctacattaacaagatctatgcctaggactgaccaatttttttgatagaaataagcatttaggccatcaatactagtagctttgtcaccagacaattggaaaagggctctcttaacttcattaacactaaaaggttgtcgtagcattatagaatcatgatcattaagaggagatcctaaatgctctaaaatttaaacaatcgagttagcatcacagccttgagattgaaaaagattgataaaataggtagagacaacacaacaaattccttcaaaattattgacaatattttcattatcttcctt

SEQ ID NO: 22790 - DNA, 4369 bp, Cannabis sativa
aacttttcccattacaatccctccaaacttaagatctacttatggtatagttaggaacaaagatgataataattgattcatttttttatctcaaaatatgtgtaaaaataaggaataaaataacaagtcaaagttaaaagggtaaactagaataaaaactacaaaaaggatgacttaagaggtacaaacgttaaaaaaaattgtctaaaatcattttttcgaagcacacatcatcaaagattttacctcaaaagcttagtaatgcaagttctgtccaatccaatttattaatcatctaaccaatcaaacatgtataacaaaattcaactagtcatgtttacaaatgatattcaactttttctcaaaaagagctaaagttaagcacaaaaaataattaaattaagcacacagtactatcaagtcaaattcaataagcaacaagagatgacatttcttcaatcattaaggcctatcataatactaagataaactaaaaaaaacacaactaatcaacaaaaaaaaaaataataattttttttaagaaaataaagttcacctcctaaatttaattatcgcattgttaacactaagcttagaagaaggaatcaataataatcaatttatacatagatgatgtaattgaaaactaaaaatgttaggttattagagaagagagaaaacgattaacaaaaagatgagaggagaaacactttttattcggcagatgaccaaaagtgtcacccacatcatatttatcccgagtacaaaaagaccctacaaaaaaattatgtcaatttcttgtttgtatatttattacatagttaataattaaatctcatattaaacctatcaatatcatatcatattataattaaatgtgaaaaaattgtcatgttgagtaaactactaactaaacgtattatattcgtattaaggtttttttttagatcgtattaaggttcttacgcgttatattaatacttattttaattgtatcaagaattttaatacaaacatattttaaattgacgtcatattcatatattttttttttcatttatcgtgttattttagaaacatcaaaaattaatttttaaatttttttcttcaatttaaagttaataggttgttatattgggtggtggggttgatacttcgaataaacaaagtgtcttcgaacaaattcctattaaaaggaatacaaaagatgcataagacacgtcaattttgatgggcacatggacattcaaaatgacaattatgaatcgagtcccacgtagtgacgttttgtgaaaaaacatgcgacgcaactatgcagttttttttggaagtcgcgtagcatttattagattgtaattattaaggtagtaattatacaatataataaccacactttattaaaaatacaagatgtgtttagatttcaagtagtaattatatataaatatttatttttttaatgaaagaattagtaattacataaaaaaaatattgtctattaattaattattaaaaatagtaatatttcataattatgccaaattcttataataagggttatgataattgaagagtataactgatgataaaattaatgcgtaattacttgattaaacaaacacattgaatctaaaaattactccaaaaatcacactcaattccaattataatatgaatttccaaacgcaaatgtatcaaaaactcaaaacagaaacacacgcgcaagtcatacaacatgctaacacaattaataaatgtgtcatgtagtacaaaccctattgacatgattaatgtgtcatgatacatagttttaacataacattatattgataaagaaaattaaaagccctagtctcaacagtagtttacttaatcgtatcatatcttgtttgtgcagatattttatgattaaagtaaacacacgaacacaatatggttattaatttgttgaaaatttaaacgcacaacatgattttcttagtatgcatgtaacacaatattagtctcaccacagttatttaagactcctaattcatgtgtcaacataattattaaaaagatcagtataattataaatttataataaagtattgctattagtcatcaggtcctctatgacatgattaatataacacaaccagaaaattattattgaacttttattttgtttctttctcaaccaaactgtgtttagcacaatagcacatatgattgttagcacttaattttattataattttaataatatattttgaaagagggtgtttgttgataagagggtgtttgttgatggacatattgttatccatattagtcgttggatgaatgtagctagtcttgcatgcttttggaatggatgtacaacttggccggttagaaaacattccttaaccttttttttgaaagaaacttttgttcattcattaataaaattgatggggttcaccgaggaaacaccctccccttgatacaaaactgccaaatcactatgaagtctcgcgtatttagctacaccatcacccataccattacaactacgactaataaaaaaaaagcaacacctatgaaacaaattagataagttcaaacttaaatagaacacttttgctaccctccaatcaggaattactcttgttgttaaagcacgaactgccactttcgaatccgacaggatatgaacttcactccacccaacattagcagtcctgttaagtgcaagaagaattgccaaaaatttcgcctccaacaccgattgagcctgtatcttttgggagctcacaaaccagcagccctctgtcatatcaacactaatcgcagcaatgcccgcagccccttgaaccaacgatgcataagtgaggacataattctggataccaatagccgatctctcatcaattctctgcccttcccgaacctcattaactccaacaatgcaacattgtgtgttaggaaaagatgacttgagttccaacaccttttgatcgatttttaacaaagcagtctggacattaaccgcttgatactggatacaaaaagagtttctctgatgccatatttcatccatgatacaaccaaaatatgttaacagatccttcctctctgaaccatcaagtgtgtcaattaaggataccatcatgttgatcatattgtctgctggaatatcatctagcttcaaagccaatctgcaaccaaaccagacagctttggaaaagctgcacttccagaacaggtgaaaggctgtttcctccttcgtgtcgcataagctacacactttgtctagcagaaagtggaggcgggatttaggggataaagatttgaaaatttttgtagttatttaaaatcatatgtaaatttttaaaaaaatttaaatagtttacaatgcgccaaaaataagatttaaacagttacaagggctgaacatcggacaggtttaccgaatttcgagtttgcgggtttcgggttcacgggttttgggttcaaaaaaatgaaactgaacccgaacccggataaggcacgggttggcgggtttcggttggccgggttgaccgggttgacctggtcaactcggtcaactctttaaaaaaaataattttttattcagataattctttttttttatttattaaattaaacatatatataatataacaattttagaattttttatttttaattaatatataatgtaataaaaaatatatataatatattaaatatgcgggttggcgggcgtgttcaggttcaacccgaaacccagtactcccaaaaactcaactcgcaaacctgcccgaaggatagcatattgaacccgaccttgtccaaacattttttttaaaaaaaaaattgcaagttcaccggttcgagttcgggcgggttacttgggttcaggtcgaacccgctcaaaatgttcagtccttaccatggtaataagaaaaaacagttacccttgcaacaacatatgtaaatcttatttttgacattataaattactcaaaattttctaaaaaatttaaagacaatcgtaaataactatacatatacgatcatgaaaaaaaactgaacaaaaaaattttcatgagtgccaaaacggtagtttattgaaacacctgaggtattctttagacttaccctaaagattttctaagttctatgaagttttactcaaaagaaaaaaagtatcaagttttttttttcccaactaagtattttatagcttaaaagaaaaaaagttaccagcccttgtactgtatctcctaagaaacaccaactccatatattatatattgaccttaaggcgtttggttgggaggaatgaaaatataggaatgggaatgagaatgtgaataggaataggaatggaataaaattt

SEQ ID NO: 22791 - DNA, 2020 bp, Cannabis sativa
atgttttatttcttataattgataaattggattcactcataaaacaaaagtcaaatatgttggtcgttaaatctgactccctgtttgatggcttttctttttggtatgtggaattaatttgagtaatttttaaaaaatgtttcattaatttattagttaaaactcctctaattttgaagtattcgtaaggataacaattgaagcagtacttaagtcagaattgttttgtcagcttggtaatgttatatatttatgtgtgtaaaccataaagataaatgtatgttgctgaaataaaaaaacccgttgcaaatgtatttttttgaactgttttattatataaataatatatgaaaataatacgtttttttttttaatcagaagagaatcctttctattaacaaacttaattccaatataaaattcttccaattacatcaagttaaatcaccacttacttagcaagcctatagaaaataaataatataaacaatctcacaaaagttcatgatcaatgaaaaagaaaagaacagaaagggttaaggaaacttccattataggtaaaacaaaatcaatgtttcgaactttttttttcctgaagactcgaaaatagattttttttcatattataaatttataatgaaacaaaggcttagttaattaatgatgagaaaacgacgcattcacaaacttgcagggtagagagtgcaagaagcaacactattttttgacagtttttaaatgccaattgcaccaaataaagtttaataattaaaacaaatcttcacagaccgcaataatcaatatcctatcacatcccattctcaatcacaattaataaaaaattaagtaatgttagaacacaattaaattacattcaattttatatttttttacacttttttttgtcttatctttggagcacaagccaaaagacaaataaaattttacacataataacttcttcttctttttgtatatcaatattttataacttcgtcatctatattaagctttccatctattttctaaaaaaccaatcacaaattagtttctcaactaccaattagaaatttataaatgcttttaaaaaataaaaatatagaagtttgaaaatagctgaaaatacacatgaaaaagcatactcctatctctctttaaatggaaaacagaaatggtttaagataagaattttcgtacgaatcattttttttaatgtgtcgaattcctttgtagcattgagttaaagattgacagaaaaaaccagaatgatagcccccatccgagggtagggtcgttgtgttgaccaaaccactcacactgcatagatggtcttcattacaccatactccacaaaaaaaaaaaaaaaaaaaaaatacaatttgaactttgaactctttgcgatatggttaatatttacatatttcttaaaccgcatagtgcagttcaattagcagtatctcatcaattttcaacaataccattttttaagatatagtatttacttttggattttttattttataattgacaataaaagaaaaaaattattaaaatacgaaggctctgtttgattttgatttttttttttttttaaaaaaaaaacaaaaataggaagggttgttttcacataaattgagattatttcataaatatacatgtgtgacaaattttttacatttttacagtttattatttgtttttttttttttaacattttacagttttttaacaaaaaatacagagtggtttttttaaaaacccgttgttccataaaaatgtaagtaaaagaaaaggtctgtaaaatagttaaaaaaagtctataaaaatgtaaaaaaaatctattcttttggtgtattgtgtaaattttccaaaacatttatcctatgttatcataaaaaaaatataattttaaaaaattaatctccataaaaatgttaaaatttggtgtgcaagtaaaaaatggaggaaattacactctatactctttttatattgtcctcttttatttttaccctctttt

SEQ ID NO: 22792 - DNA, 6290 bp, Cannabis sativa
acaaaagaactccacggttaagcgaatttcaagatgggtgatctcctaggaagttttctaaggaagcgtgcgagtgaggacaaagcacgctggaagcactcttgttggtctgtagagctagtcgttagtccatgaagcagccagagtgacgcactcgtgtataagagtcattattctataggtgtaaggacccaatagaggcttgaagcgggaacgttccttggaagttttcttaggaagcatgcaagtgaggacagagcacacttaattgtggagttcttttgtgataggctaccagaaaataaggtgtaccttgttgatatagtgagacaccctgacatgtggggaatcactaataaaccatataacctatataagaagagtaagaggctgaagtgaagagaccttctttttgacttactggacggctccaagaacaccatatcccttgcttcatcttttccttgagtccaccatactttgtcgacactaaaacctcatacaccattgatatacttccatttttctactttgttggttcattgttcccaagaaccttataaacacgaactttgatcaaatttatgaatattgagtctcccatgagtcctttcttcaaagttctcaattaagatttcacatagaaatctcttgagaatataactctggtgtgtcagatcaaatcaataaaaataaaagtaggcattgtctcatttccattgcgacatggggggtgaaatattataaatctctggtgtccactttatttattgcaattttatttagtcgaatcaattcatcgtagttctctaatcttagatcagttgacgaaaaatcacatcaatagtttggtgctttcattgagagcgttgcgatgaaagttttgttgttttccctttgaaaaactcactaaatttacctttctaacaacaatggtgttgagttccagaagaactaattttgaggaagatgtcaaaatcctaaggggagaagttaattagtcccttagtgaaggaacctttgtccctccacaaccacatggagaggagacttcttaacaccaagaaaagtgtcccatgccacctatgcctaaagatgagggacaagtccaagactgtgaaagtttctcatctccattaagggagcgcccacgagtcaggtccatacctgtgcatgaagtattcctaaagaatgagacattgcgtgcccggttggcagaaagcttacgtcgcaacaaagagctccaagagcaagcaccaaaaggcgtggggaccaaactcctccactaagagagccttctccccctaagagaagaagaggccgcctatcaaaagagcatgccaccatggcacatcaggggattcaattccatgatgaccttggaagtaccaatccaccaaggagaggggaccaacaagctttgccaaacatttgagtatgtacaagacatgcacatacaacccatgcacgattgcatgaatatggccatgacgctctggcccacgatggaggtacccataaccagacaaacaaagccaatgatgcaacccaacattagagtatgtcctcgacacactcatgccactcgtgccaatcatgcacaattgcatggagatagccgacatggtaaaccaaatttgtaagtgtgggccactccttagaaacttgggcgtggacagagaagaaaaaagacaatcctctaattcaaagagaaagagaagacgtcccatgggtagttgtgccacatattaccccatgaggaagcaagcaagatccaatccacataattttcataattttcctcctctatgaggaattatgaaatatcttcgtgaaaaaaaataatacacctccacctttgggtaacaacctccttcgaggtgacatgggagtttgtgccaacaacgatgcacatcatgcattggataatcaaaactgtgccccacatgatggtcctgacccatcccctagaccagctcatgttccgtgtaatataagggtcgacgtcgaggaagaaggggagaaccctcatcaagaaaggaaacaacatactcaagaggcaagttacccttcaaggtcacaagctaccctcacatattcccaactcggggcacacaaaattctttaataatccttccttgaagatagcgacgacaccaactcgctaaataattctataagtatttatgacgacatccaaccttggtcctatcaagtacattccactaatcgtcaataccaaggggaaagaccaagtaaaaatatatacaggggcatctccaaagagaagatccccatttaacacatccttattttagtaaccgcaccaacatccctctttttcaaggaaccaatgttggtaaccgcgccaacatccttcttttccaagaaatcaatcctcatgttggtaaccgcgccattcctccttttcaaggagccaatccacatgatggtaaccattccaacaatcctcctctctctgtaagagttgattgtggtataccaaatggtaactctcgcataacaatgcttgaagaacaactccaacaacttttgaataacaataaaatgaaggagcatgaatctgatgaagagatagagcccttcatgccttatatcttggcattcccttaccctctagagtttgaattgctagctaactacgaccaagtatgataggaccactgactctggggtccatataaatgatttcaatactcttatgcaagcacatcaagtggctagagatttgagatgtgttttattccctgctaccttatctagagttgcattctcgtggttcaaaaagtttaaaaggcactccatagtgtcatgggtccaactctcagatgctttcaaaaaggagttccaagtcgcgagaacccgcaagcttgaatgttcttccttggccaacgtgagacaatttctaggagaaagtttgaaggcctacatcaaccatttcaacatcaaagctactaaaactcgtggcattgatgatagtgcaagactgatggcactagtggcaggtatcacccatggtttcgtattttggaacaaccttcaaagcaagagtccacacaccattgaaaaatttatgaagcaggcacaaaaatacatcaatatttaagaggtaaggatagcaaaaaacctccctctccaatccttgcagcccactcaaaccacatttgcactaccagaacttactaatgccaatatggttgctaatccttgcagtcccaagaagagtaggagtgatggcccttatcaccctatgtatttgacctacacagagttgacaaaaacccaagaggccatccatgtggcgaatgagcattgagttccattccgagttcctaaatctatgaagcatgatcgagccaagagagatgcctcaagatattatcaataccataaagacatcgatcacacaacaaatgagtgctaaaacctcaaagatgaaattgagactctagtccttaatgggacacttacttattatgcacaacacaattttcaaggagggcatgtcaactagctgaaactccaccaatggagcgagaaggcatttagcatttctttagtttttctgccttttcttttacaaagacactcactttttaatttttagttattaaactattacctttattttttggaatgtaagtagctaaactcacatttataagagcactacaataaccagattttttcttattatgccaaacccaccaaagagtgaaataggataatacttaacctataaacacccagggccaaaagagcgtagatgaaactgtgctcgcaacaaaaaaaaaatctcaaagtcgttactgatatgccactttaagtgcgtgagattttaaaaaaaaaaattccatgaatattttttcaaaattttacctcggagaggggcaaagttggtatgtagacgagataaaagacaaagtgagagcacttcaaggagccattaagactttgacaagtgggtcgcgtgctaaaattgagtacccaaagagttaagcccatgttgacaatttgcttgaactagcaaaaaatgcaagcccccattggcaacaattaatgttatctttaaaaccccatgttgcaaagataataagcatcggaataaaatacgcgccaaaaaatatattaaacttaagttccaaagttaccaagatactaaataaattaagttatatatgcttaaaaagttccaaagatgtggacatttacaaatccacacatgtgggtcccaacattaaggcacaaccaaaaagtgtaaaacaagagaattcaattctgctcaccgtagaccttacttcccaatcaacttgagcaagagatttaactctactcatggatgagtttgggaaagggatacaattctactcaacactcaaaacttaagcaagagatttcaaaattttgttaaattttcaaattcaagaaagagataaactctactctgaattaaaaaacttaagcaaaaagttttaaaccttgcaaaagtcccaaaatcgagcaagagacataactctacccgactactacatgagatgtgagatataactcagctaacattctaataagaagccacatgctttaagaactccacacatacaagtccaaggaaattggtcgtgcccatgcacacatcttcacaataataaaaaatattgctcgtgcccatgcacaccttttcaattcaatgaaggacattggttgtgcccatccacaaatctcctgaagagaagtaacattcatgtactctacaaaaaagtattttttgcgcaagccttggaaaaagtgcaaaagcattacttgaaggcttacatgtaaatacttttggggagaaaaagtcatacctaatttttgccaaaaaataaaatggttactcttgcacaagagcccacaagccaagagtaccttgaagacactaaagtcaaccctgcgactttgattaagactcacaaaggctaaataagttaagacctctacttgagggtcccacaacacctctaggggactcaaaaacatcaaccaaccatttggtactgggactcacacacccacgtgtgcctaaactagggttcatgggcccgcgcaagcgttttcaccctagagacgtgtatctgctaaggaaaccaacaaggacttgactcatttaggcatgaaatggcttaaatttgtgcataaaataaaagtggcataaaacccccatggaataaagcctatgcgcccactgccatatgagaatggcagtgctcttcaatttttagagagcactgccacaagggaatggcagtggttgccacttataaagaaccaaggagatattgttcaaatatgttctatcaacaccaaggagtgcaaaacaagtgaaagaaactactttccaccaaggaagaagcctagtcgactgctgccatctttgtggcacaatgagtggaagtggtcggccatgaagaatgggaatgagatatctcgccaaaaatatattttcacaattaatatgtcataaccatgtgaaagaagccaccaagtggtgtgaaaaacacttggccgaccactgccatacttaagggacaattggtggcgttggtcggccaccacataggaggaggagtttcattggctaaattgtattttcaacatccatgtatcaaatacaagtgagaaaattcacccaagacttcataaaccccttatgcgaccactaccacttttttgccaaaaatggtggcaatgctctcctaagtaattggccaataactaatgtgaccaaattagttttctagcatctataggactgaaataagcaagaaacaccatctatggcttcccataatccatggctgaccactgccactttgtagccccaattagtggcaatgatctccccttaggatttcagacatcgaaatgaggtttcggtatctcaagaactccaaaatatgactcaccataaaaaaaaaaagtcaaaacacactttgaggggtctgagaacatgcatggtcgagcactaaccgtttggccatgtcaaagctcgcaactaagacagaacataacaaatttcccttagtaaaataggcataactctctctcagtttttatctaaatgacctagttcaacttgctttgaaaaatattttcaaggcggatctaagtttgtctcatagtcatagcctaattctgaagttattaggtctaaaatttgctcgcaagacagactagtgttgctataattttaaacactacgcaagtatacgcaatcaagtagtaaatctcac

SEQ ID NO: 22793 - DNA, 2285 bp, Cannabis sativa
tgattaattggagaactttctaattaagtaaagacaattaattcactagtaatcacattaagcatgcagaagaatagatgaaaggaagtgactatattataataatatatataaaaattatcaaataaataaagaagaaatgtgttttgatcatctagtggttgaatggagttcgttggagatcatgtcgaagcacattgccatcattttcaagctagacaagagcaaaacattgatgttgtatgtgttagatcattgctcacgtaaaattactacatgggctctgtctattgcaccacatgtctaactatatcttcttctcactctaccaaaacatactaatccatctactataaatacaagatgttattctcacaactagataaccaaattaaccagctatagatctctctctatatatatataagcagaaaaacaaactacggttcttatatcataagcttattatattaattgtctacacttaaccaaccatatattatataaagaaatatggctcttcttgctctctgccacaaccgccttctagttactctcattttgatttgcttattttcagccacagttagaggtaagcaaattttatatatagctttcaatgtcactctaatttgttgtacatatgtatataaaaatttatataccttaaataaatttggatagtgtgtatttattgcatcttattaatatatttataaaaatttgatttgcaggtaggagtttgggagtagtagtagtggctaataataaggaagttgagcagaataatttgaagaagggtggtactagtcatgaagagcaaaataatgttgtagctgttaaggaagagaaggatcatggtaaggtgacagaaagtgctaatgatttattgaccatggattacactccagctcaaaagaagcctcccattcataactaactctatatatatactatgtagcaagttatatattgagaaactagttgatattgatgaatatcttattagttagtcttattacataatataaatataaacaagtgtaatgattaaggaaggtgggtgggtgattatcatctgatcaacgtttgggatatgatgatgatgagttaataataattagtgatgcaaacactttctttgatcaaattttaattttgttaattaatattgtttttttttttttcatctattaatcatgattaattaaatgtgaaataataaatatggtactgaaacagttattctataaccatagaacgcgactctgtaactacatattagttaaccataaaagaataaaagtataaaaaaatgaaaacacacaagatttttatatgtggtatcaacaatgcttgcagattgttactagttcacggggtcatgcccagagataagattcattaaatagatctcaaaaatacaaagtagttgacttatgcataaatagactctctcttattatgtgctgaaatcttgatacttctcaaatgaatcttgttaaaacttcaagtgttcaaactcgcttcgatttgcttgaagagtgcttgcttcctcccaaggtaacttaaaaagatatctctcgaaatcttgtagaaccttctcccgaaggtaacactgttgttcttcttcttttatagacttaattacagactcaagacaataacaaagacataaataatgagttagagtcgaaactcactctcttcaataaaacaaagacactcttttctcacaaaataataatgaaatttaaagatatgaaagagatagaaaacctggtagccaatatgagtattaatagatgatatactcatattgggcagcttatacacggactggacacgtccacaacccacagtaaactttcctaaaaaagatcttcaaccaacctaggaatttttgcttttgtacctacaaaattgtgagctgtaagtgtgactttctttttataaatgttatcccaaaatttatacgaatgatgtggctctttcctgggtgacacgtggactatttttgagacttagacggaggataccatcctcgaaatgttgcccagaggaaatgacctattaaataactgtagtttgatgactaaagtaaatgtgtcgtgcatgatgaactgtttcgcctgaacaacatcaacaatttaggccttgtgtgttccgtctcgggtaaacgcgaagatcagatcagcaaaattactttcctcttttgaatataaataaaatgcctattttcatgagatttccatgtgtaattgatgtaaattaggaaagtagta

SEQ ID NO: 22794 - DNA, 5390 bp, Cannabis sativa
  modified_base (5343)..(5358): a, c, t, g, unknown or other
ttgagagagaaaaacaatttttcttttcttctctggtatttcaaaaataaatgtgtagaaaaagcataatttaatttctcaaatcaggcttctatttatagtagttaatttctaattaattaagtcatctctatacttgaattcagttacagagatttttttattagggaatcgctcaaccacttgagagaatatgtcaattaacttggagagaatatctcaattactttaagagaatatctcaaccaacttagaaatatctttaaccacttttaaaatttaaatatttatttgattgaatgaattatttaacccaaaagacaaaaccaatagggtcaccctactatagggtatgcacctaccttgtcttaattaagataaggatggtgtcttttgtcttgaaaacttttatcttaacaatttttgtcttgataaattttatcttttttcctatttaattaatttgaaaaatgatttatcacaaaaataaataattactattttgtcaatacaaaataaattttttagagaaatattatacaactctttatccctacccttgagagtattttaaggtggcgatttagggaccatggacctataattctaagctccaataaactaaattatttattgagtctcatcaaccaaataatcctgtttattaattgtatgattactccagtataaatatagaattaatctcttagtaattatagaattacatttactaagtttcattgtagtgtccattgatataattaattctattgattggccctctttgtgtcagttcgtaattagttttggtcaaattactgttttaccattctaattacttctttatcctttagtatcattaattcactagtggaagaataatttagatcgcatctaaatttgcatgcaactttcttgttctagaattaaaaagataaagggaaccaacatttgatccgttaggaaagttaagattctattactatagatcatgttcccatccatccacattgttagattcccaaaataaaagttgtaagaatcatcttctctgataaactttaacgagtgaatcaaataacctaataacatgaacaagagttcatgattactcatgatttaggtcgatctattattgatcattatgatatgaataggtctgtatagtaagtggtaagtttgataaagacagctttatccaaatcagtccttgtcatatataatcttgattatatacaataccctcacttagaagtcatgctacatcagtaattcgaataaagattacttgcaccgaataatgggcatctctgaactgcactagcaaccattgattaaagattctcaaacttaagatgatgctgactattttactcatggctaagtgatcttaattctccgtataactacgagtcacaacctcatatatgaataagaaatttttaatatttatatataaattattcaatattaaatattaacaatacaatatttatgcatatatatattaaaatatttaactcttatttataatcaaaaatgactttacgggcttttcagggcatagaccctaacactttcaagatgaatcttaagatgttgctagtggattggatggacacctttccatcactgggatgatgacttcccttatcttcttgtgtttggcctttgtgctcgttaggctcttgagtcttatgcaggtatcacagtgggtaactcatacgagattgttgtttttatggaagcacttggtcatttttgtgagtagccaccaactccattacctcatcttgacccctagttgtgttgttgtatttatagcgctagacacttgagatgttctttatttttaagacactgaggcctggcaagatctccatgcgagatggggagcttgggacttgctcctcttgttgagattcatctatgtgctatcgagatgcatatggtgacatgccaagttggagggcctgtgaggtgccccttatcaagatacatttagatgttaccaagatgcatttggcaagatacggacatggggggcttgcgaggtttcccttgccaagatgcatctggatgtcatcgagacgcatctagcaagatgctgagttaaggggcttccaaggtgccccttgccaagatgcatatggaaagatgccgagataggggcctctcagggtgccccttgccaagatgcatcttgatgtttttgagaaaaatttagttatatgctagtctcacttaattcttaattgacatgcataacatcattaatatttattttaaacgatacacaaaactatatttcacaataaatgctaagaggatcaattgtggtgatgtgtgtcttgcttgtacgatccgttatcgtggtaatatttgatcatttcaacttggattattgattggactccatagaaatcgaatcttactcaaactaatcttggaaactagctttgataattttaagaattagcacttgcactttccccactagtctacgagaattctttcatttagccaccgacatcgcgggatgaaccatcatgggtgacactggtattttttcatgagaaggagacctttaaggtggcgttgaagcctatcttgaggaagtgaactttctccttctcattgacgttaaattcttatgccattaataggggcattaaaattatttttatagttattgcttaagtattgaccactatttttgggtttttattctcctgcgacagtagcggcatgagatgctttgtcaaaggtcatagaataggaggtttcctcttaccttttactacagtgagatttattaccttttaccattggtgtgaatttattttgggggagtcacctagttagtgatactagaggtttcactttgatgggagattagacgatcgtgcctagttcattccgcaagcttcctccatttgcatggcttaggtttttcagcttgggtctttcttgtgcacttgaggcagagtctcttgggtgatagacttagttccacttagttgaccctttaactacttcggggggctacccttgtctctgattccatggggtgagtgttttttgagttctactttggacgcaacatgatcttgggtcccggtacactttcccaacatgagtcttcatacgtctcatgtgggacatgtggtcacttgcttgttcaatcagaaagtaactttgttactttttgacaccacattttggcgtccccgtcgctaggtgttgtgctaatctggccacacttgcatttcgtaaccccctcttggtctttcactgtcgactaaacgagaacataatgcctttttccatcatcatacgagattagtctagcggtcaggtttttagcatttagacaacctttctcccgcatgatccaaggttctcttttgtaggaagatttatgatgatgactatggggatctttcttgtcgctggaggcctggcattcctctccacatatttcactgtagtagttatttagacatggtctttatctctttagcttgttttggcatgtttaggctactagttgagttagagaagagcgtagttgtaagcttattcttttcacagatggcgccaaactgttgataccctattctcgccaatgaaatcatggcaacaaaatcaaagctaagatgaaaaatctagaagaatgattagagttagaaagcttgaagaataaatgttcataacacaatggagataaaagtgtgtttgtattgctttcatatgcttgtcattacaataattttcaaatccattttcaaattttacaatgggatatttatcgaatctaatggctggagatacacaagtggtacccaaggggacaagtaggacatgtactcctgtaggtcacaaagtgcagacgtggtctagggccaagtatagtggctgtcgaatgttaggtggtcccaacgtgcagggtagtgattatagcgtatactttgtcgagacgccagggcatgcaggcgaggcatttctgctactcgtactttttctcgtgacaatctccttgttccaggtattgtaggtggtgtggtcgtactctgacgtgtactcaactgcgtgcataccctatcattttgattattcatccaacagtctcctttccaacatttaggaaatctcactaagtgttggtccaatcattgaaggatttaagggatcatggccaagattttgattgccatgaacattatcgagatgttggccatggcatctgtgcctagaaagtctttgtgcatgcataccaaggtgatcttttcttgttgttccaagtctctctattaagggcatgtgcctagatggttttcttaggatacacactaatataatacacactgagataatcaataattcatcatggcaaagatggtcactaagagtttctacccttaatgcgttcgagatggttaccaagaggctctccccttaatgtggtcgagattgtcaccaagagggcctcctctcggtgtggctgaaatgttcaccaagaggccctcctcttggtgtggccgagacggtcacaagaaggccctcctcatggtgtggccgagacagtcacttagagggtctcctcttagtgttgcctagacggtcaccaagaggctctcctgtcactacaagaaaacctaaatgcgccggcaaaagtacactaaatgtgctgacataatacaccggcaaaagatgtcagcgaatcttggctggtaaaagactttttaccagcgcatagctgcacttcgccgacaaaagttaaacgccggtgtaaaaggatacccttatccactctgaacctgctttgatttttttggtcagcgcaataatgcgccagtaaaaaggtttgtgctatttctcaaattggcgcgaatagttttgttggcgcacctatagcgccggcaaaaattttgcgctccaatctgagaaatggggcaaaccttttagtgttaagttttgctagcgcagtaatgcgccgacgaaattaattattttttaaaataaattaattattataattaattatagtatattttatattaagaaaaaaaaatataatttacattaaaatataaacaaacattaattatattatgttgtactaaaattagtatataaataaaacattaaaagatgtttgaatcggaaaaaaagtaaagttctaattggtatataaaataactaatgatctataggcgattaatgtcatcgtcgttgggaaagatgcgatgatgatctagcaccaggagcaggcgatgacgatccaacaccaagaggagtaggggatggtggaagatccatgggtggcaagttgaaacccgnnnnnnnnnnnnnnnnatactcaaactgatcttggaatcgtctgaggt

SEQ ID NO: 22795 - DNA, 2298 bp, Cannabis sativa
  modified_base (2245)..(2248): a, c, t, g, unknown or other
tttttttttttttttttagccactaaaatggcaacacccgatctactccctcttcctcatctcctttagcatcaggaggagtagcaggacggacctcgtcgtggtcctctacccctttaacttaaacgtcccaaacaatatccctctcttcagtagcgggttgggcctattctgccctaggcaaggtggcaaggtgggtaatgtatgggtcggacaatgaagatttctacactgtctgcttggtacgtgccatcattctacatttggacggagttttatttgtgtgcctagcaatagtcatagcaaatgtggcaagaggtttgcccgccacagcaggattcgggtagccctcaagcagagtgtcgactacgtcttgacggactatgtacgtctagttggacgaaagatagcgtctttaccccttcctatgttcccggacaaaatagtcgtatccctcaccttggatctggtcaagatagaaatgatgttctacctcgggttctagggaaggtgtgtgtccactacttatttcccagtcttcaaagctaaagttagaaatattgtcactagacaaatatggactggtacagagacgaggatgatcatcgtatagaagttaaagtagatccttgtcgataatgtggttgcctccccaaaattcacaagggttcatctacaaaagataggagacaagaaaatgagaagtggtcggggtaacaaataaaaaacaggttgaatgtatcgaccaggtctgattgaggaattaaaaatagaaatttaacttagaaacaaaattttcaacccagaagttcaaaactttgaattagaaattctcactaaacccctaatggatatgtgaaaaatggatatcgtgaggttaaaatgaaagtgcagttagaatcagatgctgtggttaagtataatcaagattctaaattgtaaactaaggatttctatggttatcttagaaaatttcaagaggagtcaagatttgcagacaaaaagccagaaattctttgaagaatttgagagaaaagtctcttgaacatatctttactctactgtttcaagaataaaaatgactaaaaagattacttagggttttcaatcctattcataagcagttcaaaaaaggaaataatcatttcaaaaattttaaactcctcgaattccccctaaaagtatatgttatgtactcattactggctgagtaaccgtcatcacacgcatacctcaagtcatgactcaaggtaaaactgtcaatcaacattaatgatttgaaattgaagaccctttgtcagggtcacatcgattcgtcattcaacgcctaggacacgcgtcagccatctagacaagactccacaatgagtgaagtccatgtgggaccaggagggtcgcacatagactttggggagcaaatgttatccagctttttgcacattgacgtggcgataggatcaagcgacaagtgtcctatatttcttatacctgggcggagggaaatgtccatggcagcccacacctgaaaagttagtgtctataataactggatattcgagcagggttgtggagaagacattcgacttggtagaagcccattgtgtcgagcgacttacaagagataacaacttcagaataatctagttatgtccagacacgaggacaatccctatgatcgtgggattgagtcaaagaaaaatttcaacctgctctagtttcctattttatacattgtaattatgtaatcattgtaatttcctattttattcattttaagcaaaaaggaaaccatccctcatgcattaagcccctataaatagtgacctagccttactatgaaagggattgaaagaattgctgcagaaatatgctttcgagagaaaatagtgatctaagagagttactcagagatcagttgtaagagctttcaaggggaagcatactttgttccttctcttaagtcaatacaatagaaggggagtaggctattaccacactcacggggccaaaccactttaaaatttggtgttcactttaccttattgtttttgttctcttttaattatatcatttaatcacttattatttgattcattgtcgttggctagaagcaaggtcagtagatatcaatgagagattatgggtcaattatgattcaggcaaacataaacgaaaaaaaaagaaacgaacacatgtctaattggtaacttacttatgatttcttacttgtgataatgtttgtttnnnnagttaatatttgttatagattacttgtgataattttttatgtaagaagtt

SEQ ID NO: 22796 - DNA, 2619 bp, Cannabis sativa
tttttttaattttcaaagcattttcttctctttttatttttttaaaaaattataatattaagtagccttataattagtatagggaagtacagtactaaagattgatcttaaatatcaagattgtattaaaaaattattaatgatattgttattcatatttttagaaagatgacgcatgtacatttgagtgttcaaaattagcttacagagtcatttactatgtctaagaaaattagtagcccgacccatgagcagagttaaactaaggttttggattcaactacaactctaccatgattaaatcaggcatacagattcggaaggattacacttgttcaaatttacaagtatttaggaaaatgtagatggatgccctcaagggtcatccaggaagggcagttgaaaaggtgtcagggagcgtcgaccatccaggaacaatcctacgtggctcgcccagaaaagaatcctataaaattaggagttttccccctgtgttaggccttggaaaggctcacagcgaaaaaggagatctcctttttgtccaacgcccactactctgacatttcataacgaaccgacaactcatgccccaactgtcactaccagtcgtacctctgtgtacggacaactgctgtccccaactatgggcttcctaaatcggccaaatatcaatatatcaatgtattttaccccaccagtgggcttactttcacataacaaaccctaacgggtccaaatcagcccaagaacccgatatacgacctataaatttggcactttctcttcatgcaaagggttagaaattttagcaagaactgtaagaaaaaaatagagtagcctcagagctaataatgttcactagtggactaaggtttattaacacccctaccacgtaaaactccgtaaatattttagttcattgagagttaaaaaaagtttctaccaatttttgtcatctataaaaagggtaactaccaaaacaacgaccgaaaaatcaagcaatgaagctgctcgcaacaatatagaagcccctatagccgatggcctaaatcggcctcctccggtggatgcttaggcagccgccgtgggagatggtgaagcgtcagttgcgggaggtcgatatccttagaatgttcatcagctagaagaacaccatgacgaaaaccctcttgaagaggatggcaaagatgacgataaaaaagaatacaaagaggactatgaagaggaccccgaggttatatgtttgaggaaattcatattaaactaagaaactaaaatgacagtgcaagaagaagatacatgtcaaatacaagagacccttctacaaatgcaagccatgatggcgactaatggtctcaacttgaagtttcctcccacaaaccaagaacatataatggaggttcatcttgatggtgatgttttagctgccacaggaaagttcaaccaccctggagctaaaccctcacaaccaggaaacaaagtaaaagttgtagatggtggcattcagaaggaaaactacccaccaagccctgcatgcgaaaaaccaaacctctagaaagggaggtttaaccaaacctagggcaatgtcacctaaccaatccgccaaggagggctctgcaaggaaataagacccatgctcagggttcatcaacctagaggagccgtacgtccaagtatttggagtagcttcgacacatgtcaacacactcaaacatgggggacaacccttagttccctctttttaggtgcccgcgatagtgcctcttggaactcaatacacaatgctcacagtctacggacctgcttccccaggtacacaccttcgtagacaaatgtttttgggtttagtgttatggatttttctctacgcaagtgtacgtatcgattgtaagtatatacttattggagtgaggttgatcccacaagaattgtagttagatactaataaattaaatttctaattctatttggcaataaaaaatttaaaggagaaattttaaattgaaagtaataaaaataattaaattagaataaacattaataataattagagtttagagttattgacttcaacgtatttatcttatatggcataatataatttaatttctaaatatcaatttctatgcaatagcaagtttactcaagtaacttatattaaactaagatatatacatctcaacttattaaataaaaattttctactctcatgataaatttaaacatataagagggcattaagtaaagaaactctaaaagctatccaaaccacataggtactctcgtcctatatcaatattcgtccctatttcattatagcataatcaatactcactttttagagtttatatcaaaatcataaatatttagttagtgatcatgtaattaaaagaaattaagaatgaatgaaataaaaacacgtagaaaattagaagaagaataaaatcatattaaaaccataaaaagaagtcaaacaatctccaccaatatcctaaataaaagtttagctaagagcataagaagataagaagaaaatagaagagaagaaattgttgaaaagccttctaggtcacttctactctctgatttttgtcatctctaattgcttgctaaaaagtg

SEQ ID NO: 22797 - DNA, 2084 bp, Cannabis sativa
cctattggatcaacccttgtggtctagcttagctagaacatgtgcaattcttcttcaaaactctcgaactcatggctgaaccaacactgctttaccgttgcctacacatgagagtatccgtgagccaaggcccaacaagatagaataataacaatatagtatgaataattataacaattatatttcacacattatgcctctgtgtatattactgtagaaccacactgtttatcatattatttcatatataatgatgacactgcatctaatgtctatataatatagatacatatgttacactcatacgtctttttttacatataaggccttaatagaatttattttagtttcagttaccgagtttaacctagctatgccttaatcacacaactcttattatatatacataatccatacattatgctcttataatggttcatcctgatgatatttatcacccctaactcagttatatcttgtacacataactcttgacatatcactcaattcatttagtttatgctcatatataaaatttaggatattaaccctagtagaaattgaatctaactatccatataacataatatatagtatttattcacttaatacattaacgcatgtgtataacaatatatatttagggtaatgatcttatttcataatatatgtattcttaggataataaccctagttcacaataaatctagttcaggtaataactataatccacgacacatttatttagggtaataaccttagttctcaaattatacacttaggataataataaccctaatccacatcatataaatttagagtaataaccttaatttacacttttatcttattaatcacataatataaatcgcgtcacctcactatactccgtgttcttaatttactatcttaccagatttataatgtatgaggagaaatcccgatctgcaggtgattctaactaagcactagtattcctagtcacaatttcgtgttttttacacaatagggttaatcccaaattcacattcataaatatccacatataagattctaacactggaccaaataatagagctcaaaataagctttctaatgatataaagaacctccaaatcagagtgggagtcaacaaatctgcataaaataaaatagcaaaaattacattgtcgctgccatctagtcccaattgattatagttgcaaccagattaaactagagcctgggcaggggctatccctattctgggtttgagcctagcgtgatgatcccaaatctggtcgcgataactgggcttataacccaaaaaatgccaatttttgagaatttacctatttcatgcatacaattcaagcaattaacacttaggctcaaatatgaaggtaaacaagtataatcaaccccttaggatttacatgtctaaacacatgcttcataaattcataaaacaccattacataactaatttctaaaaaacctcaaactcaaactaaaagcttgagaacccaaaatcaaaatcaaaacatcataaccttcaacgacaaatacacaatcacagccacacaacccttgcaataaggctcaacttaaagaaagaagactctaggcaatcattcgaaagaaaaacatcaaggaatccaccagatcatcataactaaaacactttaacaatctcatgcattcaacttacacataaaagtttttagagattaactttatagcaaagagatcaaaatacctcaacaaatcctttacaaagtttaagatcaacaccacaattgaattcccctccaattgcacttaatttccctgaaaattaaagaacttcatataagaaggttagcgagaaggtaagtgacagtaggaagactcaagaggccagaaaataaggtttttccttctcattttcaaaaatgagattataacacaattcagtcacttttggtcaaaatgactatttttcccttatgtcatagaaatcacataatagcaactaagggcatttatgtcctttcaaattttcacacatatatttagatattctcatataggggtgttcattagatcacatccaatgtttttag

SEQ ID NO: 22798 - DNA, 2021 bp, Cannabis sativa
aagttatatctaaacaatttagagcatataatggagtgtacttttagttgatcattttagaattatgtgttataaatatctattatgagtgctcttcaattgacctaatgaatgatattgtagctcactgcgatacaacagtggcaagaatgttagtagggaataagtgtgatttggagaacttaagagatgtgagtgttgatgaagccaaaagctttgctgaagaagaaggcctcttctttatggagacatctgcacttgaatctactaatgttcaacaagcttttgagactgtgattaaggatatttacaataatatcagcaggaaaatgctaaattctgattcttataaaaaggctgagttatccgttaatcgagtcactcttgttaaggatggttcagataagcaaaataagtttaatctatcatcttgttgtgctcgataagcaaaaaagtacaacttttttaaggggattttttttctttaaaaaaaaattattaatagagttgttttgttggggcttaaagcatatgattaatttgtatttgtatttgtatttgaagatcaattatcaaataatagttgctaaggaaaaaaaaatatcaaataatagttttgtattttgagacttttaacttatttattttacttgttgaaacttagttcactaccgtctatattatttatgcttattatttataaaccttaatttgattaataacattttattgaaaaagtaaataatgttttttcttttatatatttgattttttttttttttgaaaaacgtaaacttcttgagaggaacctattcaaactccataattaatcgttttattggacttagattaaacaattaggaacctattcaaactccataattaatagaataagttaatctttcatataataaaagaataaaaaaacattacaaaattcatataatattatagttaattattatttaatttactactcttatatatgaattgttattttatatcaaagttaatttaatcatgtgggacaatataattcaatataacctattttattcaattgctttttctttataaaatgaagtacaaatgaagacctaatattgggaaaaacaattatagaatttatgggatgaagagacatttaaattaatatcaaatcaaccaaaaagtcctaattttgattctcagaagatcaagttgctggtcaatgtttatgccctattttatcacactatttgttgcatatcctcttgctgcattgcatttggttcaattaaaagagaaactttctttaaaatattgcttccccgtaataatttacatgaatagaatgaacaaatggctggtcaccaactggtggtaaaggcaataataatacatatttaagaattaatatgacaatatcaatatgctaatcctaattccgattttagaatgtgtgagctcagatcaaggttttctcaaagcagatgctgcacccatgaccacagccaatacaaggccaagaccggccccaactgaagcccccacggctgcagccgttattgaactctctttggctttagagtctccacctgcacctttcgctcttgcacggtctcgcaccaattccaccaaaagcctttctttacaaagctcctttatagaagaagaaaataaattataagcaatataactaatgaccttcatttgtgaaatatgtacagaaagactaaacagaaaattatttagatttttatacctctaacgaggcttcctcgtgggatcttagcacgcgatgggccagctgacaaagtgaatcgacaccctccactgggagaatggtttcttttctttggaaaggtctctgaataaaattaataggagcataaataaaccgttgggctcccaccctaccatcatctgtagcacccaaggacagtgaagcagtagcagcactgtgaatgacgtatggacaggaattaataattcccgcggtgcttggagatgcttgatacgcttgaattacagcatcaatc

SEQ ID NO: 22799 - DNA, 1211 bp, Cannabis sativa
actacacctataattgatcgaaaggaaaaaatcttctaaggaaaatgggaaaaaaaaaatgttaatgtgatgcttggtggatataaaatgataaaagttggaataatatatatttttagtagtaaaaaaaaaatatttttttaattaaaatataatttcattaaaatgaattcacgttctaaatacaaaagatattgaagattaactgaaattagaaattcaaaaatactacaacagggttgataccgaaagtatgtaacaacataatgtgctactcaatttattgatcgtcttataaaaaataattaaacaataaatatcataaataaaagaaattggcagttcccaacaacaaagccaaaagttaaacacattgcaagattactacaaatgacttggaccaaaaccataatgccagttttggctcttaacccaactaagagtctcttaaatttttattgtctcaatgacttttggcgtatattggtaaaaaaaattattattcttttttcttcaacaaatattattgagtataagtattagatatattaatattaagttgacctagtgctaaggtctagcgcccaggttgacatattgtcagcttgggccattgctaaacatttttcacgataagttttttcggcatattctctttgttcaccaacaattaagatacaagtgattttaggaatcaaatataagcatctatcggtaaaactaggactcagcgcctaagttgacctaatgcctagtcctagtgcccaagttgaagttttgtcaacctgagtcagttcgaagtatttttttcttgagaatttttcttgttttgttccaaaaacaagatatgagacttgaaatcaggagaaatattgttcaagtagtgagttatcctcaaggaatcaccgggcgccagtgtgcaaacacactaagcgcctaggttggcattggcctggggcatactgctctgtccttcaaataaagattatgttctaggtatcagtcttattttgcccctaaaataagatttggatgttttcgtaagtcaatatctcatgtacatgtgtcatgtgcaaagtacatcgatatccatgtacactagtgatcacctgagtgtcacctagtcgtcattagttattcatcaggcatcacccgtgcataccaagtaaacttaccaagagaacttctccaaagtcaaagaataaactaat

SEQ ID NO: 22800 - DNA, 1021 bp, Cannabis sativa
aaattatctcacataacaatataaactagaattgcctaaaataatattggtaatggcaaataattttttttcttgccttatagattcttacttttttgcatgaaaaaattctcccaaagtatagcaactataaaaaatttgcttatgatgtatccagttaattttctgaacgatttgctcatgcagttacagatcataagcatatatgataattcatttaactagctaaaattagccaaagttgaatattagcatttgatacatctattagttcataatcataggtcttagttaggatctttgtaacgaacataatgttagaaacagtaattaattagttaaacgtttctgttttcaactcctaactactctgtaataatctgcctaaaaatgaagcttttcattccaagtcttgcaacttttgcaagcctttagaaattcattgttttctttgagttctgtgatagtgttttttattgataagttctttcagcattaaacttaccaatattagttccgatggttcagaaaaatattttgctacattcaaaaattcaagggccaaaattctaatagacaatagttcaagaaagaaaataaaaaacctatcgtaatattgtactatttcaactttcaaataatgagatgagtgacaaaatattataaatatatgtgtattttctactcgtgcatcacaattaggcaaaaatacaccaaaagataaaggtaatgtgataagtgataatagaccagtcattttatttagtggctggtcatgcatttcccactcaaaacagacaatttccttttcttttttaatatatatatatttatattctttcataaatatacagaaacatgctggccccacttaatttcatgtattttgccaatttacaaagccatcaatcaacgtcaggtagacatgtctcctaactggttaaccttctcactcatctctacaagaatggttaaactccaaaacagtacaagagcaatcagtaaggccaaaacactgttt

SEQ ID NO: 22801 - DNA, 3172 bp, Cannabis sativa
ccctctattcaaacacaaaattaagtaataatgccctcttgtaccttgccatattatatatatagttctattatgtatttaacacaccgtatacagccacgtacgttcttatgacacatgtacaagtgacctaagcagtgatgagataatatattaagtatgttgtatacatgcatgagaagaaaaagattaccaattgatattatatgtcttttgacatggtcaattttggaaatatataatttggaaactagctatagctcaccaaaaacataaatttactgagctttgttcatatattatatttttatactcatatttttttacctacgacaaataaattaatatttcttaatggtgtatcgtaatctttttgtttgtgtgatatgggacggtcaatatgggtgggttcaacgttttcttattagacttgttctctatattatatatcaccacctcgaatatgcagacatcctaaaatagggcacgcattaggattttatgcatacgtgtcgcatctcgagaattatcagcattttttatgtcttatttttcatattttctttatatttatccatgtattgctgatgttgtgtaatgtaatggtaatgatagtagtagtaatataatgaaataatattggtaataaaaattaattttcgcatttaatttgttattaaaatgaatattaaaataaataataaattgataaaattattcattttaattttatatttatataaagagaaggtattataaagttattttagttttactttatttatattttgtgatgtaatatttttcattatgtataccttttttaatgtgatataggattcaattatatgatataattattattatattataattaattccattatgtgcaaactaaatatatatatatatatatatattataatgggtaatttaattcaattacaatcactataacaaatataagtattaaggatgataaaaattactcttaaaattatagaaattcatccttaataattcgcgcttcaaagcactattaaaggtgtcaaaataaacatgaataatacaccaattttcgaaatttacttataattttaatacccttaaaatttgctcctaaaaaagcgtgttaaaaaaaaaatctatttttgacttctaagagcgactatgtcactcttaaatgtcgcctttaaaaatttttacatttaaaaatatatagttttataatattaaaaatattgacatttaattgataaaaaataattataataacaaataaaagaaatattaatatgaattataaatttcattaggttaacaaagtagcacaaataattaccatgtaatattattaataagtacaataacataataaagtaaatagttctcattaatataatattagttaccaagacaatttaaataaaaaagaaaaattatactaatgatatggttgtagtttttggttccataactgagtcataaaatcatctgatctctcgttctcattgaacactggaggaagcagtggctggcgctgtgatgtctacggtggctgtagcggctgtgatgtcggtgcccccatcatggcatcatccattaatatagaaaaactagctgagcatgctgtgatgacgaaggttgtgatgatccacccatattagtcgaacctggaaagaaagcagaaggatgctactgcaaaattccttcgtacatgtatgaatgtgtgtacggtggtccatacatataggggtaatagtgcaattgttgtggctgaggctgcgagattagttgtgggtgatgctgagattgtgatggcaaagatgtaggcatgtcaggctgtgccgctaaatgatgagaatgtgcaggtgaaccttgagacatgtgagtctgagaagattgaggcgttgtagttgagtacttactcttaagtgaattaaagattgctaacgttgtagggtccccagttgatgagttgaattgtgataaaaagagattaaacatatcactcatgtcattcaccaaattttgtggaggcgtctgtgattgggtggatcgagcgtgaatagttaaagatattcccttcaatctgcgaccaattccataaatgtgacctgcctctgacaaaacgtctcttcaaataggctaatgtaattagatgacgaatcaaaatcaaaatctgtctgaggttggggtgctcgagctgctcgagataccttgaaccgttcatgtattaaagcaaaatgttataacaataatgcaacactaatattatgtaaatataagaattaagttacaaaaactcacataatcttgttttgcatattcattaataatttatttattctttttggtatagacttccttccatttctcgatgtaatccagggtctcctataatttttgaaataaacattagagattttacaatttaatataacttaactacatttttgtatttgaacttactaattcaaagcgcttttgagctaaagattttgttccttgggttgaaacatacttcatcttttttcaatttttcttgttttgttcaaattgagctagaaaagctgggctagtaaaaaattcccactacccgttaactaggatcaaatttcgcttatggctatcacgtgcaaaatgataataaatgtaaagacacaagaatttatagaggtttgactttgacccctttgatcaggtaatgacctacttcctttttagttgtattcactcttgagataataccaaagcaaattagaggctgaaaccttataatttctagttatgactctcttcaatattacaataatgagaatgtgtgttgctagtgaagaaaagtataaggcggctctatgagagaatgcaagaactctgaacacttagaatcttagggttaatgcgtgttagggcttacaaagtttttatttgaaatacataaaagatggaaaatatccctaaaaaatagagctgttatttgttgatgaagaatccctaaaatcatgggcaatttgaagtactattccaaagttgtaggagtattgaggatgatttggaaggcttgtgggaaaaaacacaagtgttggggcatgacccctgaagttttttggccgttaaaaattctccctaaactattgagattgttaaatttaaggacttttatctaatt

SEQ ID NO: 22802 - DNA, 4127 bp, Cannabis sativa
ataccaaaatggacggaaggattacagagcaaaacgattctcaagtccaaggagtttagccataatttttaaaataagggggttaaaccgtaacaaacataaaagtatagagagtttgaccgcaaattacctttattttaatacaatgtaatcacgtgttttcaagttttaaggattgggcctttagtgtatgctttttttttcaaaaataaatgggataattacataaagtattattttttataaaaaatattatatttttacgtttaaagatttttttttatatctttacggtttttttataaaaataatacgaaaacaacaaaaaactacataaaagtaacaagaaaataaaatccaactagcatcaaaacaacagcaaattaattaacaagagtataacgtaaaaagaccatattttatttaaataaaatcataaaaatcataaaaatatttaaaattccatagaactgttttaataattttttttattattttcgtgtatttataaaataatccctaaataaataaaatagtaaagaacatgtgatttctaccacattttaatagttgtagatggtggttaattcgaattccaccaagcccaagcaggcccacttaagtcttcatcagcaccctaaactctatcaatcacaagcccaatgaaacttcaaaatcttatatatctttatataaatttgcaaaacataaaaaagtttacgggtcatcttataattgtttctttttttctagtttcatggtgcatccatggtttgtgaagaaaaaaaatcacctacgtatctatttcattaaaagtttatatgctgtatagtattgtgttagtattatttaatataataatatgtgtagtgttgatttatattaataagttgtgtaaaattatattatctttatcataaattggatcccaaccccatcacggtaaccagggtccgagtccgagtccaggtctagggtctggggttgtggtcagggaccaaatctgggtctaaggtttgggtctgagactgagagaccaaagctcgagacagagctggggtctgggttcgaggtctgggtctaaattttgggctgatttccccaacttcaaaccctttgtaaatattaatacaagctaatactaataatgtgttatgtattaaataatacgattcatattttattaaaaattatagtcgtaatgattaatacaatacaatgttttatccaaaacgtagagttacttgttatttacaatacgacccttatacggtatactaaatatgaaaaactgtatttttgcatataccaatttattttcttaataaatgtaattcaaatgtggctgtaacaacttgctataacaaattgaaaacttgtactacagaacacatacttgctataacaaaacagaaacatgaataaattttgtaaaattcacaagagaattatacgtggtatccgtattcttccaaacactattagtccatggggccacacccagagaataaaatcaattaataaagtatcgaagattacaaaaataattgagttaaacaactttagactccctctgatgatttgccacaatcctttgtaattcacttttgccaatctaatttttgaacaccagcaaacaacgaactcccttcgatttttgatgagtaagtgcttacttcctcccgaagtaagtcttggacaaatcttctcccttcgactatttttttagttgttttgtagtttatttatagttgtattatagttgtcatgaggttatttttctagttatttttggttattttatagtttgcgtatagttgatttatagttgtcgtgaggttgatttctcattgttttcttactttttcctgagcaaagtgtatttttatatttttaaaactttacaagtgtatttttgtaaataaaaatttagaccgtaaaattgtaaataaaagagattatcccaaattttgcatatctaacgtggcacctacacctggcttaatccagcaaacacttgacataacatgggacttttgagcacgagtgtgtcgggcaggtcccaataggctaatatccatgaattgtatactgcattctaggaagcatctagccaggctatcaatatgccggccagatgggagaagattagtgtaccgtccaagatttttttgtgagtaatctcttcaaaaaagacacgtcttgaaaagggtctggtcgggtcgtcaacatgtcggccatgataaatgacaccaggaatgtcggacaaggctaaataagccataatttcttcctcaagcaacttttacaaatatctctaactggttcctacagatacggatttgaatgttttacccgatattgtaggaccttcaacagatcgtaactgcaccctagaatatagggatatttacttcctagttagtccttttacggagctaaatgtaacaacttttccctataaatagtgaatgaattcacaagggaagggacctgaaatcataatcttgcatcgaagagcacttctctgaaatatattctatgtaaacatcttaagagttgtaggtggaattcactttgtcttccttagtgataagcggggtaatatctcaatattaatacaactaaaaggagagtaggtcattacccatatataaagaggccgaacctctataattcctgatgttcttcctatttatttattatttctaactctttattggtgattaactagcataatttagacttcaagttagttggtaatttttccagtcaatagtttggtgctttcatggagacattcaaaatctcacgaagatctcatctcttttcacgtaataatcaccatggctctaacaaggagaagtgtgtccattgaaccccaagatctgatggctatggatcccaatatccaagttccatccactattgataaattgcccaaccctgcgcgaccacctcaagtaaactcatctacagggttttgacctgaaggcctgacaaatgatgagcaggttccaatcaatgttgaatgcctgcccatagtaccacgggggctcttttaacaagagctacccccaggtatatgctggcaaaaccgggcctagagttggtcagcctagtgtcaacgagcccaatattaacgtgggggatgattcagagctagagaaactaagagaggtcatagggcaagtccaagatcatacgaatatcctctatcatgatcaagaagaaacacgcggtgctgttagtgatgctttagcccaatagagacgcgaattccaagaatggatggatcgacaggctgtgatcctccaagcctactaggtggaattaaaccgctgcaatacggaggcgaatgacctaattagaaggtttaatgaaagggatgtgtccaaagtggaataacccgtactcataagagacccccttcgaggaaaaggtccctatatctcgaaggaaactttgtgcactgtgggcccgactattttgcaaccaaggtcgcctcttgatcggcataatgatcaataaatactgcctaaaagggcatatggcgggaccaacgattttcaagagcttcccaaagatgaaggaaggagggaagtgttaacctagaaactttctctggtgatatggacatcaatgtttgacacatggcatgaaggatggatgccttgagtaggacccgagtcatagtagttaacctaggaggggaccctagccttgtgcccaggttaactctagagctccgagatggaagtttggacttcaataacttgaatccaactcactatattttagtattttataccatgaagacatggaacaacctaaaagaatgttaacacgaacctacaacctggaaaccaacttgggcacctacggtttccacttgacgtgcaagttgacagcctcaactagggtttcagtttctgagactgtcttagtgaaaagtgatcaaaaattacattgcgacatcagcttgacataccacaaacatgtttgaggcatcagaatcaaatttagagcaagttgattattgagcaccgagcgcccaggttgacaatttgttaatttgggtgccttctaagcatccaatcgaagatactgttggaaatattttacca

SEQ ID NO: 22803 - DNA, 2212 bp, Cannabis sativa
  modified_base (1703)..(1708): a, c, t, g, unknown or other
agccactgtaccacatacactacataccattactgtacgagtgttggtatggtttgtttcgtatctcgagtaccactaagtgttgtaccacacacaccccgtatctttctgtactagtgttggtaacactgtaatgtactctttaaacattgtacactataccaatgtactctgtaccgttaccgtacgtactagtgttagtagtgtatcaatcataacaagcatgcatatatatcacacatacatacattcacagatatataatatgttctatgctattcttatcttatttccaaattcaaaaataacacgaattaacgaatcgaacgatatgggaaacctgccctaaatctggttaaccgattttacacgaatcgaagagagagggaaataggtgtaggaaaaattggggttttccttctttttcttttaatttttaatttcacaaattaatggataaacctaggctgagttgaatacaaaaagccagctgtcaaggctcccaacagccaccacatctcactaataaaatgaccaaaatgcccttgatgcttaaacttaagctaattcgagcctaggggtaaaatgggcaaaaatcataaccccgctcaaactcggtattctattcatctcaaatatattccactaagaaaaaggttctagacttacccatgtgacttatacggccatcaaccgtattttctgtcgtcgccgagcaaaaatcataaaaattacataatgcatatttaacttaaataatactcttagaatttaataaaatctccagaattgagaattataactctaatgctcatttttaataatgagacccataatataataaatccatgcataattatagaaatatcaataattgatgctaattatctttactaatccataatctaaaatgtcgtcattacagaaaccctcattgtgcgtcactataagcttttagagacacaaccttattaaactgtaaaagtaacacctacccatgtggcacgttactatatctatttattttttcttaattttttttataacagccacactcaaagtgtgtcactacatcttattttttaaaacaatatatattaattttttttaatttaggttattttgtagaatttatttaatttattatatttggataataataataatattaactatgaattatgagttaatatatattttaatttggctataaatttgatagcaaattaacataacaaaaatacgatacaataagaaaaaatatcacaaaatatataaagaatctaaaaatcaaggaaaaatttgtgtaaaagttaatcaaaaatctatacagccaaaaaataaatcttcaacagtgaaaaaaatgagtgtaaacatacatttcaatcaaaactaaaatcgaagtctttgaataaaataaatacaaaatatttgaacaaccattcgacgccaatccaaaacttacgccatttgaagctcacaatatcgtccaagatgtggtggtgtggagcttgcgtaacagagatgtgagaggcagagggaaaggtggagttgtggcccttttctgtcgaaaagagagatgaaaggtcaagatgtgatggtgtggagctcgcataatagagatgagagaggtagagggagtggcggactggcgaagctaacttgtggctcttttccatcaaggagggagagagagagagagnnnnnnagagagagagagagagagacgaaagagaaatgcaagatataggagagagagaaagggcacgagagggagggggagagagagaggggatctggcatttttcactggggtatgggtttctcggtaaccggaggtaaacaagcatggatttcttgaggtctaggtttctcggtggctcttgggcatggctggcgcacaaagaagagtgagagagatatgggaccaatttttgtgttgaagaagactagggtttataactattcattagataccctaaatatttttttaattttacatatttaattataattatatataaaaaaaaaagtcagctagtaatagtaacatgctatgccattaatgtcgtgtctttttttttcatttttattattattttattgaatctttattgacgtgctttgtgtgactatgaacacttttagagttgctcattacgcgtcactacatacacataattttttgggggttttttatttttacacttta

SEQ ID NO: 22804 - DNA, 2212 bp, Cannabis sativa
aacccttgactcagactcggccctaaacccagacccttgacccgaccttagacccagccccgactagaacctccacttgacccaaacgcatacctagacccagcccttgcccaaactcggaccttgcccctagacctcagtcttagacccaaacccctaacttcgcccaaactcgaaaccaaaccccaaattgggccctaaacccgattatggacctaaacccggacttggacccaaatccaagacccgacccaaacccagttctagactctgaccccggcccaagaccttgaccctggatccaaaccccaaacctagttctggacctagaccctggaccagtgtctaggtcaggggatgatgtccagtctcgggtttgtggcatgggcctggagatgggatctgcgtcccagaacagggtcaaggttgggtcgagtttatgataaatatagtataatcttatataatctattaatacaagtcactactaaatatagtattatattagataatactaatacagtacaatacaatacaacacaagataatacaatacaatataacacagcataccaaatgagccctaagagttgagtttaaatcaaaattgtgatctaataaaaatttagggtgcttttatggtgcaccccttaaaaatagggtgtaatgatgcactatctactattttcgcatccaggaaaaactgggcaattttagaccttatttttttacaaattggacccagtattttctaaaataatacaaattaataccctgagctaattttttgtcaaaataactagatttagatgtgttatgacaagattggttatatttccttacatttgtttgtactaatctttaggttggttatattaagaaaataatcaaaattgagttcaaggtagtgtccttatgtatgtccttatgtatgtcaagcactttcttggtaaactcttcatcttcagaaccaagaagtctgagaacagtaggatctttttgccacaaaccatacaagaccattgcgtaaaacatatttagggaatgcaagcggtatttttttgccctggcctccttgtcagctgcatcttgaatggtttggatggcattttcccttatcatctacatagatgccaaagcaatataagctttcgcgccattagttggcttctgggtagcctccctctacaatttatcaatggtctcctaacgactactgctagcgctgcgaatagcttaataaagtaaatttaggttgtcatacttgagtgaccaagaatttttcaactgctgctctttattaaagtcatcacgcatgcccttgatgattaggtccttcttgcggccctcttcctataaggcgccaactctttgggtttgaatggatagagtctcagcttggaacatcgccctggcctcagtttttttcttctcttcccaggttaggcgaagttcttccttggtgttgcataagttttcctagagaaaggccactattgaatggatgtcactttcagcctgggccttgtggtcctcataaagtttctattacttgacactaatttccttctccttcagagccagcgcggcattgctttggttctgagccttcttaaatcaagggtagcctaggttttgactcacttagcttcagtgcatagggtcccattctcaactatcaaggattgaatcttatagcaaagctggcctagctcgatggtcatgttgcccacctccttggcagttctttttgtgaataaggcaatttggcataaaatagataaaattagataaccctcggtaactgtgaacaacagtaaaggcacatgaagattagaacttacccctgtcgcctgttgtttagtggccattgacagagtgtatgggtctagactgctactcacggcccacttctctgacgtgacgtgagttcactcatattggtgcccacattatccagcatctctacagcataaggggccacagatctaccaaccatgggaactagggtttggcttactgtggcaacattcaatactgggctaggtgaggaaggctgacgaatcccttctgcgatctctactatcttgatggaagatagccagtagtctatctctgaaggatcacttgttctttctcatggcgcctcttgagagtgatggctgattcgcttgctttagtaaggtagttatgaccaagaacggttggcctc

SEQ ID NO: 22805 - DNA, 1801 bp, Cannabis sativa
  modified_base (944)..(944): a, c, t, g, unknown or other
  modified_base (1746)..(1750): a, c, t, g, unknown or other
cgtaagtagagagagaaagagagagaggtatacttctaaactttttaatgtttatcctcaattaatattttgcataaaacttaatgtctaattcagtaaggacaaaaaggaaagaaaacaaaggtgataaggactaaaatgcccattaacttaatttctaaataatctctaaggataggggtaaaatggtcataaataattacctcaaaaacaccccgaggaaagctatataccaattacaacttcccagtataactaattctcaaactattaccgttgtgatatctttggccaaaccatcaagtttccatggttgacggacccaaaaatatgtttattacataaattgtacaaacaatacccacatgttgttaagattttatgtcctaaataaaactcatctcaaagtaatcttattgactattaaagaatgatatagaagtcaaattttatattacttggttcacatgattatttcataattattgttttaatatataaattctattaaatccaaaacttaagataatcatgattattgtgttgtctacagaatggaaaataatcatgatcataggcttcaaacattaagacccatgatttatgagggcacaagatttacactgacgtgataataagcgatatagtttacttacacttggataagtggaataccttttctaacgtattagtagagtaaagctaagatatgatgtattggctatgcatcagagtggactgatatttacagtagaagagatatcaaaagcttaccataatatcttttctaagtaaatatcacttgatcttagatcaaagatcataatcctgagattgttaggttctagcttaaatgtgttacatgtgttctttgacctatttgttacagctgaccaaaaggattggcacaatactcacatcttaggaacatggtagtacaattnagtgggagcgctaatcatagatttagaatctatagcttctataaatacttacaaattaattgatgattttcttagagcttggctaatagacataaatggaaaggctcttattttaataattatactagtttactgaaatatcatttataagaagctaagtgttttaaggataaaatacattcaagggtttatcgtattttttgtaccttgacgtggcaatgagaatggatgacatgtgttccacatatttgctacctgagcagagggaagtattcctagcagccaattaatggttaatctaaatacttgtaacactcggatgtccaaacaagttaatcaagaagatgtctgactaagatacatacatatctatgccgagcaagtcgtataagttggcagttccaaagatcggtctctttgcttccaagacacgaaaacaatccctataaatgtgtgattgagttagagaataaagacaatacaccttagtttcttattctttttacattgtaattatagaattaacgtagtttcctattttatttattatagattaagggaaaccattcttcatgtattatgcccctataaatagtggcataatctctctattaagggggacaaaagaattaatcctgaaatgcactcaagagagaatagtgatctaagagagaaaataactcagacatccattataagagctttagagaggaagaacactttattccttctctcaagtcaatacaactacaaggagagtaggctattgttgggttttgtgccctaaataaaacccattacnnnnngattagttatcaatttagaatttgaagtgatttatgtttacatgtatgtta

SEQ ID NO: 22806 - DNA, 3195 bp, Cannabis sativa
ttgaattactcgaattattcatattggaaggtcaaaatgagagtactcattaaatcataagatgagaaggcatggagggctatacttgcaggttggtctcgatctactaaaaatgatgatgaaggtaatactaaggtaaaacttgaactaagttggaatactgaagatgaaaaattgtttggttataagaataaagctttgcatactattttaatggtgttggtgaaatctgcattaaattgatatcatcttgttaatatgtaaaggaggcatgggaaatcctttaaactcagtttgaaggtaccgctaatgtaaagagattgctaatgagttttttgctttgggagaaaaattagatgaatctgtactggttaggaaaattgtttgtgtgcctaacaaatttaacacaaaattactatcactggaagaggctaaatattctggcaaaatgaaaatgatgtttctgatgatgaaaatcaagaaaaggtattgcctttaaagtttccgaaaaagatgtttctgatgatgaaaatgatgattaaatagccttgttgacaaaaaaaactttcaaaagtacatgaaaactgttggaaacaaaaagaatctctcaaaaactccatgaggtaacgattcaggtaacaacccctctaaaccttttgttctaaacaataaaaaaggtatacaatgcaggggatgcaaagggtgtggtcatattcaatctgaattgccaataccttgaagaaaaataaaagagcttcaatgtcacttgcagtgatgatactggaagtagtaaggatgaaaatgaaaaatttacattgacaagtgttttttcaagtgatttgcaggagaaaggaaaaattatatgtttgaataataccttgactgataacaataagaaagaagatggaccaaatttagataagttagaacatgatgagaattccttagcattgtcttataaggtaatgtaaagccaaattttatcccttatatagatggttaaaaggacaggaaagtaaattcaaattcaaattttttggttcctccctcctccccaaaaaaggaatgttagtattcattgaatagtacaaacattatgcatgtggtatcaaacaaccatcattgcatgactcaaaatacagttttcaaagcaatgttttaaatgctccagacagaaaagaaagatctcattagtcacgtctaatcaaaggtaaaagccaggcacgcgtcaccattcgatcagattcatgaccatttaagtctatatgtgaccaagaaactcccgcccagacttgcgggaaaatactttccaaatttcttcacagggtgatgtggcattcacttgggtaacacgtgaaacagatttcatgatctgtatggaaggttccactcttgatgaaccatgcaaggagattagatgctcaaacttagaaggagttagaacattctggcaaggcgtgtgagaacacccgaccagcttccaacatgtaggcgctcgcatgagctaactagataatgcgagttgaacatttttagaggaggtatctcacttatcttcatgattgcaagacacgacaagatccctattttcatgggataaatatgcaatatcaaggaagaaaagcaactgacttagtttcctatttttcttatggtaattatagagagtaaatagtttctcctaattatttcttactaatttaaagaaactaattgatgtaattaatccctataaatggtggaattatctcactattcatggacaaggaaattcattaagagaaaacacacgaaagaaatctagattcaagagtgtaagagctttcgagagagatcaaggtcttcttattcctctactcacaagtcaataaaaataaaggggagtaggctattacagtcatcaaggagcctaacttctataattttagtgttttctttactttacattacccaaatttattatttcaattattcttaaattgcattgatttgattcactttgttggctaaaagggaggtcaacagtccctatacatcagaagggataatttcaagaggcgacttgactgtttcgatgaatgatttataatgcatgtgtttagatttacctatatgacatgcatcaaagaaaaatagtggacttttgaaagaatcctttttgttactcaacgtatatttttcattacagatctacttggaccaagcctcatgtgccttaaatcaaggtcactattattagaagattgaacaaacaaacattaaatagtatgctcatttgatttaagctgactacttcatttagactttgagttaagacttcttggaattcaaaatagcagaaaaacaaagactcgatttgcttggataacttgaagtgaaacatgatgtaggaagctgaagttgataaagaccattactaattgttccatgagctagctccttcctcgtagccagatccttaacaatgcaacaatctaaataaaactcaatgaacacagacttatccttggttagctgagatatggaaattagatttttggtcatatgtggaacacaaaaaaaatgtttaaaaaagaagagatgaggttttaagaatattcaatgatggttaagggttgcccattaccgatgagcagttaagttgtacctttgtactccattttattttcaggttgtgagtaattggtgtaatatggtttgtagctccactgcgtatgtaccaagagttgtcatgactagcattagttgaggaagaggagtaaaaggcttgttgaccttttccagaagattattgttgagttgggttaatattgggttttattggttgaaaccacaaacagcagcataaaaattgatattaaaatgatgatagcatttagcaaccacatgtcccacatgattacaaagctgacaaaaaggacgatttcctcttccaccacatcacacacgaccatgaccacaaccacaaggtgagaaaccacgattctcagtactatttgagcttggtggaccactgatagtagtagaccatcgaaattgagcagtaagattggcgctaggagaaaccatatcaccatttctttgagtgttgagttgttaatatttcatttcttggctatgtaagaggaactaagcttcttgaggagttatggggtctagccttgaggtgacggtgatgaccacaaggtcatagtc

SEQ ID NO: 22807 - DNA, 1814 bp, Cannabis sativa
ggcaaggtttagggagagggattttactttttcgaaacaattgcattgatgtaactgttatttcttactctcttaatcatgttgattgtattataaattattctaatgatatgcaatggcactttactgggtactatggttctccctatcctgaccataaatctgttacttggactcttcttaaccgattgtatgatactgcccctcttttgccctggttataggtgatttcaatgactacctttcaattagtgataaaaattcgactactactccccctccacatgctatgcatcatttccattcttttttgaataaatgcaaccttctccctcttaattactcgggtaacaaatacacttggagacatggactaactttggaacgcctggactggtgtactatcaatccatcttggcagaatctatttccccatgtttctctcttccacttgggtttttacgggtctgatcattgggctctcaaaatccaattggaatacatttcttcaaacacacgcaggcccacacgttttcatatagaaaattattggctaaatgacccatctttctctaccactattcaatcctcctggtgtcttcctacaacttcttcttcttctccccttcaaacttttcttgataaacaatcttattgtctctctgaaatgaaagtttggagtacttcccaatatccccttaagttccaaattgcgagaacccaagctgaacttcaccaggggatccttaacaatgctgagcctacttcccagtctttacaacaagccacttatctccaatctgaattgtatgggttacctcagaaagatgaaatctattggaagcaacgagctagacttgactggcttcgtgttggagataaaaatacaaaatttttccatcataaagcctccattaggaataataataacttcattcgtaatataactcttcctgatggatcggttgctcatgattctcccactatcctctctcagttttttaacttctacaccaatcttttccatacccagggagtcaaccaaatggctatcaactctatcctctaggggattaccaccaatctttccccagttcaaactgctttcctcgctgaggagttcactgaagatgagattaaacaggctatgtttagtattcccggggataaagctcctcgccctgatgggttgaattctctgttttagcaaaaatattggcatatttttggccctaagctttgttttgctcttctccatattctcaatcatcatggggatatttctttgatcaatgacactatccttgttctcatccccaagaagaaaaaccccaaaactgtgcttgatttccgacctataagcctttgtaacaccctatacaaatgtctttcaaaagtccttgccaatcgtattaaaagtatcctccattccatcattagtcctaataaaagtgcttttctcaagggtcgacaaataatagacaacatactcattgctaatgaaaccattcatgctatccattctcgaaaaataggtaaaattggctgggctgctataaagcttgatatgaaaaaggattttgatcgtgtcgaatggcaatttatcagacaccttcttgtttatgttggtttccctagccattttatctctcttgtcatgaattgtctttccacggtaacttaccgtttatcccttaacggtaatctgtctgatactttttcctcctctcgtggaattcgtcaaggggatcatttatccccttatcgctttctcctgattgctgtgttggaagttattttaccagaacttagat

SEQ ID NO: 22808 - DNA, 7621 bp, Cannabis sativa
gaaaaattctacaaaaactaaccttgattgctgcgattggggttggtgggattcgactggtgtgtgggttcgactggtgtgggtggttgtcgtgggttcgtggtcgactggagttcgtggtcatcgtgggttcgctcaggtcgattgggttcgtcgtcatgggttcgactggtggccgtgggttcgtgtgtgtgggttcgactggtgtgtgggttcgtgggctcgactggtgtgggttcgtgggtgaggtctggtgtgggttcgtgggttttgcagcgtgggtttgggagagggaacgaagagagagaatgtagaagagagagaatggagttagagggaatgtgagaggtttgaaaacacaggagtatttttggaagaaaattgaaagaatgatatattttttttatgtgtgataattgggtataattaaacaccctatctaatgttttagcataaattatcaaatttaccatatattattatagcaataataaaattaaaaattaaaatatgaaattaggaacagatttattatacgataattaagttacacccgaaaaaagaaacatttagttgacccaacactaattgcactgccactctccattaaaagggtaattaaatacttttaaatgtaaataaaatgctcttaaacattttatataaggtataaactacataataaaataaaataaataaaataaaaactacattttttttttggaataagtgttctttattattaaaccgagcaatcgctcgcaagaatagacaataagtccgagggaacactattaataggaaacatgcgttcagctagagaaatagagtgccgggcaacaaagtgcgcgacacgattcgcagaacgtttaacaaacacaatagaaacattggacaaacttttaaaactatttttacactcatccaccaccaagccgaaagcagaagcaaaagtttctgcacttctaattactgctgcacacacgagactatctgtctcaataatggccattgaaaactggttgttcttgagccaactcaaggcttcccgaatgcccattatttcagccagttcgggagcttcaaaaccattcttaacccttgcaaaaactgataccagttcatcaacagagtttctgaccacacaaccatagccgtgtttatgaagagaagcaaaaagggcagcatctacattgagtttgattcctgaaatcggtttaacccaccgctctaaactatctccaactttgagaggagacaacaagggaatatttccctttccttgagcattcaaccattgatcaagactcgatgtagcaaaagtcaccacagcactcacgcttctcacacgctgccgccaaaccaaatcgtttctcgcagcccaaatggcccaacatagcatcaccactttgcctaattcaacactactaacccgattagcagtagcttccaaccacaccagcagagaagagaatgagtctctctcaacagcagcaagaccagcaaaaccgaagcatgaccaagcaaaattgcaagagaccaaaatgtgccattccgattcagcaaaaactccacacataggacaagtactatcggccaaaaccttcttcatgcacaagttccttttggtggcgagacaatctcaagccgccctccacacgagatccttggcctttagaggcaccatgagagaccataatttcttccagaatacattgacttcagagccatccgaatggtgtttaagcttttgaagcaaattatacgcacttcgaactgaatagaacccattcttttctgcaatccaataccaataatcaactccaccagattgatttaaaggaatgccaaggatgatagaagcagtttcagaggcaaacagatccttcacaatgtcttcatcccatcttcgattgttagcttcaaaaaggccgtttacagtgaagttatcaagaccatcaatcacaggggctggtattgggttgtcaaaaacaggaagccatgggtcagttgttatttgcacatttgtaccagacctgattcttctcctcaaaccaagtttaacggtatcttttgcagcaaagatactactccatataaagctcggattcgacccaagctccaaagttagatagtcgccatgtgggtaatatctagctttgaagactttgctagctaaggaatcgacattaaataaaagccgccagccttgtttaccaagcatggctaaattgaaatccctcaagctacgaaagcccataccaccatcaaacttgtgcttggtcattctatcccaactcatccaagtaatgccgctgccattgctgttggaattattcgacttccaccaaaagctagccatcatcctctcaatttctgtacaagtgccaatggggaaaagaaagacattcatagcgtacgatgggagagattgaaccacagtcttgataagcacctctttcccagctcgagatagaaatctaccctcccaaccattgatcctcttcctcattctctctttaagaaaccccaaaacagcattcttgttgcgaccaactatacttgggagccccaaatacatgctgtcttctcctgcttcttgaatccgcatcaaagtacatatacggtttctagtatccgctatggtgttggaactaaagaaagcagaggacttatgaagattgaccttttggcctgatgcttcttcaaataaccgaaggagtgaaagaacttgacttgcttctgcttccgaagcttgacaatagacatatctgtcacccgcaaacaacaagtgggaaatagtgggagcactccttgcaactttacaactggtgatgtatctactagcctcgtaatgtcgaatcaatgaagagaatccttccgcacaaacaatgaacaagtatggagatagtgggcatccttgacgaatgcctctagttggaataatcgtccccattctctgaccgctattgataacatggtattggaccgagttaacacagcttagaaccaaaccaatccaccgatccttaaatcctataacccgaagaatagactccaaaaaaccccacttaacacgatcgtatgccttgctcatatcaagctttagtgccatatagcccttccttccattagtcttccttttcagatagtgcattgcttcaaaagccaccatgacattatcaaatatcaatctacccgaaacaaatgcactctgagtttcagaaatggcatggttcaaaacacccttcattctgttggccaccaccttcgatgcaattttgtaaagcacattgcaaagagatataggtctcatttcactcacttgggtaggatttttctttttcggaattaagacaatgtgagtatcgtaaattgaatccggaaacttccctgacttaaagaaatttcgaacaaattgaacgacataagccccgacaatgctccaatgtttttgataaaaagtcggggtcataccatctggcccaggagacttatccgggtgcatttggaaaagagcactcctaacttcgtcctccgagatgggaataagtaactcatcattttgttcaccggatatagatggacggatgccatccaaaaccgaacccaaattaatacccgaagaacgaaacaagtcatggaaataacttgtgatgacactttgaaggcccgactcccagtttacccaaacaccattgttgtcttggagttggctgatactattgtttcttttcctagaacttgcaacggagtgaaaatatttactatttttatcgccggagtttaaccaatattgttttgacctttgcttccaaaaagtctctcgttgagccaaaacttcagctagcttatctttgccttgcttgtgttgttgaatagaaatcggatcacgaccccattttgaattgcggatttggcttttacattgtttaatccgatggcggaaattcccagttatctcgcgaccccacttcccaagagcctcccccacttagaaattttatcttgaatacccgtgagacccgaactcaaccaacatccctcaataatctgcttgcataatggttcacgaatccacgcattctcaaaccgaaaagaataatgagtagttgttgggaaaatacctttaaaaacaaggagtaaagggcaatggtctgaggtagagacctccaaattgtacatgatcggttgtgtaaacattgaaagccattcacttgtcaccagtgttttgtccagcctttcttcaatccaatcgatgctatttctccctttttcccaagtaaaaggataaccaacaagaggcaactcggtcaaattgcaatctcccaaagctttgttaaacccctcaatcaatcggtcagggtactttctatccgtttgtgagcccaagttattcatatctcccatgagacaccaagggagactactattgtttttgatggagcggaagagattccatgttaaatgcctcagctcacgttttggctccccgtaaacccttgtaaaccgccaaggagaagaccccaaaagctgaaccgtagcatcaatatgattgaaagagaatccttgaatctccacctcttgaacatctttccaaagtaaagccaatcctccactgtgaccacgaacatccactacaaaacaaccttcaaaccccaagtggcctctaatgctttccatactagttttgttacataaagtttcacaaagaaataacaaattgggcttcttttggaacacaaggtccgataagaattgtttggcccgcaggttcccaagcccacggcaattccaacttaaacaactcatacctctgggcgggcctggaaaccagaacccgccaaaggcccattttttgagaggcccaccatatcttgctccatttcatctacttttcttgaatcttccttattctgtgggcccacattgccacccacactagaatctggtcttctcctttttgagtcaataattgtagtaattgttgaatcaaaaaaattcccattattattgacatgcaaagtcatatcttcttcattgactcccctaatatcctccataacagatcacctctcattgagcaaatcaatgtgattgatatcatatccattatttctcccacccgatccccctaattgctccaatgatacagggatcaaattaattccctgttcagaactgccaccagtgaagccctgccttggttcgtcccgcaccaccactcctgactggagccactgtgatccaaatgttgagtgtcttctctatagggaagccctcagttccaggctatacggtttctcctggaggtgcaaaggttttaagaaaagcctggggcaaaacctctccgaatgcccaattattccacatataaaaatagaaggttggaagtttttcgtatttgaagttcgcccagtaccaagaggagttgtctgaactaactttcatccttcgctttattggtttgtcaacattgatccgaactctaacccgaagaaaatcacgccaaacacccacaaagttgttaggatccgattcaatgaaagtgccgatgaaattccccagcgctgtaactacactcagggtcatgttacccgattgtaagttgtgcaattgaacccacatatccatctggttgatctcgacaagccgtgggttatcgccctccttgagtctagtaaagataaatggcttccaatcatatttccaagggctttcgtcaataacacgttgtatatcgatctcgtggtagaattgaaaaaggaataaattcagattgagttccttcacatacattcccataccccgctgccaaagaaacgccatcatattctgaaatacgttaaaattcgagactcgccccgttaaaagttttcccaccaaacaccaacgagtatcaattgccatctcctctgccctgctttttggaatccgtagtacttccacctcttcttcatctaagctaataagtcccccactattctccatgtctctcccagcaatactcctagacgccattgaaaaccaaacaaatgtcacagccaactctcaaaaacagagagacaaaaaacgtatcaggggatacgactcaagactataattaaataattaaataatcaaacctaaataaataaaaaaaaaacgatctgtaaaattaatttaaatattaatttaattataaaaacattaattaaaattaatacctatccgtgaatctcggcttgaccgatctccaattttgccgtcatctcccgttgtctccgtcaatcactgccgatctcgcgagatagctaagtaaatctcggtcatacaggctcatgtgaactcctcctctgccgccaactccgccaccgccacgaccatctcggatcccgccgttgcaccactctgcccaaagcaaacatgtccttgatttcgtcatttccaatcgaaaactccgtaatctccatatagctcttcaagtcttgatggctcagccatcgtctccgtccttctccataactttaaaagcttcttccaacactccactgccgctgtacaataggttcgtcgtgcaaccgaggactcgctcgaactcgtcgtactcaaacatgtgtctcattatataacatatgtacatatgtacttttattaaagttgaatatagtctgagctccaatgtaatttaactatccataattaacgattgttagattaatcctatcataatccaatgattatggagataaatggaacaaaattatgctccttttaaaggaggctatatgaagatcttgcctaaccaaactaaaattcaaagaaaaacttaggcataaggaggactaaacttggaatttgacttgagcgtgtgtgagtgggtgagctattattcaataaaaatgtatttgatgggcaataagagtaggcgagtcaggcatccaacttaagtttccgaaatatgaaaaaaaattattaatatataaataaaatattaaataataaaaaaatataatattatttgatttagtgataaagagttttactttaagctaaaaataaagatcaattatcaatctctacttttttattttttatttaaaattatatttcatcatcaactaatgatattttctcaatacaagacatttgcacaatttgaaatgtagtagaatttttatacattcaataatttatccatagtggataaaaaacaagggaaaaaaaacaaaatcaattcgccaattcaatttactttttttttcttcaacacgttatatttatgggtcaagatgcaagatgaccataaatctaacaattaagttaataaatgtcatttcttataaaaaattaacaaaatgtccattctgttaaaagtttgatgataaaattacaattataaccttgaataattaagtatttgttatagttattttgcacaatattatatcatttttatgtgcaatagtatattaaaaaaacttaaaggtagtaaattaatttaaaattgtggtatattattttaatgtgctatagtatatagaaagacgaaaattaaaaagtgtggaatattagtttaaatttgaggtatagttatatttcattggaaaatattgtctttatgttcattagtatatcatga

SEQ ID NO: 22809 - DNA, 4571 bp, Cannabis sativa
  modified_base (3604)..(3608): a, c, t, g, unknown or other
tgcataagtcaattactttgtatttttgagatctatctaataaattttatctctgggcgtgtcttcgtggactaataacaatttgtaaagattgttgaaaccacgtacaaaaactttgtatgttttacgtttctgcaatgtttattttctgatttattctgaaattacagagttaatcttgtagctacacactattttatcaccaattttattaattcacatttaattaagaaattgattaaataataaattagtaattttaaaatacaaaatttctaaattaaatattgatggaatgctaattattaaaacaactatatttttgcgtgacacagtaatttttaaattcacaatatttatcaataatatattataatttattttataattattttcaaagttgaagttatttgattaatttcatattaaaatgagattctatcacatcattctttattattttatttgacatatttttagatttaaaataaagaaaaatattgatggtaaaattattctatatgaaattactattaagatatttacacttacaattttatttacaatacaatgaaataatatctattacaaaaaaaaatagttttactgataattttttaattagtcataatataattttttgtgactaaatgtgacttttaatcacaacaaaaagttacttgtcactaaaacataatatttagatacaaattatttttgatttagttttaatcacaacaagtattataactaaaaacatattttaatcacaataaattataattgtgtgactaatacctttagctacacactttttagtcacaaagaattatgttttatacttagttacaattttttttacttttaatcacaaattttattgtgactaaaataagattttttatagtgatcattgacaaattaaaattaacatattattttaattgaattacatttaattatcatatttatgtaatgttcctacatttaaatttattaactttttaatttgattattttctaactttggaaatcgtaaaacaaaaaatgtaatattgtaaatttgatgaattaacaaaataacattattatcatttattttatttttttttaaaaaaataactttttttattatacatatttacttatttttaaaatttataatatttgttttgatagatttaatcatataccaaatatagtattccattcaaaatatatatagtattaatttatcccgttaccaaaattttattatgaagttaagacttagtaacggttaaatttagtataagggttgatcttttgctctctcttgggatctcaaaacctaaacattaagagcatctccaaggagtacaccaaatttggtatcacactatcaccaaatttagtgttaaaaattattctccaactacaacagaaaaaattacaccaaaaactattctttattattatattaattttttaataaaatttaaaaaaaaaaattaatattacgtcaattgttatatttaaataataattagtgtaccacttttaaattgaaaatttatttttattaccataaaaataatttatggtattcacatttaaatttacacacaataaattaaaatgtacccttctaaataaaagagtcaaatacataacacacagtttgaatcttattttcggcgtgttaaattttttcgaatttgttggtatgtaggatatcttaaataattataatgtacacgaccataaaaaaaaataaactaaaaaatttttatagatccaaaacaagtaagagtatatcagtgcactactttaaagaggtacattgtaattttataaatacaattaataatataaatatatgacataattaaatatataaaaagaaaaaaagtatgtagtgtgctacagtgcactgcatatatgtcgtgtactgtaccacagacggcaatatgcagcagtaaatgatatgcttttggagaaaatctcacaccaaatataatgctttgatggctcgttggagaagccctaagtctgattgctctcgaatttgtgaccctctttctaataccaatcccttaattcctaaatttggaaatgttatctccaaagctttaattctctgtaaaagtttaaatgttaaaccgcgctttgcgtgatgttgccaaatttttgtaatttttttaaaatttgattttttttacaaattgtgatataatcgaaaaatataatattttgatgtgtattttttaaacaaagtaatatttttcaaggttttttttttttttttttagaaaatcacctcctttatatttcaattccaaaactgttttacaacctatcattatttgtatgacaatctatatatgtacacctttgtgtagttccaataatacaacccaatctctgtctttaacatttttcaagttattagaaatataatttggtattttcaaaatgaaaataccaaattataagtttataagtttaataaattgaacttgtaattgatggtgtagttttttcatttaaaagattattttccttttttcctaaaaaaaaataattagacaaaatagttgaaaggcgactaaaaaaaattaagaagctttatattatatataaatagttgaataatttatttaatttttatataaaattacagtttgataaagattaacaatataaaggaattttaatgaaagattaaaagtataaaatagtaaaataaaaaaaatataaatattattgctacatgatctctttttattaaaataaaaatagactacactttgagtatttgtttaagaatattataattaaaatttatatgaaaaaaataaaattatatcttaaataatgtgctatttcaattaaaaaaacataagtatagatattaaattttggtcttttattttcataagtatgataaatatataatttcatgcattataattttatttactacctactactacttgtgcaattaacaatttagtaattcttttaattttttatgaatcatttgttgaaaaaatgatttataggatatcgtctcacctttatttaaactttcctttatatctatatatatatacatatatatatatatttatatatatatattttattaagcaaatgcataaataaaataattaaatcaaactaactaattctttagagatgaacaataaaaaaaatattatttagacttatatatatacccataattattttatgattacgtttacataatttttaaaattagtatttaaaataattatttatagcaagtgagaaataccaaaagtataaattatatatgaaaaaatattaaaagatattcttcaaaggtcattaaaataagaattataataaaaaaatttaaataaatgataaataaaataactaaatcaaattaatatatcattaaaaaattaaacttatctttgttttaaagataaaaaatttactacctactacttgtgcaattaacaatttaataactcttttaaatttttttgaatcatttgttaaaaaaataatttataggatgtcgtctcacctttgattacactttcttttatatctatatctatatctatannnnnatatatatatatatatttataagcaaatgcataaataaaataattaaatcaataattaattcttcaaagatgaacgctaaaaaatattatttagacttatatatatacccataattattttatgattacgttttacataatttttaaaattggttattaaaataattatttatagcaagtgagaaataccaaaagtgtaaaatatatatgaaagtattaaaaaatattctccatagttgattaaaataagaattataattatttttttaaataaataataaataaaataactaaatcaaattaatatatcattaaaaaaaattaaacttataaaaaaatataaaactatcactcatacttatttaagtgtatgtgtaaaaaaaatgtattgtatttatttaaaaaatactcaaaattaaatttatcattcacaaaaattacaactaattggataagattaaatttattaatcactcatataaaaattaataatattaattttggcacaatccaagtgaaagttcaatcacataacatccacaatagtttctaaaccatgtggacttttttcaaaaaaaaaaaaaatctcacactactaaaagtataaaaaaaaaaaaaaaagatataatacaataaaaaatctatgtgatgccacctcacatttctttaaacatttctttagatatattgattgtaattggtctactaattacatatttcataatttggctaaactagttcttacttctttagatgctataacttggtaatctggatttccaaaatgtatttgagcggttgctataacttgatatttcattatcttcaacagaaaaagcggtttagtataaggaaatttataaaatattaaaaataagtaaaggtgcatgcttttacctaggtttttttttccttctttttacgtttttcaggtgctttcacctagttttttttttttttttt

SEQ ID NO: 22810 - DNA, 3524 bp, Cannabis sativa
ttatttattaatttaaaaatgttattcaaattaactaatcccacccttttttaatgtatcaacattaccctcctcaagggtatttatattaccgagaatgacattttaagattaaaccttccaaacaaacaaggtaatatttaacattaccattcatttgctaacattaatctattccaaacattcctaaaggcattcctaacactacacaacacgtggtatttacgtaaatattttttttttgaactataaatttcattcaactagatcaactaccttaataatattaacaacatcaaaagagagattatactccaaaaaatacaatcaacatgatgctctaatcaatagaccgtttgacaaaacgtaagaaaatatttttaagttgtttacaattttcaaccacaccccaaaaataaatgacaaaaaattcaaatttctaacagctttaccaataccaaaaaatcaaatccgataatactaacacccgaaaaatcactcatcaaccatagaaaaaaaatccacaaatatccccaaaaaaacattaaatataattttttagttttatttataaattaccttaaattatattttaaaaaagaaaattagaaagtgaaaatatatttattatcctaattaaaatatcaaacctctctttcttcttcttcttcatacaaatcttcattgtgtttctttctggtttttgaaaatggcggacaacaaaaccatgacttctccaacccaatacgacgtcgtcaatgccaaatgggacacgtgtttggatctcagtcttcgtcgtttcgtgtacggttcattcggtggagccttggctggtcttcttctcttcaggagtccagttactcgttgggcatctgtagcttttggtgctgggattgggattggatctgcttacactcaatcacagcaactattatcatcatcccaatcttcttctgtaaaggagaattaaactcttgaatcttcggtaaaacctaatttttcatttcataataattttgatttgatgttggatttgatttgagaaaaatttaaatgttgtttcgatggatggagttttgataagaaaggaacaattgtgatggtatttttgttgattaggttgaatttgggattgttgattttctgaatatattttcgattgtgtgaatttttcatagaatttattatttgatgatgttggctttgaatatttatttgaagaaaaaaaatatgctttgatggataattttgtttacccatggatttgtaagaatggaataagatcacaagatcattagtgatgatatttttgttgattaggatgaatttgggattaatttgttgaagaatatatttttgtttgtatgaatttttcgtaattattttgattttgtttgaataagttggttttgattgaatgaaaatttgaacccatggatttgatgagttcaatctgaacttttttctctgtaagatcacaagataaattctagggtttttagatgatatgttttttttttattttttattgtttcattgaattgtgatgatacatttgttcattggattgaatttgggatttgtttgtatgagtttttcatacaattctttttttatttgatgttggctttgaaaatttgaccttctttgtgttcacccatggatttgataagagttcaatctcaacttcttgctctgtaagatcacaagagcagcatgggaaagaaatactgaacataaaaaattctagggctttttttagatgatgggtttttttgattgtttgattgaatttggattgaatgtgggatttgttttgttgcatatatttttgttttgtataaacactgatttggggaattaattaaaggttgatatttggtttgagggaatggaataaaaaggaattcattcctttccattgaatggaaaccttttactccattttcatgaattgtaattcaactcaaaattgggtggaaagataattctatttcagtgtaattttttattggtttcatataaaaagttttttgttgttttagattatatggttattatggttcctttgatattgtttgtatgaattggtatgagcacattttggggatggttttgttgattatttgggggtcatatgatgatgatgatgatgatgagaatgttgaatgaattgttgacaattcatttttgtttctttttttagtttaaacaggaaaaagtaagggtagtaatataggttatgacacgatatcacgactagaaaatgatacgaaatgaagggatttggatttagcataaatatgtttggatcaaaataggctaaacacgattagaaagattaaatttcaagtgaaaaacaagttgacctatcaaacccgaaatcgatatgttaaacacattgtaggtggcttttggctcaagaagtttactttattcagatgactttgattggtggttctaagttgttttgtctatatttttgggctaactcgatcttataatagagtaaattttgaatttgtatatctttggttctttaattttgttttacctttcttcacctttcttctcatgttgtgcaagtcacttgtcaaaaaaaaaaaacgtgtataaattattattattattattatttgaataaaaagtagtaattcattaatcaataacaacattagtttgaaaatgagcagttttgtttgtataaattggttaaaaatggtgtatcacgacttacttttgccacccgaattaaggcaaaagagacgagaccaaccgacgccaagaagaaagattatttttgttctcaaatcgaaagaattaataacacgcaagatgtttacctcattgttgagaccgaattagtctagttgaatgaaaattttcaattaaaaaaagtaacacgcaatatgtttctatttatgctaaataaaatctctacatactgtaaagcttagctacaaacttgtattatcaataatcccaatcaaacaagtaacaaataagtttgtgcattctaaagtaattatcaccaaaagcaaagcaaaataataaagaaacaatgcaaataacaaagttgaacaaagcgcctaacacgagcattaaaccactaatactcaataactaacatattagaagaagaaaacaaagggtctaagttgtctaaccctatgaggtaaagggactgagtcatgacacccacaaaccctagaaagaagggcaaacctaactccaacaaaccacgacactgccacccgtcatcactcctataccatcactcatctgacccaaaatgcctccgataacttttcgaagacccatattaactcagaccaagccatcacccaagcctttaacatcagcaagaactctgtccaaactccatctcttcacacagtacattagagcttaaatccaacatagaaagttagactccaccacgagctccatcgccctctaaccagcttaagggcacatggtggttgcagggctagccttgggttaagacaggctaggtccaccca

SEQ ID NO: 22811 - DNA, 2108 bp, Cannabis sativa
  modified_base (701)..(722): a, c, t, g, unknown or other
aaaatagtgggcatttgatatgtacaattttaaaaattcgataactggaacattaacttaagtttgcgaatatgtgtaatttaataattttacaatttgtatagatataaaaaattcttaagataaaattaattggactagaaacaaaaatatgaaatatgtgtggatataagtttataaaaatgtgacatatcaaatacaataaaaaaaaaccttaatataaaaaaaaaaaaaaaatactatagaagaataaaaaacttataaatgctatatttttataatttttttaataacaactcatatttcatgtcatttttcgttgttttaaattggtgtgcatagcaataacaatgctctaataagattggttccaatttcttgcaaataaaattttaaaagcaatagaatgtgtaaatattccttaaattttcctattaaataggaaatttacatcttggaatgacaagtcaagtttgttctcttatcctactatttatgaaatcaatagctgcttcttctccttccagtcgttgatctcagcatcgattagtgcttctactttagcttgaaatcctgggtaaggctcatagtttaggaacttttgcatagcctgaaattgaaacaacaaaaattttatgtcaagctaataaatgcttctggcattatattcaatcccaaacttaaaatatatatatatatannnnnnnnnnnnnnnnnnnnnngagagagagagagagatatagagaaatatgtcaataaatgacctccaacaacacaaagaagggagccattatgaaggcttgtacgaggttgtccaacaaagctggagcccttttctgcagtccatgcaaggtcattcaaattacaagattatatgtatatgtactaattcataatagatggtaactatatagatcgtcaacacaattttaattttaggggttaaaaataaggaaaagagcaaattatttatacaaaatttcctaaaacctcaattcatctaaataaaacctctcaacgttttgtaacaaacactgctgtgggtagtctctcaaaagttcatattattcattggaaatataaaaagtttgttacctcaaacacgccgtggccaataaactggcctatccaacacacaatttgagtaatcagaacaacctaaaagaaacaaatccacattattcatatcaaactctgatgataatactttataagaatagcgaatccaaaattgaaaagtatttttatataccttccaagtgagagaaaatccaagaacttgagcgagaaaactgcttaaaatccaagcagtcatacaaagaagagcagccaaagagccagatttgacttccaaagctatgtaaaacagcgaataaataatagctataagaaacccaaaatttagaatcagaaaacaatgaatctcaaaaatggacaactcgatttgaggtaggttaaagaaagagggagtgaaatagaggattaagagagccgtaaagaagataggccacacaagtaacatgtgaatggctatgttgattgggttgtggtggtaagctccatagaaagaaaattgcttttccagatccaatatacccatctttactattatgatttttccttaaaaagaaaaaagaaaatgggaatgatttgatttccccaccaaatcgggtgcttttttttgaaactggttctggggatggaaaaaaaaaatgggtgtttcagttagactgcgtgagaaacaaagaagaaacatgtgaacgaacttattaaaattgtaataatattaattatttcttcaattatttagtcaactcattaattattttattaacctgaaatatatatgtttaacttatatttaattattttctactgctcggcattttgatctcctagctgcctttactatggtttctctctaggctttcttcctacctctgctagggttgggtcttctctccaactaaggcttgccgaccattcttggggctttgttgtggccatggtcgggggatattgatggtgctctctggtggtgagacagtttatgaaggagcggtcgtttccttatttgtctaagttcttggtgttggaaattattttac

SEQ ID NO: 22812 - DNA, 4700 bp, Cannabis sativa
ttattattaattaacaacttacacgtgtcacatttttacgtgttttatgcatgagcttgtcaagctgtcattggttaaaatacattaaattaatttcattattctgccatataattaggattttcatttctaaagatttgaaaggctagttatatattattacgttcagatttgaaataaataatattgatcagatatcgatcggaggagcgttttctctacttgtcacaaaaatctctctctgcttattcaaatcttacccatttgatccattttatcaacactaaaatatgcctattgttgttgttactgatgatgatcaaagaaatattatcaacaacaatgttctcaagaatagtaaccatcatgactccattcccttccctctttggtacgtaaatttatttatatatataatctttcttattcttcttcttcaaataaataaataaattcacatatttgattcttgatttgggcaaaaaaaaaaaaaaaaaaactgactgattctttcttgacactatatagtgaatatgggcactgaatcataaaatttagggccttattttgggatatgaaacagaatattgttgattactcactcactcactatattttaaacatatatatatatatatacacatacatttagattttgttatttttgttattgttgtctcacttttatgttatgtgtatgatcatgtacttacatacagccgtaatagaagtaaaaaaagtgatgaaaaagtgacaaaagaagtgattattagtaaagaaaattacaaagcatcatcatcatcatcatcattagagaagaagaagaagattatttttatgaatatggaagaggagaaagtaagtggttcatcatcatctattgggattattaataatagtaattcaaaatcttgtatatgctctccaacaagccatgctggctcattcagatgtcatcttcaccgagctaatgtgtctaattcatgcaatataaacattattagtactcttaataatgataataataataagagttttgagtccaagaattatgtccgtaccaatggtgatggacagggtaggttatcaaggttcggcagggctgcctgtgatcctggaaagtgaaaattgcccatcattagtattggccttctcaaacactgacaaactcaagtagtcatcttttcttgtaaatacaaataaattcttttttgtttttattttagcagtaatagtattgtgtgtttcttttatttggattaatggactttcagagcgtgaacagtttatttatttattttttataatataaatatttgatataacaagtactaagtgtctattgatagaagatgaaaagtttgaatctaaaaactaaagttatagaaaatatttgtttcaattttattatttggtgactagagtgacattgccaaccttttagagtaactataatttctctcctttcaatggtaagtctattaaacatctctctctaaaagtatttgagttcagaattttttagtttttttttttttctataataccgaaaataaaatttaaatattttatgcgtaataaataattatttaaatctaatttttaacattctaaactatttaaaaaaattaaaaattaattagtaatgctaaataattaaaagatacatcatcataaaaaaactttcttcaattcaaaaacagataaaaatctaccaaaacaatcttttaaattaaaataaaaaaaatcaatgccaaaaaaaaaaaaaaaaatcgatgccaaaacaaattaaagtttaccaaaacacatttaagaggtgtactatataggtttccttacataaatgtaaatattgcctcctttttcacttctctattttcattactaccaattaaaaagagccagaaattttccatttaattaaaattgtcgtccacaagtagtgagatttacaacttagttattccaaaaatacatacaagactgcttcgcacattcacaggcacatacagaaaccaggggagagagagagattaaaaacagagatatgaaattaggaaacttgcaaagctctgactcgtgctgtcagctccctaacttggctcctcaaacgttcgggattacaaaagaaatcaacaaagacccgtcgctgcagagcaacctcttgagagtgatgttttacaatctgcaaaccgaaacgaacaaaatcgtgtaaagaacaagaatgagtcttccaccctcaatttaagtaaatgaaatagaaacacttccctgatttccattcccctaaacatatagtattgattatgaaacatggtctggttgtttaatttagaagggttaattttgaacaggaatttttaatcatttgaaattggaaactgtagatgctactgcagtatattgatattcatacaacctccaaagactggcttattaaatgagaaggatagtaaaagaatcaaataatgaaaggttacctcattcttcttgcagtgctcaagtgtcacctcttcgacggcagcagagagtttggcattaatcttctccatttcatcaagctctttcattaatggctgaaaaaataaatcaagggatacaggaaaatgacatcatgttgtaataatgtataaacaacttgtcacgaattgcatgaataaccaaccaaatcccatatgtaaaccaaatgaacaagctcttgatgtatggaatagtgtaaagtctagtcaagtattacttaggcagttcattatgtttagaactttgccactgtaacacaacacagtatgaaactttaaaaagtgaggtaagaaatgagtggtaactgtaaaagactagtgaatgattttgtacccgaggcgtcagtatcggttgtgcagtggttgaagaggcaaaaagcaattgctgcaaactttgaattaaagtgcacctggcaaaaagaaaccacagataaggcatttgaagattattctccagtaacagtaatactagtactacgatggttaagtatgaatatgataacttacagctcattgataaatctatttctatcctcaggaagagagttttcaagatcagactgaagagtcattaagtcggattgcagacctgatatctgctgaacaatgcctggagctgatacatatgttgacaacccagcttgtgcatctaataaaaagtagttaaaaacaataattcgttatcaattgaaaaacaggaatatggaagaaatgttatcaaaatttaatgtactgtcattacttgaatgtatacttaaaagatctctgacaccatgcagaaaatggtcctgatcatccacccctccttgttcttgcacatctgatgcagcttgtattagtgcaaggcagcgaccctaattgagagaacagtggttcagaatggaaagattgacgggaatattatatttaaatctcaatgtacacatgaacaggatagaaacagataaacatagagagttgagataccacacggcctttggttgctgaaaggtaagcttgcagctctgactcaatgactttaagcaaggaatatgctccaagcatattcttcttttccaactggcaagcaatttttaagaattgatgtcttgcaagctgattaaccagatgatttataaactacaagttcacataaggattatgaaatgtcagtgtacaaaatcagtaagtatggtgatgggaatatatttctaccaacaaagttaacttggaatgatgttgaaaatcaagttagagctctttcctctctacaaacaataataataattaaaaaagaaaagttaaaataggtgtagctaacaataccgctttctgtcggttaatataatattcttgacgcatgaccttcaaatcataatcacctataattccattcagattgcatcagtcctagagaaataagaaatcaaaaatgggttcatatgacacttctgtaaagggaaagctagaagaaataccttgcaaaatgtatgtgtcttggagctgagccagctcccaacaaagatccggtattgtctttaaaacagaaacacacaattggttagaaaatataaatgcaacaacagaaattatccaccaattggtaagaaaataaaagcataaagaagccttctaacttaaaacaagcatataggaaaaatcccctcaaagccaataatataaaagagggccaaaagttaaggtacccacctcagataacaatttctcttctttatgataaagatttgatagttctccaaccagttcagaatgctttctcctgaatatcgtgtaacattagtaaccaagaagatcaagctgaaggaatgtaagttgcaaaatgtagtttctagattggtacatatagtaaaagagctatgaactcaatgatgcgttaacgaatcaactagtagaaggagcatacctgagagagtgaagatcaagatgaatgtgtgcttcatctgaagttacttgagatctaagtgatattagaatagcttgctgcttagcattctcaacttgggcttccacccattgtctttcacttgtcccaaaactgttccaaatgacaatcagttacaaaatcatcatagaatttttcctatagagctccaacatgctttaaccacaagtaaaaatattcatggcatgttataattgctcttttcacatcatactaaaggcacaaagccagttaaaggt

SEQ ID NO: 22813 - DNA, 6276 bp, Cannabis sativa
  modified_base (6174)..(6186): a, c, t, g, unknown or other
ctcgtcatcttctaaagattatggtaaccttctcaagtgggagtttattccccattttcacttatttattttgcttaagtgctaatgtacttctcttatctcgcagatatggatctggatttggagaacatgttcaagagtcctcccacagtcgacaagaagtctaagaagagagctgctgaagttggtgaggcctcgggttctacgaaataacaaaaaaggaccaaaaccacgaccaacaagaagaaatcatcaagccagcttaccatcgagcctactaagtctccagagaatgaggtctttattgtgaaaaattctaatgaacaacccactaggtcggtgcaccaggtgaagttctctggttctcgtccagagatggtccttcttgagtcctcttgtattacccctcaaggtcagaacttaaggctcgcaactcttctcaatgcattctactaatgagtggcataacttcttgactcttgggtctagcgactgcaagtttctcacgacagcactaaggatcttgcaaaaaggagttacgagctcttgcattaggttagtttccttttcttcttgttctcacttttcctcatcttatcgcctttactaactttgatttgcctccttcttgcaggcctctctcctatccttttccactcatcattggtcgtctcagcaggctgaaattcttgagactgagcttcgccagaccaggaaccactgggacacttaagccaaaaagtggaatgactcttaggctgaggtctctcatgcaaaagaagaggctgaaaagcaacgtctggccgaccaaaagaaaatcaaagagcttgatgattctctcaagtctctccaagctaagcatgagaaaaagcttaaagagatggaggctgaaaccaaggaaagggttaacagcatcatcaggagaacaatttatcagacctggtcggccaatcttgagatggacttcagctttttgggtgaaggagtcgacgctatgctttccttatgcaagaaaacaaggagagaagaactgggcaaggatgaagaggtcgaagtggaacaagaagatccgtccaatgctcctacaacgtaggcttgctttttaagttgcatttttttttatatatttaggaaaatggcgatatggccaagacaatggtttgccccttgtggcacttttgtaaagataaatttgcatttttggatggccaactttgcttttattttatcttttatttattaccttgcatttttaaatttgaacttaatatatttgcttgtttgcatttttattcacaacttaaacaattatactttgatcaaatttaaaatactttaagtaagcatttccaagtctcttgttttccttttgatattacctaagtagttattaatctactatgtacacaagtagttatcatctgccatgctttctatttgcgagcagtttatcagttctactttgcgtaaagatttataattgatttaagcaaacttaaacatagttttaataattcatcttgtgaattagtttgtatatttttgattgcctgtatgaatagttaggccttctattcacaccttaggttaagtatttttccaaaggatcttggtacctcatttaatacattcctatcaaatgggagttgttagatactcagctttgcatgtagcttagtgttgtttttatgagttaaatctcatttacaactgctacttttgaatttgcatcgtccatagatgacttccatcaattacttgaaaaattcttaaaatttttaaaatggagtgggtttgcaatatattatgtatttatagataaattccatttgatcatacacatatatatgctcctcatgtaattttaaagaataaaactttttaattacttggaaagtacttcaactttattaataattgaattttaaaaattacatcagaaaaagtgattacagcatgtctttgagtttactggtagtaggcttgcaaatgctcaacattccagtggttctttatttgcgagtcgttaagccgagctaatttttaaaccccggttctgactattgcctcgatcacataaggactttccctatttgggttaaattctcttacatatgcatctctcgtgtttgcaaatacttatcttagcaccaagtaaccaatgttaaagagccttttcttcactttcttattgaaatatcttgtaactcagtgttggtatgctcattagtaatttgtgactcagtacattttcttcaagtagatcgaaagataatttcaagagtccttggtttcttcttgattatagtctgtgggtcgcgatattgacctctacttgcagcattgcctccgagccaaatgtgaacgagaatggagtatgccgtgttgctgttttctcagtcgttctttgagcccaaagcacttttggtagttcatctacccatctcccctttgcagtgtccaactactttttgatagtatccttcaaggtttcattaacaatttctacttgcccattcgcttgaggccgtgagactgtcgagatgctcttaataattttgttcctctcgcagaactcagtgaataatccaccttcgaactgagttccattatcaaatactatcttaatgggtattccaaatctgcaaattatgttttttacgacgaagtcgagaactttcttgcagattatggaaactagaggttcagtcttagtccactttgtaaagaaatcgacaaccactactgcaaactttcctcctccttgccctgtgtcgagtgcccaatcaaatcaatcccccatatttgaaatgggtatggcgaggtcatcattcttagttccgttggtggtacgtgatgtatatgtgaaaatctttgacacttatcgcatatttttaacaaatttgggtgtatatttatagttggctagtaatatcctcgtcgaattattttcttagacaagctctgccaacctgcatgatctccacaaaagcctacgtggatttctttgataatctcacttgcttctgttgggagaacacaccgtaagagaggcattgaaaagccctttcgatacaattttccttctactattgtggagcgagatattgaatacaaaagtttttgtgcctcatttttatcttttgaaagttgcccgttgagaagatagttgactatcgatgtcatccaactaggggggctgtcaatcacctcaacttgttccttttcacatatactcggttcgtttaatacttccaccagaaccaaattcaattcatcatgttcgttctgcgaggctagttttgccaaggcgtcgccattagagttttgtgctcttggaatttgttcgatttaaaaataataatcaagttcttctgaaccttctctaagtattttttgtatttttaaaccatttgcttcgtattcacctagaacttgattcacaattaactgcgagtcattgtaacacaccagatttttgacttttatcacttcagctattttcaaaccagctatcaaggcatcatattcagcctcattgtttgaagtgtcaaattggaatcttaaggcatagtgaaaattaaatccttctggcgagattagtatcatcctgcacccgaaccatgttcattagatgctccatccacatacaacttccaagtgtatgtgtcttgctggataagtggattttcatgtagaattatcccttctatcaggaaatctaccaaggcttggccctttatggatgtccttgggtgataagttatgtcaaactgccccagttcgatagaccaatttatcaatcatctataagcatccgggtttggcaaaacttgtctcaggggttgatcagttaacgcctatatcggatgttcctggaagtaaggccttatattttgagatggatggattaggcatatggaaagttgttcaagatatggatatctcgattctacccacagaaacgttttacaaacatagtaaactagttgctggtgcttcccctcttctcgcactaatgttgcactaattgtattctccgagatagccaagtagataagtaaagtttctccagttattagtttagccaaaactagaggggtggataaatgtttctttatgtttgcgaaggcttccttgcactcgtctgtcaattcgaactttttgttgcctcgctacacattgaagaatggtaggcacttatcaaatgatttcgagatgaatttgttaagagctgccattcttcctgttaaggtgtgtacttcctttggttttgttggtgacgacatttctttcaaagccttaattttctcatgatttgcttcaatgcccgtcccgttgactatgaatcccaagaatttcccaaggaaaccctgaaggaacacttctttggtttaagtttcatattgtactttcttagtgttcaaagcacttcccgaggtcctttgtatgatcttcaatttttattgattttaccaacatatcaccgacgtagactttcatgttcctccctatttgtttttgaaacacatttttctcattcactagtcgcgctgatacgtttctccagcattcttcaagccaaaaggcatgactttatagcagtaaagtcccatgttggttaagaaacttgtatgttcttgatagggacgtgcatcttgatctggttacatcaagaatatgcgtccataaatgtcatcagctcgtgtctgacaactgcatccaccaactggtcaatccttggtagtagaaagcaatcttttagaaatgctttatttaaatttgaaaagttgatacaagttctccaagtaccattgggctttaagacaacgacagggttcgatattcatgagggatagaatgccttgtgaataaagtcgttgggtagtaacttatccacttcttctttgagtgccctttgtctttaatccaagggtcgcctcttttttctttttgctcggtaatttaggtcgatattcaagtgatgacagataattttagggtcaattcctatcatatctgagtggctctaggagaactaatcctggttttccttcagaaaatttatttgtttctattttagtttttcatccaaatttttcccaatgaatacacactttgtgggattttctggatcaacaataacttcgtccaattcctcgattggttttagtaggttcttttcatcttgaacttaaggatccagatcctcatcatgcttctcaccttcctcagttgtaactgccattagttgatgaccttctttttattttgtagctctatgcgatagcactcatgagacagtagttggtcaccttgcaccacacctacaccagttcgtgtttgaaacttcaaagataggtgttcaattgagctaactacccctagtccaattagtgtaggacgacccaacaatatgttgtaggccgatggtaagtcgacaactagaaaatcttgcattatggtaatggataaacgcgtcttgcctacagttaatgggagttcaattattccttaaccggtgacactatcgcttgtaaatccacatagattcaccatgcaaggttttaacttttcactttcaagtcccattttcttgagtgtttccttgtaaaggatattcactgaacttccattatccaccaacaccctttttatccttttcttggcgagctagattgtaatcacgagtgggtcaacatgtgggtacctcacgtgatttgtgtcttcttctaaaaacacattggaggttctttaatcttagctttctttgattgttcatgtaaagaccgcttacctttaatttagaaattagcagataactagggcttaattatgaaacttgtttatttgttttgaattatttaattatgatgatttatttgaattcagaatgcattttatatgtcgtatatagaatttcataatttggcatgttttatgcccggtaacattggaacgcggtgtttagctattagaataacatcctagtattttagtatagtatggtagtatagttagacattgggaatgtcgggaatagtcgagattttagagtgcacaaaaatacccttaagttgttttatgattatttagtgtcgccaagggcattttggtgtttttgccctattttggttttgtcatttagtggactgttggatatattttaccagnnnnnnnnnnnnntaccatgtatgtttcattaacatcctaatatgaattctaaaacaacaaaatgaacacatataaagttcagtaaaccttacattgggtgca

SEQ ID NO: 22814 - DNA, 8787 bp, Cannabis sativa
aatatttccaatacctaacaatgatgccccgctacaacaaaattctaaatcatatgagattgtgactctaattgtctaatatcgctttccacttccaccggacaccaacacgaaaaacaaaaaactcacatatataacataattaatacatactaaatttaaataaatctccacaaatgtgtaaatcataattaataattcaattttatatttaaatcctaattatttaataaaccagcatatcaaaattaggtggtctttacatataatgtataattttttgagtttttttttctttcttttttattcttttttattgttttctttctttttttttttttttttttttgaaaggagattttgtcatccttaaatgctatgaatttttgagaacattctagtgtacaagtaataaaataaatattttatcatgttcagggatttgcctaaataaaatattataattatatcaattaaattgggaatgaaaataagaacgataaattaattaaataaataataaaaaaggaaataaaaaataaataaactacttaactagtaaaaaataaaatgagacaacagctaattgatgaattttgtaacaataatcacaatagtaacaataatgttgggaaaagttttatatattggtcccatacataaaaaaaaataaaaaaaaaaaataaaaaagaacaaaagaataaattgtgagagtacacgatgatgaaagaacaaacaaaaatatgataatcataaaataactaattcagacaaaattcttaccctataaaaattattaattgaattgcatcagctttggaccaaacctcaagagcctatccaatgtattaggcaagaattttcttgcgaacaaatggcatacattagtatgttttccattgtactcacatttgcttccatgccttaaccttttcaagaggtctacagtgacatcttgtcttataaatctagttggatggggtcctcctctagtccaatcaacccaagtcagtgtcctattggagtttctcctacaaaatctgatactaacaaaggtgggcaggtagtgttcatctgtgtaacatgaaccatggcaaaacctcttaaagactggaaagtatttttggtcagctacaacttcgatggatattgcccggtctagttggaaccactgcgagccctttcgccattggtggagcctaatttgtggcctcattcgaatgttgtagcggccccgattcacggccccaggaaggtcgtatgactctacaaaggtcttggttgagtccatcagatagttataaattgtagagaaattgaataaagggatgcatgactcggagattagtacaaatctttggttcgaataatcaagtaatgcattcgctaatagccgcctctctgcgtccatcatgttgggatctccccatctcacattctgtaccaatcaaaacatattcatttattttaccaacaaaaaacatattcatttattcataacatattattaagcattaattatgatataaatttatcaacttaatgtaatataatgggacattcataatttttatattgttattttttctacttaattatttttctcttttctttatatttgtttagtgagtttttgctaatttttcatcttttttttttctctttttcgttctttttcttcactctctctgtttcattgttattttttttttaattctctctcctttttttctcaaactaattttttttatctttctatatatataaatatataataagtgtatatttttatctcttttttaacactctttctctctcttaccaaaaataataggagcattcctcctgtattttgctatcttttacataattaataaaagtggtacatttttgggatgttttttaatttattcagaattaatttataaatgatttgcaacaagattgatatcttttatttttctgttgatttctaattgtctttttgttattttataattattttatatttgtttttatgttgttatttaggtgtgtttacgagattttcggcaactaaatatttttagagcttaagaaagtaataataatatagataacagaataacgaatataagatttttacgtggttcaagcattaacaatccttagtccacgagtctattttattaggctcatcggctagtaactgtttacacaagtaaagatacaatagactgaaaaaccttttcccctgtgttccccttgaagaagaggaagctttgtaggaatattctagaatttttcggtgtaatactatctggcttaatacaagtgtgtttgcccagaatggtgaagaatgaatcttaccctagaaaagtctcttctttctcttgtgctttacaagggtatttataagccaacttctcttcatgtgttgccttggattgatcatcgttagtgcaaaatccaaccgtttgattagtaggctgcatttttcccatttggcatttaagggtgtcagatcgtacaggttgagccccgtaaacgtgttatcctagggcttttccttttagaatttcccttatccctagccgttggataattaggtcaggtacataaggacacgaattctctatgcaatatcgcgtcgtgggaaacaacctctaacatcgtacctaaaaaagcctggtcactacgtccctagcttaaaatgtgcaggcaaagtttttacgggcgaggagtgtagcttggtttggcgcatctcaaaattcctcggtccttctgagaaaaccaatactcttctcgggagcagatggctttgtttcttagaactgaggaagactttggctcaaggataccttccatgttgctagcagtcagggaactccctataacaaaaactcttcctatgagtttgaggcctttatcctcccatagcatcagttgagaaagtcggtcagctaatgacttcttagcctttcttgattaaaatccacgtgtcatgattacaaaaacacgaataatatttactccccaagcttttgggacgtaccacggtccaagagcttgcagtatctcttcctgagtgactcttggcacatgcaaactatttattacatcacatcatcagccgccaactaaagtgacactgtcaaaaggttttatctcctttgttttcttgtcaggggtttaaatgctgacttttgagttttacgcgtctattgggcgcgtgttttgtgggatgcccaaaaacggaaacgattggatttgagtagactctccatttacttaacacttttcacaaagcatgcaatgatggaggcaaaacgttgggagtcgatacgccttcttagtttcccactcatccaaccatcaggcgtaccttgggcgaacaagtcgaactgtttgcttctcgtggaaggcaccccttcctggtacctaataaatattttcagcaaccatttcacattttacattttttactgcttgtcgtaccagagttctagcatttggttccagctcttcctttgtcttacgagacctttctagcaactccattctcaggcactcattccgtcagccaagatacaacacccagatcatccacctcatttcctcttcacaacggtaagttttattcatcgtttacgtgttgtagagttcttagggagttttgagggtgcatgttgcatactctcagaatattggcaccgtgcctatggtctctatcatggggagtgaaagtcttggggtccgatgtcatgctgacccattttgctttgtactaatttctggcaagtacattaggtctgcgatgaaaaggactagttcttctaaagcggcatgcgacagtgcccctggcaggaaaaggcaaaggcttgaggcagccacttctgaaataggggcccagccctagcgtcatgatacaccattgaggctaggccaatctcagtcatactacccttctgccattctaaaaataccttttgtggggttcactttcccaaggaggaccattctttttaatccttttgacatacaaaataagagggaagtgaacaaggccctgaagaaacttttggaggcagagaaggggctagttcgtagatggaccaccgtgctctcagcagtgtgaaaggctgaaatctcagatgacctacacacccttccctctgctggtccaaccgtggaggtagaagccttggaagcgcgtggctttcaatgtagggagagaagctgcctcttttgccattgaacttttggatcaagtggctgcgaatgcttctaaattgcctatggagacctaggaatcatgcaacagcgtggagaataatttggcaccgtctgtgggaacgacaagctctagctacgttggttcttaaataattcaccatcacattcgaaatgtcaagacatttttgttgtctttgagaaaatgggggtcagtcagaagaaaactagtcaattgccatatttagatgataccaacctcctgtcgctggagaagactgaaggaagaacaaccaaagtgtgggtttccaagcaaatgttcgaagagagcccctagcactacgtgcgtcaataacgacaccgatgactaaccttatcaatagaagcatacaactaccaagaaagccatccctggggtagagccttccatcatctacatcgtcaaacccaggcaccttcatgcgtggacatagaaaggaaaagcaagtatactcagtgggttcaacatctcaagctcataattatgaagcagaagtaagcaaccttcgctagaagaacaaaagactagaaatactgtggctggtatacaaaaagtcttgaatggaatactcaaaggcaaaacccaagcctcaaatttctgtcacaaaagccaaaaaatggagtacgagatcccaaatgcatgtactaacaagtgtgattccttgtcattcaccaatagcaccccaagagatgagcacaaaggaacttgtcgtgagataagagcccaacaggccggttgagacaacttgagccttcccactataaggggagtacactgagggaaacaccctgccaaagaaagacttcacccaagaggtctcatagtagagggcacctcgcatatggctccccactgagagcaaggcccaatgtgaaccacagacaaggctcgagttcctctcactaacccccaatggaggatgagtaaaatgatgaaggagtttgagtcagaaatgcaagacctatactagaggatggccatcaccaaatagaaagacatggatgatgatggggagtttgatgaagaatcccctctcttgagggaggtttaaatagagccactaccattgaacttcaaggagccacatatgacatgatataatggtaccactaacttaaagtaccatcttagcacctttaatgagctaatgaagatgaaaaaaagtgtcatgtaaggcaaggtgttaatgttttgcgatcatactagaaggagctgcgtataaaaaaaacctcttaatagaagaatattcaaaatagaaatctcataagctattttattccaaaaagttgatgttccattcattcaaagaaaaaaacccattaaaataaactcaagggttctatttatagggaacccttgacactttacactttttccaaatcccaatacatattatatgaagccacttttacaattgataaatgttgtatcataggtggtctgatgtacctcacatcctatgttacactagaaatacccctgtcattttgtaccatgaatggaatgaagtttgtccccattatcgttactcattgtgttgtcattatctcatctgatactacttgctttggtgtcaagagtataaagaagatcaatggggtgatggaagccaagcacagggaacacacggtgcatggaggggcacgggcacacgaagggcgcaagcgcaggcgagggcgcaagtacgggtgtaggcgcgagcgagggcacgggcacgtggagcttcccttggcaaacttttggcatagcactaaggactccaaaatattacactaagtcatttttaggagtcaacgcctaccaaaccttattaccccaattcaaggtggttttgtgcatgagagatattgctcacaatgtaatgatttgccaaaatattgaggaaggcgtatgatacaatagaatggtctttcatagaggagatgcttcttaccttgaagttccttgaatctttgtgaaactaataatgaggtttgttacaatgcctaaattctctgttatgatgaatggatcattgcatagatttttttgaatctcaaagaggtttgaggcaaagtgatctaatattgccattgctctttatttttggaatggagtacctatcaagaaaattcataaaagtagttgaaaaccataatttaagttccatattcggtgttgggatctgaagttaactcactttgttttgctgatgacttattatttatttacaaaggagaggtgcaatctattcaactattacttagagctttctaaactttctctgaaacataaggtctagaggctaataacgctaagactattggtatggaagctagtgatactcaacatatttttgatatgacttgttatgtacaaactaaggtaccttttagatacttaagggttcttattagccccaagaagacgtcttcaatcgaatgtgatagtctaatggagaaaatagtggtagaattcgagtttggaacacaaaaaatctctctttcggagtgagagcactaatgattaacttagtgctaatgagcatccatacatattaggctcttattatgataatgccaaagttagagtcgataaaaataaacaacatatgcagggcatttaaaatatataacaatgatccaagctgccattggaaagcaagttaagaaaattgctcaaaagtaggataatttgtggatacaatgggtgcattcagatgtagtatacatcaagcaagagaattgatgggagtataagatgttagaaatttatttatttagggccacaattgtatatataaaatatatgatggatcattataagaatgagtcaaatttatgtggtctattttagtataaagtttatgacttaagggcatgattatcatgattttaatatatgaataccataaagacaatttctgatttaatgaaggacgaaagtagaaaaagtaaaaaatgagtaattgttgtttttcaatcattaatatataggtagtggtccctatttttgcattgtaccatttcatagtcctaaatccccatcatcaagaaaataaaggctccaaagtattttgatgcaaaatcagaagatcatactattctaaattagattttatatggactctggtatgcttctgctaatctttaattctattattagaattctcatgaattaattaatactaaattcaaattatagtatgcttaacatttagtatcagagcattcctcttgagaatttataatagaattaatcttccataaaactatttttggatttggggtattccattagtactttttggatacactatttttgttctaatcaatcacatatatatattgtttagagtgataacatcttgtatatatgtatatttatatattgtttacatatatgatagatgtatatattagtttaaagtcaattttttcactatgttaagattttggctcttttatgttatattgtatatatgatacaatgagaatgatataattaatactatatgtgttgtagttgtcatcttgtcgttaatgtgtttaagcctttgttgtacggcttattttctatttatttttagaacaacattattatggtttggtttagtgtcagcgagtgagtgttttattgaaatgtatataaatcattataaccccaatcgatcttattatttttccattgaaatttttggataattatgtatctgtatgttatatatattatgatttagacattttgttttaggatattttggaaataattgtatttagattttagtattgatttatgtctaatatgttaaataaattagtttaaacaatatgtcgctaaagtgatatattttgtgttgactaatttattctaaaatatcaagagaattgtatgtttgtaattggtacatatattgattggcccaaaagtaagtaaatattttgcaaaatttcaaacacatctattgtgataaatatgtgacaattataaggtattttgtatgattaatatgtcagtttcaatattacatgttgtttgatataaacttattatcagtgtttgatcactacaacaagagtaccgcttacatgtaatatcattgtccaaagatatcatattaatgatgtatttggtatcttgagatgggactaaccattatttgaatttattgttttatttggattcttgtatgagtacatcatttatctaattgtattgttctttctccatttgttgtttctatatctgctaaccttaattcaatatcgatccttaatggtaataattttaagattagaaagagaacatttttattgttcttgattgcatagatcttgatcttgcattaaggattgatcgacctgtttctcttatggatatcagcacctctgagcgaaaggggatttatgagaagtgggatcgttcaaaccacattagccttatgataatcaaacacggcatacctaatgcttttaggggtgcggtgttcgaggaggtcaccgatgccactgttggggtttatgccctaaataaaaatcatttcaatataatcagat

SEQ ID NO: 22815 - DNA, 6284 bp, Cannabis sativa
  modified_base (3110)..(3119): a, c, t, g, unknown or other
  modified_base (6143)..(6148): a, c, t, g, unknown or other
ttttaacggtcaaaaaaattcaagtagcatgatttggtatatgtcaaaattcagagagaaaaattgctaattagccttacgtattcttggcttattagctttcttttttttaaaaaaaattaaaatatttaaaataatcattttttttttcaatcacttaactctcaatatatgtcgatataatttttttgatgatgccattagtggagagattgtgcactaattttttaaattttttttacatttatacgttcaaatatgtttttttatatatttttactatattttatgaactacaaaataatacgaaaataacaaaaaaactacataacaataagaaaataacataaaaacaacaacaacaaaataataaaacatcataaataaattaacaaaagtaccatagcatattttttttgtaaataaactcataaaaatatttaaaatttcctaaaatcatatttattgtttttatctattcatgaaataatccctattattttccatagtttcacattttagaggtgtagaaaaggtcaaaattctaaacttgctttccattttttgttatcaattgatcctaaataaccaatatggtaaaaagtaaaatagaaagacatcaatattctatgaaacactaaataaaaactaaacaatagtgcataggctagcttgattctcagtcaactgtgttcatttgctgatcaacaatggtggaatcattcttataatactcatttccgattaagtgatgaataagcacaccggcagcaacactaacattcaagctttccacagccaaaaatgaccgaaaatcagcattagccgagcctccaacactgttatctgctgtttcgagttgttcatcttgacccgggattaagtcaacaggaacattagaaggaatcttgactagctgagtgcatgatctctccactaatggcctcagtcctgtaccctcactacccaaaactaggattgttggttcacccggcacaacatcattcaagggaatagctttggaagacacagaaccaccgagaactcgccaaccattttcagctgaggatgttaagaactgcatcatatttttgcaatatcttagttccatcagttcaagtgaacctgcacttgctttactcacaacaccactcaaaggggccgaattcttcgcacataagatcacccccgaagcaccaaagaagtaagaagatctaatgattgcccccaaattctgaggatctgtgacttcatccaaagctatccagagtgaattcttctcttcctcgattgacatggggtccaattcctttatcttaaccatctctaacggagaagcatcgagtaccaaaccttggtgaggtctattatctacaaccatgttgagatcatgcttagacacttcatttatggttaaaccaattttttcagccatcttcaacactttctcgaaacctttcttgtccttcttcttcctgttattactactcaaatccaatccttcctggatatgtaatgcgaaaaattctcttcttccagctgataaagcagccagaactggaccaaccccataaatacattcaccaaccatcttaggcaaagatgattcagaagcctctttccatgtcttcctaccccaattctcttgcttattccatcttcgaaattcaggtttctcatatccatcttttacatccaccactcccctgtacctatttttaatgttattccatctcgaatcatcaacagcctcaacttcttcagttacttctcctacatttttcctataccatacatccctagaattgttttctctttgatcatcctcaaccacatctgcctctctatacctactttctctactccccaccagagatgcagtccttttctttacaaattcgtctgaagaaggctcgctactctgcttctcaaatctactagccgattcttcccaagaagacttactgctactattatctagtttccgagcagatacctcccaagacgaactactagtcttcgcaggcgtttcattcactatatttgttctattaccattattcaatgacaaccaagggagcttcttcccaactcttggaaaacgttcccttccattaaccttctgagctgatgaatacgaaaaacctcttcctttcatcgaaacagaatgtccagtaacagttttaagccaaaacccacctgaaatatcctttgattttgctatactagagcatgaacaagcagaaaaattcatattttctgttctgcaaccagacccaaatggcgaaacagtaaaaatgaccgaatcagatctttgataaggttttggacaagacccagttggtaaagtttgagactttggtgtggagaacagcttaaaacaactggtttgtgaagaagtcctcacagccaatggaaatgcaggagtcttagctaaattagtgtacatcttgtacagttttacactcaaagtagagctaagagcttaaaataatcttcagagagaaagaatcaaacaacctgaattgggaaaaacatggattagaagaaaagaaaaggtcaccatatgagaaactaaaacattcaagctctaagttttagggtaaaaatcaactatggaatagtcatctaatctatgaaactttctcagaaaccaaacagacatgtgtattaaacagaagtaaaaattgggcaaacaagaaatgaaaaacagtaagaagtaagaagtaaaaccttgttggggacaaaaatcatagcagaagccattgcgagcattgtgtcaatctcaaagaccaagcaatacctccattaccaatctgatatattgatgagaaaaactgaaaatttcacaagaaaacacacagcaagtgtagcttccacttattaaattgataaaattcaggattaatcttcatgtgagtagtgtgttaagaactcaaaattatgttccttaaaaccctgagtagaataacagtggagataaaaaatcctgttgaagagaagagcagaagataaaaactgaagagattagttacaatgttttgtatgttacctgattgagataagcggctgccgttggggaaactgaggagagagagagagagaaagannnnnnnnnngagagagagagagagagggaaatggtgggtgaaactttagggtgaggaagcttttaataaaatgaaatgatattacagagaaataaagaggtttataaattaagtagcttaaaataattttgatatctctatcttaattaaattatattattattattatgagagttacttcgtatactatttttaatttttttttttaatttacggtttgaattgcttcaataagttttatgtgagttactatgtgaattttggttgcaatttaggttgttcagttgctatgtccgtttctgtaaaaatacaaaaaaattactatgaagtgtaaaaatgaaaaaaatactttattattattatttgtaggaatatttgcggcataagtattttattatttttttttgaaagaaaatattttatgtttttagtttcaaatgtgtacagctgtgtctatgttgcaagggattcaatatttcttgttgtaggccaggtcaagttagtcctgaattggctgaggtctttggggtaagagaagctttaagttggataaaaaggaaatcttggcaaggggtgattgtagaaaccgacagtctcattgtggtacaagcattgcgtagtcctttatctatgtcatcttattttgggactgttattactgagtgcaaaactttgttagaaggtttgattgatgtgtctgttttttttattaggcggtttgcgaatagtgttgcccattacttggctagagcttcctattctgttgctgatcgtgttatcagaagtaatgatgttttttctgagtttcataatgtaatcttaaaggattgcaactaataaagtgatgatttatttttaaaaaaatatatattagcggcccaattcatttttattttttaaaaatattattaaataatcttaaaatgaataataataaaaattaaaatatcaagaaaaaaaataataaaaatatattttttatttatttagtttttataattaaataattattgttagtttttttttttctattttgaaattgacaggtattattttagttagtgatataatatagtatttaattcatcgaaaaaaataaataatatataagtttatgaaattaaaaaattaaagcatttatacggcaaatattctttatttgtattacttaaaaaattactaggaagaaattttttgataatatcaaatttctatccataaataattagagaattgtcaaattgatgagttaagattttgtacatccttggcaaattgatgactaaatcttactaaagtttttgtaatgagttggcgaatgtcaatacatataagaagagtatcgaattttttcacaatgagagtgacaaaaataacagcacctctactttaaaggaccaacactaccattttgaaaaacaaatatcgcatatatattttgtgataaattgggtttgaactcattttatttgcaaaaataaggttaaccactgctttgtgcaatctcatttttaccttaaattggtcaaaatatgcagggcttcttatttttgtggatgatttggtccaatctcccattttgaatcaaaagatagatatgagggcctcaacttaggggtattaattcatcatttttctcaacagtgcaatggaactgaaattaccattacaagtttttgacgtgtacacaaattttagtttcattaactaatgtaagtaaaaataaaaagtattactaaaaacactaatggcttcttttagcaattatcatgagtagagaaaataaaagtttactaacaaattaacaaaaatatgagtaacaaagttaacccgacataatcgtattttgttttttgttcacctcaaaaaaacaaaaaaagaaacaaagaaaagagaggggaaaaaaattcagccctcttctttttctttttctttttctttttctcccatcaaagaaattacagcatagtcttcatcttctgaccttaaccaaccaacctacaaaatctaagtctatgtcctcaaatttctctgcattataaaatttttcctttactttcaatatttaaaaaacccgaaatcaaaaacactgtttaatcagtctagagctcatcatgtgattcttcatcatcatcatcaccacctgaggcaccagcaccaccaggagcaccaccagccaaacccagcataatttgattagcaatgacatgtatttgaatcagctatctttgaagatgtacgacataatcttatgttctcggtcgcttgggagatttacatcagaaagaataaccttttaccaattgaaatgcatatataagtgctcttgcaaaggttagatacacaacatcactaagaaccacaaagcacaactgtgcaagtagagaatcccaactgcaaaaaacacttaaaagcaaaattaaatgatcaaaaagcttgataaaatatgtaccttaacatttttccatccatggtcattgtttaatctaagatggacatagtactgcaatgcaattgacaatacatccataaattcgattccaggagtgatagcattagaatcaaaaacttgtgattctgatttataagactttcaaactcttcacacaggcattcttcttcagctgcctacagaaataataatcatgtatttatgtgcctacatatattaattaatatatataagtaacatcaagcaaattaaaataagttgatatgtattgtatatgaagaaatgccaaaagaaatagaatgctagcactgtcaacaaaattaattgatcacaagtaaattttcaataaaaaaatagttacgtgatggattttttaatttttatttttttaaaataaaaaaatcattagaaaaatgctaatgtttagttttataaaaaataataagtaaaaaattaatttgtcaatttagttatgattaaaaaattagataaatgagaaaattaaagagagaatagaaaaatacatttagaataattctagagcgttatatcaccgtcttatatctctcctttatatatannnnnntatatatatataaatatatagatccattatatatatagactagataaaagttacgtggcaagccacgtaaatattagttttatttaagttctaatggtttagttatggtttttgcttccaaggtgttagttacaag

SEQ ID NO: 22816 - DNA, 5743 bp, Cannabis sativa
atggtcgaataattgaggcgttttcaactatttcttctgttagttgccgacccgaaattatagaaattctaagcgtcaaggaggcacttaattggataaagaggaataacacaagtcaaatgtcattttagagacggattgcattttagttgttcaagctattcttagtttggtctctatgccttctatttttagtttatttgttcaggattgtcaatatattttatcttttttaagtaatgtttctattggtcatgttaaacggtctgctaacaaagccgcgcactgtatggcacgtggtgcttgttattggtcaggtcgtctttaactgagagcgatgtttgctcttcagtccattatattagcggatgtttctgtttaataaaaattgctttcattcaaaaaaaaaaaaaaacaaaaaactaatattgttaaattaatcaattaagtatattattgaataaatattaggtaaaattacatgttgcacgttatgctttgtttttttaataataataataatataataataattaaaagttgttagtacaagttttagtttttttttttttttggttataatatttattctttaattagttctctggaaagaaatattattatttttttaaaaaaagatctttcaataattaacaatgataatataaaataaatatgattatattatttaacgtttgatgacagttttcaaaataaaaaattaaaataaggactagtagtttggttataaatatatttaaataatcacatgataattgagctttaaattattaattaactaaatctaaaatacacgaatctcagtctttttttcctattcatcgtgttcaagataatcttgtcaaatattttataatcattttggattttcttcatatactgtatttattctttatatttttaaaacaaagaaaatcttttagagaaaatctcttctaatataaaacaatgtaataaaatattttaaatgaatgtctaaattatttaaattaattattaccataaatgttacgaaactttttatttgaaaactttacttgtaattaaattataaaaatatggtatatagtgctgatgtgttacacggtatagattaatagaaagcatattattaagcaatggtttttatgtaattttaatatatacattgtatattaataaaaattttcctaaatataattgtatttttctttattttgttgaattaattctcattattttaaaataaactacttaaaaaattctcattcattttctcgtctttcttatcctattttttttctctattatatatttatttcataacacattattaacacgaatatctaagtaatgatgaaaattgatcataaatatatattgctgaactgagatatttcaatattactgaagaatatttataaaagaaaaatactaattacagcttcgaaaatatatgctagcatgactatttgggatacgctacgacgtgacagttatttacaattatcctcatatcacatatatttaattgtatataaaacataagtatttactcccactcaatgtaacttctcactaatattgattaatatgaatgacggccaaaattacaaaaatgtacctaactcataaacgagatcttaaatgcgataaatttcaaataatttcatataatcaattatataataatataattactcatttatttttaattaagattgttaatctattgattaatcccagaatattacataagctgttcaaaaaaagagtacgagcgatgtaatatcgcaatcttcttcttccttgggcactaatattgccatgttggatacttgggattcttaaaatccatggtgcattggttcgttttgagaagactgtaggtttttaagttttagttgtgaataagaaagtcagccgctcgcaaaccataaggcaagctcaccaagatctcgtgacgcctttggatgacaacagttgggattggtctttttgaaagagctaaaagaacaacaatgaaaaaaagttagtaaaattcaaacataaaattctaacttggaattaaagtttgaaataatgaatgcttacatataattctaaaggcagtaatattgattggatgaagcccgattgtctaaaagaaattgtgattgaacttctttttatttaggagtctaacaataatcttattatcgttagaatgagtacccaaatagtagaagccacctgagcaattcttcctcgtaggacatgcctttaaggcatagaagcacatgatctctaaaggagttgggcactcccatcgtaaagcgacttcaaacaggctaaaatcctatatgtttttaggacaagttgaagaagtccttgaagtactgattgagaggaaggacgacccctgctataatatgcttgacgctccaagcgcctatccttgaagaaccacaagtgctgcaacaatgagttggaggaaaattcgacatccctcctcattcttgatgcctcaagaccttaagaacggacccacatatggggccattgacctaaccctattctcaatcagttgagcctcaaattggactgaagggttctggggtaatttagacttgcgctcctttgaagacatgatgtcgaagtttaatttagttggagaaaaagcaacgttaaccttgggtaaaaataatggtctcgccaaaggatactttgtcaaactagctagggaactctggccaagctgcatctcgcaagaagtggcgcttcccatcaataacctcgtcaataaaatgtttagagcgagctgaggcatcctctcggccaagtttttcgttgaataacctaattctctcatcgtttatttttaaaatttttttaggtgttcaagtcgtgatttgaagggtaaagcaagcaattttaggttttcccgctctaaaaactttagaaattgaaatttcaaaccaaatataaatattcttttcctcagaaaagaaaatgtttcagggatctgaaattttagaaagaatttaattcagagaagggaatttttaaaatctaactaccttattacttcagggcgaaaatcatgcaagaaaaaaaaaaataataaaaataacaaagaaagaaaaaagataaatatcaaagagttaccagattttgggtttctctgaaggcgttgatgatttcttacgggaaatctacagtaccaagggtccggaataatgtaacgagagcaagatttggaaaaaatattgttaatcacacagaagaaatacgtcaaagataaaccatataggcatgcaatatttttgaaaattctttgaagctcaagtgggtatttctctggttttgtacctcataaggaaaaatgaagaagataaccgtaaagagatctcttatatcaaaagatgaggaaccgttcctcttgttcaaaattgaatcaaacggctcttctaggaaatatgaaaggatacgtgaaaattctgttagatgaaaggacatttaattaatgaggaaataacatttctcgagaaaaataaaactgccaaaggagtgtactcattactaatttggaaaagactgaattaacctaccgagatttattaaaaaaattctttcaattctaaaaagagctttttatggggcgattgttatgttcatattttgagccataaatatgaatatgacacgtggatattggtctcaaaaattgaggggattcataaatacaacagttatcttgtctcgggataggttacaattagcagagatatccatgtcgcgttgtgttacaatatcactaacatatgatagcgataaaaatacacagtatatagcaaggcgaaaatgttatgagattatctcagatttaactaggatgacccagaagcataatggaactcgaagtgatatcactggaaagggtagataacaagttttttaagagcttgattagcctattaattcacatactcgtgattatgttgaaagactaagggccatgatcaagagaagatctgtcttgttgttctttattaacaatgcaagaagaccaatctagaagaaccaactttagagcacttcttaatgttatgacgaggggcaagcaccaagttatctcacaatgttcgtctcgttgtttcttccattacaaaagaatgcgagataactctgaatgcacactttagcaaagacctgttacttctagataagattaaaaagtggttattagtagttattttatttcacacacattgtgaataaggaaaaacgtggggtttgtccacgatcccaaaaatagttatttagataagaacaaaggaaataatcgctatccaaaaaatactataaaagggagtaaagttctttccaggagagtggaattttgggagtgataaaccttgaaagattaagtatagaaatgatccaaaaatcatatcctgaacctagaaatacaattaaagaattagaattaaaattaactcgctgagtatgtatattttaactataaaattacgtaaaacttcctattatttattttatttattcactataattaatattttaattttattgataaagcttcattattgttaacggatttccgtgttaacatattctaattttaggttttgaaaatatttgtggcaacttaaaattcctcctaagatcaaaaatttcctttggagggcagtatctaatattcttcctactcatttgcagcttaaactaaaacatgttaatgttgatgttgtgtgccctttttgccatctttcatctaaaataattgggcatgtcctacttcatttctttttttcttctgctattttgagaaagttgcatgtcgattggatttttgataagtatgttctcttctcgtcttgggtaaaggaggtatttaaggagaggttgctatactttgttgggcaattttgcaaacccgaaatgaggtagtttagaattaaaaagctccttttatggatgagattgtttcattggcaagtcttacttttaatcaatgggaatcccctcaaaataaatttcaaattctagcattgcatgataattttcagtcggatcatattgagctgtgggtcaaactaaattttttaagattaaagtcaacgttgaatattattattagatattgttgtcttttattgtcttaattgaatattatatctattattttgttaagcgatctgcaaatagagttgttcatattttgcttcatgactctattcataatattgattgtgtttatagtgggaggttgttcccgctaattcatcgtctttaattttagacaaactttgttattgaagtctgatcatttccattcaaaataaataaataaataaataattagtttaaaataaaaaataaatgaaagatcttgacagttagaataagattcacaatcaacaaacatgtgaaactgtatacttgccttatacttctacactcaaatttaattttattgtgactttttaaatgcatccttaatttataattttattattaattttttttttgacaacatcatttctaaacatgaatcatacacaagtttctgacaacaccctttgtttaattttatacataagttttaaacaaatacaccatttctaaacatgatacacaagtttcaaaaaatacaccaaatttaaaatgttatcatcacatatatttgttttatataagaagagacttattctaaacgattttattttattttttaataata

SEQ ID NO: 22817 - DNA, 2758 bp, Cannabis sativa
tatatacaaattgatcttggggtttatattaatttatctaacataaaatgtattagggacgacaagtcgccactagcatgttgctcctaatacttcgtccctaatgctcctgtgacaaaataaattgcccctaaaagtgattaattattaggggcaattttttatcgcccctaaaagtattaaaatcgcccgtattttatgcaaattaggagcaaaaaaatcgtccctaaaagtgtaatgtctcccttattcacatgcaagtatgccaacatttagtagcattaatcgaccctatattatttaacatcaacaattaaatataatatcaaatgaattttaatttgtaaacattcaatttgtaaacagttttgaatttcaattacaaagagaagtttgtatatcaaatgaattagtattcatttttaaactttctagtttctgaatactatatgtatcaagcaatgtacatattatggtaatccaacaaaaagcgataataatgaccgacattattattctatctttgagtacaatggctggcttcgaccaacaacttttggtctagtagcatagacaattcagggacagaagtaacatcctatcagcacctacatcgaaatcaataaatataagcacactctcatcgggtgggatatacccaagtcaaagatatttaaaacaaaaataagtatttatttagataatagattgaaaatacctacaagctaaagtttcagtttaagatgataaaattatgcaatttattgtcacaatttcaagtgaaataaaatatatctagacacaaagatgatgaaagcttacagtagctatgttatcataataataataatcagtatataataaaaactacctggttacatctgcctcatcatcctccctatcctcgctctcatcgtgttggttttgtgacatctattgtggcattgatgacataggcaccataggccatgaatacgatgacatctgttgaggaaaagatgaagatccaggcatatctctatgttagggatagacataaggcggcataaattgctgtgactgaggttgttgcgattgaggaccatacatgtaaggatagtgatatggcgatggagggtgttgtgatggggggtcaaacatgtagggaagataaggtgtaggagtaggttgttgtgatggtggtggtcgtggcatctgccactaacacgaaaaagttgagtgcatgttggagtggcttcccgaagtttgaaaagacgaaccagaaccatctccagacatttgaggttcgggcctcctagttgagtgcttctaaatcaagtaatctatctcattgtttggtggcagatgctccttttgacttatatgctagaccaatttaactattactcacttcaatcgttgtatttcctctgaaaattcttaagtaggcattgtttgtgtttggaaatactgagtgtgactagttgtggattgaccttccatttgcgtcccactgctcgattgtaatcgctcctctcgccaagcacgtgttaaagtatttgtatctgatcaactgaggaataagcatgcgaactagagtcatcattttgctgttcatattgtgcttcatatgcatcttttaatcgttcctgtattgaagaacaagacagataccacaaatatcatctagtaagtataaacaacaaaactattaaaaagagagagtttgggcacgaaaacatacgagcttggacacgatacgacacaaaaaatattttcttaagaatgacacaatacgagaagcacgaaagtcacaacatgtaaacacgaatagactagttcaaaaggcacggtacgggactagccagaaaaacacaagatgacatattaaaaaaaatattataatttaataatattgataaaatgcatttattaattataaataagttaaaataataataaaatttaaatataatactgaatattaaaacatcaaaaattaatattatatattaatttatttatggaatgtgataaaaaattatgtttatatgattatctgtaaaatattgttgaaaagttatataaatataattaaaattataaaatatacatatattttagtaattatgaaaaaaaatatgaaaaagtaagtacgaattcaagcctgaatataaaaacggtctgactgtttaagaaatatatatgggtcgacacgagcaaaacacggcacgaacatacaaagtctacttttgaaaatgaacacggcacgatacgatccatatttttctatggcacagcacgatacaacccattttctaaaaagcacgaataaatataagttggtccagcacaacatgcattaatttacaacactatcggtcataacctagagctaggtcgtgataaaaaaatattaaaataataaaaaaaataatcatttgtttttggtatatatatgatcttgaaagagggagagtacaaagcttaatatgattacctatctgtacagcatatactcatatagtgctttactaattattaagtggcaaagattaatcacaatttttcttgaaaaaaaaagaggtgtgggtctcattattttgagataatcgtggttaaaattgaagcatataatttcgtacattggtcatattcattagatttctctagtctctatctaggtagtttagtatataaacatgttaatgatggttaacatatctattctatatataaagtgtggctatataacggaattcttggtttatgagaaatt

SEQ ID NO: 22818 - DNA, 1562 bp, Cannabis sativa
tctatctcaaaactcaatatgatcgctgtttctaaaatgataagtgttggtagtctttataggtttaggattaagatcctaaagtcggtggctgcaagaagttaagttgttaagttaattaggacttaacaaacttaacaaactctgttatgagcaagatgtccacgtcagcgtaagtataggtgcttccgggaacgtgtatgagagcttccgaaatcacgaaccaaagcacttacgggaggagcttctcgaatagaaaagagccaactagagtcgattatcgaaattcctttttaggagtaacaactagccatctggaactctttttaagagaaaggctagctttcttgaggactctttttggaaggacaagaaaaccttccatgacctacttccgcgagttaacaactttctaggaattatattatcttttggagattttttatttggagaaattattctataatactttttcattagacaataaattatcttagtggccaatcattgatgctacatgatgaattcttattgtgattctaatcaatttatatattaaaaaaaataaacaattcctaataataaagagaagcaactacccatgaactcaagtacattactaatgctttaatttttgtttcctttttttcttttttctttttttttttttggccaattctaaaatgctttaattctatagttaaatataaaggcatatacaaacacagagtcactcatttggatggtggtcccctcatcacgagctacttaaccaaacttattgacattgcaatatgaggaatgctaaaagaattagtgaaaaaaaaaaaaaataaccattgccaagaagttatctaatatacttaaaaacaatactcttgccctatgatgatcattaatgaatatttattaggaaatttattaaaaattgttttcatggaaaagttattgcgcattgttctccagttctttccttttttctaattaaaaaccattttacttactttgttaccctctcaactcccatcgataaattaacatagttgaacctaaaattaacatcttcttatcattacaaacacaacatattatattatatgtttaattatatgtggttacaatatagtaccaactacaaaggtactgtagtttttctttagctaagaaaaagagtaaaaagtacaaaagtagattttgctctgatatagtaatcatggggtagagagagatgaaagcaattatacatatatataaaagctttaattattttgtcccccatattcatattgattattgttaaatctaaatctaggctgcagtcacggcaattttcatgccagattcacagtgctgagggaaattgcaaatgaagtagttctgtcctttaacaagcttgatctgatctcttccacttgtaaacactttggaaccctttggggtcctgcaactctggtaaccggctctgttcacagccaccacattgtgtgccccctgtccataattgaacactggaaaaaaccaatttataagagaaattttaatttaatagttaatatgaaaaa

SEQ ID NO: 22819 - DNA, 1336 bp, Cannabis sativa
cataaacttgcaagctatattttgattttcatattcaactcagctaattatattttattcttattcttatttatgtcttaaactttgttgcttatttatgtcttaaacttaaactttgttgagaatcatgagttccatctcaaaaccaattgacaatgagtgaagtagtctacatttttcatatatggctcaatactttccatttaatacacgtagaacattgttctccaataaacataagtctttatttagtatttgggtgataaaagtgagggtaattaagatgcacaagtgtcataacgtatcactaaatagtttaaaagtttaagagaaaatgtttctcccagtatcttcagtcttcgcacctcccagttatatatgtggatgggccaatggccaaggacaagacagtttggcatttttctatttctttttcattcttaataaaatgaggtagtcctctctcatctaactcctaaaatactcccaaaataaaaagaaagtgaggtgtggtggtaggtaagtttttttgcttaacgtggtggactggtaggtaagttacataagttaacttgctactactattttttattattattattatttttttgtttagaagagtaattttcgacataaatatttaggtttaacttttagttacaaataaactcttaagtttaatttttgacagtaataatacctaagtgataattttggaacttctgtagtacttagtgaagtaaattgccacgtggcaattcctgattggtcaaaatcattaaatttttattatataaaaaaatttagttcaaatataccaataagaaaataatatgtggatttaattacttaatatttaacggtaatgtagttccagaattataacttaagtattattaccgaaaaaaattaaaattatgtatttatttacaactgaaaattgaacttaagtattacaattaaaaaagttgctattatttattttttctaaaaaataattgctactactacttgggtgcccatagcgcatacctaccaacttttgtgttaaactatccttttaattatgcacgagtctataatacatctcttcatatgttttggtaatcctattccttattagtttcgaaatttttttagaataattattttttatgattatgacatatagttttaaaaaatttgaaacaatttatattgtggaaaataaattttaatattttgatacagccacaggtatggttatttatttattttttttttttttatgtacatgtgatattttttctcttggtcatgtatgttatagttatttaagatatgctgcaaaatttta

SEQ ID NO: 22820 - DNA, 1203 bp, Cannabis sativa
tttttttctttgtcgttttagaattattacttagacagtaaagctaggtactcgtgaatatctttgcttttgaaatttgtaaatatattgatcaatcgtctctttctttctttccttttttgagggccaaccactatcattgacactttaggctgataaaattgagtatattccacgtgaaaaaagcactggaagaaaaatatctatacttaagcattttcattagagttaatagtagcttaataattaatttaaacgatatcatataaatattattaagaaagaacaaggaaagtagatttttcaattccactaaaaccatataccttttaattttttcatatatctttatgtaaggtaaatctatttatatagaatatgttaataatttataaaagtttgacaactatcatcattagtgttatgttgtacataacagcatattagtaaattaagtcaatgcagtaagtgaaagatagataattaaagagaaatggtaaagggcacaagtggtgcatagtaccttcttatttgtcaatatcgctattggttcaactaagtatcgggtaccatataatttattataatagtttttagggactatcgttagctaatcacaacgcgacacgtcacataggtgctagacaccagtggtgcctaatagcaatgctcataataattaaatggagagaatagtataaagtttatatatagtcaactatagtcttcaaataagtcttgattatagacaatgccacttcataatgagtttgtattaattaatatatgtactgccaatatccaaagcagcacaagaatactttaacaaggctgaaaaggtttatctcttctattataacgctagagtcaaaaagaaagttcatcgagagaaaaaggtgaggtttataatcagcctagctttgtaatctccttttctgtcgaaaaagaagaaaacctaattgaaaattgcttgaaatattgctttgatttagcctattatagatattgattgatatattaatattattatagatagatttaattaataattagcctagaattgcaatatatgcgtcggtgcaatattttaaaagggaaaggagggtcccacatttcctgatcatttccgtgtctagcggagtttaagatactagaagagaagggcgtaggtaggtagctaggaagaaaaaaaataatgttttt

SEQ ID NO: 22821 - DNA, 2538 bp, Cannabis sativa
  modified_base (1000)..(1039): a, c, t, g, unknown or other
atttgaattcaaaagggtgcaaaatcaaaaaccatctcatttgggtctatcaacttgtttgactctttcaaagcaaggagaaaatggtcaaagacctaagggccaccttccaaaatcttttttctatcaataatcaagtcaaactgaaaacatattcttacctctcaattttaccatgaatgctccctaaattttccaaaagatatttgtcgaataaatcagaccatcacgatcaaccaaacacgtcgaaataactcgtctaacaatcatcttagccacgaccttagtcccttcatcgagaagcatttgatttgtaacatcacaatacttatcatcatcctcatcactgagggccatcgaattgtagaaggcctcgagatcactgtcattcatcatcgccatcggtacatccacaaaccttgcttggagagaagaacgaggaatggcgccacaaaaaaaatgacactattgtataccctaaacggctagagagaatacatgctcaattttttagctcaaaattcaccaattcattatacttttttcatcttttttttagataaatactcattaaatctttctcatccttaataatttcagtagctatattttttttgcattttaaaacaatttgcatcgatcaaatttaattttaaaataaataaaatatcgtcagttaaataaaaatacaatattatgtttttcataattatcctttgaacatattttaaaatttaatttttagactctttattttgtaaaaagtttaaaatgtttttttttttataaatgggtttaaaatacgttttgataataaccgaaataccttgtaaatagtgaataaattgattgacacaatttcaatatatgtttttcacgtcactcaattgcaacaatcaacaatttaaaataatatttaattgctataagggaaaaatatttgtggacaattattaattgtcgccaacaaaagtgtattgtttttattattattattatnnnnnnnnnnnnnnnnnnnnnnnnnnnnnnnnnnnnnnnngttgttgttgttgttgttatttaaacataaaagcactaattaaccaggtaaatctcaaacctcatctgttttaaccataaatactaaaattcctatctctctcaacatgttttcgggtaaagtataaaacctttattttataattttaatactatcacaaaaaaacactagaaccaacagtaattccactgcaaactaaataaataaaataaaataaattataccaactataataataagtttagggatcaatatccaaaaataaaaatataatgaccaacttatgaaaaaaaacatcaaatatgaaatcattaatttctacaaataagcaacaaaaaaagaaacataaagaccatcatacaataaataaacataaaaacatataaataaaatggcattggatgaagaagaagtaaataaaatggcattggatagagaagaagtaaatctacacatgtgtggaaatggattgattgactatagggagaaaatggctagggttcctttccttgtaggtttttagatcttatcatgattattattactatttaaagcataaatgattgtctaaatttatacattgatatggactagtaagtgacaagtgtgagggtccaaataaatttaacctatattgagagaggttgataggtatttttggcaaagcataaggtaccatcacaaattatcttattcatatatatatgcattttcatgttatgctttcacaacttgttgtctaaattttgctaaggaatgtggcccatttcctataatcaccaaatgctatgtctctatttagtttaacaaccaatttatgatttagtactagtgacatattcatatttggcaactaaaatctaactccaaaatatctcaattttttatgaaggataataataatgttaacctaaaaataccatgtgttgaatgatttatttttaacataaataattaaatgatgatataaataaaaaaaaaaatatttaattaagaatttgaaatgtgcacattaatgatttggttgattcctatataaatataaatatatgcttgaacccacatctcaatcaaaactcaatcacaataattagccttaaaaagttgttattttgtcaatattattcttaggtaaataagaataattttattacaataaaaatatttatcaaatttatttcacatggactaaatgtaaaatattgagttattataagtgtataggttgttactccactcatcatgaccaaaaatcatttagaaatgaaactcgataattcttgttacttatacacctagaataataaataatttagggtgtactttttttataatttattaggaggaacataaatgaaaaataaaattgtaagaggaaactaagtttgaaaaatgattttgtaaaagattttttttttcgaaagaaaatatgttattaaatcaaagcaaatcagctgttacaagaggaccaataaatctaggacaagcatctgtccaca

SEQ ID NO: 22822 - DNA, 2165 bp, Cannabis sativa
tattaaaacagataaattttgttgttttgtaattttaaaggaaagttatcttataattcagtgttttaattattattcataaatcaccataaatttaaaagagaactttatgatactatttaaacaataaaatttgtatatatataattaatttaacattatatattttgaaattatttttttttagttttaattgagagaaaaaataagtatttaggagtgaatatactttttttttttttgaaaaggaaatttaatccttaaaaaaaaaagagagagagagagagaattacaaaagagtatgcatttagaaagtcactctttaattgaaatatttagaataataagtttgtttttttttttaataattcttttttagaagccagtcattctcatctcttacttggcaaggcattctttgggaaagagaattgctcattgagaggctaggctttaaaattaggaatggattccatgttaaaacttggttggataaatggattccagggcatactaacttcaaacccttctctttttcgagtcctgttacacttcatgcggccaccttattatagaccaaagagagtggaatctattgcttcttaatgcattttttcagcctataaatgtggaaaaaattattgctatcccactgagtttctttcaattaaagatcgattaatttggcaccatacaacaataggtatttacacggtgaaatttggtttccatttgactgaaacattgcaaatatcaatgagtcttcaccttctaataatcatatagattggtggaaaactttttaaggtttaaagctacttccaaaggttaaaatatttacttggagggtgttgtactaatagcagctgcactattaagaaggaaagtcatcgattttgcaacatgttccatgtgttcaaatgcttggaaattaattggccatgccttatttggttgttgaagagaaaagttagtttgaaaacaaactaagttcaccattgattatcaacaagcgcaaaatatgatgaatggggattacttgatccaattatcttccttgcattccaaagctgactttgaagaaataatatgcataatgtggaccatttggaaagaaagaaatagagttcttcatgggggagttcgaaataacggtgtctacacaactacctttgcaaaatcttttcttgaaaaatatcatcgagctaaagggtgtaacacgccacacaccgctgtaaaagactcggccagaaccagatacacaacaacaaggcaaaggaacttttcacaccagccacatgagaggattccatggaggccatcagacaatatggggttcaagatgaacatagatgcagctgttaactcagagtcaaatgtcttaggggtgggggcgattataagaaatcatcaaggacatgttgtagctgctttctctaatccaatacaaggatgcttcagatatgatgaaatggaggctaaatcacttttttataacctcaatttggcattgcaattacaactgccgataactcaagtcgatattgatgctctatgagtttcaactgctttaaactctacatctaaggaattatcaagtttttctaatttaatgttagatgttcattatgttttatcctttttctctggagttattatttctcatgttaagagaaatgataaccaagctgcacatggtttagcaaaatatgctctagagtttaatgagatgtttgttggatgggtgaaattctcgatcttattttctctgttgttgtaaacgaatcttaagttttaataacagcgaaattttttttaaaaaaaaatgtgttatgtgttaaaggtggtaaatgaatgataccttaaatttgcacttaaaagaaaaataatagttgagtggttttctaaaaagcattgttattcgacactactagtgcttagtaacttctatagatggtacccaacaattagttaataatattctctagaaactattttcttaagttatataggattcgatatttaattatttgagaagggtatttagacactttttagcaatttcttttcttttttattaggctaattaataatttttctactcgaactttgacatgtactaaattatgctctatgaacttttaaggtcgttaaaaattcttcct

SEQ ID NO: 22823 - DNA, 2063 bp, Cannabis sativa
  modified_base (890)..(911): a, c, t, g, unknown or other
taaaataaattgtgcctcccataaaaaataataatatatttttataaaattatcatacagtaaacttaggcatagtatacaacaaaattttaaaattcatctaagtaacttgcttaatatcaccacaaatcactaacagtgatgtctatattgttactcatctttccttagattattttgacttacataactttatatttacatttattaaaaacttatacaaacttttcactgctacaccgaaaaataacaataataaattactttattagttgtgggaactgaattgtcacaaatatatataggtcactaatggtcatgtttgattccttctccaaattctctgtaggtcaattttaaaccaaaccaaagaattgctattatttggtaattattcttttattacggacttttaacccaattattaatatccaaaaggtaaaatatactgaacaaaacttaataataaaatataaataaataaataaataattatattataaataaccaaaatgaaatagttatttattttattaattttcaaattttatttgatacaacagctaattcttcttcaacacaaatccaaaacttcaacctttctcttcagttaattttatttgcatttacatggtataactatagcaacaggacaacacacattttctttaagagttttacatctcaccagcagcaaatataaaggaacgcaactaaacagcaacggagataacgagaaagttagagaagacctacccttgctttctgcttgttcttctattcctcctcctcttcttcttcaagccaattcacaaatagcccgaacacctttaaaaaagtttggctgcaatgttattcaaccacatttcacattattattattattattnnnnnnnnnnnnnnnnnnnnnnttattattattactactattattattattattattattaaacaaccacaaaaaaaaaattaaacaatcacataaatcattcatcatacctacccttggggttggttcctttgcagaaccagtaaagaatggtatcctcagcaaaaatatcctaaacatagagagatcttataatttcagagaacagtttcataaacttaccattttataaacacttttgattctatccaaaaacgaaactacaatagatatataaatatacatatatgatacaagaataaaacattaataaagaattcagttagaggatttttctttttcaaagatgaaaggttttttttggaacctgaatgttgcaaaaagcgcttgatctgagagatcagagaggatacagcagctgaagaattgcctcttctcgtgaattttataaatgtagtactctattataaattttatgtgtaatacagtacatgcatgtatatatacaatacataagaaagtgacaaataactacactatttagaatagcacacataataagttctaccacctgtacctctcatgattattcctgataacgctaaaatccccacaattcatttattgtcaagggctataaaatacatttatatataagataaatttcttacttaatctataacaaaaaattcaacaataaacaaatatgattcatggttcggtgcatatagttacagagaaaaaaataccaaattaattacttaataggaatttataatttttactttttttttttttgcaaaaaccaatgtcaacatacctcgtcgcaatggtatgcatatctaagctctgcagctaattggtgaagataccggttaaaatcctcccaataatgaaggttaaaaaatcaacctaccaaaatagttccaaacattgcaactaatcaaaaagtaagacaaataaaaaaaaaataaaaaataataataatttgccaaaagttgcaataaaaaaaagtaagaaatcaccaaaagttatatcttctcattagtatgaataattccaaacattacaataattctaaatgacaccaccattcaatttataaagaatttaaatataaaagttaataacatacacaatattatagaaggaattattcatatcaacaacatag

SEQ ID NO: 22824 - DNA, 4047 bp, Cannabis sativa
cacttccagaccaataccaagtgttaactaatccaatagacatttggactagattgtgagcagttgtatttctcatcttactaatgtgtgttaggaaaatagttgggaaggaagttaacacttctttgagagcgtccacaagcgctccgtattcggtaaggttggtgtctatgatttaatgtcctgaacaagtcaggcagtcggtttccacatgatgaatcataatctagttgtctttacaccaatgcaatgaatgtaataacgtccagacctcaacactttttggatgcatcatgtccattttactttttgcgaaagcgacaataacttgtctagaggagtttcagaccaggttacctaaacctattttctcctttttgagggacaccgctccatcgacattaagtttttgctgctctgcttttggtggtatccatgcagtgtcctgagttgaggccttagctggggcatctttaaggtgctggtgttgagcatgttggtaaaactagaaaaaatctatagcttcctaataaatcttggagggctgttcctgcaagtttctaaaaaataaaggagttcttgctattccaaattttccatagtacacaaagaaacaattcaaactcatttttcattaactgtgatttaacactaagcaatgcatcaaaagtattgttttgctttcattgctttttatcagtgctttgaaagacgtacctgtccaaatcttcttgacacacttgcattcaaagagagcatgctaaatattttcaggagttgtgttgcaacgagggcacaaaggggagggattgctcttcctaagacgcaagtttttagcaggtggagagtattatgacaattttattttaagaggaatattgagattccaaaggagctttcaccaactaacattcgagtttgaatttgaaggtgttggcttagcctctcataaaattctctgtgctagatgataaccttaattgacaatgtaatttctaaactttgtaaacttccagaagagagaatcaggcttatggataatgggaggtgggagaaagaggatatcaaggacaatgtccttggtaagaaatgatttagtctggtaacattccagtctctcgagtcaagaaaaaggctagagactggaggttggctaggggactcaatcggggtaggaactggcagtttggaatgcagttatcttagtaaatcctcacagtgtcaccatttcctattctccagcggagccctttcttgaggaggtctttcccccactataagatgctccaaacataagagagtgcatggcccaatttagcctcaaggaaagtagaattgggaaagtatttggatttgaagagagtcgcaaggagggaagtagggcgtgtttgaatgcccaaaacttgtttggcaagcatatcttggttaaaaggacctagggattgaaagcctaaacctccattgaatttaaagttgcagagggaggtccaaattttccaatggatttttctttctccttctttggatccccaccaaaacttagccatttcccgctccacgaatttacagaaagagatgtgaagcttgaaaacaaacatggcataagagggaatagattggataacaactttcaggagtacctttagagaacaatttgccttttcatttgtccaaataagcccaaattctatccttcaaggggttaaaagagtgcttcttgcagcggccaaagaattgtctaagcctagatacttgtccagactattggtggctggaatgttcatatagtcttggatgggtgtttggtaggttaggctagtatatgagagaaaaaggcagtggacttgttaaaattcacaagctttctcaagatgcgttcgtaacatgagaggatttctttgatagcattgcaagcttgaatatttaattggcgaaagagaatgctatcatcaacaaaaagcaagtaagaaatcttaggggcagttctggaaatttcgatcccaacgacatttttcttagcctttgcctttctaagaagagaagagagaccttctgaacaaaggagaaaaaggtaaggggatatggaatcaccttaccgaattccacgggtgggggtgacgtgaccaaggtcctgaccgttaatgttaaatttgtataaagttgttgtaagacagttcataatcagggaattgaatgtggtaggttaaccgatttcagtgtaaccttatttagaaaaaaaaccaatttactttatcaaatgctttgatcatgtcaagtttgatttccatccaacaagtgcttcatattttccaccctttaatggcatgtaagagctcttgtgctatcataatgttgtcagatataagtcttcccttgagaaggcactttggtttggttaaattaaggggttaagaacatgcttcattctattagccaagattttagagaaaattttgtagatagtagtgtgaagcctaataaggcggtagtctttagggtagagggatttttcacctttggaataagagtgatgagtgttgtattaaaatgggtgatatcaactccatgattcagggaactgagcactgcattagtgacagagttgccaacaacattccaattttttaagtaaaattggttgttgaaaccatcaattccaggggctttgtcagcggacatttggaacagggcttgtttcacttcatcgggggaaaaaacttgctttaaaaactggtgctggccagggttaagctgggtagtaataccctgaattgtatcatcaatagcactgttgtgagaatttgagatgtgaagagattagtgtagtacctctcaattttggtgagaatgtcttcaacattatccactttggtgccatcaccaaggaaaagatggttaattttgttagtgtttttcctattcgaagcaaacctatggaagaatttggtgttttgttcccgacatggagctaattaactctagagcattgcttctaataggtttcttccttagaaacaagactatctaaatttgtctacaacttcctaatttttactcagagttgtcaagaaaatttctagcattctcgaggctcctctaggcaatggaaattttcttcgggaacccaaagaaacacttatgctttcagtttgaaaggtgatcagcacaagcttcctgtatggaagctgggctttggatgagagaactagagttagcactatgagtctaagccttaaggataacctcttcccagtttggttcagtcaactaaacattctcgaagagtaatctcctgtcccctttaaccttaccaacatttggggaagaactatcaagtttcatgttaatggctctatggtcagagccaaagaaatcgagatttgagggaagcattaggataggaatacaaccagggtttgttagctaaggttcggtctaatctttcatgtacattcctgtagcatggttattgttccaggtcatcctaggcccttgaaaattaagagcttcaacatggaatttgtcaataagtccctaaagaattccaaagggccatttctagtattgccattgtttttattatcccaagtcaaaaaactattaaaatcacccataagaagccacgacaaagaaatacaagatcgacttattctattaagaaatttccaagtgttataacgatagtgggactaggagccccataaaagtcattaaaattaaaaccaaaaaaattgataccagagacataacaatgaacatgattaatagagtaattagtaataagtacatccacattcgagggacctcaaaaccatggacaaaacccaacttcaacctaagactatcaaaataacccttagataatctagactccattcttaaaagaagagaaggcttatacatcttgactagagggagaggtttaggaatgctcgatcactcccaagccttgagcattccagcttaagacatttgtttctgtatgcaggcctgttcctccacagaacctgcgtcttcactggaagccacttccactatgtcttgctg

SEQ ID NO: 22825 - DNA, 4126 bp, Cannabis sativa
tggctttgatcttggaataggtaattatatattattaattctttctacgtattactctcaaatgttgtgtttcattaaattagttatattaatcaacctgtttcatgctcttttcttattaattacaacaaatataaaatatagagattctttcacaaatacacaaaaatgttataaaaatatatttgtatgaaattttaaatatttttacggttttatttacagaaaatacggtctttaatgtatttttatattgtacttttattatttgtatgtttttttaatattattttgatgttattttaaacgttatgttattatattatttttatgtaatttttttattatttttcgtataatttttataaaataccgtaaaaatataaaaaaatatttttaagtataaaatagtgatatttgtaattacccctaaagtaaaatatatgcatttattaaaacaatttgcaactcttcaataaaagataagtataaaatatccctaacctgattgatatattgttataaacttgtataattgtaagttaatatgaaatgcaaatatacttcacaattatattaattatatatattaggtttcatcctataatctgagttgaacctttaattatagggacaaatactcattataaaaagtttgtgactaaaaataatatagttgttactaattataaattattatttttataataaaaaagtttatgactaaagtattggtgacaaaaattataatttattgtgactaaatgtgtttttaatcataatatttattgtgattaaaattaaattatagtgacatcttgtatctaaatactatgttttaatcacgaataactttttattgttactaaaagtcacatttagttaaaaaaaaattacgttattactaaaaaattattaataaaagttaattgttttttaataaattttcagtactacaccgaaatatataatttaatctgtaataatatctctaatgatatctttctttactttattttttgttttttggtattaactatacattataccatggatcaaagataaaattaaactcccaaaacaaatagaaaatacaaaaatattgactattgacttggggaaggatctggggaggagtatcaaactatatatataaaaataatattgaaaatttggagatgcttatatacaatatacgttcacacacatacctaaacattattatatatataaatatatatacatcattatcaaatcctgcacttggcattatttatttaatgtgtttttaaaacttgtgctgttgtgcattgacttagttataattaattgaagtactaatttgaatggtctttttataaatttgtgggtacttaatttaattagaaattatcttatatatcatttttttaattatattttggttaatttttgtataactaataattaattaggttgggaagccaatttggaaagacaacaacgtggagtgactgctgctccaatgatggtaccacccatgacaagataataattaagatgaaaatattactattcaattcgattgaacaagattttcagtgtgcaataaatatatatttgtagggtaattttatgcactatatatcatgttttctgtaagtagataatattaatattcatggtatttttatatattgtagttgtttaaaatattttacaattttataaaatattttaaataatttattgtatcaaaaataagattacaaataatcttgttttgtattggtgtacaactaacaagattgtttgaatatttttttgatataataaattattcaaaattattatataataatttgtaaaatattctaaataactacactatatacttattacaaaagaaattcaaaattataattatctacctactaaaaacaagtgataggtgcatggtacatctttattttgggtgcactgttaaagttttctataattatatatttatgatgttggtcctagagtggttatttttttgtacaaatttactaagcattatatttttttaagcaatgaacatattcaatttacttattgttactgaaaatgttttttgtcccaattgaattcctataaggtgaactgacgcttttatatttagaaatgttaaaaagtactattatgtctgacattctttaatatgtcttattgttattagtataataaagtatcgaatcctaaaagtaatacttcttacataaaatattactaaccaatagcaaaacactacttctaagcggtgttagaaattactgatgtctcttttaaaattaattgttgggattaattgatttatattgacagtggtaattcgatacattatgatgggaaaatgtattaagaacaactaaaaaagtgaagaattgaagaatataaatcactactacaactatagagaaaaaatttatatatttatttgtcttaaaagtgtgttacaacaatttgccaacttctgtatctacgattatatgggtaactcattaaaatatattgaagatggggtttaaaattacatttggacgtcttagggaaccgttatagacctacaatgcattaaaaatgttttaggaaaattgtcctatttgggcactcaattacatgaacactcaagagattctctaggaggagctcacatggaggggacaactctcagccaaaaggctctctttttctctgtgttatttttgttgttgttctctactgtttctatctatttactccttgttgtatctcttgctttgtatctgagaaaaatacttccttttatactgatctgtgattctgagatatttgtaactgtttcagttgtaactgattttatgttctttagtcttgatctttgttgtatttgatgtaagggtatatttgtcaaaccctgtgagtggtgttattcaactttaggataaataagtgaatctgtaacaacaaaaatgatatttgacgtgtacatgttttgtttgtgaatgaaatgtcggattatttgctaagtgcaaagcgctgtgactgtcataaaagagaacaaattttttttgagccatcgtgatgtctctgctgctactacttgtcctttttgtttgttgggtatcattacatgtcttttggggttgtaataagctttcttctttacgagaggtcattatcccccattttcatgtacctatattctcttgttgggatatctatgaattcatttatgcttgaagttcatagtctgtctttagagatttggtattgacagagtaaatgggtgaatgatgatctttttgtttgactggaatataaattatcttcaacgttactcttctgccaatagttgtaatcctcgtcttggtaatctttatgagaaacagccgattgtcaatggtctaaatcacttgctggggtggtgaaaatcaattatgatgcagggttgaatcctgagacgttgggtaaatctagggctagagcggtattttgtaatgatatactggcttcgtcttagtttttaatagttggaattggaatgattgtttaacgttgctgacgctttgggtatttactctggggtcttgcttgcttgtcttggctttcagagagtggtgttggagtcttactaccttactgttatcaatgccattagttattgtaaggttgatctgtcttacttaggttgcgttatcagagatattcttacttattgtaatcattttattgatattttttttatgtgctcttaggattgctaatagcatggtccacactttagcaaagttagcactgtttttgaatgatcattgtatttctattgctctgtagatagactcttatgattaatgatattgtctgacactctttttcttcttgaggtttcttccattaagtttactcttaaggttttagtgaggctgttttttttcaaaaaacaaggaaaaaaaggaagatcaatggtgctaaacattcttacatgtgttcaaaactcaattttaaatttgtacaaataaaaaataatttttgcagttatggtattgtgacagctagtagtcccgtgatccgtgaggggaaataccgggtaagttgtgcaatcccacatcgcctggggaaggtc

SEQ ID NO: 22826 - DNA, 3958 bp, Cannabis sativa
tgagggcaaccgcctttgcggcagtagctgcctcgtaatttttcttataacgagaatagcccttagccaagctttccctctccctatcagtctgcggggcaaatttcatagcatgggcgcacctcaaagtcgtctgatactcgttttaaagaaaatatatatacatataatataaataaaacaatagtaagtgaaatagtaacaaaaataaagtaaaataaaatacaagtaggagatggattacctttatccctgagatagcagtgtccttcagaatggagtcacgcccttgggagatataaaaatcatcatcaagttttctgacggcatccagaagagacttgaagtaattctcaaccaactcctcaaacgggacatctttcttaatcctaaaagcagggatctcatcccattcagtcttggcccgcgggggatggctggacaagggcggggagcctcgatctggagaaaaggttgaggggtgcgccaaaataggagaaatggcgagatgggaagacgacgacgctccaagaagagaagaagaagtccgagcaggagaggtagacgaaggacccagattttggcctaccgtggcagtcgagagattctcgggctgagaaagtccctccagattgggaggccccgtcgaggccaaccctgcggagttacacttgccctcaccaacgcctgatgaaatctcgaggagggcgttaagcagggtaccaatggcatcgtcagtggccgaatcatgctgagatgacatgccaaagtccgactgagtagcttcctcaagcctcgctgcgctgctcttcttctttttgcttttgcgcttaagggacttcgacataagcctcttctgtcgggcagcgttttaggcctcgatctcctcaacggtcatttcagatagcctcattttgggaagatgatggggataggtctctgcaaggcaggaatgatcctaagaaaactctattaaaatcagctcgggtgtttgatttaagtgtttcagagcgcattttaagaaattaggccaaataaagtaagaaggataaggagtggggatacctagggggatcctgagttcgcaaggccaggcggaggattcgattaaggcttcacgagaaacaaggaacttgattgattgaagcttggggtctagggctgtgactttgcggaccttctcagaaaaaatatccccgataacggtatcctcgttgttggtggtagctgcacaaaagtacccccgttaaaatcaacatcaatacattcaaaaaaaaaagaaaaaacaacaacaagagaatatatatataataaaaataataatacacctgaataattgaaaatagaaaagagaagacagtcgagtagaagggcgccctaacaatagaggtaagagaattaccaggagccccccagctccggataataaacggggccgtagggtcgtcggaaaaaaattcaatggggcctctggcaaaaaagaactttcccttccatcctttatgagaggtctctaggtcagtgatgagagcccgattcttcctggggcaaagatgataacgcccggggttctttctccatcaaagaatagaaatggatggcgtcagatacctcccactgaacacccgccttatcccctaaaacaatcagacctaaaaggatagcccacacgctaggaagtaactgggcaggagcaattgagtattgtagaaggaattccttgattaatttagggatgggtagcctcagtctgattttcgattcgaaccaataagaatgtagacacacccactcatcctgagaggaatctaccctctcatgcggtttgggaagtctaatttcgacccccgacggaaaaccgcaggacgaaactagggaattgagcttatgctgagtcagaaccgccggacaacttgacttaacgtccaaataggaactccccagggcctttttttcctcttaaatttcttcaacgggggaaccgccagagtaaccccctcggaagggacggcttgaccactaacacccgcttcgcccccggagcaagagcggggaatgttggagatactacctaaacactccaccgctaggtcatcagggacatcggcattctcggcctccatgggaggagtgttagaaataagcagggactcaacaaacccaagagcaatacttgaagaaagagagtcagaaaccgaaggagagacgcctggacaatccacattcgccattatactacgaacaaagtaatatttgggacccagaatctacgcaaggaaagagggctgatcctaaaaacaacctccccctctacctaatcataacaagggaagtgtgagaccgcaacctcggaaagggtgtagtagggggaatgccaaagttaaagcaggtggcaaaggaaaggtggacctagaaatagggattataccccaattatcatgaaaccctaagtatcggaacgctaacccaaaggaaagaagaagaagaagagggaaaagaaaagaagatcctagagaaaaatatgagggagggaaaatagtgggaaggacgaaaatacaaaaaataaatataacatatatagagagggtatatataaaaaaagagagagattaaaaaaaagaggatggaaagaaatataattaagttaaaggagcagagcatatatacatgaaggcaatgagatctagcacagagaagttaaaatgaccagcagagagaaaagcatgtaatggattttcgaaattgagggtcttatactcgagagtgcgccgctaaaacacaaagggaagatagaggattagtagggcatttataagaaggagcaattctcgaggaaccaccatcacatcgagaaaaaccgccacttcctatcaaactgaaaaattcaaaagcaaaaaatatgtatataataatagttataaaactagtaatgatgaacgaaaactgacataaaaactgctataagaagtgacaagtacaaaaaatatatatatatatatagacacacaaggtaaataaaataaaactatacacatagatttccctgtcttaaaaagaaaaagagagggagtagttatgaaaaacagttctaggttataaaattgtaactggaactggggggagtagtgtttgggaggtaaaaatcaagcacggaagcaaaaggcccaatagactaaaatgaaaatgtcaaaaggcccacataggttgaatgcataaaatctcaagatcagaaagaacatcagggaaggccgaacacggtgtggcccaaatattgagcctcaagagaacaatacggacaaaaacgaaaaggaagcgctaaacgacaaagaaaataagtttgcactgacagaagttgaaggaagaaaggaatagaataattggctgacggaacaaaaattcgattgtcggaggtattacaaatgagaatccaatgacgatccccagataacctgctgacgagggaggtatctaaaatacaacaaaaacgaggaacagcaggatagtaccgtgattagggcaaacacccccgacgaaaggaaactcagatcatttcaaataggagttccgacgggagaagaagattctcggtacaaagggaaaaatcaatatttccaaggatatggtgccgtcagatcgaaggaaagcagtagcattaaagctacccgttgaaacacggatacgtagcatggaaaaaagaatagagaaggaaaacacggatacgattgatcatccatgcaatcaaaaggatgtaccatataaatagagaaggatcaagtaaagaaaaagggattaggaactggaaaaagagagaatccacaacagaacaaatagtgactgtttttgaccaaaataatggtttgcacaaaaattagcaaaggattggctgtcgaactgcttgccattgtctgaaactatcttctacggtagtccgaactagcatattatgttcttcacaata

SEQ ID NO: 22827 - DNA, 5200 bp, Cannabis sativa
  modified_base (53)..(55): a, c, t, g, unknown or other
  modified_base (4940)..(4943): a, c, t, g, unknown or other
cttatttataactggcccaaattaggacttcattttttttataacaaattagnnnttattcttgaatagagtattcttgaatagaggttctactgtaatttgtaacttaattataactagaaatgatagatgtgaatgtgtatctataagaaactatttgtcagtagtattttttttttttttgtcactgatcgataattaattatacattaatagtattatatggagaaacagttgttcgacctctgtaaaccaactttatatcaactaatttagtatattaataaatctaatcatgttataaaagtttttctaaagagctttgtattgcattgacgatctgaaacacttgtaaatatgataaaatttattgtatcgttatcagtttgtaataattgataatgtcaagtttcagtgcgttagcaaaacagttttgcaactgtgatggaactttttagaaacataaaaaaccaaaacagtatttccacgtacgtgactctatctacatgtgaattcactattctattcgtgatttaatatgaacaaattaaccattagagatttgaaaaataacgaaaatgcaataggataaacttttagttatagtattaatgtatttttttttcttttttggatatacgtgatttggattgattgggagctccaaatctatttgttagagatttatattttatgaatctgaaaattgatattaggaggactagttttctgcgaattaaatcagaattgagggttgaattttagtttcgaaccagtttttctgtactttttttcatcaatatgaaacaacatgtgtttggattgattccagtcttcttctcaggtgaagtcgctggaattaatggtggttctccacctagttggttttcgtttcggttggcttgctgggttgatcaatcgaagcttcccgttgttgaggattttgcttcatgcggctaaaggcttagaagaagaggtattgttgtaatatttagttgttggattatataaatgtttataggaccaactcaatgtattttggtaatattttatcttttttgtatatacctgaaaaaccccccaaatttatttatacatatttaaactctattaattagtaatctttcctacttttcatcaaaaataatcatactataatttttaaaacaatgtggcatgaaataaaccgtttttaaaagaggatcaaataagagaacctaggagctgcttggtaacatttgaataataacctttatttatttaactgaaaatttggcaagtacgaacaactttgggatttttttatatatactagtaaaaaattacgtgcgaggcacgtatactaaattttatgttagattttttctacattatttaaaagtagtacgattaaaaattaaaaaaaaaaatgttattagttattaggtaagattattattatgtatatctaaataatataatttataatttttgacaattaaaatgtgtgtaagataaaaaaaaattaaaaatcaatctctaaattgttgataattaaagataacatttgtctaaaaattgtagataagaaaactaatgatactcatgggtggaggttaatcttcatttgcttccacaaagacaatagtgtaatttttgtattttgcactttttattctagccgggtccacatataattgaattgtctattttttcgttgataaattaaatttggtagtgttaacaaagcggcggtaaatagtgatgtattttcattaaagatgattggacatggtgtgcataatttatttaattaaaaaaatctacttatgaaaggcaagtaaaattattttatttatttaaaactacacctctgcactctgcagtataatctattagttgggcagcagtacaaaaaatattttttccacaatatctgcaaacatgacagcgaataggctctttgtattgtcatctagttcaacatatgctataactattcttaattattagaaaaaatcagtaaaactgcgttcattaatttaataaaaagaaaaaaagaaagaaactgaacattataaaaataaaatctaatctatatacagtatagagaaagagaaagcatagaaggaaaattcttatcaggaccaacaaaattgcaattcaaatatcttattttacttttcaaaactgtttaaaccattctttaacacttcatcaaaatttgttattgttaagtaatcctattcaacaacttattatgtcaaagctcagaggaaggcatactatttattctaattaaaaataccaatatatagtgagagaactttgtatctcaatatttatctttaatctataaatacaaaatcatgtccaagagtagagaaccatgtataaaatttatttgaatttccgataatcacattatgtgtacatctcaggcgagaaaaaaatacagactcgcctcattacatgaactgaccaataaagctacaagaaacaaagaagaaacctctaaataggatagcattatagaaaaccatcaacaaaacaaacgttcagtaattttattttagagcttgatcaacacacattttgtaaatatatgatttgtataatagtacttgtcatgtcaatacatgtgagtgaattcatattccttacttttttgtttatggtagcctagaggaagactatgaaaatcatgggggaagaatattttcacatcaaaatccaaaaggccccataactgaagcatcttcagaatttctgaatatgtaaggggcctgaacgatgccaaaacctgttcaaacaaaaggattaaatattcaaaataatgatgtgtaacaatatgtagttcctcttgaaataaataagaaagacaccatataaaagcatgtgcgggtcagagatccaaacatagtgaagatacagagattgcggctctaactgaaaccttgtattgcttcttcggaaacccagaaatcaaaaaccaatgtttatgaagaaaaaaagaaaaacacaaatcctgagaatgaaaaatatgataaatataaaaaaacatagcaaaaagagagaaatgatatgagagtgaaacatcttgactgaacattaaaaaatgtaccatttaccttatagtttttcatttttcattttttcccgtaaaaaatatcatctgactttcattgattcaaatcattgaatcacatagataatttaaaaaaggaggacttcctccaaccaaataagtcattactatttttagcaaaaactaagtcattactattcctaaggaaatactttgccataagcctttggaaaagaacataacaccctatcatgtaatgtattatatcaaaacctgtgaaacgggaaaagcatcaatctcattgacaaatatttccccatagcctataatgagcaacagattttcatgttgagtactctaacaggttgcaatattcattacgaaaggttaaaaaatgttgtaaagaaaacatgaaaaaatgaagaaaccagtgttaccttcaatatcttcttgtcatataaatatatttccaaactgtctaaaaaaattctcgggcgatgatcttgatgctaaattgtatgagatcagtaacgcattaaaagatcattcaacctatcacgaaaggcatcaacaagaagaggaactcaggaatgagacatgagggagttgtcatctacagctatatatgaagttatttttcccaaatcaacatgtatactgatgttaatgctggtttctctctctatattagaaagcttctcaatatgtcaacaaaattcttccctagcttccagctcaatccaattttcaatcaaaacctttctagatttcaaaactaaacttgaaaaaataaaggaaaatttctcactaaaggtagttttttttatcttactcaggcattttgtaataattctatatccttcccaactacattaaactcaatatcaaaaccaatgttgcgtaaaatttccaataagtacaaacctttcataaaattaatgcatccctaaatctcacaatttgaattttaacaaaagatgcaaaaatgcagctctttcaacaaaagaaattcaattagtgaaatcacaaagacacaatcagaccaaagaactgaaattagtgttcccacaatcaataaacaaaattaaatcttaaaactacccattgacataatctctaacaatgcatccatattccaaaaataaaagacaatctttatcaagaaaaaacttgtaattaggtgccttaaagccatctctgttcagagactcaaacactcgaatataacgattgaaaatcaaattgttcacttgaaatcgagatttagggaacgattgaaagtcaaatcgaattgggcttcttcttcttctccgaacacattcagtcggtgatgagatttcgaatataacaattgaaaaatcaaatcgttcatttgaaatggagatttagggaacgattgaaaatcaaatcgaattgggcttcttcttcttctccgaacacattcagtcggtagtgagattttgaatataacgattgaaaatcaaattgaaatcgagatttagggcatagcttcttaaaccgtggcctgaataatatgacaagctgtaagcatccgattaaattatcacagtaaatttaagttgtttacaaaattattgaaattgagattttgatctgttattcttaaatttactcatcttaaggatggaggtgatctgttattgtatatattttggttcgtggatatttatctgaacacatttgatttgattttgaacagctgggaaaaataatttcagttgatttggaaaaagaatttataggtaaaaataaattgggaatttaaactgttatttttgaatagaaaatttaaaaaaaaaaattaataataattcattttatttttaatattataaataaaaagtcacccatnnnnttctcataaaccaagaattatgttatataggcacactttatatagaatagatatacgaataaagtgaatgttttacaattataccttataatatttaaatggctaattatgacgttacacgtcagccaaataatgccggatgaggaaattaatacacggaattcaattgctagtccattagaatgcatagcatcaggcgtcactatcaccaaaatgaaaaagcaaacatttagttgcttacaatatttaaaagaaaa

SEQ ID NO: 22828 - DNA, 1249 bp, Cannabis sativa
ttcctattgcagcgagagtttctgcctttacaaagtttggatgctacttctgtgagtgtgagttagaagatagcctccatttgtttaaggagtgtgcctttgctaaagcaatctggtttgctgtcctgttccttgtggcagtggttttgatgcactataatagcatgcttgattttgtggaagctctcctttcttctctttcaggggatttaagaaaggaggttattatctacattgggtgtgttatccaggcaatatggaagtggaggaatatggttcggataaaggggtgcaatgttgatgtcaagtctgttatcactgaggctgctactgcattcttggaattctcagattgcagggtagaagatctaagtcaagccattcctgaggattcagatgatcaggcagtgcaaagcgagtctgctaaccatattatgttcacagatgcttcttggaaggagggtgttggtggttacgctgtagttgcaattaactgtgtagaaaactcctagtgtttcaagctagatgttggtgctgcttcgtgccctttggaggcagagactcaagccctcctcttagctctagaattttcagttcagaattcttggactagaattcattttctgtcagattatagggtcctagtgaaggctttggagcagcattctcctcctcttgattggagatttttaaatgtttcattatctgttttagatttgatgaatgtaatttcggattttaggttctgttttgttcacagagattctaactctgttgcggatggcttggccaaaagagctagattgtctagccaggagtcaggtgtttttcaaggggaggaaatcccccctgtgattcccagctacttctctttggtttaatgaatttgtttctttcccaaacaaaaatatatatataactacttatattataaattataatatctttgcatgcacttgactgcaacaacaccatatatagaggcatacatattatatatatagccatgatattaagcttcaccatttatagtttcttttttctcttacaaaaaaaaaaaagttatcttttgttattcatttactaactttaatataatatataaatctatctatacatacattttaaaaatgggtaatcaaataattaagctactgatctaaatactcagtgataagtttaatgggtaaaactttggtctaattcataagatatatatgaataaaattagaatatattttgtaacttt

SEQ ID NO: 22829 - DNA, 1820 bp, Cannabis sativa
tgttaaatgacaaattcgatcctgtatttttcagaatttatagtactctaaggtcattttttcgtcatttttttctttaatataacaaacttgaaaacaatttctagtacgaacaaatgcaaaaaatgtaatcagtctagtcataacacctctctatagggatatgattaagttttattttgataataaatcagctgaaggttcaatttgtcatttaataaaagagaaggtcggattgataatttttgcaaaacacaacgttcaaatagtgtttacccctttattgtaatggtaaggtcacaaaattattctgttcagctaacctttttcgagcttcaactaatgcagggattgctatcagctacagttttatccatcattcccatgattcttccatttcagtggcagagtttgattcttcctgtaagtcaaaataactctttgaagccaaattattcaagtgcctatacttttgtactgtcacaaactaattaaacaccgaaattactctccaagatgatcctttttcgaaccttttcaggtcttaccgggaagaatggctgaatttctcgatgcaccagtcccctttattgtgagtttttaccttgtaacttttcgtgttacatataaatgatctgcatattcacttctaaacagtcaaggaattagctgctctttataatcattttcaggttggattgctaaacaaacccaatgagttgaaaatgaaaacatctagtcttgttcatgtcgatgtattaaaggatcaggtttgtttaaatctgctttagcctcttttcaataagaatttcaaaaaatgcatttcttttagtattacctacacatttgcttaaacaggtcaaaacttgtagcttgccaacactgccaagacagaaagagctcgccaatgctctagcgccatttcatgctaaattgtcacgagaaacttcaatggctaagaagcatcctgtacataagtgctgcgaaacacaggtttttatttctcgtttgcctgactttactcgcaagttactaacgagtgagttaagggtcgcttttttttactaattgtttattcctttggtttgatttgcaggcttatgctgctgacaagtttctaaaagtaacaaggggctacttggaatcactctgttcagatctaaggttgcatacaatcacaagtgtgcaatcaaacaatgatagggtagaaaaaattgttaaactcataatctcatttgagtgtcattaagctaattcacatactaattacatttaaatttctgcttgattttcaggtttctttacttctcaaggacagctttatcgattccttttctagtcgcgaccagccatttatcaaggtacttactttttcttcttttctttcttcaacttcctatgttatatagtgagaaaacaatgcatatatgagagtttctaatctttttttttgtatatgtttttacagcattttgtggacactcaaatgttctctgttctatcagattctcgtttattaagatttgagaatggtcaattgtaacttagtgattatagtttagttcatatgattggatttgcttatgaatgtagcataaaagatttgactagatattgcaatggagaaaaaaccttgcttcaaatgttgtaacatattaagttcttgcaaattccaacacccttttctgattagagcccaaattatcataatcccaatcttttaggggagatatgatgtgaaatttaggcctataaattcatctcaatttgaaaatttgtaaatgtcaacaattaaattcgagtgtaagtttattttttat

SEQ ID NO: 22830 - DNA, 1745 bp, Cannabis sativa
tgttgataacaatatgctcatccaagccatctcgtggaagacatctctgaaatacataaatattgtcattaatgatatgaagttataacataacaatcattttagcatggccagatggcttggttgaaaaacaatcttgccaacaaactgcaattaagtattatagtatacgatcaacatgcaaaacaaagaccatctaataatgcaagagccctcaccgctttcactgatgaaataacaaattccctcccaggaggactcaaaacatttgatggcaatcttatcgtataaaaatcatcttcttgcaagagcttctgaaaagattagtatgagtatggttaaaacttcttaattaagaaaaaccccaagaaagaaagttcataagaaatttaaatcaccgaaaacttttccttctcctctgcaaaaaatgcattcctcgaaaatcgcagctttgttaaagtctgttacaataaagtcaaaaatttaacccgacagtcagccaataggcattcacctcaacgtttttcacttagtaacaagagaaactcagaaacatggaatggagagtggatttgaaataaatgctgaaaaataaatagtatatcgtgcaaaacgcttacaaccttgtgggaacaaacaacaatttgatgcccacaaaagctggagcactatagatacaagtaatgttagaaaagaaccattcattttgagtatgaatccttaacaaggattctgctattgtttctactgtaaattggcaaatggatcagatataaacagaagcatccaccattattcatctacaaattctcctgtcgagcaaattgtttaacgtttaactctcttttgaatattaccaaataagcaaaactaaaattcaaatcaaaatcaaaattttgaactcgttcattagtttaacaatatacccatttcaatcataccgaaattcaatcagaaacataaaatttaaaccaaatacctcttactggtaacttattttgcgtgaattttctcatcaaaacaacttgaaatgaaaagagcaaacacacctgaccaccatgattccaagtcttcaatcgagccgtgaaggtaccagcgggagagaaatcagaatccccaaatgcgtgttcgagctggaattggatcttcgaatcggattctggatccgcaaacctcttccgggtcgatgagggaggtgtgggtggcgtacgaacgggatcaggagtctttgagtaaagccctccttcgaggccaaactcatcgtcgtcgacgagaagctcatcggattggaaagccgaagatgaaaaagcaaagagagcaataaggaagaaaaccaatggcatgaggagagagagacccatattgctctctgttactacttttcctgagacactgagttcggagagagcaagagagtgaaagtttaggactttggaggagttgaccatgggctgttcaacatgggcccacggccctagacccggcccaattaactgttagccgaaaaaggcttattagggagaagttaaaaaatatctaaactttttttacaccttaaatatctaaataaaatttaatttaaatatacttatatttttgagatgtatgtataagaagtttgggcaaaatttttaataaaaatgaataaagactatcgtaaacttagtagaataattaaaaaaaaagtaaatattgttataaatattattaattatgtggatgtccaaatcttttatttattacca

SEQ ID NO: 22831 - DNA, 3061 bp, Cannabis sativa
attaatttctattttctccaattttaatatttttcataaatttattattattattatagttattaaaaatatatatatacgtgtctatgacaataatatgttctatttcctatttattaaacttagtaatagatatcaattaaattctctctaaaaaaagtgagatatcaattgaaaaaaaaataattattaaaaaaatttaaaatataataattaatttaaacgctaaaaaagctaacaattgtatctctcataattttttcaatatatattttgtataaaaaatactaaccctaaactaaacataacccttgttgtcggaggaattcggacaataccaaatataaaataaacagttgatatttaactaaaaaaacaacgagtatttaaacaagactgtccagataatagaaaagtaataaaaacaatgaacacaagaaagtatcgtggttcaatcagattacgttctgcttaagtccactgttgcaagtgattttttctgtcttgtcttattcatgtcggatcacccctttatatacaaagcaagtgtcattttagttacacaaaacttaatcggttatagaactattttatattaaatattaacattaaattgaaataaacataaaataataaataaagaacagtttaaatctgtttcactaaatacaacaacgtatgtgacttccataacgcaagttgcatgttcatcttctcgcacaagcttgcaggcttagggtgcattttatcattctaaaggaggctaacgaatcttgtactaaggtatctgcgccttggtcgagtcgcgtatgtagacaccttatcagcgttgataacataggacatgcgagtccttgtcgagtcatcgagtatgctgggttattggaataaatttgttatgtaaagaaatgatctttactaagtcgaagaagaagactacttagtcatcgcatatatctcgatatatgcgcaacttgtaaaatcccttcttggtcctgcttattttatattacgcgaggtataatcatacgactagactctatcatggtcacatcatctcgcaagttagattcaggtgaggctaacttctcgaggagtcccttcttgatagctcagcaatcctcaacggatgtgaatccacgtgtcattcttatgggagcttagtctagagtttctagcctcgctatttgaggcatggaattcaaatcttaaggtagcgtgcactttaaattttttaggacttatcaatataattccaccatctgaaccttcactattagatgccccatcaacatacaaggtccatccttctcctgatggtacctcaaaatcgactcgctcttctgtgatgatagccacttcttcatttggaaatttgagaataaaatcagcaggggcttggcctttgattgttgatcgtggtttgtaccttatgtcaaattgacttaattcaattgaccatttgagcaaccgccctggcgcttagggtttggccaatacttgtcgtaagggataatttgttagtactttaatgctgtgtgctcgaaaatatggtcgtaactttcgagaagcaaccactagtgaaaatgccagtcgttccatttgtggatagcgagtttcggcatccattaagcgctttcttacatagtacatcaggtgttttctaccttggtcttcgtagattaacaccgagctaattgcgtattcggacactgccaggtaaattgatagtacctctctaggcatcgacttggatagtatcgagggttgccccaagtgcattttcaatgcctgaaaagcttcatcacatttgtcagtccaataaaactttttgttaccttttagtatcttaaaaaattctttacatttatcagaggagcgagacacaaaacggtttaatgatgtgactttacctatcaggctttaaacctctttaggtttgatgagagataacatctctaccaatgcttttattttcactgggtttgccttgattcaccgttggtttaccatgaaaccaaggaattatcctggccccactccagaaagcacttattaagtcgcattttgtagtgttgtaggattctaaacttggaatctaggtgagcgacatggtcctttgcatgttgagattttacgagcatatcgtcaacatacacttccattgtcttccctagtaaatcttcaaacaccatgttaaccaatatttggtaccttgctcctgcattttattaacccaaaaggcattactttataataatacaaacctcgatcagtgatgaaggaggtgtgctcctggtctggctcatacattgggatttgaatatatcccgagtatgcatccatgaagctaaggagttcatgacctacaatggcatcaacaagttggtcaatgcttggtaaaggaaagttgtctttgagacaagctttatttaaatttgtaaagtcgaagcatgtgcgccatgagccattgggctttggtaaagagcatggttagcaaactagtttcgatataatgactcccttatgaatttgcatgccaacaaatgatctccttcctctttaagcgcttggtacctcgcggggtccattttacggcgcttttatcgtactcctcgcacttcggaatcaatgttcaataggtgacacatgacctctagcagaattttgaccatgtctgaatgtttccatgtgagaacatccgaattctatttgagaaaagtgacaagcttttcccgctggtgaaaaattagtttggaaccaatttttagcactttagtattatcaaaggaatcaatacgtacctcgattgtctattatgcggcttgcgtagtgttggtgtagtcgaggatcctaggatccaaattggtttttcaacatgcagtatttcctcgattctaaaattcatgttgaggaggaggagcctcgagcaaatagatgacattgatcgatttcttcatttttgcgatcttgaacatgtattatagcattctctcgagttttcctggactcctcgcactgaccttacacccgcagagtggggaatttcattgtgagataa

SEQ ID NO: 22832 - DNA, 1839 bp, Cannabis sativa
gtcctttgtcttttcacttctgtgcccgatagataaagctaatactatgctagaaatagagatcaaattccgaatctcttatgaacaaataaacatgttatgtaattggactaaataattaccacatttttttttccaacatgaatgaaaaagcctgcaacagatcgaggtcttacaaatgcacgaactctgttaactaagtgatcaaacagctgtttttcatggaacctagccaaggtacagcaaagaaataagttttagtaattactattttgatcatcaccaagactttgtcaaacataaactaatcattgttgtcttcttcatggtagcccttgaacactcaacttttctccactatggtaatttctaaagttgtttcattagcattaaatgtcttgtcttctttttaaaatggaccccccaaaaaaatgtacatatgtctacagtgtgattgaacaagccttaatgagcatgaactttttgaacttttattaatttctataagcttgacatttaactgtccttatgtttgttctgggttctatataccattcaactaaaagaagaagaaacgaaagaaaagagaaaagtgcatatatgacaacggatgtgggcacacacaatagtgtttatggcattaatggtgggaatttttctgggttctttttttgtttcacaactacttatagggaagtgggcaccaaaagcaactaatgctttgtctactaaaagagaaaaagaaaccattgagaaccatatattttaagcaatgtttttatcaatacagagaacttcactttcttgctgaagtggatttagagatgataaaattcatctcttgttttgccttgaagaagtggatgagattgtatagctagatattttcttggtgttaaatccaatctgtccctagcttaaaatgacataagatggtaaaacgcaaccaactctctttattgcctaactacttcaagtattccaaaaggtttcaatgatagtgagcccacaagccatatgggctgcactttttgccatcttcatataactttgtgatgactataaatttgtagattattatgctcatactacttcaatctcaataataacatttgtagaagcttttgaaaagagcaaaaaaaaaaaaattaaagaaaaaaatgtatagcaaattagtcctccctggatttattaaggcaaccataggaataagaaaaagtgtgacaagagaaccacttgttcatgagtccagtaagagtagcaaccggtgtgtccttttcccagccagtactagtgtcagcttggtagccaaaacccaagttcaagagtccagaaaaagtgtaagaaaagatggcaatcctattcaaaagttccggaagagtaacccgcggcgtgtgagtttctcagccaacactagtaatgtcagcatggtggccaaaagtttggaaagaaaagaccatgattggtacatgttcttcttctcatgtatacttgtctcatatttgtacttgaaggcttgtattgcttgcttgtaatgatgtttttgtaatattaatgatcaagtttattatatggtgtaggtttgttcagtccacaattccaagtgatttgatcatccaagttggtgattcaagctttcatttgcacaaggtgggctcataaactattcacactttaattttattaaaaaaaaacagttattgttctttgtctaacacaggcctggatattaaagtcataatatattgaatttcagaaatattctagcatgctttgattgcttttgagaaataaaaccaagtcaaaggattgacataagttatcaaataatttttatag

SEQ ID NO: 22833 - DNA, 3663 bp, Cannabis sativa
gggggagatcctcctctatccaatggatagaattttagtgtggaacgtccggggaatcaacaaccaacacaagcagcacatggttcgaccgtttattaataaggataaggttagtttggttggtcttctcgagacgagagtcaagtctcctaaattaggagatttgtacttaaatgtctttcaaggatgatgcttcactacaaatatatcatggcacaagggggcagaattgtgattgcgtggaataaaagtagctataatgtaagtattttaaagtgctcaagtcaactaattcatgtgggggtagaaacaattgatgggaactataagtttgtattaagctttgtgtatgcttataatgatgaagaggggaggaaagaattgtggaaagagttgcagcaggttacccaaactgattcttggttagtcatgggggactttaatgatatactaaccaaggaaaaaagaataggtaatagagttaaatatcatccttcccaggactttattgactgtgtttccaattgccttttggaggatgtcaagtcttgtggcaaattctacacttggagtaataagcaacaaggagatgatagaatcttttcaaagattgacagggccatggcaaatcagagttggatggacatgtttcctaatgctgaggtgaattttatgaatgaagagttgatggaccatacaccagctgttatgactttttatgatatggctcctagtggcaagaaaccatttagatagttcaaaatgtggaacactcatccggattttgcagcaacaatagcagcctcctggaatcaacaagttcagggtcttaaaatgttccaagtggtcactaaactcaaaagattgaaaggggtgttaagggaggttaataagtaagctttctcggacatacaaatggctattgagaaggctaaagatatgttaaaccagatgcaaagtagagtgcagcaggacccgttaaaccagagctgttgcaagaggaattagcagcacgaaaagcttacacagcctcactaaaaaattaccagtcttatcttcaacaaaaagctaaggtaacttggcttaaaaatggagataaaaacatggctttatttcatgcaagtattaaagctagaagaagacagaatagagtactttcaatacgaaatcaggagggggaaagactaacagcggaagcaaaaattttagaagattttttgtcatattacaaagggttgttgggcactaaatttcaagggagaatatatgtaataaaaaacttggtgcattcgggggctgttctatctgatcagcatgccaattggctgtgccaggattactcttgtgaagaaattaaggctgctatttttgcaataccaggaatcaaagccccaggtcctgatgggtactcaagctacctttttcaggattcttgggagctcattcaagcagatatatgtgctgcagttcagaatttcttgcactcaagacagattctaaaagagaccaattccgctgtgcttactctcattccaaaagtgaaatgtccaaatactgtaagtgacttcagacctattgcttgttgcaatgtcatttacaaaattgcaactaaattgatctgttccagattgaaacatgtccttccctagttagtggcacagaatcatgggggatttgtacaggggagatttataccacataatattatgatttgccaagatctaatcaggcactatgggaggagaaacacaaagccttgttgtatgattaagctggatttacaaaagacatatgataccattgagtgggacttcttagaagagatgttgagggcttttaagtttcatattcagttcataaatctcattacgaactgtgttaggactacaaagttctcattgatgttcaatggaacaatgcatggattttttgagtctaaaagaggattaaggcagggggatccactatcccctctgctttttgtgcttggaatggagtatctctcaaggattatgagcaagattgggaaaaagcaggaatttaaattccatgaaagatgtgaaagcttacaactcaaccatttgagcttctgcagatgatgtgcttctcttttgtcatggtgatttcaagagtgtgtacttcatgatgcaaggtttaaaattgttctctcttacatctggacttcaaccgaacccatcaaaatcagctttctattgtagtggtatgcaagaagcttaaattcagaggataatcaatgcaactggatttagcgggcaactccttcccttcaagtacttgggaattccaatatgtgctaagaagatatcaggaaaagagtgtacctacttgcaaaaaagatggcagctagaatcgaaacatagagttctagaaatatctcatttgcatgaagagccatactcatcaactcggttctgctctctatacacacttattggagtcaaatcatgaagctaccaaagaaagtaattacagaacttgaagcaatatgtcgagcctttctttggaagggtcaaagtatgatgcatggtgcaggacttgtggcatgggagcaggtttgtcaccaaagaaggaagggggtgttggttttaggaaaataccataatggaatcaagctgctctttacaagtacgtgtgggcattagcaaacaaagaagacaatttgtgggttcgatggatacatagtgtatatattaaacaaggggattggtgggaatataagttcccacaaaatggcagctggtattggaaacaggtggtgaatgcacagtaccaaatcaaaagcaagatggatatccagcggttcgttggaacccgatataccattgctgaagggtataagttgctttgccctgttcagctaaaaatcacctgggatagagaggtttggggaaggctaaatgttcccaaacattgctatattttctggctagcaatgcacaatcgattgagaacaaaagcaaggttgaaagctcataacatagtgcaggaagatacttgtgttttgtgcaatcaacagcaagcaaagactgagcatttatttttcatgtgctcggtatcaacacaatgtttgctggaagtaaaacaatggctgcaatggggctcacgaggcaattcaatgcagcagctggtgcgagggataagaagagcaaagctgtcaagttttaggaccagattattcagcaaacaaaaaagatagtaagaacccgtgttttaatgctttggtcgaaagaaatcaagaggaaggatcaagattggttttccaatttataagatatagtaagtagcatggatgtaaataacggtataattatatacgtttcatataggtccttttttctatgaggatgctattttgtttgtacaaaagagttttatgagcaatgcaactaattgattcataaaaaaaaagaataaattaaaatttatatgtatttaagttaaattcattcttagacaatttgaactagagaaaaggtaaagttagattgagtagggtggtcatgtcacttgaaaactaagaactgtttaagttatttggaacttaaatctaaatcaaattctcaaatttgtatacaaagtgaaatggagtgagggtgagaagaatctcgataatttcacttttcttttatttttttaaaaaaa

SEQ ID NO: 22834 - DNA, 2261 bp, Cannabis sativa
  modified_base (1232)..(1240): a, c, t, g, unknown or other
ctctcccaaaaggcattctacattacccaaatctgcaaactctttaattactttccaaaagtcttgacaattatattcattttcaaagaagtgggctagtggtaatacatacttattttcctatatcttcaaacatgaatatggcttatatgtgaatttttggtgtcaacccattccccaaactaaccacttgaattgagcattatcaaacatgtagggcagagttgaagctctcttggtaaagctcaaagagggagtcacactagtagccctctcctccatttttatagttcaatcctaagtcctatggtccataaccttaacaatacatcaaatccataatacccccaaattggagacaactccactaatcagtaaaactatgcaattacagtaaataggtaaaatgtaattcgtttacattggagacaactccactgattcgattaaaatccaaggagaagactcaagcagaacgaaatatatatatttcattatacgcacaaataaaaccctagaaaaccattttcatggctcccaaggatgatctatgtgcgaccacaattttcaaatcagaatatggaggcgtgcgtaaccctaatccacaaaattaaattagggctttaaacaccacccatatattaatataacgagttgttcaaccacaaagcattatgggtaaaataaaatgctccatgattattatcatgtgaatcaactcaaatatataaaatgaaagaaatcaaatggttggtgctcatattctatgggtgtaaagttgtctgtcatgcccatatggcaatcagtacgaggaatttttacaatcatcgcaaccaaaccaaatctcacaaataataataatcaagaacaaaaattaattgaaagaagaaagaaaaagcgtgattgagttaaagaagttaacctatgctgcaccggcgatgagaatggagatttcgatagcgaagggtgtcattatataggaagagggtttactaggtctacatttcaagcccaaataatctaggcccaatatcttttgggccttcattggacctacgctttgacaagcccaatattttctatgagtgcactctccgtcaccatccccgtcaagaattttaattactatcacgatgtctccgcttattttctattggagatgggatagggaatcccctaataggagcgggtatggggcgagaaaacacctaataaaaaaaataaaatttatnnnnnnnnnttaaatatataaaaatattaaattgcataaaaattagaatattacacattgatcattatttaataaactaattattattaaaaaaacacaagttaaaattcatagaatactaatatactaaaaaatataaacataaattataaattataaaaaattactaaaaaatactaaacgggtgaccgttgagacggagagtatgatcctcgtccccgtcccatgtaacattcaaggacaaaaagtaatctctgtccccgcctcattctccatttagacggagaatggtcgctccattaggagcggatccctgcagaacctcatcctcataggagaaatgtgcatccctactggatacagaagaagaattggagcactcacatcaatgttttactctattttttaaaatacatcaccaaaaccccatttgtttcataattatacaaaaataacaaaaaaaatattataaaaataaggttatacgaaattttaaacatttttatgattttcataattttatttataaaaaatacgatatttttatgttgtactcttgttaattaatttgttgttatttgtatgttattttttattattattttgatgttatttagatgttattttcttattatttttatgtagtttttttattgtttttatagaacatcattaaaaagtaaggaaaaaaaaatctttgaacgtaaaattataaaaatttcacaaaaaataatattttattaaattattccttatttattttaccttcaatttttactttgcaccatacattaacttttttattttttctctatatcataaaaatttatatttattcatttgaaatatataataataactaatatgtgattatattacgagtttgattatgtttttttggtggaccttgactcacgagtgctttaatatgcaaggaaggataagattgtgttaaaccaaccatgaatccgagaactttgaagatggattatacatattccgaccaagttagactaagtaggtttattta

SEQ ID NO: 22835 - DNA, 1988 bp, Cannabis sativa
cgtgtgaaataaactatttgaacaataatttttatattataaattattccaaatttctcaaaattttagaaaatattttcaataatgaggacatacatgactataaacacaattagactgaaaaatgcttgtgcatgtttagtgaaccgttttaatggtagtgcattaattatagaagcatctgtaagtttttattttttaattattttattatataagttgtagaaaacaaatatggagatactagggtaactaattatcatcttaaatatattcggccaattgactgcttgtttgtttgggattaattgctttttaaaaattaagattattgaaacaattaagaattagtggaaaaaaaatctcaatattttacgtttcgttaaataataaatgaatttttgtattaccatccacattcgatataaattcttgacaaaatatgaataaaagaattggctttatatttacatattttctcattaatgattccgaagaaaaagttacacatgcatgaaaattgaaatcatgcaagagtgacctcagaaatgaaatggttgaaacatatgcaagcaatttttccgcgttttgaagttggtagttcagttggggtaaggttagaaaaaatgccatcgtcacaaaagctactaagttaattaatttaagaaactgggacaagaaaataattccaaaactctaatattgacttgtctggttgaagcgtgtcgtttatgtaagagatccatttaataaatttaaaatataattttaaatcgcctataatataaatatatgtatatttgtatatttgtatatttaaagtaagaagtgttggttgtggttcatttgagtctagagaggtggcaggtagacttctttggtcccaacagatatgactttaatataatacatatggggcctctttggtccttgcattagacagattgattttgatagtgtagtgtttgggtttaaaagtctaaataactaatacagttaattttatttgtctgagattatttatctcgtcggtaatataaataatctcatacatgtgagatttttttttatttttttctaattttaattttttttgatatgttttaatattaataataatttaaatgaaagaattatcacaaaattatttatagattttcttatatgaaaaatttatttgttaaaattagttttagaattatcatacataagcttttaaaatttaaaataatattaaataaaaaagaaaaattattccatatactattttgaattttttcttaaaaaaaatttatggttttggtttctaaagtagttttctcggtagtttctatgtgagttgttatacggattttgttgcgatttatgtttctccgttagttgtaatgcgggtttctatgtacaatttcgtgaaaaggcaaaaaactaattattttcaagtataaaaatgaaaaagccatagttacttaaatatattctaagataaataatatgataataaaattatatattctttttaaattattaaaaaatttatatcaatattttaaaatattaatatttgtattaaattaataaataaattattatttagtataaattagtatttttattttattcctttaattatttattaaataaaagcatgataaattattttaatatatgtttgattatatatgatatattattttattttataatttttaagtaatatctatttaattcgatatcacctagttgatcttagatcaaatgatctcaatcttgaaatggttaggttctagttcaattgtattatatgtgttcttcaatctattctttaaagttgaccaatggatcttctcacatgatatatagattaaggatatggtagttcaattgagtggaagcgttaatcatagatacagaatctatatcttctatccacacatagaagtcaaacgatgatttccttcgatcttggcttaatagagataaatgataga

SEQ ID NO: 22836 - DNA, 4555 bp, Cannabis sativa
ttttgttttttatttatttttttgtttttttttgtttgagaaaaatacagaaacactactaaagagcaacaagagtaaacggaccgaatataaatttaaaaactcggtgaacaaatggtatagttagtattcatcaaaaaaaaaaaaaaaaaaaaaacaaatattataggtagtagttattaaaacaaattttgttaaatgtcttttgatagtagataatgttaactatcttttgttttttttttatgaaacaaaacaagaaaaaaaaaaagaaaaagaaatgaaaggtacaactcacaaactttgtaatgtttctaatccaactaagtggagccacatagtttcaagagttaaagattttcttaagttgtaaaaaaaagtacaattattttggataagatttattattattattttgaaaaaacatttaaattctccttaaattttgaaaagtagtattgtaaatgtaaatcctaaagtctttctagtcttattctattcatggtgggttgtccatagatactttattttggttaattagtaggatgagattctattcattcattggacttttcatcactttattaataatgaaattagtttaatttttcattatttttaaattaattgaagaacttgaaggattatctgggatttattatataaacataaattgcttattcatttggaggcgagaacattttggtctctttagtccattttggcatttcatttatttatcttattagttcaacttgatccatttattttttccagcacgaggcaataacaattaattagtaataattaataaattactcaactaactaaaagccaataacaaataagaaattaataatctaataatgttgtttgcaccattaatttgacgattattttcatctttggttaattttgttttataaggtgtaataattgtaatctatattatgttaaaacaaagtcaaatatgataatgtttctaaaaaaaactaagaaaatgattattaaaagtgtgaacataaaacttaaaaagcttaaaaatgtcaatagaatgtaataatcggtctaagaaaggcgcaaaattggaaatttataattaaatgcagagagagagagagagagagagagagagaaagtagagagagaaacgtgaaaggttgaccagttgaactggaaacgaagaagaaagtgaggaagaagcagtgtgggaattttcatgtcaaagccgaactacgacaccattgcttaaattctcaccaccaagcctcatcagacatcttaactccgtcaaatacacgtttctctctccctctctctcttatgtcagtcatgtacagatacggagaaacgacagtaaactcaatctctaattctcttcactatatctgaattattcaaaccgagttatatacatatacctatacatacacacatctactttggctcctcgtataaatattatagatttattatttcaaagacccatattttctcttcttttattcttttatattgttttttactgacaatcacaaacccaagctcccatatccagccgccgttcaacaactgctcaatctcttcggtttctctcttctagctcaaagggactcttcctttttgaattttctcagcttctgaggtgattttctcatctgggtctccttcttttcttattttttaggagactggttctgggttttgataacgtatgtttggggttattttggatgattttttgtattttttttttatttttttaagcatattggtataatcgaatttcaattaatgatacggtcatatgctgtggatgtttaaaccaaaattctcttttttattgtgttatctaaaattagattggtacttggtggagatgttgttatctgggttttgtttagtgatgtggtcacatgctgtggcctttctaattgatccctgctaaaagaactatctttcatattctcaaagaagaagatggattacttaatttgtagtttccttgttattacaatcttgtatttctcttgtatgtgcccatttggttcttgtattgtgtagtgtttcttctttaactgttctgtgatagggtcaagttgaattaaaacttgcatacttttcatcttacttctaatcaagaagtgacattgaaaattcgagttcacattgatgcttcaacacatacagccttattatgtttgcactatttttctttttctccatatgaatgctacttttgaatctgtttctttgttctctaggaataatttggagaactgatgagattatgtttgagcctaattagtttatttaatcttaccatcgtttagtttttagtttagattggtatgtaaattttgtatttcacatcagactttggtagcaataatatttgcttcacttacttatttttgggccctccccccaacccttaaatggtgttgcattgctgctttttccttctatttctctgcttattttgttttcctctaattctcttctcttgtcttggataaattatatggttagaaatatattattattctaaaagtgggatcgtttcatggtggtcttgtttcaaattatggagagttttctagataaatgcacaaattcaaatgtgtcttgtatcattttctgtgaactaagatgtacatttacaatggttttgtttctagcaggtattcactgtgaccattgagttaggaatagcgtggactgtcattcagcaattatgacttgcatgtctttcttattcagtaggaaggggaacaatgcaagaaaccatggttttgatgttgaagatggtaagctgtattttttaatgaatacaaactatagcaactaatttttttctgttgttactttatttatcttaacaaggtctaatgcatggaaaaaacgaaggtgctgtgcatagaatatcacaagactcgtcaacactaaagtattctaacagtttctttatacccatcaacagatgtttctggaattcatgatgtgaaactttacacctatagagaattaaaaactgcaactgaggattttagtcaacataataaaatcggagagggtggttttggttctgtgcataaggtaaagtgactactgatttactattttacatggtgctctgaatgaatctcccatctttttaaatgaggcgttcttggtatattaccattgatattcagggacggcttaaagatgggaagcttgctgctataaaagttctttcagctgaatcaaggcaaggagtaaaagaatttttgacagagattgaggttatctcaaagatagagcatgaaaatttagttaagctttatggctgctgtgttgaagggaatcacagaattttggtgtacaactacctcgagaataatagtctggcccaaactctccttggtaattttataagtttattctcttgcgcaatatattattgtgttcattacatgcatatatatatatatatatttatatataactcttatgagagttcataacttgtctgtattaccagttggatattgtttttcattttaggaatgtactttgtattattttctcggtcaagagatgtgcatttcccataatgtatataaccaaatggaaactgaatgctccaaggccatttcatttcaggtggagggcacgcttatagtagtattcagtttagttggcaaacacggtataaaatttgcgtaggggttgcacgtggccttgcattccttcacgaggaagtgcaaccttatattgttcacagagacatcaaagccagcaatattctgttggaccgagatctgacaccaaaaatttctgattttggtctagcaaagcttatcccatcaaatatgactcatgttagcacacgtgtggcaggaacgatgtaagtttagatatagatgtttttcttttcaactttctgttattgatttttcaccttttctttcgtttcagataacataactaaaacaaaattgattcttgaaagagattgtcatgaacattaacaacacaaagtaaattagtctttctgttgtcacaaaactaaggtctttatgtagtacaatgcttaaaatcaactatacattctttttgctatcatatttgatgagagttcatgacttgtctgtattagcatctctgtaatccaagaaactgtcccctcattttgtaatgttccctaccttgtatttacatttgctttttgttttttgtgttatagaggctatttggcaccagaatatgcgataagagggcaactaacaagaaaagcagatatttatagttttggggtgctcctagtggagatagtaagtggaagatgtaacacaaatactcgactaccagctggagaacaatatctgcttgaaagggtgagtgttttgtgtgtttgaatcagacttttatgttgtatttgaatccgtgcttagcggtagacttgctttctccttacttgagattttgttttcaacttcatctgctaaacttgtttcaaaatgtgaagaactgtaattcttcaatttcaaaatgttgatatatagagtca

SEQ ID NO: 22837 - DNA, 6783 bp, Cannabis sativa
tcaattaatgaaatttccctttgtaaattgtttggcaaaaattaaatagacattattcaaattagaaagaatccgtctgcactcagaaatgcaaaactcaaaaatagaatccatatctaatgattttttggatagcttggattgtgagcaaactatctgattccaccacaacatcatgtctccctatttcttttaaccatctcaacacttctttaacctcgatagcttcagcaagaacaagatcaaccactcccatccaacttattgtccaagtcataataagctgaccagaagagttctgcgctatccaaccatacccatacttattttgattgctaaagataactgcatcgacattgattttgatcgtattaccaatcggtgtaatccagtgctcatgcccttcgtcgtcttgtaaagaaaacaacgatgaaccaaatttttttatcttgagcacaactctattgatcaaaactacccttagctaataaaactacctctttaacagtcttattcttaccattccacaccttgtcattgcgcacagaactctatgtttcataccagaatcccaacaataaaatttatcatgaaactacccccaaataaattgtcaccaatctctatcaccaaaatactcgccatctgctagcaagcaacaacaaacgaatacctgacaagacaatgagaaatagactctccaattcacaaatatattaaacacaacaaggagagaagaacatatttcacgcctaattgttattggaaagataaaatcatatttattaaatattgtaatatatatatatatatttgactagataaatagattcacatttcacaccgtttttataataaataaaaataactatagataataaaattgaactatgtataataaccaaggtttatataatttaattatacgccaataaatttttatccatatatatttttgtgggtttttttttctttttggaaaatatagttagatattttatttttttcatgattattagtttgcatatgttttatataatataataaagttatatataatgaacttttaaataaaatcttatttaccttttccaaaaaaaataaataaataaataaataaaatcttatttagcctagttcttcaatatttgctcaatttttgattaagtcatctcatctttattattatttttattctatttttatttttaattactataataactttttaaaatatatttataaaaatatgtggtaattaaaatatatgtttattgtatgaaaaatttggcatattttgtaaaacactattaaagtagtattgtatttaagtgtgttaaattattgtaatgatctatccttttgacacttcaaataatattttttttttaaaaaaaaagaaaaacaaatatgctcaatataataaagaaaaaaaaatatggatattatctcaatttctacacaaggtaatgtggcattaggcaaggtgatatgtggagattgattcacgacctggacgatttgttcgccttcgaatgctctgtctagaagagtcaacacttgcgtctgaatacccaacaaacatctagattggaatctgtgcggggtgttctgagaagattgcattttctcagctaagcaaaatcctccgcctagaaggatgtagtgaatttagaatcttaaaaaatatttttcgtgaatatctccttatttttggtttgatgaaattcctacatttatgggatttaatttgcacaaccgagagattcaagagattttatatttaaatttcccattattttcttattatttatagtaaaaatgttcattgcatattctctataaatagtgggagacattccattatcaaggggtcgagttcaaactttcaagagagcacttacgatgctaaaatattttataagctttcaccaagctgttaagaaattcacttggccagtttcttgtgatcttgataatcttcgaagtaatacaaattaaagaggagtaggctattaccataatcatggggccaaacctctataaaattctttgtgttcttattgctcataattatatttctattattattcattatattatcgctttaaagactcaacgtcgttggctaaaagtgatgtcaaaattttgatactttcattaagagtaattgaacacgaccatcaagtagttttgatcatcgaacaatgttttgacaagaaggtcttaatccactgaaccatttgatccaatagtgaaagatcccaatgtgcaagttcccattgatcagagagatccaacagtgatggacccaaatatgaatgtttggctgcctccgcgagcttcaccagtgaggcttggagtaacaacccctctggctgtgttcactcccggcacgaaagagactaggaacaccagccaagtatatacgggagaaactggaccaggtaccggacaaccttctatgggagaaccccatgttgatttggggacaacactaatttggaaaccctaagagaagttgtggggaaagtatagactcatactaatgtccttcaccacaaccagaaagaaacgcgctctgtggtgaactaagtgttcgaacagcagagatgccaatttcaagagtggatggacagacaagctgagtccatgcgtgcccataaagaagaaattaactttcgatcaagggaagctatcgacctgataaagcgttttcaccaacaaacgggtgaaaggtgttggagaaccctccactcagaagagatcctactcaaggaaaagatccttacattccccctagagggcaacagtacggtccgaaggagcgtccgaccaactacatacaagctaatgggagtcttttaaatttaaggctttctaaggaagaggtaaatgataagtaaaagatatagtttaatcttttctcttctccttttttaagccaattttgaaatccctatacaactaggaatatgaatacaaatttaaaaggtaacaacaattcctaatgctattgggactaaggaaaaattagagaattaaaggaaaaatataaatgataagcaaaagaccaaaagtcttttcccttcttcctttgtctctctaatttttaatgacatcttcaaataggattaatgtcataacaaaaaaaataagaaaatttcaaatttttaaagaaagagataaaaagataagtgaaaaaaaggataagatttttttctctttttctttattaattaattttcaaaattctcaaggaccaagaaaaagtgttcaaagtcctaatccaattaggaatgcttgaagaatagatacaagtgcctaagaatgtcaaaattgatgcccatctggtagtttcaagggaaacgggcttggttcacgtcatcaagttaactccacacaagtgtaaagtttacttacgggcaaatgttaacctgtaaacttttcttggtgacgtggacatcaatgtttgacatgtggcatgaaggatgacatcacgaatttgagtagacccgagtcatagtagtcgacctgggaggggaccctagccctacgctcaggttgactttgggatctctaggatggaagtttggacttcaaaaaattgaatcaaatccactatctttcattattctataccacaaagacatggagcaatctaatccaagccacaagagctgaaattacacgaacctgcaatttggaagccaacctgggcacctagggtttcacctgacacctaggttgacatcctcaattaggattttagttttcgggactgtcttagtacaaaatggtcaaaacttgcattgagatatctactagacataccacagacatattagaggcatcataatcaaaattagagcaagttaatttttgagcactcgaggccccaaggccccaagcatcaaacaccaggttgaaaatctatcaatctgggcgcctttcaagtgtctgattggagatccaacttttacaatgtattcgtcttcatcaaaaatggggaaataggtcctctcagaggaaaaataacaattcacgggcataaataacagagcccagcgcccaagttgaaacttagggttggccctgcgcctaggttgacattttaaatgtcaacctgggccatttaaaatggatttttttttaggaattcttttgagcatcttctctgtcttcagaaaatattgagattcaactatttctagggaccaaatagaatctctaaagggctaaaatagggatctagcgccgaggttgacacttggggctgggccctacgcttaggtttacatattgtcaacctgggctattttcgatccagttcaacaaagtgtttcgggcatttttatcaataataaaaaagatttaagtaaactcggggagaaaaccacaatctcgagtccctagaaacagggcccagcgtccaggttaacctaaggttgggcccagtgcctaggttgattatcaacctcggatgccgccttcaattgctcgaatgccaaaactaatgtgacctttgaatcatgcatggtcaaaaacagggtaagagacatcgtcctcaagttcagaagccttggaagtatcaaaaacaaaatctcaggagctcgagagaaagggcccagcaccacggttgacaaaaggcctggtgcgctgggttctgcttatccgaatctgatgtcatttcgaccgtctgtctagtttttcacaattacaatgatccttgaagtcagagaaatcaaattcacaagtttgtatttcttatttccagcacacctggaaatgaagagtttcgagtctctcatttctgcaaaacaacaacctcttcaagaaccgatgaccaacttcgctagaacatataaatggagtaagtggtgtcaacctgggcattgggatgtgctggatgtcaacttgggtgttgggacttgcatcgcttttagtaaaacaaccataactcactcaatttttatccgattaacgcaattcaacttattttgaagttatttaaatgctctatcaagtaatgtctcacaccacagttgcaattttgaagctatcgttatcgaaattcacccccaagaaagttacgaaaagaagcttcgagttacttgcagcgcgacccaccagacaccaaaaattggccatcatcacgagaaactaattttcaccgttatatcatcatcaacagtggaaaaaaacgtatttgtatatttctcctatttttgtgggggctcattcacatataaaaagaaaggtcccttagctcattttacacattcagaaaactacctacaaggtacgtagcctcattactatcgcgatatagagaatgtaccactatcaatcggttgtgtctctcttaattacctaactacttttttcattctcgtcaatctaacgagcgagtgtaacttaaaaatttagtctaaatttttgagtcaacaatatatatatttgagtataaaaaagtgtaatatttaaatttctctttttttcattcattccctacttttcctcaaagattctctctcataattaaattaagtgtttggatgcacttgttagatccttgacaaaatctgagtatgatcatgtaatatgctctattcagccatttatggtaaaagttctttagtaattttacaaggtttacaataattgataaacttatatttttcccaaatatttgttaaatttgtaaattgtgatgccaaaaacattttttatattttcataaaattatagtttcaacatttcgatattttcatcctcttgtataggtttaaagttttatcatccgtcttaatcttaacattatatgataaaaagttttactgcaattattagacccaaaatagacagtaaaagaataattaaaaaaatgaaattattgtattaaattgaggaggatgtcttgccattaaggattttaccattggtttgctgaattttgtgttctattttagcacacaacccaaaaaacaaacgatacaggccacatcagtatcaagatgtcgaaccaaaagagtctaattcgacttgaacagttatctatgtcggtgaataactaatcttcctcacaatgaaagagcaatcaaatgaactaatcatgaagagttcccagaatgtcgtcctccctatacagatgatacctggaacaaaaaaaaatgaacaaagtaagaagtatatttccgtgtcaaccatgaagtttcagactaattacaataatttgattcttaaaacatgagacattggagagtaaaatttatgggatctttaaatactaaaaaaaacgaacaaacggaggaactagactaacttcgcttgaacagaattattcagacattcagaaaccgaataactcaaaccaagcagcttttcattttcactagctcttatattcctaccctgattttcttgccctccttctcaaccttaacttccatcctttagcataaacaccattcaaagatactaattgacaataaggtatggccccaagataaaattactaaatagtactccaaggcaatatgcactgaagtctgaacatgtggactttcttctgtacaggtttgtatctcacccatcagtaaatacaaaactacaactaccataaagataagaaagtttccaagggggaacatttcaaaatggaatacacggctctttcatgttcaaaacgaaagaagtaatgactttgaaaaaaagaaaaagagatgaaggactgttatttgtctaaaaacgttagtacactatttgattttacaagctaat

SEQ ID NO: 22838 - DNA, 2978 bp, Cannabis sativa
tttttgttatttttgtgtatttttcaaataatcccttttaaaattgaccttttacacaaataacaaacaactttttggaggtacctataattagattattcaaagttcaagcaccagtccaaactgttgggtcaaccatattagtgggcttggaccaaaataagggcttaaaacccaaattaaatgaaacataaaagaaacacaaaaataaatggggtaagttgagaaataccacttttattaatcaattaattaaatttacctctaattttatatttaattgaaacatatctatttttatatgtattatacctaaaataccctgacataaaagaatcacatggagagtatcttgaagtgataggggcaaaattggtataatatttaagaaaagagataaaaatgatagactttaaaaaagtgggtaaaaataaaagagaacaatataaaaagaatatagagtgtaatttcctcaaaataaatgcagaagctgatggcggggtcgtgaaaaaccagcagccaagagagaaagaagaaagaaaaagaaatggaaatggaaaagaagagaagagagagaaagtaagttttgtcactttgatcttcagtttcaatttcgcgattgtttttttaaagtgctcttctacaatactcatttggtgagactcaattttttctatttgtgtattcatcttttgagatgataatgattatgatccagtattatttaatcttgaagttgttgtgagcctctagttatactaaaaaaaaacattgtaatctcattatcgaacattaaagatagtggatgatttgaccagactacagtcccgtgaggacggacacacgaatagtagtgtgggggctatagcccttatacaaaaaaaaaaaaataatgttaaaaaatattaaacatcttctatttaattaaataattatacaacaaaatagtaaaaacaaccccacaaaatgattataatttttatgcaaagtaatataaatatttttataacaattaagccctcacagatcaaaaaatctgagtctgtcactagtcccttagttttttttagcattgggtttatacgtaaaaatcttagtgtctcacttttatactagattcgtgtattttatttgcttgtggtgctttgattaatatttgatattgttgattgtattgtttgataagtgtcccattttcaacatacaaagagagaaagtattgtgattatttacaataggttttccaatacaaactgatttagctgatataagatccaattacaattacagtaaaaactctatctaacaatactctatttaaaattacttttaatttattataaaaagtttaagtcccaatttggaccaattataaataaagatgtgattggtttagaatttaaaaactgaagatccacataaaaattctttatttgttgagttttcaaaaacaaaatttaaatattattttgagttttaggctataaaataaaaatactatttttatgttttgtatgttttcaaatcatggaatccaaaaactctttaaatattctcttacccttttattttgagatttccaaccactcatatattcaactttttttaaaactcaataacattatgtttgatttttttgtgattaatttttttttatagtgtactacttaattataggctcttaactaaaatataattgacttggtctgaagtatattctaatgtatatataattggattcaataacttgtttttagaataaaatgtataaatatattaaaactaaatggagttaaatctcatgatcattatataatatgttatctggtatagaagaagaattgaccataccgattacattattggtgaaagcccacttagccacattatgggtcgcaaaattacaatgtcttgaaataaatgaaaaattacaacttaacaaaaatttagaaagatgtttacattgaagcacatagttactaataccccaactggaacaagttcccttccgcgtgttgataattgtctcaaagtcactctcaatcaacactaaagtatgcttcaaagagatcgttgatcttaggactagctaacaaacaggtcgcaacttctccaataagtgggtcagagaagttgagcatgttggtagctacctacaaaatcgactttgtgtggtccctagccaaagccaccatgcacattgaactgcaactaactttaacattacatttgattttgattccaatctttcggggagaaaccaatcaggagaataactgtcaccggtgaagaaaacaaataagaaccataatctgcgtaacacatagagatagagtcaatgtaatgtttaatgtaacatatagacttattgtgaaccttgtcgttgcgagttttccagattgtgtctaccacaatcgaagcataaaggaacatctcttggatttggactttagactctaaaggaatttaactcaatcccaaacacgggccccagaatccataactggcatcacactccagggggaagacctccataggtgaaaggaaaagttacaatagagaaaaagatgttctattgtttcctctccctctccataaataggacaagaaacttcctcaatatgtattcttttagcaagaatgaaacgaataggcaaagcatttgagaggatgctctaccaaaggagcttatgacgctccaagattttagaattccaaaatttattccacagaacgagagcagcattgcatagaggagcacgattcaaggcctgaatcagataggatttagtagagaataaaccatttagttttttagtctatatccacttatcactactttgaccacatgatttaccatctttgatgatactattggttgtttctaggtcaaaaaggttatggagtttggatacatcctaattttcattgtttggtagtaaagccgccactttctccaaacccttaggccgagcgtt

SEQ ID NO: 22839 - DNA, 3921 bp, Cannabis sativa
  modified_base (2513)..(2515): a, c, t, g, unknown or other
aattcaattcatttcaggttaaaactttacaaaaacaatgctttagtgtttataatttgactttgagcacttgacacctagtaaatggttaggatattttataaaaattattacataaattatacagaatctaatatttaatcgtaccaataacgatacgatactctagatagtgttattcttttacttagtggtgtaaacagttaagccattatattatgttatggtcactaagtagtgttgttggggataagtgtactgtacctgttacaacaacatcagtgaggtttgttccaaatatgagactggcgaagcgtccaccagcagcgtctcttcctcggccgtacgatggcaatgctttgaggacaggccactcacttatgtcctataccaaatcaaatcaattcatcattaaatgtaagaaaaaaaactagtcttgtaatgttatacaataaagggttgtgtatgaaaagagtctataataataaaagtctgcttaattagtgaaccaagttgattaatgagttttaattgattccgatactaatgaaaattgaagtgtgacttagactacttactcatttatatcctaaaccaaccaaatcaaatcaatgaatgttgttgacccgctacaacatatgttaggtggtgatataatgtagggactttattagatatccctgtttcagtctctgtcttttcatctttttattttctttttctaacaacagtgcccttttcgtctttagattcaaacgatctcaccaaaaagatcccttgaatgttttggtacaacaaattcttggattttatttcacatagtcaatgaaccgttccctcatatctgttttctaatgcgtaatcctgtgacgtgtcacctttttagcttttacaatagaaccattagtattacgaaaaaaaaaaatcatttttagctaaataacacttaatataatttattttcgtgactaaaaaacattaatataatttatccctcttcttatttttagtcaaaatagtgtttgaaatgtcttaaacggttcctaatatttgactcttgttcccctacccttgaacaaattattttcgaaatgttcaatatttaaaagcatgaactttcttttttcaaaaagattctcatagatgagaagaaaaaacaaagaaattaaatataaagtactagttatagcctaagtattcttctttgtaaaatcttaaaaaaaaaaaagtgtaattttccagagggggaaaaagacaatttccagttctacaagtttttttcttcagtagtagttaattttcttccaacacaacaaaaccaaagtaagcataatgttcaaataaagcacaatcaaacaactcttaaatgcatttctattccctaaaatttaaacacacttgacaagtacaacgatttacataatattttctttttaaaattaaagaattaaaatgttgagagagagagagacctgagaagcaagaagaacagcatccttgtggagataaagagtgaaatggctaatgaggctgaaactgccagtcaaccatttaccaggagggacaaagagctgagctccaccgttggatgcatattgagtgagattgttaatggcatcttgaaaggccttagtgttggatgtttttccatctccaactccaccaaaatcagtaagcactgcactatgagctctacagcttatggcactgtactctaacgaagtctctacattccttccttttttacttccttttcctcttcttctactacactcaactccatttactatgttaagtacaagaactgcaactataacagctttaatcacctgcacaataccatcatcatcaaacaaattaatctaagctgaacccattttagtagatcaaaaagaatatcatggaatagttatttttgggggggaagaaaatgttgatgcagaaaaaattagaaagagaaagagaaaaggtttgttcgttttacttgagctctcatcatgtgttttctcatgaatattgacaacattgtgagaagaattgaattgacactttggaagtaattttgttatggatgacaaatggtggtggtatatgtaatatttataggataaagctacactacaaataagctaagccagcctatacttaccaaacattattattttattattataccccggaattaaagtcttttatttttccccacttttctttcttatatactgaaaagtaaaatgaagatatacacgtataaatactcagtcatgatcttcttgtattccatcatccattcttaaatattttgcccctaaactttaacatgtatcaaatcatgtccccttaatttttttggctgttaaaaattctcctgaattattgagattgttagatttaaggatttttgtctaatttcattcaatttactatttaaatgattgtttatgtactaaactatgctccccagattttgatatctattaaattatgtccctcgaattttgatatgtactaannnatgtcccctgaactttcatccatcttaaatccaacaatctcaatagttcaagggatatttttaacgaccttaaaaattcaaagggcataatttggtacaagttcgggaggcaaaaatcctaattaacctctttcaaatatgtaacaagtcattgttcttatctttgatattagatcacaattatctttgttctatataagaattaatgatactgtaaaaggattagtatggtacagattacatttgtcaaacaagaaaatttagtgtatatatggacaagataacataatttgcatttgagttatatcataataaattgtttattgtcacataatttgcatcttcttgttttatttaaagatttctcctaccacaagtttcaacagttagtacttgactatggactgtttaccaactaattaaatgtaaagactaaagaggaaacaaaatgattttgttaagattgtttcttctaataggaaactgtttgagatacattaaaagctaaagcacagttgcattgcacttatttgacacagtaactaataattgagaaactcattaagtaattgcataatctataataacacattatctttggccattaaataatcactatctcgaagaccacaagaatgtttaatgctatcactaaaaaaaaaacatataagaggatagactagcaagtgtaacaaaaccaatttttctgtactttttaagatgaaaattatattaagaaagagaagaagagtaaataaatgagttaaaaggacagatgacatgggctcgtgaacaagggaatcttagagagaaatagagtttaatttgaagggaaaggaggtgtctttttgtactgtttgtgtgtggatttgttgttttggaaagtagtgaagtgatgatgagtggaaaaccaataacccttttcactttcttggattttggattgatctaaatttggtctcgtgatcattttctaacccaaccgcccaacatatgatctcatctcaccatctcttttctttttgatcagctccatcatcaatccttatgctatctcaccaccactgcttgtaaatttaataatagtattgccggcccactctcacgggtcagcaaaaggtggatggcccccaccccacccttcatggtcctataataaccccatttcattttatttcattaaactttgtgttgagctcactttacttgaagttatgttgtgtaagttattaccatgtccaattgtccatgtccaagcatagaagtgacaatgaggggttctgttgtaatctctcattaatgcatccaatggcaatgcaaggaaataaaatgtgtgtcttagcttatgaaagcactctagtattaatatggcatttgttcccaactttttatcatattgatgcgtg

SEQ ID NO: 22840 - DNA, 6188 bp, Cannabis sativa
ttatgaattgattaatattgaggtatatttaatattgttatttattgaaaagactgattggttgagtattgataatgggacaattacattgttgttaaattgttgtttttagttgttttattgctgttattaattgttttgttttgtatttcactgtttttttataaaaacatagtatttgtgaaaaaaaattcgtgtaacggtatttttgtaaaagttaacctaaattttaatatttttataagtttccctattacatattttcaattttatacacttaaatatcatattttttatttcaatagattaaatactcaaagtttagttttactcactctcgttattacttttctcttaaatataactgagaatatttctatgccatatgttactcaagtattagtccactgcataatttcttttaaaaaatttattaactaattttaaaaataagaaaaataattataaataaattataaaaacaaataattagttttttttttcttttttcaagcatggacacacgcagaacatgcagaaacgagcaagaaaaagtgatcttccatggacgtcggtgaaacatagagatctaacatggtttgtttggcctgtcgagaaaaaaatgagaggatctgtggtgcctcgagtccgagagcgatgcgagcaagggagagggtgaaggaggtctgtttgagccgcacacgaatgcggagggtggtggctcgcattcatcgtcaatgttcatcgatctgccattgatgccgacatgaagaaaaagagaaagacgtaaccgattttcgaggtggagggtggtggttgcccttgggtttttgggttctgattatttaatgagtttgatttatggttttgcataaagaaaaatgaagatttatgggtgaggaataatttaggttttgtttgataaatttatgatgaattaataatccttttgttcatgtcctggatagtttttttttttttttggtcattattgttactgtatttgtttagaatggtaatgaaaataaagagtctccaaaaaaaaaagaatgacaaaaaggaggagagagagatttaatattatttagttttttatttaaaaaaaattatgcagtggaccaataccaaagtaacatgtggcataaaaatattttcaattatatttaacagaaaagtagtaacgagagtgagtgaaactaaactttgggtatttaattcgttgaaataaaagatatggtatttaagtgtataaaattaaaaacatttggtatttatgccgcaaatatccctatttttttataattgtactcaaaatattatgaatacaccctatgtttatcaacactattggaaaattgttggttctactgttataaaaatggttttgagagtacttaataatggacatgatatggaattgctaaacaagtctattatcattcttatttaaaaaattaaaaactcaagtggaataggtgattttagaccaattagtttgtgtaatgtcatttacaaactaatgtccaaactcttagccatgcgcctcaagaagttcttccttttgttattttggaaacacaaagtgtttttctcttgaactgactcattacagacaacatcctgattgcttttgagctagtacatcatctcaaacataaaacccaaggtaaaaagggttctctactctaaagttggacatgagcaaagcctttgatatggtggaatgagtatacatagcagctgttctggaaaaaatgggcttcaatgagcgatggataactttgattttgaagtgtttattatcaataagattctctttctcactaaatggtgaggttgtgggggatgttacaccaaagaaaggtttacgacaagatgatatgttattactttatctattcttaatttgtttagaaggtctatctcacttgctacaacatgaagaagcaaatgataatcttgaagggcttcgtctcacccgttatgcaccttcagtgactcgcctactatttgcggataatagcctattattttgtcgaataatgaataactctgtgttagctatccagcgtgttcttgagattcatcacaaagcttcaagtcaatttcttaatacacaaaaatcggtcatgtctttctctccaaatacgatggtgtctgtacaaaattttttcaaccatactttggttatgccaattagtgagttccatgaatggtatatgggcctcccttcttattttggcaaagataaaaaagaacttttcagtaatattaaagaccgtattttgaaactcatcaatgcttggaatgataaactcttctctataagaaggaaagaagtccttttgaaaacagtagtacaatcaattctaacatacgcaatgagttatttctgacttccataatatcaatgcaatcaacttgaggctatgatggcaaatttttagtgggggtcaaattagaatggatcgaaaattcattgaaaaaattagaaattcttatgcaaataaaagtctaatggaggcatgggcttccgttcctatgtacattataaccaagcattattggaaaaataagcttggagaatctttgaatcatcagattcacatctgagtaggttgttcaaacacagatgtttctttaactgctcttttttggatgcaaatattgggcattctccttcactcacgtgccaaagcatctgttggggaagagaattgctcctcaaaggtcttcgatacaaagttaggaatggtcatcacattaatgttaggttagcaaagatccatggatccctggtcatagtgaaattcacccactgtcttattcaggacctctatcacttaataataaagaatggaatacaacacttttaaatgctcactttaaaacaattaatgtggatcgtattcttgctatccctttcagtttcttcccaacctttgatcggcttatatgaaatttcaccactaccgatatgtacacagtatagtcaaggtttcacttggctaccaatttggaagaagctaacgcttaaaaaccctgtgcttctcacaaagactaatggaagttcttttggaacctaaattttcctttgaagattaaaatttttgcatggaaagtcaatcaaggtgcctttccagtggcgaaaagtttacaccagaagaaggtaatttgattcagctacttgttcaaggtgtgcacatgcttggaaatcgattgggcacactctattctgttgtaagcatgccaagactgtttggaaacaatttaattttcatattgattatggtaaagctcaccaattacacaatagtgaatatatatttcatctctcaactgtgcaaactaaggtagagatagaacaaataatttgtattcagtgggatatttggatggagcgaaacgaagtcctccatggtagcactagtagagatggatcataccaggcaacatatgtgatcaactatttggacaactatattaaagctattagccattctcaaactcttacatgactcagctttgactgcctttaattgaccaaaagatggtgttccatggaaaccaactgacctccatggcctcaagctcaacatggatgttgccgttaacttaaacactaacattttgggtgttggagcaattatttagaattctgaaggtgatgtaattgttgcactgtctaaaccagtctaaggttactttcaatcagacgaaatggaagcgaaggccctctttcatggtctcaaattgggctgcccaactataaatgtcaatcactcatgttgaaactgatgcgatctatcttatttttcatatttgattgttgatgtttgttgtcttttatcctctttttctagtattgttatttctcatgttcggagaaatgctaatcatgctgctcatggattagcaaaacatgcactagagttggataggagaaattccacctcctattttctttgttattataaacgacttttgatttataataacaatttaattttccaaaaaaaatatatgtatgtatttcattttcatgtgtaaaattgaagttttggtaaatacatcccatttgctaaaaaaaaaataatcataaaaaaagggaccaaatcttatgtcccacttcttgtatgatcatgtcccaatccaattaaactattacaattcatttaaatgtcacatcctatttaagacttcaatcataattaactgatatattttacaactcaattaaaatatcatattatatgttcaaaaaaaaaatatcatattttccttaacggtttaatatatgcttaacagatacatgtactttcttttaaatttgtaaagtattatatattaaaaaatgatcatccaataccccaattggagcataaccacctactaattccctctattttagagagttctcggtctatctgttttagagagtattcgtttacttgttaagttcttttgcttggttttgagtgtgtcgcttttctcttttgtaatcatctcctatggcttctagtagtgggtccattaaggagaaaaaaccaaatgggttgatatttgtatcgatggggaagaagaacatgaagtggtttttcatgaagaaaaagaaggggaagtcaagttcgattcgagatggggtcttgttagttgtttgcttacagtgaaagtatcagatttccaaatttttcagaatattatggcagatctttggaaacgagggaagggtatgactgtaaaaattctcgaccaaaatctatttctctttcaatactactatgagatcgatatccaatgagttatcacatgtagtccttggacctatgatcgaaaataatttattttggaacgcttgaaagaaggggacaatcctaaaactcttgctcttataaagctagagatatgggtttaaattcatgatctccaatctggtttcaagactaaaaaagttgttcgtgaggttagaaatattagtgtttatgtcgatacagatctaaataattttacgaggccttggcgggagtatctaagagtgtgtgtttgccttgacataatattcctcttaaaagaagaatgagattttgacgacaaggaggagaacctgttttggctaattttaactatgaaaaggtccccactttctgctttatatgtggcattttaggtcattcagaaaggttttgtgcaagactatatgacactccaatcaatcaaattgaaaaatcgtatggaatctggatgaaagccttatcgaaatgctagaattttttaactgcttccttatggctctggcctaccaaaccagtagttgtctctggtgatgataggaatcaggctgacttgaataagttaatgcacccccacaaaatttggctccatctaaggaccaaattttgcacgagcagctggtagtgtgcatgagatctcaaataataaggtacgtaattgtgggaatattgataatagtattaatgatatcatttatgaaccatgtgatggtcaatgaaaatattgtaactttttcctctgatatggacctggctattatgaagctcaaaagaaaacaagttgagtccgtgtgtactggtaggcctcaagatgatagcagtgtttaatggatcaagatcttatggcccataattttcctgatgtggaagttattgggctttcaaaaagtgagaagaatgtgggttctggtgtcaaggcccaccaatcattatgagtttatcacttagaattgtcgtgggcttgggaactcacagtctattcaattccttgaggacatttgtgttcaaaagaagcttgattttatctttttgtgtgaaactttgtgtagaaaaaatgttgtgggctgtttacgggtctggttaggatataaagattatttttctattgaggcccaagggaggaaatgaggcctagctttattatggaaagtccaagatgaagcccttttacttagtttctcttccagccataacatgttctatgctattcttaccttgtttccgaattcaagtgagttggccgacttgaacggaaaacctcatgctggatggatgccttaagtcacatttatataaacgggtaaataacatgtcaaaacctaattcgggaacccacactactaaaaaaacccaaattcgcgtcggttttacattgtcggccaaagaattcccgacagt

SEQ ID NO: 22841 - DNA, 2844 bp, Cannabis sativa
  modified_base (61)..(64): a, c, t, g, unknown or other
  modified_base (1432)..(1441): a, c, t, g, unknown or other
tgtgagccatgcaacataaaatgaattctgatatttcattaattagtaaatctgattatannnnaatgagttttatttagggtacaaaaccgaacaataccaacataaacttcctcgtattacatatagcgagcagatcacctcgtattataaaaaccacaaagaggacatagcgagatggaaatctttccaacacttagtgttttttcttatcaaaatgtggacaagaaagatagctcgaattagagaagatgtaaccttccacatcaacaataaccatttaaaggataaaactaaagaatggttgggtaattatttagtattatctcacgcgtgatttaaataaaacgtacggattgtccacgtctcatttacaatacttatatttaaatctatcccaaaaagaataactgtcaacctatactcctataaataggggcagatttcatgaaaagatggacgaaaaatttgagatagaatcattattattcaatatcagatattgtactctgtactctaaaaatatccctaataagaactcgtgtagtatgtagattttaactgcaaaactacataaaaataactagagttattatatatattttattatttattaatttttgtagaattcttattatttaaatgctatttaattttatttaacaaaaatttgcgttaataatattatataaaattaattaaaattaagtattatttattataaattacatgtgacatttaattatatatacttcaaaataattttaagcataagtaacttgacacgtaatatatatatttagtatataaattttattaaaaaaaataaataaaagaaaaaagaaaagtaattactaatcattaatagttgataatcaactaattaattaataaattacttaatatataattaacataattaatattaattgtaaagtatataaaattattttaaatattaaaaatcactataaaacaacagttactaataaaaaaaaggcttttttcaatttttaccgaaaaaaagtaatattattacaaaaatatttctagctggccaaataaacaaatatataactcaaataaaaaaattacacatataccacttacacacaccttcaactcaggatccatgctttctgggtaactatcgcgcaaccacgcagcaacccaacacaactgaaataaaaattcaaccagaaagagaaccaccatcaattctggcacgttcacctgagaagacgactaaaatcaattaatataggggctgttacgaattcataaaaaaagtatagaaaaactactacgaaactaaaatgcaactgaaaatccagtttaattagcataaaactaatgtcttgacttgaatcttcaaatccatgaaaaggcagatcttaaaaagtttatctggagttcccaaacaatccaactnnnnnnnnnnccaaaaaaaattacatcaatattataaaatttattatcctagtgtattttcgttgttttccaaatttcaaatggtaaatttgttcatattaaatcataaagagacatgtagatagagttacgtggaaacactgttttaatttttaatgtttcacaacaggtgcattacagctgcataaatattttgctaatagttatttcgtctgattgaaacctccgtctgatacaaccttcggccaattaccacccagaaacttgcgtatgattgaaacttttgcctgatgcaaccttcggccaaccacccagcaaccacgctgcaaccatcgtcttattgaaaccttcgtctgatgcaaccgccgcgcaaccacgcaacaaccatcctgcaaccattgtctgattgtgtaagtgatagtgtaagtgttattttggtaattaaaattatataaaggtataaatattgtcgacaccttatagaggtatttttgtaaataaaatatcaatttatattttttatgtaatagttccataaaaaaaaaaaggaatacaattgtttaaagaaaaaattaagttattaaaattaataatactagaggtctttaaaaaaaattactaaatgttaataaatgagtgtaatcatgcatagttgggattataaaaaatctatttttagccacaacaaaatttgtgactaaaagtgaaaaaactgtgactaattataaattattattcctatgttgttactaaaaggttcatggctaaaaattataatttattgtgactaaatatatttttagtcacaatacttgttgttaccaaaactaaattagtgacaacttgtaactaaatattatgttttagtcataagtaacatttaattgtgactgaaagtcacatttagtcaaaaataaaaaaatatgttgtaattaaaaagttttcactaaaatttacagttttttgtatagtttggagacataaacatttgtcaggtttgactttgtttcttagtttgataaaaaagggtctgctatgatttttgtatttgtattagtttggtttttggttaatttagttgaggtgtcacgttagtttttttttattgttttgaacaacattagatcccaaatatgtttctatcttagaaaaaaaaaaagagagagagagagagagaaagtttggcaggcaacatttagtggtcatgaaggtgatgtggccgatgttaaggaacagagttacttaagctaattacttgttagttattgttactagttagttgtgctgttgttatttagttaattgctttcttgatgttagttactggttgatttttgtaagaaactactatatataagctcagctgtaacatttctttaatatcaataaataaaaatcactttcttcctttta

SEQ ID NO: 22842 - DNA, 3902 bp, Cannabis sativa
tatttttaaaacaaaatatttattattcataacctttaaaatataaagctttacaaaattattggaatcataatctttaacaaaatattttaaaaccaaatgaataggttgaatttggctagcataagaaagatgcctagttgcccaagtattcagccgcaatttaatcttcttaagaattgcatcacaatcttctcgcctccacttagtttatcagcattccaagatagttaagagggaatgatccttctcgaaaatgcacatcatccaaaatcacatctttatcactcgtggagacccccccaaaataaaccaatgaattatccttgttaggcatcaaacctgaaacctccgaaagctctccaaagcaaccttaagatggtggacaaccgaaggtgtacccttgctaaagaggataagatcatccacaaagcatagactaatcaaaaaaaagaggtgacatcgggtccccttgtcgaagaccctttttccccttaaagttgccttgaaatcttccattcatcaagattgtataaaaggtgcctctcaaagacttcataatctacaaaatgaactgtgactgtctgtaggcccgtgatctgtaaggggaaatagcgggtaagctgtgcaatcctacatcgcctggggaagatcaagtgggatgattctaagactgcgtaggtatgggactacacagttgaagagggattaaatggattgattggtactacctttgtcaacaaggtgcatcttgtttttctgtagcccatcacaaaagaaccccacagttaagcgtgcttgacctggagtaattttaggataggtgacctcctgggaagttttccaagaaagagtgcgagtgaggacaaagcacgctcgaaacactcgtattggtttgtagggtcagtcatcagtccaagaagcagccagtgaaatgtactcgtgtataaaagccattattctgtgggtgtaaggacccaatggaggcttgaagcggggatgttacatgaaaatagaaggaaagtttaatccaacatgtaattcctcaacaaatcttcaattcactgtgtcataggctttactcaagtctatcttgatagcacacctaagagagacaatcttcctaccataattctttaacagatcttaaaaaattaagatattacgagcaatagatctattcttgataaacgcccctaattttgatgaaccaacaagtcctttagcaatatatcaaggaagcacttcatcaagtccttatatattgtagaagatattgtgaacaatagatctattgtgatgcacttatatattgtagaacaacaagcaatcgacctgtaatgaatagccctcataggattccaaccgtaggaacaagacaaataatagtttcattcaactgagaacggatcttacaagaactaaaaaactccatgatagcactacacacttcaactccaatttcagaccatagcaccttaaagagctcaaaattgtatctatctgggcccggacttttcaaaatagggatgctaagcatagcctccttgatctccttattagtaaaaggatgaatcaacttcagctgctgagaaagattcaaccgatttccaatatccaaaacactgctatctagccgacaaccaaaagagctacaaatgcccatatagctcttaaaatgatcaatgtagtgcttaaccacctcaggatagtttttaataatatttcctttgtaatcaatgaagcttgctattctattttcctcccttctcttcttaatataagcaaagaaataagttgtgtttccttcaccttggttaagccagttaactttactcatttgaacaagaaaacttctcagcatttttttatgaagcacaaaatcagcagcaacatccgactcttcattcaaataaatctcatctcggctgttttgagcttccaatctagccacaagaaacatgtctctagctttcttgtagttagactccacattaccaatcctggatgtattaaacaccttcaacacatgtttcatctgagccaatctacaccagatgcccattaacccggtagcgttcactggcttttgccaaatttccataaccagatttttaaaatccctatgttcagtctagtagttgaaaaacttgaaaggcttcactcctatctcaaccataactgttgaggaaatgactgtggcacaattttcagaatcctcttcccagctgaatgtagccattgaattaggaaataaatcaatccattccccattcttaaatgcatggtgaattcttgaataaattctatcgtgacaaccttggttgttggaccaagtaaaaaatgatttggacctcttcaaagggtccacatgacccaaactcaacaaattattaaagtctttaatctcattccttgacattggcttcccaccaactcaatctccatagtgtataagggcattaaatcacctagaataatccaaggtttaacagggaaccttagattaactaggctcttccaaagctccttacgctcctccaaacaattcaacccatacacaaaagtcgaacaaaaagcctgagtatgactagctaacttcacataatgcacattttgacttgtttcttcaaccactatcaccctagcaaaagtccttttccaaataatcaacagtcttcctgcaataacagagctaatataactatcccaacaaacaaatttattggacatcatagctttcactttctctcctttcaacttagtctccaccaaatctccaactccaacctccttaattcgatagacattcaacaccgcctctaactttttctctatattaaggcccctaacattctaacataatatattgcaacaattcatgatgaaactaattcaccaagttctccatgtatcctactcacctttttctgtaacatctcaaaagagtttctacccttgttatttgttccctgatccgaagcaaattgcttagacttaatcaagtgagttcttttaggtgtctcccaatctcaatcaactccttcttctttagagttaactgttgaaatagtacaaatatctccctgttttgaattacaaagagcctccccattattatggaccccaattgtccccaacgacttacaataattctcagcccccttaccttcatcttccttttccaagcttttagcttcctttttaacagcctccttctctatatcttttaattcaacttccttatcgttattcttctccattcctcctcctttctccacttttttcacccattgtttagtctcccctttctacaatcagccatgataaacccaaaaccccaacaactcttgcacttaaccggcaaccattcataatctaccccttacgcaattagtctccctttttcattgataaaatgaataactctcggaagagtatcagttatatcaatttccaccaaaattgtagcaaatttaaccatggaccattctttagttactttatctacaatgatagggctcccaatagtactgactaaagcactcaaacacttcttaccccaatattacagacccaaatcatgtagtcgaattcacaatggtactaatttaactagtttaacagcatctaaataagtagtccaaggtctactaattatcggtttccgattgaattgaaccactccatgctccagcacatgatagcttcatcattgaacttgacaatggtaagccctccattcattcaaataatttgagcaattcccggctttccccatatccttcgcaagaacccttcgaagattgcaaatggtgggttcacacccaacaccacacagatcacagcagtgctccaactagctgcctataactctacttcctcagcatcaatttggggga

SEQ ID NO: 22843 - DNA, 1751 bp, Cannabis sativa
aaaaaaaaaaaaaccaaaacaaaacaaagcctatcggacttgaagccaagaaaaaaaaaacccaaaaataaatcattcgcaattttgcttttacatggtgatgtgatacactgtgcaatattagactgtgtgaatatgttttattttaaaaaaaaaataaggacaatttttttgtttgacttgagaaaacataataaagaaatatatatataaaaaaatgtgttgttatcattctttatttttttggagtgtgtttgttgtatgattttggctcatagttttttttcttacattttttgatttttttactatactgactgttaaaaaaaatatttaaggaatttttaggtgattctataatttaggttttttttgtgatagaattgtgtaatcctatttaattttggttgattttgtggaaattacataaattatggtagtttttttttatttaaatttatatggtagtttttaatttttatatttttatgggatttttcctatatatatgtttagtttttttttctcatcttgaaaccagtttctcaattttttgagtgcatgatattaactatatttcttttttgttggtaatataagtgcattttatttatgttatttttcagctaaattttaatttgattattttaaggatcgattcttaatttatttatttcaaaaatcagcttttgatttagttagttcaaggaacgagtttttttttagtaattttaggaatcgattttttatttagttattttatgtaactagttttgtgttattaggttttttttagttgctttactcaatccgtttttttgtcttagatttttaactagttgataaacgtaattggtttctttgtgtcatatttcaatgtctaactctagcatctaactccgttgacaatttttctgacacgtatgaaaattccggtgactttttcggcgacggtaataaattatagtaatttttttggcgacgatggttgctccgtgactatttttgcgacgatggctgctccagcgatttttctggtgatgatagctgtttcgataacttttctgacgatatttattcttaaaattcatgttaattttatttaaaatattttgttggggtattcattcttaaaatattttaattataacatgaaatttttgcatgtaactataaattacgtcttattacaaataaataaaaaaaaacactcgtgcacttttacatgaatgaacaataccgtaacataagtatgaataaagtattaaaattttgatttaaaaaatgtattgaaattttcataaaaagaaaaaaaaattgaatagtgtggacataataaaatatataaatcttatttttggcattataaattactcaaaaaatttaaaattttataagaagtcttaaataatttacacaatttataaaaaaaaaaatagattaaaagactcttttaaatgttgaagtagtctacagaaacactcatttataaagaagtatatgtattaaaaatttatccattattatttattatcttattatttataagagaaaagttttgaataaatagtgttgaatatattatacagtatataatagttaaaataatttgaaaaaaaaaaaattaaaataatataaaaatatttaacaaaatgatctaatatgctaacatccataggattaatatatatcctaacgtatgatccatcatgattggttgaaaaaccttcctcatcggtagggtaaaaagg

SEQ ID NO: 22844 - DNA, 5290 bp, Cannabis sativa
cctgatcttcgaccagagtatataagagccgcagtggccaattgctaccccaaaaaaatagagagaaagacagaaattaatgacccttaaactttgaattttcaataaataagtacagtttttcaaaattgaaagattactgtctgtttcattaggtggtacctgcacagtgagaagtgtcattgaatatgaatattgcataagaatggctttgttgataaagaccatggccatggaagcaaccccatatgacaaagcagcaaacaaactatgaaaaatcacaaagtaaataattcattagtattgataaacgaaacttaattgagttaagaagcaaaaacatataatttaaattaactaacctcaaaaactgactagattccggatcactacgattctccatggccaaccaaagaattcaaactgacccagattcaaatttcaaacccaatatctctatcaaagtttctgaaacaagataagattgaaagaaacataaaattaaaatctttttaacatattctacgaatcaagacaaacccagatcataaaaacgaaataagaatcatgggatccaacagaaacgacaaaatccagaagaaaacataagaaaattgaaaaattcacctggtttagcatttacatgacgttgttgggattgaaaagaaatgacgggaaaagggggagtgaaagtggtagagagagagagagagagtgtgtgaagattggttgcgtggactgtggtatagtaaaataaatataatagtagaaatatagtaatagaaaattgagagtgaagaagtgatgaaaacagctggcgaaaatgatcttcaccattgccatagccatcaacatcaaggtgcctctgttttattcttgctccttttttcttttttggagtttgtaatacaagctttttatattttttggtatctaaataatttacttttaattttgtattggatggtgtgtattataaatatattgaaaaattttaaataatttgaagtgtgaaaaataaattattttgaataccaaaacagttaggaatgcatgcatcggtgcatctattttaaggaggtgcattgtagaattatttcgaataccaaacaatctatttcacatgtgtataaaataaaatagtcacgcgtggaatacactgtttgaataccaaaacagatagagatgcatcagtgcatccattttaaggggtgcattgtagaattttccaataaaatttaatgtaaatttgttttattttatgtgtgtgtaaaataaattattttacaattattttttataatttaaattattttaaatttacaaaatattattaccctcatgtatcatttttttaatttttttttttaaaatttatagtttgggttcttctactagttgctaatgtgatatgatttctatgtgggttgttatataaattttagttgtaatttatgttgctacattcgtttttacgtgagtttctatccctattattaataactatagtaattagtatgtagggtaatataacaaaaattaaattaaaattatttagaagccaaacatataaaaataaagttattttcttctcttcttattttttcttcttcttcctttgatggccataccaatcaccactctcaccccacaaccaccaccattatcatcataaccaccatacccaccactattatcaccataaccaccacaccatctccattatcaccaccactatcatactataaccaccacaccacaccattgttattattcgcaccacaaccgaccacctttagcactaccactgtcacaccacaatcactgccattatcaccatcaccgtcacagcacaactcccaccattatcaccaccaccgtcacaccataaccaccactactgccatttcccctaaattaaacaaacaagtaaaacaaattagagcaaacacacattcttttcgtccaaaacaaaaaaaaaatatttgaaagtccaaatgactttggagagatggcgagagaaagcgaaagggaaatcgaaagaaggcggtgatggcaagagaaagtgaaaaccagtgagccccaattgaagaaccatctacatcttccctatcaaaacaatcaaaagaaggcatcaacaatgtaattttggtggtttcaagggttggggatctcgaatttaaggttttgaggttctaggttggggcttcgtcgctccaaggtctcggggttctctggactttcgggttctaggttggggcttgtcgtcggtcagtagtgctgtaaatacaggtcagacatttttacacgacacgaaattggcacgagcataactaggcacggagaatacgagcttgggcatgacacggcacgatgctacaaatcggtacgacacgatacaaaaaatatgtccttaagcacgagaagcacaaaaggcacgacacttaagcatgaatacactagcccgaaaagtccgacacacgacaagcccaaaaacacgacatattataaaatcttataatttattaataataataataagatatgaatttatcaattatagataagttaaaataataaaaaaaaattaaatataatactgaatattataattctataattaaaattattaaaatatgaaaaactaatattatatactaatttatttatagggtgtgatataaaaatttgagtatttataggtaaatattcaaattctaatgatgttaataattttttatatgattatctgtaaaatattattcaaaagttatataaatataactacaactttgaaatatacatataatttagtactggtaaaaaaaaatatgaaaaagtaaagcacgaatttaagcctggatatgaaaatgggttggcctatttaagaaatacgggtcggcacaagtaaggcacggcacgtccaaacacgacacgaaaataccgggcctaccctttaaaaatgatggcacgacacgaccaggactggacacgacacaacctacatttttctgtggcatggaacgacccattttttgaaaagtacggataaatacgggtcgggccagcacagcacgcatgaacttacacccattttttgagagattctctcataaatatcagtaatcgaattcagctatagatatttatttatttaaataattaaatataatttaattaaagtgttttaactattataaatagaagcctgatttgataaattagatacacactttgacatgcctatttttgagagagagagagagagaaaattgtttttctctcaattgttcttgcccatgtgttgagaactcaacaagaacaacattatatactttatccaaatagcccacactagttcttgtgtgtggtgaaccgatttggaagacactagtgtgagttcaattgcatcatccccatcatttggattaaggatacaacatacaagaagtttcaaggatactctgatagtcttcaagaggtatatgttctaaacttgtatttttatgttttgatttaatgtacacacatttggagatctattgggttatgatacaatgataatcagtaatacaaaattcttccgttgtgtacctaatttagtaccataaaaccaacaatgaccccaatcagaaaaagtggcggcaaaactcccatccgtgatgatttcattgcacccaattccttttcgctgttaaatgtcacttaggttcgttaagtaccaactaagagacacgtgactatattttaatgggctgcatgttatttaattactgaagtattcaaaaactattttaaaatatatttaattagttaaaaaatatgaaatagcatggcagatttcaaagtaaatttagtggccccaaagtaaaaatgttcgcttggtagatttcaaataattggattccatccaagtttaatttgaatatgcatggtatgcttactgatggcctttgtcttttatgtgactcctaggaggagactactcatcatactttgtggggatgttcttctctttctcaatgttggaaactttgtgagtttaaccttggagattcttttgtcacttgtactaattttattagttttatttatctatttttggatcctatgcctaattctcaagtggagttagcccttgttatcatgtgaagattctggtataagagaaataaaatggtacataataactatttgatgtctcctgagttggtggttaattgggctcgtgatttcctgagtgattaccaaaagccttttttgggttccaatgagattagttgtcagagatctcttgggatgtcatgcctatttcctctcctcctattgagcattgttgggcacctccttttacgagttgtttaaagatcaatattgatgcgtctttagacttggaaggtagtttctgtggcatggacatggttatctgtgacgttcatggagttgtttatgcctcggttgtttggcacgtgattggttttttttcaagttgaagtagctaaagctcttgcttttcgccatgcaggaatctaagtcatctttttggtctggataatatccaatttgaatttgattgtctgaatgtagttattaagattaacaacaatatttctctagactcgtctctaggcttagttctccgagacattcattgtattttggctctctttcataatgtgaatctttctcattgttctaggacagttaacgttgttacccataaccttgctaagtatgctttgtctgtcgctactaataaagtttagttgtcagattatccaaattgtattcaacaatttctcatggctgatgccatgaatctttaatgacatccccctcttcctcttttttgagagcttttgctctttaggatagagtttaggaattttcttcaaaagcgaaaaggaatagtataaaaatttaattaattaaaatttttaaaattacttttttttaaaaatcaattatttatttgacatgtgacccaataaaatatcaacatgtgtctcttagttggcacttaacggatgtaggtgacatttaaccgtgaaaaaagattaggtgcaacaaaatcgtaacaaatggaaattttgccactgtttttgtttttattgagatcatatgtgtaacaattataaatattaagagagtttcgccgcaaatatcccaaatttatgtttagttctttattcttactatcttttagttcttaatgggtgttcactgactctattgtggtttgccaaatctatagaacaaaaaaaatattttcattcaatttttttttttt

SEQ ID NO: 22845 - DNA, 9654 bp, Cannabis sativa
  modified_base (4472)..(4472): a, c, t, g, unknown or other
  modified_base (4932)..(4936): a, c, t, g, unknown or other
tttttttttttttttgctgaaaacatttctctggttcatatatttatagcccatcgaaaaacaaaaaaaaagattcattaatttgatgcaaactagatactcgaatccagccaactgtctaattaattattgcttcattcataaaattgtgtctttaattttgtgaacaatatgcatataattaaacatgaattcgtatacattattatactccattcctttttctaaacaaatatcaacaccgttattgtctacatgtggaagccactttggctcccaaaaaaaaaagcttacaatttttttttcataacataaattttttataattaaatataacttttagtgacaacaaaatgttatttgtgactaaaacatcgtatttagatacaaattatcactaatttaattagttttagttgcagtaagtattgtgactaaatatacattaatttagtcacaacaaattgcaatttttgtgactaatacatttatccactgacattttagtcacaacataagaataataatttataattagtcataactttttattttcaatcacaaattttgttctgactataaaagtaatttttttatagtgactatagagtaaatggtcgctcatcggagcaacctatttccaaacccaagaaaaaaacataaagggtcgagatcctttaattgaaatgtagacaagaagcaataacttggtctacataaagggtaggggatacttggtcgacataagtcgtttgtcgacaaagcacataatttttctggcaaaatattttacgctgacgactttcttggccagcataagttccaacgctggcattaagttgtcggctgaggggtgtctgacgaagttatgccagcaaatcaatcaccggcaaaactttcccgccatttttttccgtgaaagctttgccggcacaccttacttcgcctgcaaaacattgcaaaaaaaattatttttgttttgccaacgatgtaaatttcgacgacaaaaggtttttttaaatatttttaagcatctaataaaactaaagttaaactaaaactgaaactaattttttgttaaataataatatataaatataatttgaattatattataaaattaaaatttatattataataacaaaaataaataagctaactaaaactaaataaagtattgttagtttataaaaattagtaatatttacaatgaaaattgtaaactaaaaataaaactacaagttagtaacattgttatcgtcaacgtcgtcctgagtgggaggggcagcctgtgaataagacccaagaccaggaggctgaaatagtagaattagagccatcgggtgcaaattgaagacgggaacgatgtcggccagttgcctaaattactcttgaaacgtgtttaggaattgatgctgagtgtacatcatttgttgttgccactcattccatgcttcctgctcttccaccctttgctttagggcctcgtactctttttgggtgacagaaggttggtcggagggacctgccctctcggcccgccctaagtctcggcaattgtctcagtccccttaagtggcgtgaccgctcacccagcacttgtgtcataacaggcatgggtggggtcgacattgtggacattggttggtattggttgagtttcacgaatcttaaccattttggcctataaaatactttgaacaaactattagagctgaatagaaattaaatatagaacgactttcttaaatttatatcacatgcagttgttgtgtgtgttcatcgcgccatttgttgttcttgtagtggaacatttgaaaagtgcccacggcactggaaagatcccccgtctcgggattagtctatttttatagataaaataaattagaaatatattattcaaaaaaatattaatttttaggcaatgataattataacatcatacactgctgacatgtggctaactatagtcttagacctccatccaccttgaattttcatttgggctcagtttttcgcattttgcttggctcttgcctgtaatttaaagtaaatttattattcgcaaaataagcaaagaaaacataagttaatggagattcaattttataatacttttattttctacttgttgtttttggtctttacagtatgcaataacctcagctcacacctctggtgtgatcacatttggacgtaatctcttagtcccttcttcctctccatatttctcaatattctcattccatgtctttttcgtgtttgatctccagtcatatagctcttttgacattgatttaagaccgtagtccacaaacatatataagattgtcagttgggaactcaaacttggtttaagaaaaataaacattaaagtcatatataaatttttttgtataatagttttgtttgatctattacaataaaaatttaaaagttaccgctagtctgtcccagataatccaatttatctctctctccctccctatttttctaaaatatgaaacttaagtacgatttactatacattatacttgtagtgtatgtgattttgattcaaatcatatatgtagataaacatgtacgtaaaggtgttgtatataattcgattatgcatgacttggctgatatgtaataaatattttttattaacgtgtcgtttattatgaaaaaaattattcatatcacaaaaatgatcattagtagatcaacttaaatcctgagtacacctaaacttttgtttgtgttttcattcatttcaaacacaatcttatttattattttctaactttcaaagcaattcattacatatgataatattagatttcttaattataacttgtgttcatacttgttaccaattttttaaaattaattattgtttcatataaaattaataaataaagttagaacatgataatttgcatgtattatgctgcatgctttaattaaataattgtttgacaaaagaaatttgaaagtcatcctcttaatatatgatatagaaaaagaccattataagaagacttatgaagttagaacatgctaatttccatttttctatttaacacaatttcgaatttttattttaattccatgtgcgtaagtagtttaattaaaaattaaaataaaactttattaattaaaacatcaaaaccacgttaggcacattctttatatttaacaaattagaaaaaaaaaaaaaaacttgatataatttttcaatttttttatttttacactacaaaacagttttatttttatatttttataaaaattctacatgacaattaaaaagtaacctacatatataccaaccaacagagcaatttaaatggtaaataaaatccacataataacccacatacaaactacttgagcaatccaaaccgtaaatttaaaaaaaaatgatatatataaagtaattttccctatataatattaataaactcataataaatttaattaataaactcacaatttcataaaataaaaaaaaaaataaaatgagtattaatataatattaaacacaaatatagcgagtacttagatattgaataattaatgtgggaaaattacgattaatggtgcagagtcaaatcaactaaactttaaacaataaaagaattagcaaagacaagattatcaagaattcacatgtgataagtgcaaccggagtcaagaatccactccctgttaatagatgactctgagatagagaacaactctccgtggagcaattatcattatcttccgcgattgcagcagaatccttcccatggtgatggtgtcagaagtccttcctactctatctgtaagatttgttgaagccttgttgctccttgtacttcttgcaaaatctttgcaagtttccaaaccctccgcagaagtaacacttccttgtttctttatctctagactttgatcttgattgagagtgatggtatttactctttgaacatactttctcgggtgatctttctcttgccatgatatatttcttctttcttgaattccttctcttactgtaactaaaaatctttcgacttaagtccggcaagaacatcttccaaagcaataacatctctatcatacttgatatatagctgccttgacttcttgatatgcgattggaagtgatctcaacagaatgatggccttgatttttcatcaattttgtgatttatattttctaatcctaccataatctcattaaatctatcaatattctcattaaaagaaaggaaataaatcattttgaacgcgtataacctttttaacaaattaatcttactaacaattgatggctttaagtatatttcttctaacttatttcaaactcctttcgtcgtcttctctgcgatgagtttccttcaaacactatttgataaatacatgatgatcgtgtagtacgccatttccgtcatttctgctttttcctctggtacaattgagtgagagcgctaatcanagatacagaatctatagcttctttaaatacatgaaagtgaaacgataatttttttcgagcttggcttagcgagattaaatggtggagtactcatttgagtaattatattagtttactgaaatatcatttacaaggagctaagttttttaaggataaaatacattgaagctggtggaacagtaaaattctccctactcaatgtagatcatttatagaggatcattgattatttggattgaaacaatagataattaatagtatatctatatttggaacatatagagtgtgctatataattaggagtgcaattccaaatctatagtggagtttggagaaattaataagatagagaatttacttggtaaattctagaactatttattgggctgttgattatataggcccatagtccccacactagttgagataatattggcttgcagactcagttaattggttnnnnntaatcaattagaattctaaattagactatgtcttatttaataatgttcactaagcaagggcttaattgagaagaaaagagattttaggatttgtttattaattaagagactttgatgggtctaataaataaataaattaaataaaaattttatttgataattaattataattgctaatgttgtggtgatttgcatacgcatgtgtacgtatcgtaacaagtagtagactcaccaagagtgaggctaatcccacgaggattgattttgtctcacgtgggttttggtggtttgattttgcttccatgaacatgtgtagctaaacactttattagggttagatggatattgtttgatattgctttatggtattaatataatttatttccccccagtttctatgtattctatttcatccgtgcttaactacttttaattgcctgatcaccaattaaatgtctatgattttgatgcgagatctgagaagtgagtgtcaattgtgctatttaggagggcgggccgcgaccccaaaagggctgggccgcggcccatgttggagttcgacggtataatttttctactgcgtccgctgatagtatttaggccataactctctcggaattggatgatcaagatgttccgaaaagataaaagagagatctagaacttttatttttcgacctttttcaaaatctaatcagaagatagtcgaattcaggcttgaagttttagctttatcttttgcataattttctctattttaaatatcatctttttgtgagatatttttatctttttttcccatctttttcctctgatattttctaatcttcttattttaaatctgcacaaataaaagataacaagcataaaaatgctccaaacacaatttaaaactaattaaaaatatactaaaatgaatctaaatttaatactaaaaataacctaacaaattctatcacaaaagaagatctaagttcaaatcttggcaatagtctgtgatagattggaacaagggttagagatctgaacggaatgaaccataaattctgctgccaccaatgtaagattttctacaattttatatatgtttattttattgttttagattcatatttaggatgttagtttatagattataatcaaacatacatattagtaaatttagatcctagtaaaataagttccaacatctaggtctcaagacgagtttaaggctccggtctaggtcaggtttgggtcagagtctaagttggagatattataatacaagctaatacgatcatttgttattaaataatatgattcaaggtggaatcaataaaatatttctgatttatcaccaaaaaaaaaaaaatacgattcacattgctttaaaatgtatggtcgtataataattaatacaatacaaaattttattcatgtatagtgttaatttttatttaatattaaacaatctttatacagccgatcaaacgagccctaaaactataaataaataggtattatataaacatttagtaaacagtactcaacaaatttattgcaaaatttgagtttttatgctctcaacaataaaatttgaaaattttatttttagtgatctttcatcattcatgtggatatcattatagtttgattaattaaaaatttgattttcatgtagcaaaaatttaagagagtgcaaaatgtggtaaaatagaaagaataatttaaaaataattaagaaaaccattaattatatatagtaacaacatatattagaacgtacttgattttttttttgaagaaagtaatcaaactttattaactttcaaattcagcaaaaaaaaaaaaaaaaggaagcacatcattattaatttgacgagttcttaataaagaaatgtgattaattcatagaaaatttataattactttgatgagttgtagcaatttattatgttattgcctcatctctcaactcattgcaatttttatttgatgatgaaactggttaataaaattttaataacataataaacagaaactcaattcatgcactgtaaaagttttcaaacgtacgtacgtagtgattatcattattaattaaggcagtgtttcataggtggtcttaatctccatgttgaaaacattgactccggtatacatcccatcttccatctccgtgattttggaggttccgtcgtagaaactgtccttttgagcataagagaatggaacttcgcacgtaccctccgtcactacaagagtaattattgctctagtctgaggaggcactccaacaacgtagttagtcttagttgaggtttcgaaagttgtggctcttccccattgccctacagcagtaatctgatcacgcgacaattcaatcttgtccttattgatgatcagtggaattgaatagatttcaacggttggtttaacatctgaaactagcgaaatactgttgcgaagagcaattgatcttgttttattgtactcaaaagtcaatttcatagctctatgaacatcctcggggttgtctgccactgcctggctcttctcaatgacattgaggttataaattcggccctcctcgtggcggaaattgatgttgtagattttcttagacgtgacgctctccaccaccatgaacttggttttatcgataatgttagtctcattagcataaagagctgttcttgaatgaccagaattttccacccaaaggaacgtgttatcacccatttggcgcaataccacgatgttgtcagcgactttgatgggaaggaatatcgaatacttgtcggcagagttcttagagtccgctatgatgtacgtggcagtgcacctccagaacaacttggttgaaaggtttcttatgcgaacataaccatcgccgatggtggagatctcatgagctactgattgatcgacgatatcaacgtccttgagctccctcataaactggtcttgtttgttggtgacataccagcctacgccgctatgcgacttgaaggcgacagtatttttgggaaatatgacaagagattcccaatccaagattttgaaagtatcgaaaccatcaacctgggtgtcgcccgcataaagaccatcctcgtaagacttttcccacttggaaagacaagcataacgtttggtgacatgttgaaatcggaaatattcttctccaccaatatcaaatttgataggcttgaacaaggtatttttccaatctgtttcgtcttcctcaaggggctggtcagccgaggccaagaaataccaggaataattggattgcatggtcaagtatttgttgttgtagcaataacgtatgtgaacccatcccggttttgtcttggctctttccaattcgaatttcaccaaaggactcgtaacgtcctctcctcgaaaattcacatacgtttctgagaacccttttgtgatgctctcttccttgcttatctttgtcaagtactttccattgtgcttagatttgataaccacaaatctcggcaaatcagacatttttttttctatataattagtactgaatgaatacttttgtaatttggtgaattaagttgacataagagtttgtctatttatagatacattaatgtagagagaaacagagagagttgagagatgtactaaaaagtaataaacggattacatattgaatattattaattaaatgacgaagatctccaccattattggatccaatctgaaacctaactactctaataattagactctaatagctaacattcatataaatgacacatatagacgattaatgttataggttactagtgatgtactctagcatttttaggtacatgtcgctttaagatatgttaacgaaattttttagaagtagtgtatacatgttaaacaaaaaatagtgatattaatgcataaaaatagtgtattaaatactacaagtatcttttagcatttaattaaaattaattattgatattgtgttaaattaatgatggtacattcttacaaaattgatagaaaaataaaaatgctctcagaccaacaatccattagatatagacactttcataacataaggatgtaattacagattaacttttggtcttaccgtatcaacattttctccggtttggtttcctataattattataattatttttatatatatgattaagtacattataactataaaaaaaaaattaaaaagttttgaaatatttataatatttaatataaaatttaaataattaattacacacgttctatttttgtattatagacgtaaaatcattaatataaaattggattttagagatggtttttaaagtctttcagcaacggttttggcaaaattttctaccgatactgttttaggcgacgctgtaggggttaaaaacaaccgacgctatagggactctatggatacgattattatgaaaatatagcttccatagggtccctatgacgttagttattatgaattaaccgactccgtaattaaggaccctctggagtcggttattatgatataaccgactccatatgggcttcctataatttttttttcaactttaaaattttgtattttaacattattttttttatttttattgaaaatatgatatttttttttcatatacattgttttactattaatataattaattaagtataaataatatataataagtataaataatataagctttatattttataatatgtgtttg

SEQ ID NO: 22846 - DNA, 3105 bp, Cannabis sativa
tccctttttataaaatgggttaaaaaaggaaagctaaaggcccatattgtagtagtgcaaaaaatgtgaagttagtgagtcctataacacaaggagaggagtcgcagccaaaagggtgaagttagtgagtcctataacacaagtagaaaggttttcatcgctctgcatcgtttctaatttctgttgaagaaattaaatatatacctgttatataataaagaatattttaggtattaaaaagtataaatggacatttgcttaattattttttttaaaaaaaaacattaactattaccaaagttagatatagggtcatttatttacatttctccatttttctcacatattagtagttttttgtttaagccattccattaattgacctggtatatggaatatacttctatctatttttactatgataaagtccctcctagaaatatttatatatcataaaagtaaattaaagaccaataagatagaaactctatacaaattagttcaaatagtattgatataaagagtccaagggtcaaagcccgagcaactctaaagaaatatatctctgtgtgcattattgtacgtagtggttgaagaacaatgctctgtttctttttataagttagtaactaatgagctaataactacttaataaaaaaatgaccattaatgtctttatcttatctgctacacattattatattaatgataaatagtacactacctctataggctgctaatttgatgtaatatacttattacggatccatctataaatagacgatttggggtgcatttgtttctcaattcttcaaccaaagcaaaaaaaaataaaaaaaaaaaaaatacattgattctagctagatatcacatacttaatatagaaaagaaaatgaagggcatgcattacttactagctgttgccacattggctgtagcagcctccgttgtgtctgcctatgacccaagtcctcttcaggacttctgtgtggcaatagatgatcccaaaaacgcctgtaagtaatgtaattatttgattatgttatgtcacctttattttcttaatattatcctgtatatgcttttaatataatcgaagtactaacataactaatttgattataatattgtagcttattataagacctttgaaagtgtatccattatttattctacataagattaataataaatcatcatgtttgaaaatggactctcttaaatatattttcgtactctaatatagtgctatatagatatgcattattttgttttgaattttatgtaattataacttattgaaactagacaaaatatcattttaatacctcaatattcttttatcattataagttctagcctatctattgtggaaagtactattaaaatctatctatatgtatatgaaaaaatcatctcaattgaaaatcatgtatctttcaacactaatttatttattaattgggaaattaaagatatacaactgaatttagaagacattaattaatttatgggaaaacgatattaaaatatatatgttatacacaagattttatttttaataaacaaaagacatcaatatactctataatttttttaaaaattaattttaatatttttttaaaataaattcacattatttttatgttaattttaacacttattttaattttaatttcatatctattttcttttttttttttgaaatcatgtattttattagaaaaagaaatcacataattttttatttcaattattttgtcataatatttaaaatataatttatttttatttgattaataattttttttttaagaatatgaattaagaaaaaaaaaacagttaaaaaaaacttaatttaattaaaatataaattttatataaaataaaaaatattaaaattattaatctttatatattttttagtgtaaataaaatttccctatttatagtttacagtcacgttaacattaacattgtgttatttgttgatgatgatgagcagtgttcgtgaatggaaaattctgcaaaaacccaaaacttgtaaaggcagaagatttcttcttctcagggcttaacatcccgggaaacaccatgaacccagtcggatcaaacgtcactactgtcaacgtgggcaccctacctggcctcaacaccctcggcatctcactggtgcgtatagactacgcgccctacggccaaaacccgccccacactcacccacgagctagcgagatactggtggtggtggaaggaacactgtacgtggggttcgtgacctcgaaccaagccgacggcaagaacttgctcttcacaaagatcttgaacaagggtgacgtgttcgtcttcccgattggactgattcacttccagctcaacatcggaaagactcccgcggtggctttcgccggtcttagtagccaaaatccgggagttattaccattgctaatgctgtgtttggagccactcctcctattaatgctgatcttcttgctagggctttccgtttggacaagaatattgttcttgaccttcagaaacagttctggtctagtaattaattgatgattgggaatagtgaaagaaaggaaagggagtcttggagttttaataataataaaaagtggatatacatatatatgtgtgtgcatgagatcatacatatttaatatttttctggctgattatgtcgtttttatgttataataaaataaggagaaattaaaatttctttcatacatgtatgttatatatatgaaagaactttctttctctcattatatattgtgttttgagcttggcaatgtctgtatttataattgatcgatctcttatatatattgaatctcaaagtttattatttgagtacgtaactctttcattaacatatatatgtacctatatatatattatacatatacatgtatgtatatatatgtatgaaaagaagttcgtttaattgttttagtgatcattctctctagtgtcccaagatccaaacccatcaatcttgttgatatgataggtactgcccaagtaatggaaataaaattgtatatcaaaattacttttggccatcgaaagtatcaaaaccaccgacaatt

SEQ ID NO: 22847 - DNA, 3579 bp, Cannabis sativa
  modified_base (1726)..(1737): a, c, t, g, unknown or other
  modified_base (3552)..(3554): a, c, t, g, unknown or other
aaagttcatatttagggtggtaataaacatacttgtgagtagatctaagatcctggtaaaataaattccaacaagttttagtgtagtggttaagcaattttacatttatcttaactgtcaagtgttcaaatccaatattttttatttgtttaatatttaaagtttattttttgaaccttttctaaaaaaatttaagcaaatatttttattgttattttttaaaaaaatatattttatattataaaaaaaaatacatgtgtgttgatttcaacatgttatattatgtagaaaataaagtacgccctcttcttttaccaaaaaaaaaaataaataaaataccccctcctgcaactaaattttaggtccgccctaggctaggattaagggtccatagacttgacggttaaatattttgtatttaatctttttctatgttcaataaaaagtttataggagtcttccattaaaagttagtgtatgaaagaaaaatagccaaattaatttgaataatgtacaataaaatgatgagcatggttaaaagatgagcatggggcttggcttgactgggattctggcttggcagatcatatggttcatttctatactgagttattcactaacccgggtgttcagggacacgacattattgatgatgttactagctcaattactcaagaaatgaactctaatttattggcaccggtgtcttttgaggaagtaaaagtggctctttttcaaatgcacccagacaaatctccaagttcagatggaatgactacagaattttttcaaaaatattgggaggtggtgggtacggtcgtggtgaatctggttagacaatttttcagctctactacacttcctgatgatctgaacaacagacatctagtgcttattcctaagaagaaaaatcctgaagttataggtgatatgcgcccaattgcactctgtaatattgttgcaaagttatttcaaaggtgatggctaatagactcaaggtgcttttgaatgatgttatttctgcatctcaaagtacttttgttccaggaagattaattacggacaatattatagtgtcatttgagatcatgcattatctcaaaaggaaaaatataggtaagctgggacaaatggccttgaaactcgatacaagtaaagcttatgatcgtgttgaatgacctttcttggaagctttgcttttgaaaatgggtttcatgccaggtgggtgcagttgatcatggccttagtcatctcggtcaggtattggattagttctagtgggtactttttgggaccaattgttccatctcgtggtatccgacaaggcgatcctttatcaccatatctttttattatttgtgcggaaggcctatctactctcattcgcaaatatgagtctaggtgttggatcaaagggtgtcaggtggctcgtggggctccttcagtctcacatatgtttttcgcagatgatagttatttgtattgtcaggctcttgaggtggaagctgaaagaattatggcacttcttatgagttttgaacaagcgtctggccaaaaggtcaatcgtcaaaagtcctcaatattctttagtaaaaatactcctatggatgttagaggtagagtgtgctcagggccggccctaagcataggcgggctaggctcgcgcctagggcccactcattctaggggcccaaataaaaaatatacatatttttttttaataatnnnnnnnnnnnncatttatctttatagtaagagcccaatttttttttcctatggcccattttaacttagggtcagtcctgggtgtgctctattcttgggatggttgaggctggtgatgatggcttctatttgggtcttcccaacattatgaaaagaaataagaatgtggtgttgggttttctcaaagaaaagatgaggaaaaaagttgacagttgggatagcaaattcctgtctcgtgccggtaaagaagttcttttgaaatcagttgccttatctcttcccaattatgcaatgagtgtcttccttatgcctaaatgtatttgtgaggatctcgaaaaaatgatgcgcaagttttggtggaagtctaactctaaacaagggaatggtatacactggatgagttgggaccgtttgtgtgttccaaatgatcaaggtggtatgggatttcgccacttgcatgattttaatgttgcacttcttagaaaacaagcttggtgcttacatactcttaaagactctcttgttggtaagttgttcaaagctagatactttcctcgtgggtcattcattaatgctgaattagaaagtaatcctagttacatttggaggagcattcttgaagctaaagatgttatcttaaaagggggtcgtttgattgttgggtcgggtgaggatgtatccatcattaaagatccttggttgcccgacagtgacaacccctttgtcacatcctttcatccaagcttgtgtgattaaaaagtaagttgtttgctggccgtggatcctagaagctgggaccatgagattgtgtctgatttgtttaatagtagagacagagatttgatttttagcatcccaattgcttcttcaggtgatactgacacttggtattagagtaaggaaacctcaggtaaatattctgtcagatctgcctacaaattgattcaagatttaaagtttcctctagccctttaatagcaactcaagtttttcgagtgagctgtggaagttgaaggttccctcaaaggtaaaagaaatgttttggcgagcgttgtctaactgttgaccaactcgttctcagctcattcaaaggcatgttcaaatctcctctatttgccccaggtgtaaccaatcggctgaaacaatcagccattgcctggttttgtgcaattttgcatctgcttgctggtgtgaagttggtttgcttcctgggaatgttgtgttttcctcatttggtgtctggtttcaaaatcagtttcaacggtggagtaaggaggatagacaaatgggtgctatgttatgttgggcaatatatcatgatcgatataacaaagtgtggaatgggaagagtaatacttttaaaaatattgttgcctttgctaaaggtgatcttgaacaaaggttatttgctcacaataactcctttaatccttctcatttttcgatggaggttggggaaaaggatgagcaatggtatgctccattaggtgataattacaagattaatgtagatgcagcaaaatttgagggtgcaaacagatttgggtatggctggatctttcgagatgtaaggggtcatgttttacaggctcaataaggttcttgggttggttgtgttgattcgggtcttgccgaggccataggtgtgaaggaggtcttaagttggctaaagatgtcaaatgtttccaatgtaactgttgaaacggatagtctcatcactgttcaagctattagaagttcggtcattatgatctctccttttggcagttgtattgatgattgcaaattccttttgtctaatttggtaaatgtgacagtcagtagtcnnntgatccgtaaggggaaatatcgggt

SEQ ID NO: 22848 - DNA, 5834 bp, Cannabis sativa
ttgttattgtttaaagagttagcaaccatagtggcattagcaagttttggcagtactaatgtggcttcagttggatgcaaggattggagacggaggttgttcactatccttgcctcttcaatgttgatgcatttttgtgcccgcttcatgaatttgtcaatggtgcgcaactctttccttgaacgttgttctaaaatacagacctatgggcgataaccaccaccaatgccatcagtcttacactatcatcgatgccatgagttttagtagctttgatgttgaaacaattgatgtaggccttcaaactttctcctaaaaattgtctcatgttggccaaggaggaacatttaagcttttcagttctcgcggcttggaactcctttttgaaagcatttgagagttgttcccatgacactatggagtgtcttttaaactttttcaaccacgagaatgtagctccaaataaggtagcaagaaataacacacatttcaaatctctaaccacttgatgtgcttgcatgagagtattgaaatcactaatgtggacccaaggatcagttgtcccatcatacttggttctagttggcatctcaaactcttaagggtaaggtaatttaaagatataaggcacaaaggactctgtctcttcatgagattcatactcattcattttattattattcaagaattgatggagtcgttcctcaagcattgttatgcagcgatttttgtttggtttaccataatcaaatcctatagggagaggatttttaaatggttaccaacatgtagattggctccttgaaaagaagaaatgttagtgtgggtggttgttaccaacatgaggattggctccttgaaaaggatggatgttggcgcagttaccaacatgaggattggctccttaatgaggaggaatgttggtgcggctaccaacataaggatgtgttagatggggatcttctctttggggatgccccttgtatatattttcacttggtcttttcctatggtattgaggattaatataatgtgcttgataggaccaagattgaatgtcgtcaaaaatacttatcgagtaatttagcgagtcggtactgtcgctatctttgaggaaagtttattgatggtttctttgtgcccccagttaggaatatgtggtggtagcttgtgaccttgaaggattactcacctcttgagtaggttgttgcctttctcggtgagggttatcccctttttcctcgacgtcgagccctatattccttgaaacatgaggtggtcgcggagataggtcatcactgccatcagtggcacagttttgattacccaatgtatgatttacatcatttttggcatgaactcccatttcacctctaaggaggtttttatattccatatttccttaggatacatgcataggaggaaaattatgtggattggatcctccttgattcctcatggggtcatatgtggtacaactacccataggacatcctctctttctctttaaattcgagggttatcttttttcttttctatccacacacatgtctctaaggagtggccttggagacaaattttgtttaccatgtgggacatctccatacaatggtgcatgagtggcatgagtgtgtcgagtacgtactccaatgttgggtattgacaaattagtattgcgaagagcatcattggcttggttatgggtacctccatggtgggccagagcgccatggccatctccatgcaatgctgcatggattgtatatgtatgtctggcatgtactccaatgtttgacaaagcttggtggtcccctctccttgttggattactcaaaggggcatgttctcttgttgggcaccccctcttctcctaggaggagaaggatctcttggtggaggagattgatccctaagcctttgggctagctcttcgagctctttgttgcggcgtaggctttctgccaactggacacgtaaggcctcattttcttggagcacatcatgcagagtcatgaatttaattggtgggcgctctctagattgtgatgaagaactctcacaatcttggacttgtccttcatcttctggcataggtggcatggcgtgcttttctcgacacctaaaggttccctctccatgtggttatggagtgacaaaagttccttcactttggggttgattaactttcccccttgggacttcagcatcctcctcaaaattagtcctcctggtactcaacaccattgttgtgagaaaagtaaactaatgagtttcccaaaggggaaacaatcaaattttcactgcaacactctcaatgaaagcaccaaactgtattgagagtcctctctaatcctcaatgaaagcaccaaattattgatgccattttttgtcaactgatctaagaagatagtaaaaataaagaaaattgcgatgaattaatttgactgaataaaactgtaataaataaaatgaacacaaatgatttatagttccccccatgtcgcaatggtaatgcggctatgtttgcttttgtttttattgattaaatctaacatatcaaagttatgttctcaagagagtatggataaaaatacaacgaaggatttctaggtgaaatcttaatcgagacctatgaacagaagactcatgggagactcaattatcataaatttgatcaaagttggtagttgtaaggttcttgggaacaataatccaataaagtaggaaaaaaaaaagatgtatatcaatggtgtttgagatttaagtgtcgaaagagtatggtggactcaaggaaaatatgaagcaagggatatggtgttcttggcaatcgtcaagtaagtccaaaagagaaggtcccttcacttcagcctcttattctacttatttaggttgtagggttagttagttatcccttacatgttggggtgtctcactaacaaatctcgtatatcatctttaataaataatatcgacaaaaatccccttgtttctaggccaaaatcccacaaacattggggaaatggttattttcggctaaggatgcactaatttgaaatggagtgacaaaggatgtcacctctcggcttggaattcatgacattagtgataagtgcttaaaacatgtgttttgggttgcccctgttttcatataatgccacatgggttgtggcagtgtcctccaacactcctcacttaattacactacacaattcccgagtaaagaataccagtctaccttgtgagcaaattttggacccgataactttagaattgggctatgactttgagccacaattagatccctcttaaaattatctttctaatgcaagttgaaccaagtcatttggataaaaaaattgagagattatgttcgttttattaagggtagtttttatgttgttttgtcccagttgcgagcactaacatggccaaatggttagtgctcagccaggctagttctcagacccctcagggtgtgttctgacttattttctgatgatgagtcatattttgggggtcttgggattccaaaacctcattttgatgcctgacctaacgggagaccactgccactagttcgggtcaaaaagtggcagtaatcgaccatggattatgggaagccatggatggtgtttcttgtttatttcagtcatatggatgctaaaaaaccactttggtcacattagttttttgccaatttcttaggagagaatgaccaccatttttgtcaaaaaagtgatagtggttgcataaggggtttatgaagccttgagtgacttttctcacttgtatttgatacatagatgttggaaataaaatttggccaatgaaactcctcatcctaggtgatggccgaccattgccaccaatttttaccaattgtcccaaaagtgcggcagtggtcaaccaagtggtttccacaccacttagtggcttctttcacttggttttgaaatattattggtgaaaatgcaattttggcaagaaatatcactccccttcttcatggccgaccaatgccacttattgtgccacaaagatggcagtggtcggccaagcttgttccttggtgggaaatggtttctttcacttgtgttgcactccttggtgttgagggaaaacatttgaaaaatttccccatagtgctttgtatgtagcggccattgccattctcttgtggcagtgctctccaaaaattagagagcactgccatttccatatggcagcgggcgcataaaatacctttgctaaattgaagaagaagaaagatgaataaaaatgagcagaaacactaacctgaagtcattgttagagactgcatagaaggttattatgatcttccaagaatatattatttctttaaagtattttctctaatggggaaagggagaatacaagaacctttgtgtttcttggggaccactacctatttataggctcattatagaatgagttttgagtatttataattcaactcctcaataaattgtaaattaactaatgatatttacacaatatttctatgataatttaataaccttttgatacccttaacataattggtcacttaattttatatcacactttataatagtatatacattatacatatgtgcccacaaattagattttaatccaacaatctttcacttggacaacacatgttaccttataaatgtataacctcatgagctcaaaatttgttattgtgtaaaggtatattcatgacaatctcgtccatcaactatacttatataggatcaaagtaattttcatcatattaatcatgacaaaacccatcaatggtcacatatacaatataactaaatgacatagatcaatcatgaatgtgtagcatagaaattacatgcaatgtgaactgagcatgcctatttccatctagtcctaaaccaaagtgaggttagacttaaacataacaaaatggagtgaataaactaaaaattttatttctaataagaaaaaaactaaatacataaatgtcttaaacaaacataaagcaaataaaatacaaactcccacaaaatcatgatatcctcaaacaataaaacacccatatgggcagtgttcccatgaaagaacttgggtggtaatccttttgtgagaggatccgctatcatggaatttgtcccaatgtgctatatggatatctatccacctacattttatctttcacaactaggaactttatgtcaagatgctttgacttggatatgctcctgttgttattggaatatagtattgttgaattattgtcacaaaataaattgcgtggtctttctacattctccaaaatatgcaacctagtgataaagtttctcagtcatattccctgatttgatgcctcataacatgctgcaaatttttatgttgtagtggaagaagctataagtttctttttgacactattcaatgttacattctactatcttggcatccaaaaaaattagaatcagattaccctacgaccttcaaatgatctggcttcctatatgtgagcatgtaatcttttgttctctgaagatacctcataatgctcttggctgctatctaatggtccagaccagggttgcttaaatatctacctaacatcccaataatgtgcacaatatttagatgcatacatacctgataatacattagaatcccaacaaatgatgcataaggaatcttttgcatttgttaaattttaagattacttttagggcattgactaagactaaatttgtctcctttagaaatataggtatctgttacgaattttatgtttgctacgcaagtatacgcaatcaaatagtatctcacgcaagtgaggt

SEQ ID NO: 22849 - DNA, 6057 bp, Cannabis sativa
tttttttttcttaaaataattaaaaaaaaaatgatttttccacaaattctcagaggatcattcttttcaatttgattataaattatttaaaaataaattaaaataacattttatattattcttcaaagaaaaaacagaaaagaaaattatatgttgaccacgccgggtactactagtactggtacaggcaaatatacagggacattctcgtcatttacttaatcatttttgttttgtaataattattaataatattatagggtgcttttttttctgttattatttactattgaaaaagtttgggatttattaggtagcagccaaaaggccggttggatttatatttcaagtaataaattggagtcgttatacaagtaatagtttaattgaatttaacattgactgtaagcctcaataaatttaggtcattttgatttatatacttttccttttaataacgttgattaatattttaagaggaaactttgaatagagattgtagtatcgctaaatcttgaagactttaatataattggtcaataaacatctgttaaggaaaatgattcaacattattatatagttgttgttgtatctttaattaaacctaatcttgattcttaatgatgatgatgaggacgaattaatgatgatgtgttataactcattaagatggcaaattagttggttaatgtgtatactatagagggtaagtaaattatacaaacaaatttaatccaatcactactatgaaagttgaagctatttaaaaatgaagtgatttaggaaagaagtatactaatcttcactactacattattcaacataattaaaattagcattgaatatcatcaaaggcatttctcacttcaacggtcattttagacttataggctagattcttctccggctgcaaatgaaaatagcttttaacttttcttgttggtttcctagaagatacattttttgatcatatgcagaaattaataacataatacttgaatttattgaagccaaacatatataattatcccaaatagatattgaaaaatcaaagaagaaaaaagggtctaagagaaatatagtaatcacatgcaaaagcagagtcaaccaacaaatggctgattgggacacatagcagctttttgccaagaacaatgtgcttgttttcataacctagttgaccttgtttttgggttttaggggtttgacaatatcaacaacaccacccacccacctactatatataccattccattccatcataaaattttaaatttaacaataacttcataaaggaaccaatagtttttaccataaagtattatcacattctcaaatgctttgactgggaaaggaaaagggaaaaccagggtaataagtggtcttattgagcaaactttcgattcacctgtatgttacaataataataatattcacatacaaatttggttatgcttacaaattcatcatgtgttttttttccctttttttactttctttctttctatgaaatacatctcagagcaattgaaataaagaatgattagtgttggccaaacaaaaaaattgattgacttgcatatgtgaataaacaaaaaaatgaaaatggggacatatataagctgggatgcccaccaagcaaaggtagctactaagttcacagtggctggagttggagttcttgctctataacagctgaattgacaggcttataggaaatgagagcctgttgtcggcgtctccaaataaaccacataccaaaagctgataatccaataaaaagagtaaccaaaattgctaaaatgacaaccagatattcttgatgccaccatttcctgcatcatagaatgaaaagacagaagttgcttcacgattttcagtcacccaaaaaatgtgtgtgcatatagtgcaacctgatatgaatttgactttgatgaaattagttcacaaagattgttaacataccgttttaccttcggtacaatgttccatccaaccaatttataaccggaaaaagtagcaggaagctgtataccatgttcagcaagatgtgcaatgacagactgcaagatagtattgttagaaaaagataaaaaaaaaatgaaagaattgaatcttctgcaattacaagtaacaactccaaagatttaaacttaccactgcagttgtattagagataaagtcagcagaccctgctgggagaatggccaatctaatgacggtataatttgtattggatgtaaaattcaatacttggacctaaaatcgggcaaaggaaattactaacatttttacagaccaatgcttaaaatgtgaaaatatatacattagattctgagttgatcatgcaccctgatccaataaggtatttgtctaacctgtgaaatattaacatccaactcaggagcaatatattcgaccagttctgtcatgtgaggttttaaatcagaatagctaatgttgaatgacacctcaaacgtaatttttccaatttgatgatcctctgcagaccaatgttaaggatatatcacgaggtcagaaaacctatccaaatggatgagacaatatattttaccagcgaaatgtttaatgtaggagagataaagattccttttgatattacaataaaacactttggaaattaactgaaattttgttttgacatagagaagaggattatatccaaacagaagtttacagctgacaaacctggaagcacataatctggtgattcattgggagctaatgtaggtggaacttctgtacttgaatttttctcaacaggagctggtgccattgttgggggagagccagttatgtgaagcctttcccataactcagaacaattagttttccaaaaaccaattttcgaatgctcacggtcatacatcacaagagtatttcggacaatgattcctattataaacacataattaatatcaagataaccaatagtgttgctaataagtaaatatatggacattggcatttagaaaagtatcgaaagagaagaaaaaaatatgtggtaataattcaattggcagaagtatattacagtaagaaaaaatcagacggcatctttggaaagaacaacttacccccaataagagtggttggatctcttccatttggaaaaacacccaagcaatatgcaccacgcacctttgaatgctatataacaaacaaccaacaaaaaaagattacaaaagataaaatatctatgaatattaattaagtaatgaccgattcataagcaatgcacttaattctgataaataccaccacacgtcgcacaaagttgttttcagaaacttcctattaagcctcttgcagtaaattaaaaatcgataacagaaagagtccatcaattacctggaacaaataattttcaggagacagtgacagtttttgtccattgctaaataccataccaaccgcaggaaatttttttgtaagttgggagatatcactgtaaaaaagagtatattaaagctgttaattacaacatagaactatttttacaattgatagaagtcctattgtatcattttgataataccttccagcaccggaaaaacatatatcattataatttgggtcaggaccatggatctgcttgagagattgcagctcctttataacctgaatccagtcaaagtgagaaaagaacaagaaaacaattaacttgcgagtttgatccccggaaagggaaaagaaaaggaaaacaattaaaatgcaagtttgatgctcaaattgaaaagttgtcaatgataccaattgaactactactaccaagacaaagctagtctctatttggtctataaacgagttttgaaaacaagcagagttacaacttacacatgcataaaaccagcagagtttcctctattaatcaaaatttcatcaactacaacttctttattacagaactccaaacaaagccctatttaaaatcataaattcaggatttaagatttaagcaggataaactatagagaaaattatagtaattggtggaaatacacctttgacaaagcatcccaagagatttaagagaagaaaaggcatggtatgttatggcttataatctttgggaagctaaactatagtaatattgctaggcctaaaactttcaatcatatgacctacctgtcctacccctcatgatcaatcccttaaatgccttattatgttatactacatacaaaggcaacttagaaagaaaaaagaaaagaaaaactaccccaaaagaaaacagaggaagaggaagaaacttacagcatctttaaatggtataaatgctgcatcaggtaggtaagcatacgtggtgccactatcaaggatcgtcccatgttttccatcaaacacccctggatttatgggcaattgctttcccccaacatgaatctccttcaaatctatgttgtaatatggactgttgccatcccgaaactagagtaaatgcgtgacatgtttcaatggtattactattcattatagagaaaaaaaattgctgttttttttcatctacatgaacaaaatcatttgtaaaatacataccttcttgcagcatcagaatcagcaaaaaccatgtccggaggtggagtgataccaccaagaaccatggaacctccaccaatatccattccaccataacacaatgagaatgagtcactaatcacacctctatccacaagttggtccacaacactaaggtcaccccggcccaaccccattataccatcagcatgttgactgtaaaggtcgccagtttccaagttttcacagccaaaaacagctctttgtggagtaagcgcactcaagttcccaaaagataatatatcctcaccaagaacaccactgcttgtactcatctccgcgtattgcctctcataaatgcattgtgtttgatcattgtcacaattacagtcaatattgcacttcaccgcttgataagtgctcgaaagctccggatcgaatctggggtcctgccaaaatcaaacaataatttgacattttcacaaatcataaggatgaaaggaagagaaccaaaatttgaaaatttcacctggtgttttccacactgatcgcaagtggaacagggtacgtacgtaacagagcttcccgtatcgacaatgagagcgaatttctgaggtggcgttccgatccaaagccgagtggtgtagtacctttaagaatctcaaaacaacatttttcattgtcaaatttagtttttttttaattatttccttaacatgaaaaaattacgtaaaaggagaaatacccattaaggaggaggtcatcgtggaggctcatgcgagcattggacctgttattgggaccggatctctgtaggtggcgatgtggataggaggaaggagacgacgacgacggcagcgaagaggaggaggaaggggatttctgggaagaatcagaagaagaatgatgatgcagaggtaagaggaaggcggtacgtgcttgcgcgtgaggtggacggaggaggcgcggagtggcgggaatggcagaggagatgcgagcgagtcgaaaaaggagagaaaggaatagaaggggaagaaatgtggtggttagatgagtcggagaccgccccattgagtgagtgggtaggatcggaccgagttgagagtgagtcagatcaagaaggaattcggtaatgacggaggagcttaacgcggtgaactctcttcttcaactgtaaggaagaattggatggaagacgagggagagagaggaagcaaaggtcattctttctttttccttttttgggtcaaatataataattaataaataaatagttttcctatcaaattgtattatgtggataatgacttaatcatacaaaaattaaaaaaatacccccttactaaaaaatatataaggaaatttcatttaccttactaaaaaatacccccaaaatattctataccatttaatattttatcctctctttccgatgttcatttacggtttattagacgattagtaaatcgtgttgtccactttgttgctaggcacgcacgatccttgatcgtagcatt

SEQ ID NO: 22850 - DNA, 4071 bp, Cannabis sativa
aaataacaacatctctgagaactactgatgaacttcaccagaacatacaaatggactaagtggtgtcaaactatcacttaggcatcgtaaaggacatctcttggatatttttttacttatccaatgtccaggttgacgtcatatgtcaacctgggcgctggatgtcaacttgggcactgggacttgaattgccttcaacaaaacggtcataactcactaaatttttatccgattgatgcgattcaacttgcatttcaaaactatttaagtttagtaaaataatacaaaaaaaggactttgaggttcaggatcccccaatccactgtgcttggataaaatctcgaactaagaaaacaaaatttgtcaatgattatgacaaggaaattaccgataagataggtagtattaatcgctgataaagtaataatgagttaatatatataatcatatactaattacttgaatatgtaaactatgctcaactagaggagaaatttagtcagggacaaattaaggtcaatggccaaaatgatattctgacgcaggcgctcaggacaccagagcatcctggacgtgtcaaggcaactgggtatgctagtacttgaaaaatttcatttcattagttagacaaaataaagattcgttaactttttattaatttgcaggttccttgccaaccatctaaactttttggcaggaagaaaagagaagtttttgatgttatggctcgaaaatagagggagattgagaaattaaaagcagaaatcaaatcccttaaacaaaagaaaaatgttgaggataggtggctcatcaggcgtatgttccataagaacatgctcaggaggatgaggttccacaaaattatgatgagaagtttgttcccttatatgagccgcctgtcatgtactatttcactgaacagagggcagctaatcaaacaatatttctctgctaagaaaatattgacaacaaagtggttgcaacttatctgtacaaccatgagggtccaatcatagttcacgcagtgccttatgatgattcacatgcccacattctaatttctaaaatgctgcaagaagatgttgaaattctaatatcaattgaggggtgcagatatgttagggaagtagcgaacatgttccttttttggcctaaatacttaattttaatattcgatgtaacttttattattaattaattatcaatgcttattagagtttgaatatcttaaatattcatcggtagtaaggtaggttctagcgtatattgttaataataagcatgttagtagagtttaaatatcttaaatatttaaccattgtgaagtaagttctgcaaatacatgtactgcagttagatgggtggataatttttatattgttataatattttgtttgttttgtattattttatttattttgtttgttattttaggcatgtttaaaatttttgaggacgttcaattacagtcgttatgcttccaaaattttagtagaattatgaaaaattttgatatattattatagtgttttgtatagggtccacttgctcaaccaccatcaagacgtgctatgtcaaagggaaaaggtcccatgccttgtcgaaaaggcggtcgtgatcaagttgatctattattcactcgagagatcgtggcactaattcccagggcaatcagatagatggttgaagaatttctgagaatcaaggcaaataatgcaataatcccgattcgggtaccacgtgaattcatagcacctcgtatccagatcacaaaatttggagaagttttacaacaggtggtgttgtgtgacttcattggaaatcaaggaatgcgttttgaaatgatgtatactctgctttaacctaattaaccatatatatcaatttctactgaaattactacaaaaattttatatttaacaatttaatgcaggaatatttgggaggagttacatgatttgagatgaattttcaattagagatttttgcagtgcacgataacaatgatatagagaaggaagagtcttttaaggttgcatcagaaagattggctcattggttgtcattgatgaatagccaacaccaaatattcttttttttttattttttttttattttttatgaataaggttcttgtattgctcaaacaacatcttacaacttacatttgtttacatctgatctctcttctttttttacaactagatagacatttacactattacaattaaagcaaagaattatatgttcacaatccaatctttatctacagctttagttttcctaggcataacttctataatccggagcttgctttcccattgtatgcgtttcaccattgccttgacatgccacaccttttgatttcataatacatcatttctagcctcccaaatatgatacactagtccagccagcactactttcagcatacttcttcgagtcgctgaaactgctttggtatttttaatacatatctgcaggctttgtaaggactctgctttggttctccattgcagccaggatttgacctcctgcaggcatttcctactgtagtcacaggcgaagaataaatgcctaattgtttctttctccttcccacataattggcatgtatcatcaacattaatatcgaatttggccagtctttcagttgtatttaatctgccccacataactaaccaaaggataaacttatgctttggaaagataagtctatcccatacatctctataccaaggaaccctctccttgttggggaataaaagataataaccttgctgaattttatacttgtgcagcaaaaaactagcaagatcaatcttttcatttaatcgattcttaactccaacaattttcttccaataccaactacaattgggagcatcatactcccaccattgttgttctttcaagtatacaaagtgtatccattttacaaaaagacaatctttcttgcttgcaatatcccaaacatacctgccaagtgctgcaatgttccattgctgaatgttctttattgcttgagatatcggttaaactctacttaagagataatttaaaattgttttctttattataacttaaaattatttttacactatcttatatacatgtatatatattttttaatgcccattgaatgctagaggtcgtaacgccagggaaaattaaccatttagaccctatagatgaccacaaagtttcccaacaaattcatgagatgttaaaaaggtaataatttaattactctttatgtaacaaatattttaataaactaagtgatatatatatatatgttaattaattaaaatatcaatataatttttaaaacagtgcatacaaaacttttagggggatcaaatgcgtttattgggacgtggctagaaattttactagcaaatcgttcaaaataactttaacaaccaagaatgtaatttttatgtattgaaatacatgagtgacatcgtcacgcgtacaaacccctaactgttatttaaatgattaaaaaatgtaagttttaattattaattatcttatttattatattgacaattaataatatatatactaatataaatatttaattcttttttcaatttagaaataaaagaagacgtacatgtaaaaattgaattgttaccgttacgatagtgaatagaataattacttacagtgattcatgaagacttggattaatgctaaaatgtataagaatttttcttccctaacttatttttttttttatgttaacttgtaatttttatatgtttaattagatatattaacttgttaacacttggactaattttaaaatatttgtataatataattgtaatttttttaattgcttccatgaaattaatttaagtatattggctagccatgaaaataatttaaataatatttaattcaaataataattaatttgtgaatttatattaagtttcaaaacagaaaaaataaattgaattttacacactatgcggtgtcagtttttttacatatggcgtcagttatttaccctatggcgtcaattatttaataggaactgacgtcatagggtacact

SEQ ID NO: 22851 - DNA, 4809 bp, Cannabis sativa
ggacctgaaacaaaagaatcaagcgtaatatagccctaaaactagaaacaaagagtgaaaactaaccgaaatatgacccgaatcttagactaattttagcctaacagagctttcgagagagaatacttcattctttatctcacaagttaatacaacaaatatagaagtatattattaccactatcacgaggtcaaacctctataaattatggtatttccttaacttattattatttgctttctattgtttatttattcttatcgttttaattaagactcactgtagttggctaaaaggaaagttaatattttggtgctttcattgggagcaaataaataagttttttgtcttaagtcttttacatgacacatgatgtttgtcttcattcccaagtaaagggtgagtcttatgcgtcactcgaagggggtttaaaatcatacagtcgatccaatggtgacagattcgagcatgcaaacacttggaaacgtaagagattcacctgtgacagcccctagacaagttaatactcaaccaccaacaaccggccatggagtgactttccctctggctgggttctctccaagcgcaagaaactgggaatagtagtatgacagcctagaataccacttctagaactagaattccatgcacttcaaatactcaaagatcaattggagatgacactgagcttcagaacttgtgagctgcactagggctaatacaaggccacagtaacgctcttcatcacgaccaacaagatatttgagtagccattgacaaccgctccaggcagaccaccatgctaatctgaagagcctatcagatcattgaccatcaaccagtgattgataatagtattcccatgggaacacaaaattggttagaagagtataaagcttatcacaccgtacagactcgcctcagtcaaccatccaatccaaagccataagctcaaactagtcacgtgggaactagtactcaaggggaaacccttaacgcacgaaataccaccaccacacctagtaaccgtgccaacactaagaaaacactaggtgtggagacctcctaggggaaagtaccttcgaggaagagcccaaaaggattcaagctcatgggtgccaatcatgggccctccacctgatgtggagcaacctcaaaacactaaaagaactaacaagactcctccaccaagtccttctcaacactctcatgataacaggccccgagacccttcaagaagaaagggacctattactcaaactaatggtggtagtaggagatactacttcaaaactataggctacgagatctgggaggtaaagaccaatgaaccactttacactcgaaaatacttctgagatgaaaggggtaaatcatgttgttacttttctcgtggccccgatggccaatagtatgagtacttccctcaagtacatggagaggagttgaacctgaacaaacaattcaattcttttcatacttgtgatccaaacgaagactactttgaaggaagtagctactacaatactccaaatgatcactcccgtagcgaatcatcttgagatgatttgaaattcattttgaagacctcaccagtgttgccttcacgaccccatggtcaggagacaacaacaagacccaagtagactggagtccaagatcgacttagcagaccaagagacctgtgtgacctcttgaccaagaaacggtcggtggaagtaggatgtaatatccctaaaaatgtaatgatatttaattagaaatattttattaaatatgtgattaagtggatattagagtaggattattatcatacttaagctaattacaagttgttagtgaaatatgagtaaaagaataaataaagcgtaatttattaattacggagattttattagattatgggggtattgtagatacgattttcaaaataaaagattttcaggttcggcgaccgtggaaactcgaaggattggtcagaaatgtcacggtgactgaagttgcattatattagagttatatcggactaggttagaatgttaagatgtaggtttgatcgggaaaattagaatttatcaaaatacccctggttatgtttagtttaagtttagtgggaggggtaaaatagtcattttaccaagtattaccttagttttgtcttatatggatttcagttttattgatggctgaattagaattatatttaagtttattaatttttaatttaaggttaggaaattaagataaaaccaatgaaagaaaaaaataaataactaaagatacacatatattgctttctcttcctctctctcgacaaccctagaaaaccaacttggaccagagttttcatctccatttcaggcaagatttgattgtggtaatgaggtgtagaagtatctcaagcttggagataagtctcttattccatccctttgattttctaggtttaaggttaagttttattgggtttttctaacggttttgggtctgtacagttgttgaggttcgtagtatgattttaaagttaatttgggtttgtttaattgtgaattggatgatttccatggctcttaatgttagaaatgaagaaatagagtttaagaacctaattttgattcaaacatggtgaattgggtattgtgttgaatttttgagaattgattgattatatacactatttttatgttattgaactgctttggagtgtttgggtaggtttggaggagatttggttgggttttggtgcaaaaacccaagtttcccaattctgcagcagagaaaactagttaaccggtttcacaggtatagtgaaaccggtcaaccggtttgccagtagaggaaaacctagtttttggcttcgaaaccaattttgagcggggtgttcttcagagcttagattagggtattttagtgatgtttgagttatttcgaattagtgggggattcatttgttcggttacggaagtagggtttgttttaagagtttggataagttgtttatcaagttttgttatcgtgacataggatccaggatcgtcgagcatggttccacccaggtcagcctgcacccttgatattggtttgaggtaagaaaagtgtcatgcaccgtttatggttaacaaatataattgtgatagtctcaattatgatcgagatcccgatatgtgtttgttgtgactcgattttgatcaaggtaatattgaggaacaattattatcaattttgattcgattatgatggaggtaatggtatggaacgattattatcatttgtgactcgattatgatcgaggtaatgatatggaacgattattatcatttatgactcgattatgatcaagtaacaaatacggtcattaccgttatgagtaattactcgttgaaatcacggataggtttcttacttatcgttcgctttattgggcaacgataatgacatacatagctcgtggatagcgagtggtaaggacgttttatgaagcactgcaattatgtgattatgtattgaatgaatgtttgtttagtgaaatgatgaagttgttgattataagttactataattttcttataatgcacaatatgcatgttggtatagatgttaaattatttatgcatggtgaataagtaatgaattatgcgtacgcatattatatcatgttgtgattacttgtgtttatcaattctttgatttaatagcttttcttggtgagtcattgtgactcacgggtgcttcatggtgcaggtaaggaggatgaaactgttgtcatccatgagtgagaggtctctcggcgatgtacatatcaaccgcggtgtttcgactaccagtggataggatccatccttttgactattttgtggaaatgtaaccctattctgtaaatccagttttgagctaatgtgtaaaagtttttttaaacaggggatccccatacttagcaatcttttgaaaaaaagttacgttttagtttatattgaaagtttttaactaaaccgcacttttcctaaactaatagattaactaagaattagtttgaaaaagcacacacatggcgtccctgtgacacaaggcattacaacatggtattagagcgaccaaggtttaaagatcatgaagactagtttgatacgtacattggctgcgaagattcgttcgactcatggttcagtacgtgttaaatgttgaattatttgttaattatctgattacctgcttatttgaaatttgcaagtaattagaaaatatgataagtttcgataaagattgttaaatatgtatgcgcatgtatggcaatgcttattagcattaattttaatttggaagattctaatgatggaaagttttggtcacgagtgtagtagaatatgcactcgaggtgatctaatagaggcaatagcgagcttttagggctcggggttgatggtgaagggacgaatcctccaccaccaccaaacaggaaagagatgtatgccgtgatgcagaaggccatttggtagcaaggtgattagatttgaaaattgagtgcgcaacaagctaagccttctccaagtctcagtcctgatcctctagcacttttggtagtgccacaggatgtgagaaattgtttggagcctttgcataagtggttcagaaagcagtgattgcatgtgcctgagggtggtgcatatccacccaaggcggagcaatagattagtatgataatatcgacttttgatttcatgcgggttaagagtaatgattgggttagatgtgtcgtttacatgttgcgtagagatgcccgcatttggtgggacattgtatcatagggctat

SEQ ID NO: 22852 - DNA, 6239 bp, Cannabis sativa
  modified_base (35)..(47): a, c, t, g, unknown or other
atatttagggttttaaacaacatacttgtgagtannnnnnnnnnnnnggtaaaataattcccaacagccattacatggataagtgttattttatccacgactttccttcagggtacgtatgatgataaaaagaaaccagacaaatctaaaccagctgctaatcaagtcagcaccagttcgaatgtgattcttggctcttgaactcctacagacttgtctgtcgagtgccaacaccttaattctcttctcagtcagcaattgagccaagccacttctcgtggtgatacaaacaacattcctgttgcatccaacatggctggtaagcatttctcttctcagccttttacttggatcattgacagtggggccacacatcacatgtgtgccaccagatcttgctttctatctttctctagcaatgcttttcctcaattcgttgtgttacctaatggaattaatatacttgtcgaaggcatttgaattttccaaatacacaaacacatcactcttcacaatgtgttatttgttcccacatttcatatacacctcttttaaatcattgtattccttgaaaacaattctaatatggttgtgtttgcccataattcttgttcaatacaggctctttctccgagcatggtgattgggacagctaaaagactcgagaaactctatgttctacatcaagagtgcagccctatagtttaatctagttgttctttttctttacataataatgtagaacaatggcatacacaccttggccatccttcaatgtatgtctctaatacattcaataaaaaaatcaattctgatttttccattcaagcaaatcaatattgtcatgtttgccatcttgcaaaacaaaaaaaaaaattaccattcatatctaataataattttgctgaaaatacatttgctctaaaccatttgaacatttggggacccttccatgtcactagcatagaaggatacatgtattttctcactattggggatgatgcatctcgattcacttggacatttatacttaagactaaagctgatgtccacactgtcgttcctgtgttttacaacatggtttgcacccaatactctacaccaattaaagccattcgatctaataatgctaaggaacttgccatgtcagcattctatgcctctaagggtataattcactatcatttgtgtgttgagtgtccacaacaaaactatgttgccgaataaaaatagcaacgcatactcaacattgcaagagccttatgctttcagtcacatttacctcttctctattgcgcatgcatacctaattaatactcccacctacttgatgaatataacaccttctgctctatttcatggcatcacatcttatgaaaaactacactttaaacccccctaattatgaccatctcaggagcttcggatgtcttgcatatgcctctacacttacatctaccaggcataaattttccccaagaagtcgtgcatcaatctttattggatatccacatggcatgaaggcttacaccattcttgatattgaaacaaaacaaatatatcattcacgagatgtcattttccatgaacatatctttccttttcttggccaaggctcaagcaatgacatgaaagtgcttttccagtagcattgcatacctgcccacaatcacattaataccaatttacacaccaacaccacacagggaacacaatctcgacttcccacacttcctgaaccaacaccagcagctctagttgagcctcactcaacaatagatggcactgctttcacaccagatgcaactactaccactggtgttgttcccacaccacaattcaactacaatccaaaatagttgttgaagttcacgcactagctattgatattaaatcaccctcaaaagctattggtgcaattcacacacaagatgcttctattgaatatcacagaaacaatactggtatcattcctacactagatgcatctagtaagtctcaccaagacaacactggtgtcattcccacaccaaccattcattccaaggccccaatacaaacataaaaaagtggccgtcaaataaccaaaccatcccacctaaaggattatgtttgccatacccattccattgcctatccaattgaggaattcatttcctatgctaaactcagcccccaattcagggttgctgtgttagcagcttactcccaaatcgagcctcaatcctacagtgaagcctcacatttaagcattcgctcctggctatggatagtgaaactcagccccttgaaaaaaaaaacaaaacttggatagtaacaaaattacctcttggccataaagccattggatgcaagtgggtatacaaggtcaaatacaatgaacaaggggaggtcaaacaattcaaggctctccttgtagccaaaggcttcactcagaaacaagggattgactacttgtaaacttatgcactagtagccaagattaatacactcaagatattgctggcccttccagccatgaacaattggaacatacaccaacttgatatcaataatgcatttcctcatgttgatctccatgaagaagtatacatgaaattacccccaggatacaatgcacctcccaactcagtatgcaagctcaacaagagaatttatggacttaaacaagcctcgagacagtggtatgaagaactcagcaccacactgacaaatgaaggcttcacccgatctctctatgacaattctctctttatcaaaaacacaaggacaatatttctagctatactaatatatgtctatgacataatcatagctagctacaatggcatgacaatcacccatttcaaataatttttatctaagaaattgaaactcaaagacataggaaccctcaggttctttcttggacttgaaattggtaaatcaaagaaaggcatatttatatctcaaagatcttttactttgcaattactaactgatacaaggtaccttagagctaaacctgcttcaacttaaattgaacctaatctcaaacttagcaaagataaatgacaaccattactcgatcccactgtctataaaagccttattggcaaactaatttatctcaccatttcaaagcatgatatcacttatgcagtgaatcacctaagtcaattcctcacatgtcctccagtaccaaatgttcaggctactcaccgggttctcctatacttaaaatgcaccccaagacagggtcttctcttccctgccaatgctactccccaaatatcagcatatgcagaaacgagcttgtctcccacaaatgtacaactctccttttttgctgatacatactagggagcatgtcaagacacaaggcgctccatttctggctactgtgtctttcttggccaagctccagtatcttggaattaaaaaaaacaagaggttattttacgatcttcagctgaagccgagtacagagccatggccaatgccacctttgaagttacatggatccttgccttactcaaagactttggcatctcaattaacaaacctgcctctctctactgtgacaacactacagccattcacattagtgaaaatccagtctaccacgagcgcattaaacatgttcaaatcgacttccatttcattagagaaaaggtccagcaaggcatcctcaaactgcttcacgttcgatcaccaaaacaacctggctgacatattcacaaaagctttgctcccctcctccttcaatagcattgtgtccaagctgagcattttgaacatctacactacagcttgagggggccgctattatgatactacccctgatcaacacctcaccactttcatcttgaaccatcattggttctgttatttttctgttgtagcagccgagttagttattttactaactaacttagctccctacctatatatcttaccttcctcatttatgttgtaatgatcagatgtactatagagattaataaagcattttcaaagcttttctctcctactatgttttcactcatacttatctaacaaaaaaagcacacaaagagcttttgatgaaatttatagtgaaaaaacaaatattaaaactaaattttcacacaaaatagagatctctataagaaaaacaataaaataaatctatagaatgctttcatataattttaaaatcgttgttattactgtaattcacttgtaattaccattacattcaaagttggtatcatcaccgtatttcacttgtagtcatcattactgtaaattgaaatctatcatcattactttcaattgaaatttatcttaggtatgtgtaaattatttagagtttttattgaattcaaattatatatcgtgaaaatttttatttaatatagttaactcgaattttttttttttttttttatatgtttatattcttttttaatctaactttgaaatcaatttaattttttaaaataaaaatctttatatttaaaattctgtaagtgatttattatcaaaataatttgaaaggttaataatattgaaaaataaataaaaatacttaaaaatagaaataaatagatatgcaacgacaaaagaagaaaaataaagccatttaataaattgtgaaaatttatgagtacatgtaattattataaattattctaaagctactaaatttaatatttgaatttatattgcactgacaaaaaaaacataaacgcgcttcaaataaaaaaaaaaaaaaggtattgtttgaaaataaatttattatttttaatattaaatataaagaaactaaataataaaagtacaaaatctaattatttaacacccaaaacaaatgtcaacttctaaatcaataagctaacaaaaaaaattaaaaataaaatacacatataacacttaattaagattttatgattatagcataattataatgtgcagtataattatatcaacatctaaaatcacttgaccaatcatgatacataaatattttacaagtggtgtggaaataagtaaagaataaaaaatcaataagaagcatcctaaaaaaaatgctttataactttacaatatccttcttcactctcacattcttgccaataaatttttactctttcaataacaaaaaggttatacttggaattgcctttatttcctactccataaaagaatcctacatttaatataacaaaataaaaagtactcaaactcatatttgataggattatttctccttaataaaatatgttaagattatttttattctttttcaaatatcatcaaaagtctaaattaaacctaaatcataatataataaacatattacatgaaataattagaagataaaataaatatattatacgaaataatataataaacatattttctcgcatacaaaaggtttcaagtattagaatgtcacgcaatcccatctacaaaataaataaaaaagaaaacaaaaattcagcaaaagtctgtcctttgattgaagtcctccagtggtaagttacttcgaattttcctaactcaatcgaccatttaattaatctttctgatgcatcagtgttatcccatttttgcactatgacgtggcaacacatgctggtgacacgtggaccttattccctacatctggctaaagggatgttccgaacaaagctcaacatacacctgcacggataatgtcttccaggggcggacgtactgtatagcatacagaggccatggccccctagatattctacatgactgtaattcaatttattttgataattgactatattggagatcttgtttgacaaagtcaaactaaaattatatatatatggtatgttctagaattacttttatatatttaattttataaaaatctattttattttctttttttaaagatatttattttttgtttctctaataatattaatttacttggtaagataagctattttagatttttataaaatgataattctttctcttactctttcattttttatagctaccagaaagtgatttttttcaactaccaatatagtgaagactacattctctgaaaagatagaatgaatttttacgtgattgtttgttaatatctattgaaagagaaatcgccaaaaaatttagtataaattcacttatcgatgacttttgtgatatacaagaaaaaaaattatgtattttaatttaattatgaatttaataaagaatatttacaatgaaactcccataatatttgc

SEQ ID NO: 22853 - DNA, 2770 bp, Cannabis sativa
agttgtttttgattgaatatacatctttcaaaaaaaaaaaaaaaaaacatcttgaatcgtccaattctgagcaatattgaaagagctatggctaaaatatcatcaatcgtcgtaccatgaagcttgctgccaaaaattgaactttaagcgccacgacactacttgtagtatcacggcccgcctattttaaactacgaaaagaaggttttttttcaatctttttttagctatataaagactatttttcaacacttaggagacgattttagagtacaaaaattagaagcgagaagcggttctgaagacttttaacatttattttttgaagagttcttctttttcctctattttttcttatgttcttaattgttatcatatgttgtcaatgattatgagtagctagattttttattagggtgttaatggagattgttagacactttattttagttttaatatgatttatctttcccaattttttgtaaatttatttcattcgtaattaattacttttaattgcatgttttccaattagttatttaataatttcaatacaaaatctgaaaaaatgagtattgattatgctatagacacagatttcgatataggatgagattacttatatatggtttacgtagcatttaagatttttaatgcctcctatttattcaatttatcacaagtagaaaatttgcatgaaagttgagatttatatgttctagcctaaatataattttctttataaattcacgatcacatgaaaattagaaattaaaaattaaattatattgaaccatataaaatagatgcaatcaaaattaatcgccataagcttgaattattgttaatttcatttcaatttatttgtttactttttcaatagtttttaaactcttttttttttctcaattattattttagctaaataaaatttaataatttaattgtttggtaattaatgtaaacgacacctatacttgcattagaaaattcataacagtttttaaattattttatttaataattttgcgcaattttttttgtcgaaaaacactaattttgcatagtttaaagtattaaaattaaaatttaaataagtgttaatacatagttaaaaactttcttacttacggaaacaaataagaaatgtactaaataacattttcgaagtctatattcctaattttatgattatcatattttgggaatttatttctttaccttcaaaactaataaaaaagtttacttctattaattatagtcataagactaacttcttctttaatcactaactttggtgagttcaaatatattttaggaatattggcaaaatcactataccatttgtgacatttaatcctttaatagtgtttaatttagtgaataaattggtatatttgccatgtgaaaactccatactaatttggtagaattgtacacccttatagatgctctaatttttacttattcatatttattcatcaataaggttatgtaaatccatgtaaaaaatatatataaaaaagtcgatgaaagtggtgtaggtgtttgagaattcggtaaataaaaataaaaaacgtgagagaaaaaaaacgtagattaagaattatcccaaaccaaaacttggattggatacagtaataatttagaacaatctcttgaattttatctacttggataagaaaataaataaataaataaaaaatactactatgagtatgtacttgtacacacgggccatgctacaaataatttgataccaagcattttaaatggcatgtttaagaggcctagtgatggtccttgtgttaaatctcacctgttcctaaaggctgccttgaggtatcaccagaagcccatgcctgataatcttttacaagctgcacaatattttcttttgaatattagaagagaacccaaatatgcaaatgaatcaaaaactttgtttatatgcatcccaacacaatcccatgattaaaaattcaaacagaaatcaagcttactctgtactttctttgcttcatcattagctgctgttagcaatcatggaatcgtaaatattatgcatgaaacagcaaaaaaaaaaaaattaacacttttacaaacctgtgccataaagcgaggaagcatgatctttagaacttgatcaaggacttgagaaccagttgattcaatggcttgcactggaagaaatgcaaaaggaacctcgatgctaacctgaagaatttcaggcaatgtccaattataatttaaagagacagtgttgttaaagagtcgcaagtttgtaaatcacgacaataaaatataccatctaaagggttacctcaatgacagcctctgaagtgagtcgttgcaccgacaagtcttttccttggttactatcacatgatactatattctccatgaaagctgcattcccacaccaaatcaatgtcaaagccttcctgaaaaagggattaaaccaaatgactccaacaaaatgtatgtttgtacatctacaaaacaaactccagtgaaaccggtattcattttgcaacaatgtgcatgaattcaatataaacaactacataacctggttcagtattcctagcaattgttttttattttttgttcattatatatatagttgcaacttataagattactcaaattatgcaacttatgctagaacaaaaatagattgtccaagatctagaaagaccttaaataacaaccagtttaggcacccttaaagctctgtcaaagtgtaaaatacaactttctttgtaat

SEQ ID NO: 22854 - DNA, 2419 bp, Cannabis sativa
gctttgtcaaattgaccacaagatatggtatgagttaatttaacacataataaattttatctatttcatttactcttaatacactctaattgatacatcaattgaaattttaccagcaatataataaggtagcgctttatgaataattaacgatatgttataatagttctctcatttatctaagctaagcaacttaattatattacaatgagaattcatatatctcatgtaacattcatgaatcttcttacaaattaaatatatattatacaataaagcactattgacacatttattaaaaaaaattaataacaattgacacactaatcatctatatatagcccaatttattatacatattacacatcaaatataaatataagttgttactaattataataattatatcatctctcacaaaaaaagtttgaagcattatatatataattatacagacaaattaagtagatataatattatccatgaccaatatcacaaattaattggccatatatgcactacatattgtggtagctattagagagacttacagttatatatatatatatatcatatatatatatatttattaggtcctgcacttagagcaaattgcttatacatagattatacatagatttagctatatatatatatatttatatataaagttgagaaatacatgcatgcatttctaggcatcaaattatcaccatttgcagcacaaaagtatcacttcttcttttgatcccaccaccatatttagctgcatatataatattcaaatgctaaaatcaattaatgaaaccattttgtgtattatgattaattttttacattttaatgtatatatatttatgaataaaaaattatgggaattaaaaagttcaagtcaaatgtataattatataaacatattgtatttagtgatgtaacattgttatttaaaaactaaaaaaaatagttcaaataaatttgattttttgaaaaaaaaaaatagatatactattccgtaaaattatgatgcatattttagatgcacatattattttcgaaaaaaaaaaaagaaaaaaattagtgatatgtaacccataaatacatataaattcgattaattagaaaaattatcatgtcaatatttttaatttttatgtatacataatattagatttagtatgcaaattcatgtaagttattattaatttagacaattatatatatttatatatatatatatatatatatgatatgttcttacactaattgaagagccatggtgggatcttggcgtgagtagtgattgttatttggttgtaaagcattgacttggaaataatttcctggttgctggtgtaccacaactgatgctgcaccctcatcatcattattattattattattattattatgatcattgttattattatgattttgatgaattagttcatgatgatgaccatagctgcttgtaccaacattcatgttcatatttatgttcatgttcatattcatactcatgctttggttcctctcattctcagctatctgtaaatattattatgcataaaaaaaaattaagaattaataattcaatttcatttatatatgaaaatggattatttatgtatttattatttttacctttgctcgtagaagttggttgttgttgtgcaaatcaatttcctgcatcagtattcaatttatacaattaatcccacattttaataattatatttgttacattatatatatatatatataaatatatatttacaaacatgcattaggcatctatcaatcatctatcaatcagggtcagttataagctaagacgggctagactcacgcataaggcccacttatcataggagcccaaataaaagaaaaatcttttattttgtataactttgttttgtatatactttgattaaggtggaatgtagtaagtttagtttgatgtattttagttttcataatcgttcaatgtcttttaaatattttgggattcccatttgtgctaaaagaatttcagtaaaaagagtgtggagttttgattgatgaaatggtagtaagaatttgtttttggagttcaaggaatatatcttttgctagtagagtcacattaataaactcggtcatcatttccattcacatatattagtcatagataatgatcattcttaggaagttattgaagcaaattaatgcaatttgtcgtgcttttttgtggaaaggacaagcaaaatatgtacgaccagctgatcaagtggcttggcgagtagcttattctcctaaacgagtgggaggatctagtttttgagatttacatctgtagaatactttggacagttttcctccaaaaaagataatctatgggtgaaattgatacatagtatatctcaaagactcatattagtgg

SEQ ID NO: 22855 - DNA, 3523 bp, Cannabis sativa
ataaaaaatagaagtggtcctctgactagaaaaccactaaattcaacacaccattgtttggacactctccactatacatgacctataaaattagtcacccaaattaactccattctataggttatgacttgtgaagttttcgaccaaagagagttatttatttttattaatgtatgtgattattttggtgttgatatagaaaattatagtaataataaatggtaaatcagacatagtctattacaagtcgtttaaggagtaatttcggtcaatataggtctactaaactcaagcttttacaatggtcatcaaaagatttagtactataagctaatgatctttcaaaagatttagggtactaacaatagaaatgttaacaaatacgggtggtgactaataccttcttaggtatcgtattattattattaatgcaattaagtatcgagtcacatataatttaatttaataatttttaaaaaatatcgctaaccaatcacaaaaaaccacttgtaggtaatacttagcaccgctaatatgcccaataaaaatactatactaacaattataattatatattcaaactagataagctgcctctttgattggttatataacttaggttgtctcttaccatttaggagaaattaatgttaaaaagcaacagtggtacctagtaccacctaagaccattttaaatggacgatgtaaatattgtgctaaatttagctcaaaaataagttaatattatatttgcccgaaattttataattgtgcttcaatgcactacgagtaaaataaactttattttaattgaaatacataaaaatatcaacaaaaatattaaatttttattgaaagtatataaaaatcatatcaaaatatataaatgaaaatataaaaaagttattaattttattaagggaaatactattttggacactatgttttacaaaagttacagattgggctttctgttttgtaaaatgacaaattggaccatgtatttttcaaaatagtactaaatcgtaccctgaactgattttttgtcaaaataaaacttaataataaccctatataaatgtgttatgataaaaatagttatgttttctacatatgttcgtgttaaaaattttctttaagttggttacaataaaaaaaatgtcgaaaattgagcttagggtcctatttgtactatcttaaaaaatacgtggtcatttttgtcatttaacaaaaccgaaggtccaatcaataatttttacaaaatacaagaggtccaaaatagtattaacccttatattaatgagtgacaatagagtaaataaagaaagtcatatttattgtagtgtaaaatttgactcatgttatatgttgtgtcaaattcggcacaacttttataatgtcctaaatttaaaccatattatataccatcattggagttcaattttatgaacatgggctataaaatgcatatatacaatatttataccactctgttggagatactctagggtatcaaatgactattgatacaattaagtatcgggtctcacacaattttatttaataattattatagaatatcactaaccatttccaaaacctcacctcaagttgatgctaaacaccactaatacctaaagcgatccagaggactagtgaaaccattgaaaagatttgatctcgtatgcttgcttcacaaagtagagagaaaagctacgcttagggatatcgagttccaagtgggagattttgtatttctccgagtatcgcctatgaaagggatccgtagatttgggaagaaaggaaagctaacccctagatttattggccattttgagatactagagcgagtaggtcaggtagcctatcagtttagctttacctcctgcgttgtcggaaatgcataatgtgttccatatttcattgttgagaaagtatgtatcaaactctacacatattttgagttatgatgatattgagtttagacatacttatcatatgaggaacaacctatccaagttttggatcagaaggaaaaattacttcggagtaagaccattccgctggttaaagttttgtggagaaacaataaggttgaagaaacgacttgggagttagagtcaaagatgcgagagtagtatcctgagttgctcaagtaaattttgaggacaaaatttctataaggaagagatagttgtaatatcccaggtctctttccattcaagtcgaccaacacgcttaaattgaaactcaaggtaagaaaagtacatccgtaccacataacatgttaagatataattattatcattatgacttggttatgatcgaggtaatagaatggtgattaccgttaagtgggttaaagtcatgacgtcaagtgaaactgttgttagattttatacttgtcgattatcttattagacagtaacagagatatatggatgccaagttaggacattggcgttgccttattaggcaatgagagatatggatgccaaggtagggcatcaacgttgccttattaggcaatgagatatatggatgtcggaatagagcatcagtgttgtcttattagacaataagatatatgtgtgtcggggtaggatatcgatgttgccttattaggtaatgagatatgtggatgtcgggtgtcttattaggaaacaatataaatagttactttataaaataacagatatggcttgttttattatacaagtacttgagtattacttgttaaattatgttattatcctgaattagatacctggttgttatatactttcattatttactttttatgctgagtctttgtgactcacgggtactttgtggtgcaggtaagggcaaggagaaattaggatagtcatgagacgacaatcttttttgaaaaatgtacatatcgacttattcagcttgtgtgctcgagttgttaagagttgttttggaatgtacttaatgtatattttgacttactgttgtatataatccttttcttaaaaattttgtaacaagaaattctcgaaacaaatttttaataatgtcatcctgtccattggggattaagtagggatgggagtataaatatgggattggggttgcattccttgttcattatccatccaatttctattcataatgccatactaatatttcagcattctttaaaaaaaaaaattaatgttttaatatttattttttctttattatttaaattttcaaaaatataatatcactattttacaaatttatttatttatttaaatatttttgttattatttaatttagtttttcataaatttagtctcaattttttaaatagtcaatatcgaggaatgaattaaatattttttgtactttagaaaccaattttttgtattttcacataataaatttaagataaaatataaaattgttaatacaattgttgaatcccgcctaactaactattattcgttattattttaaattaacacaaaagttaatacattttttttaatataattaaaaaatatttacagc

SEQ ID NO: 22856 - DNA, 2840 bp, Cannabis sativa
  modified_base (255)..(268): a, c, t, g, unknown or other
gccgacaatggcaatcacagacggctggaaaaaggctcaaatacccaagtaaaggcatcggaggtcgagggtttttaaaaccctatttgtacggagagcgtttctgacaagcttctattacttaacttgctttgaaagttatattataatatcaagaagaagagaaaaaacacgaattcttaatacataagtttttttcttcttcttcgttaattttaaggaaaagtacgtatgttgtggacattgtcccacatnnnnnnnnnnnnnnagaattgagccatatataagaacatgggctactccactcatggccaattagttttgagatggaaccccatgattctcaacagtattcgacattgtatgtttttgcattaattaataaactatgttgaattatattaagcaaaaaaactcaggcacataatttgaattttgtccccttcaagatcaatatgcagaatgtaataaggctgagcttgattgaatgatcgagttgacgatatatagattgcgaataagatgattttttttcttcttctaaagattgcaaatatggtctaatttaaaaagaaaatgatgataaataattattattacacatatttaccatatttctaatgttaatatgactttaatttttattgtttaatttaaaaagtaaaataaaaaatttacatacaaaattaaaatctcttccttggacttatttttctctttttttgtaatcctatttctctatcaaacaaatgaacctaattagtattaatcatcccaaattcatactattaaatttatcattcttctaatcccttttaccaaacaaaaggtaaaggatcacatatcattaataacatatatcatctaatattaattacatttctctcctaatataaactctattttttagaaataatataaaaaaaaaacatcattaataagttattaattcctaaattaaaaaggaaaaaacaaaatcatttttgctcaattgcaaaagattgggggagtggaggagacattgagggggtttgccaagtaggtagggttatgatctccggccatgataacaacaaacttaggctcatcacaatccacaaccacctcatcaatttccctccttttcagatcatcatcatcatcaccgccaccggccgcgccaaccgcggttggagatgaagatgatgatgatgatttacggtaggaacaagctaggattatcaaggccaccgtgatgagacctaacatcagagcaagcccaccaaacaagtacggaattggagtgttcttccaatgcggggaaccaccatcaccggcggaatgtgttgttggagaaatcatttgataatatgatatatatctattagttgtatacactctgtcttttatatctatttatatatatttatatgattgtatttttagtatatgtttttttttttctgaagcttatcaagactatttaacagtataatcagagataggaattagttacaaatctatatatacatatatggggctttaaaaaaggagggtgatgttattatattcttgcttcttttatggttgatatatatactttggactttgagtgttttaaaagtttcactgttattattgtggtttgatttgttggggagtttttctcttttatacccttttttttacaagccaaaatatgtataactaagccaacttgttagttgtttcaaacaatgtcaatataattaagtccaagttatcatgactgatattgactctagatgaggttaatggaagacgactagggtcaagtctttaattaatctctaatatatatggttttgtcgtaaatttgggggaagaaaaagaaaataattccagatcattaagtttatttttaccaatcaagagtaatttagtcaacgaaaaaaagaaaacttcgtaagagaaagtgataatgttcgttataatgtcacacacatatgtactaccaaaaaataaagagaaaaaaagaacgatttcaatttaattaatatcatggtttttatgtaaaatcactagtacatgaatattcatgttttattgatgaagcaaaccagcatgaaaagcatagacaaagaatgtgaatttatgtctctatctatctatataaaccaataatatatatatacctagctattaattagtactctaaacgtgtctttacagcttaagtattaattccctcaaaacaaaaattaataattaataacgtaacttaattgcaaaatttcattacatataaaaacaatatatactatcttagtatctcttccttttttttcatttacagtctgaaatgaaacaaatttaggaccaaaaaaaaagaaaaaaaactaaaaggataatcatttagataaactatggtcagattttttgctctaacggtgtatagtgaaaacagacactttatctgttttgaaaaaaatttaaaataatttatacaatgaaaaataagatttaaatatttaatcacacatgtaaaaagtaggtacacatgaatgtataaactctatatacgacgtcataaaatattcatgtataatcatgatgatgatgatcagatactaatgagcaaaatgatgatcatatatattggttatatataagtacttttcatgtcattatatcatcatatataggactaataattaatatcaatcagaattaatgtactatactacgtacaacaaattacatatataatagagattaatgatatcagttagctatatagctatttacatggttttaaattaaatattgttcatcttcatcgatcatgagcttctagccataaccattacatgcagttccta

SEQ ID NO: 22857 - DNA, 2716 bp, Cannabis sativa
agtactaccgtcaacttttccgttacaatttcttaattaactttcacacttgaaaacataatatgtatgtcgaaaaaataatatttttattcattcaattttttttttttttttttcacagacaggggtgttcgttatgcttacaacatcttcactataaatttttaaaaattttcgaatagtttatagtatcgaaaatacgtttgaagttttttgaatgcgcgtggtaaacttgaatatcaagaactctgttttcagtactgtaaactattcagaatttttcaaaaatttacagagattacagagatgatactataactataacaaatactgctataaaaaaaaatttgaaaagaaaaatattttgacatgtgatttgagacgtgaaagttgactaaaagattgtaattaacatttacttctctatcttatactataacatcccaccaaattatgcatcaaaaatattccaaccttatttatttgcacatataaaacctaaatttttgatcatcgggtctagatagtaatatatagtatcagttactttcaaatgttcttctaataaattcaaaacagagtctgtactgacataattgaaagaaaattacaattttacaagcattgggtacttatgccgctaaaaataaacattgaatttatgccgcttacaaacataaaattttgagtacttatgccgctatttatccttatatttttattcacttcataaaaataaaatatataatatcacacaaaaaaaaaataataacaaaatatatttaactttatgaataattatatttacatttagttgaatagtattcattaagctaaaaaaacatatgaaatagctaaagtttgatagaagcttgacattataattttttctcgacaatttaaaatttaaactattttttggaagtgctctcaatatatgtatatgttagaatatggtggaaaaagtaaaatatgtatattgaaagaagtatcatatatatatttgtatcctatatgatatattattttctcacatgcatattattattatcataaaatcatataaatataatattattgattaattttgaaagaaaatagaaaaagtaaagagaagaagaagaaagtgattattctctgaagtatgatcataataggagggaactacatgtgaacatatatatatgtaagtttggtatatagtatatactatatagtactattgggcaaaaacaaacatgggtgttctttattaatgggataatttgtagggctttttttcttttatgtaagcttttttattttttatttatttttaattgtttttgcttcatatttcgttttcttcagtgcctaaagtgagtgaattttgctttttgggtttgaacaggatatttgatgtatcaatgttcaacacaagaaaaaaaaaaataactgttggttgggaccattgaatataggatatatatatatatatatatatatatatatatatagacaattttttttttatatgtatttggagcactaaaaaagatgagttaacacaaaatttatagatggattcagatcacataatataattttcttaagggtacatcttaattgtaatcaaaatatgtgaccaaatattagttgaccaaagtttattttcaaataacaaataattttactattaaaaatagtgaaaagaaatcattactaatttattattttcttactttactaaaccaactcgatctcaacaattaatgacagacatatcactcagaacattaaagcctaaaaaaatacaataaacatttaaaatgaaaggctcatgcaatttgatgatgagcaactcaattagcgaatcatttaataaaatttaatgatacttaactaatgaattcaaaagatatttacaattttccacaacacctctaaacgtagatatcatcaccttaggactacgtacgaactgcttggactaacaccaagcaatcaatctcgacgctactgaccattaggaaatcttgcttcagtcttgaaaacacctcctttagagctataacttcaacgacctcaggaagcacaacaccctcctttaaggcaccacaaaaccgtgatgatctctaatcactccattgaacctaaacatgtcttcctattcacatataaattcatctttattcatcttgaaattgtcaatttgattttaatccacagctcagcactatccacaagacaccaagtatccatcgatggaaaagaacttctatcctgagcttttctccattgatcaagagttactcgagctaaattaacaataacctccaaaaaaattcttcttccccttccacaaaagttgattatgcataccaaagcacctaaatacaacataatcaccctaccacatgtccctcatccaattgagcaaaaacatatatgacccattacctaaaagaacagccaactataaccacacaccaacaactatgagcaactgacaagtaaccaaataatgtaagatagactcacttgccaagtaacacactgaacacaacagcgacaccacatacttcaacttcaaattagactctcgttgggaaacaccattaatggcccaccacacaaaattctttgcctttggaggtaagcgcaacttccaaaacaccaccatctcctaatccacccactactaaaaaattagattttccctgattattttaaataa

SEQ ID NO: 22858 - DNA, 1615 bp, Cannabis sativa
ttaattactggtttatgattgctggtttattgctgttttgtattcctgatctttgcttgtttaattggtgttgtgttggttcttgttgggagttcaagcctccacaaaatgatttatcttcaggaacacatgctaaacaaccccaaatagatagtttattaaatttctaagttcaataaaaaataataacctttgaaaatactttccaatttttatccagaaggtcaactgtgaagacaattagaatatttttaattaccatcttatattttatcattatattcccatataagaagattcaatatccttttcaagatcatctgcatgtctaaaaataatcaaaagacacattttgaaccaaagattcaaatcagtatacgaaaaattaaatatacctgtggattggcataaaaatcatgaaaagaatccgactgtttctcagctttggtggattcaaaacgataaaaagcgaaatgggttggcgtattattaacaatatttacagctgggattttcagatttggagcagacgcatctgaaaatggatgtctttgatggaaagaataagacgaagaactccggttgatcttggccaaaaaacctagctttgaaacgaaatggttgacaacatttagtgattttctagtccaaacagccatgtaagaagaacaaaacgaccacaaatctcagaatgaaaagaaaagaagggggatttaggatgggtttgaagagaaagagaggtgggtgagaaagtagggaagtagtgcagtggtagttggagtaaatcctatcttaaatgcgaaacaagaagaagaaaaaatggcgtgaaaggagagaagagtagactgaagagaatgggatttgccattttgggttattatgtgtatttagattggttttgttgtctgtatggaatggattagagcgccaaatcagaattgcatttacacgtgtaacagatttgacttcaacaacgtacccctcaaacgttgaattcggccctatccgagaatatatgggcttaaggcaaatttaattttaaagcctaaaaaacatatataaaaaaaaaattgaataagagtgttatgggattcgaaccatgacattgtataatacatacaccttaactaactaagctaggactatttattgtttaaaatacacttaattttactttaataaataccccttcttggatgagtctatttccgaatgcacggttggttaacatggttttttccacctcggatcattgtctttttttttttggatccatctttttcgattccaggcaaattctaggagggtgtttcggtttgagaatgtttggttgcgtgatcccaagtgttatgctattatccaggaacattgggaagcttgtgtatcgggtaacattgttgataaagtgggggcaattcagggtcctcttggtgggtgggaaaggagcttaactaacaattttaaggagagaatccaaagctgtaaaaccagaattgatctccttaaaggtcgactggatgtggagtctctgtctgaatataaggaggcgaggaaacatcttgttgaaatctatcatcaaaaagaaatcttttggcggcaaagatcgaagcaattg

SEQ ID NO: 22859 - DNA, 2644 bp, Cannabis sativa
ggtggtcgtggcaataatgatggcagaggttcttatactcaaaattgtgtcatctatcaattgtgtggaagaactggacacatcgtgcaaaagtgttatagaagatttgacatcagctttaatggaccagatgactccaaccccaatatctcatcttccaactccaaccctcaagcacatgttgctgcccagtcctcacaagatgacactgcatggtatttcgatagtggagcttcgaaccatgtgacaccagatacttcaaacctgcaatagcaagcatcatacaaaggtaaagagaaattgattttaggtaatggctcatctctcttaattaaaaaagttggttctagttttttagcagctagaaaacccctttatctcaaaaatatcttacatgttccttccattcaaaagaatcttattagcatctctaaattcactcatgataatgatgttactgttgaatttaaatctgattgttgttgtgttaaggacaatcaatctaagacccctcttcttcagggaacaactaagatggtctttatcggctatccacctttattgctcctaaagactcaaagactttggctactaatccaatttcctcaacttaccagtgtcaaaaccgtgccactcctcctgctgtctatcacactagaaataattcttgtaataagactagctctcttgtaaccttgtggcaccaaagattgggccacccttctcaatatgttatgaataaagtgttgaactctttgaatatatcttcctcacaaataaatgtttgtcatgcttgccaatatggcaaattacatcaattttatttcttatcttcactacacaaaattactgccccttttgatataattcacatggatttatggggtccttccccttaccctaccagtgaagatttcaaatgctacatatgttttatatatgattttacaaaataaacatggatttttcctttaaaaactaaatctgacaccatagccacatttttacacaatgcttatgttgaaagaaatttctccaccaaaattaaaagtattcaataaaattggggggtgaatatagacccttagctaccatccttgctcaacttggcatagtgtttaaacatctctgtcctcacactcaccaacaacaaggaagagctgaaagtaaacatagacacattactgaaataggactcacccttcttgctcaagccaaaatgcctcttaatcattggtgggatgcctttgtctctgccacttttctcatcaataggctgtctgctcaaaagaataaatacatctccccatttgaaagtttgcttgatagaacacctaattacacttttttaaaagtttttggctgtgcttgcttcccttttctcagtctgtacagcaaacataaattcatttataaaacttccatgtgtgtctttcttggttacagcccttcccacaaaggctatagatgtctccatccttcaggaagagtatacatagctaggaaagtcacatttgatgaaaatattttcccttactcctctctgttttctagtccagcacctgctcccaaaacatttactcagcctactgctattcctttcccccagctgcctgcacctatcaccaccgtacccacttgtccccatatttctcccccacaatctaacccaattaggtccatagatatctctccacctccacaacaaacacctattacatctcctatgcaacaactcaccacaaacatagcacaacccccatcttaaactgagcaaaccatcccacactcactgccttttctaccagtaacaaacaactgccccatggccctccctctcttcatccaatgctaacaaggtcaaagtcaggtattcataaacctaaggttctggctgctaatgttactagtactaaccaatttttgattgagccaaaatctataaaaaaggctcttgcagatccccaatggaacaatgccatgactacagaatacaaagctctaattaagaacaagacttgggttcttatgtccctacaattctgatatgaatgttcttgataaaaaaaatgggttataagaaaaagcacaaggcagatggtactttggaaaggttaaaagctcatcttgttgcaaaagggtttcaacaaacacctggagtagactattttgacacttttagtcctgtggtgaaaccctccacacttagaataatgtttacccttgttgtcacttacaactgggacattcaacaagttgatattaataatgtctttctcaatgggtagcttcatgagacagcctatatgcagcaaccaaagggctttgtggatcctcaataccctacacatgtctgcaaattacaaaaagccttgtatggcctaaagtaggccccaagagcctgatatgaaaaactaaaatctgccctgttgtcttggggattcataaattatgtctctcacaattctctatttttctacaaaaaaaatggaaaactactgctcattttaatatatgtcgatgatatgctaattacgggagaagacacaactgctattatgttggaattatatttatccaggatcttagatctatttgcaagtatgttgatttaacaacctaatattgaacttctaaaacgatg

SEQ ID NO: 22860 - DNA, 5692 bp, Cannabis sativa
gtcaatattttagtgctttcattaagggtctaaaattctcattcaagaagctctcatcttctgcatggttgtcacaaggcgtgaaaattcgactgaaccacgagaccctatggtcgcagaccttaatgtgcaagtgccacttgttgtgaccaatccaagcctggctagccggtcaccacgttctggccagctgtctaaaactgccaccatgttccggccagctgtctggaacttccaccacgaaagtttgtcaaggagagcaagtgcctattggacccactctccagtccacaactaaaattcttagcataggagtgggacctcgtgtctatgctattgagactagacctacggttggcgaccctagaattgacgaaccccatgtggacctggggatgatactgaacttgctaggctgagagaggttgtaggataagttcagggttatactaacctcctgcaccatgaccaacaagaaacacaggctactgtgggcaatgtttttgcccagtagagacgcaaatactaggagtggatggatcggctagccgcgatcctccaagcccaacaggcagagctgaaccgtcagaatagggaggctaacgactttgatcaggtcattcaaagagagagttggatctcaagttgaagagccctccctcgtaagggatccccatctgggaaaaggtccctatgttccagaaggaactaagcgcccaagcgatcatgggcagacctcaaggccaggagggctaactgtgtcccaaataaggccatcctattagcccaatgatggccaggtcttgcctaaaaggtcatgtggtaggactgaccaatttcaaggcatgcgtagaggcaaaaaaggagggggatacatcccaccaatacaaggtcaaagcaggtctcatagtagggagtcttaccctaatcataatgatgaagtgccactagtcacccaagtggtaagtgcactaattggtgagctcaaaaatttgggcgcaacaatgacaattccaccatgtaatggttagacacgttctaacccaaggcccacataatttgtgtttgctagaatgggccctcatgtcaagttagatcttcgagctagcttgaaccgaagaataaattctcaggacgaatacatcgtgcccctgaacactccaccaatagggcagaatagaccaaacccggccaacccaacagggggctggccagccaatttcctatccacctaccggtcagcctggccggccaggggctggcaggttaaaatttggtcaagcaagagtaagtcgaagttgatcctctagtgcaagcacaactagatcaagtcaagaacatgacacaaggcctgcctggcccaaagctttccaacttagagttggacaggacccaagagtcacctttctctacgcacatcaatgcgctgcccttacctaccgagttcaagatgtctacttgggggatgtacatagggaaagaagatctcttgactcacattaaatattttgaaatttagatggatttatagaatgttgaggttgatacccattgctaaatcttcccaataaccttgtcttaaactgcacagcagtggtttcccaaacttgctgttgaaaggttcaattcgtggaactctttcaaaagagagttctacacatagttatcatcttccaagaaaatgccttatagcctggaagacttagttgatgtcagtggaacctctgaaagactatctttaaagattcatgactgaagctaccaaggtcaagaacctggtggaggaaggaaggtacacatccatcatgagtgggatactacctttgagtgaattgtggagggacatccgtcgatactcaactcaaaacatggctgatataccaaacttttaacttataaaccctaatacactatgatggattgtgtgtaaacttataccatttgattgtgtgtagtcttgatgtagatgagatttctagctagatttgtatgttttgatctaaaattaacttttttctgagagttgactttgactttgactttcaggttggcttttgtagtcctcttttggatagggtctttgaattcttgatctcttgatgaaattttttctcttgtgaagtatgaagtagttgatatacttgttgaattcacttctttgattatgtttgaatttactgagaaaatatttatactttgtaaatttacttgcaaaatgatcaagaaaatattagtaacaaataataattaaacatttatttatcatcataataagtgagtgattgaattttggtcaacaggaggagcagtggccccaccaacattttgagtccctcgggggttcctaaataaactccactagaacctcagctcacagtgtcttctctaccataaaagcataggtagtcgtgtcatccatattaatcatcaaataatgttttattttggggttcaaccttgccagatacttttccttcttattgaaattggttggcactcgaggctaatatggtcaatctgtcaaattgagtattatatttcgtaattgacatattctccccttgggtcaactaggtgaactctttcctctttctactacaaactgcctcattgtagtacttagcgttgaacaagtcccaaaactcttcctaggtaatcttggtaacgtctcgagtgaaggacaccatattccaccaaactagggtattctcctagaactaaaaggtggcgcaggtcactcagtcgttgtcagtgacacccataaagtttgatattttgttgatgactgttagccactactcaaaattcataacattcagacctctcagaaagactggaggtgcttgcttacgaaacctttcgtaaagaggttccatgagattaccaacaaaaacctgctccactagaaacacaagagcaggggctatcgattcttcaagagcaggcaccacaggagcaccatgttgccttaagcttgaaatctcttcatcttgctcattaattttggcttgcatttctacaaatctttgttcccaatcctaagcagcctgcagtgggttaacattacctcgaccgcaaaccctaccgctttgccctccaccttagccacaaacattagtgggattctgacctttttaacaacactagatctgaccgagttgccttggcttcttgtgttttgcctggtatcaattctattagactagcctatgaaaccatgagttagcttggttagatcgtgatcaagattaaatctgactaccgcttacttgagaatttaaaacatgcactgattcaactatcaggctactaacatgcttcctatcaagcttttcttattcacatactaataaatcaaactactaaaatatatagaggcttatgaaccgtgagttaagcttatctctgttgatgattgtacatatcgcgatgatatttagaagacaacgtggcgactttgataccaaattttaacgccctactattttaggtgcactatcatgctttcttaattaatgtgcactcattttctaatcaaaggatttattaaaaatatgaataattaaaaaatttcataaataaaatcaaacttaaatagatatatataagtacatattttgggatcctatttaaaagtttcattttttttactaaatacatgtactacaaaaattgtcgtctagcgactaccaaaataaagtctaactgtccccaagatctgaacactccaggtctaactgccttgatatatacaatcttcatcttgctcataatcactgttgttcagaattttccttgcctttacctacacatgtaaataatatttgtgagtcgacagatttagtaagaaaagcataaacataaacatataaaccaaattgtaactaggctcccatgcacctagtcacgatactatctcatgtctgacgcgtactaagtttgaaatgtttgtacaactaaggctagcatatattcgtcaatatccaatgcaacgctatgtacatcgacaccactgttatgcaaaactaatggctttagaatttgcctaacatatatccgtccatattcagtgcaactctatgtacactaatactattcttactgatatgttatctaataggcaattataaaacatgtacgctgaacatgtaagtatgcatatcattatactaatcttatcttgattctaaatttcgatgtgccaatcaacctcagtagaaactgctgcttgacgatttaaagtcctaagtcacaaattgcataaatctaataagtgacacactaaatcactttttggggacttagactccaactaaaagttttccaatcaataaacagtgtggtaatactctaattaatatcgatgaaacactaaatcgaggctctggggaaaattcccataaaatagtaggtcgtttccttaaaaacaataagctacttttctaggacactactagagaaaatggtagaccatttctaaaaaaatagtatgctattttctactgtagattttctaaaaatcctatttcaactacaaaactactccaaatcttctacaaacctccaaaacacatattttaggttcaacaaacataaaataacatctaatagcagtcacaaacccatgaaatcaatttcaccattaaagacccaactttgagattaaaagcttaaaccttttttcaaaccctgctatagtcaacaaaaccaacatacaacaacatagttaattttaaaacaattccaaaaacaaaccctaagcattcccaagtcatacagaacctaaaccccaataattgcatgaaaaacctaacttttaaccttagaaattaaagaaaaagagacttaccttggcttggctatgttaaccttgaattctaagctgaataatccttgaatcttggtctagaaatggaggaaaagttagtgttggttgtgtttctttcttggctgaactagagggagagtaaataagaaggcttgggttttgattatttttaataatctagctttaccaaaatgtttatttttaattgaatacaatcagcataaaaatctcttagaaaatgctagaattcactaaaaacaagaattcattaacttagggcaaaatgacactttgcccttacttcactatgaagtaaccttaaatgcctaggggtaaaatagtataaactacaatctttgaatactctcgatattctaaatatctaactattttatctcgctaattctaagatactccactgtatctaagtgactcaatttggccaaatcgtcacatttcactgttactaaacataaaatataaaaaatataaaatttcatatataacatatataatatatatatttagaatttaaatatatctccataaatgagaaaaataataatttacagcctatttttgacaataagccttaattatctactaagaggcataaaaatgataaaagattaaataaatccctatttatttgttaatttccatataaaatcaaatggtcattacaattttaaacttagtatttttttgaatcaaatccatccaatattttaagtccagtatatattggattagtttggatacatcgaatccaaaaaaaaaaaaatgtaaactttcatatgtacatgtatattttacgtataatattataaaatctaattactcatccaaaataaatgaaaatac

SEQ ID NO: 22861 - DNA, 2222 bp, Cannabis sativa
  modified_base (579)..(582): a, c, t, g, unknown or other
atatatatagcccacaccactcacttatgtatatttatcttaatttaattaaaaaaatagtttagtaataatgctatatatatatatatatgttacacttttacacacatggttagatatttttcttttatctttcttctttttaaaataataatttcttatagtacgagaaaacaatattctaaaacttgaccccatatttcataattttgcatagctttaattttactaattattatcctttttgtcccatatgtaattacctttctatgtgttttgcttttatttgttttcttttctcaatctatcccattatataaatatatcaataattatttattttattgagaaaaatatatttatatatagtaattaattatacatattaagatctcttttaagaaaaaaaaaaactatatatatatgaagatcaaaatatgtgtcgttactaattttacgaaaaaaattaaaatcgtgactaaaaaaatatttttaatctataataataattgtcactaaaagatttgtaattttaagtattaagggttagtttagaatgtcgtattaggtcgtattgtnnnntattatattatattgaattggattatatatatcatatttttatataatactgtactaaattttaatttatactaaaatattatatatttaggtgcacataaaaaagttaataccacatatagttttacataaaaattttgtataaaatacaattcaatataatactatactcaatacggtgtaataccgcgtaccaaaggaactctaaaatcataaaaactatatatatatatatttataaagcataaaactaaattttaataattatatggactaaatatattaggcacaacaaactttgttactatatattataattaaaattaaagtagtgattatttttttaattttatttagatattattttaagccacaaataattttattgtaattatttttttttcactaatagataattttttgtgtgataaaaaatttataatatgtattgtattgtatagtgttaaatttacttgtattatgtaatattatatttaatattgacttattgtatgtacatttaaatatataatattttaatataaattaaaatttaatatattattatataaaaatataatatacaacaatacaatttaatataatatatcaaacaatccctaaatgtaacatataaggttcaaatgtacttgcatcttcatttatagtgtaactaaataagaaatgctaaatgcatgtgcttactcgatcttaatatataagcaacatttacaatatactaataatttatacaactttatatatatattaacatatatacatatagagtaattaaataatatcagtctagcacaatataaatttactaacgtattattctaattaaattctaattaatattttaatctaatcacacgaattagttagtaatataatatagtactaattattcacgtggttatattattttactataatttgatcgtctcatatataccttatctatattttattttataattgtgaaggttagttgtttatttttcaattaaaaaaataaagttgtactaattaatatataatataggtcaaatcaatagaggaaaggaaatcattctttccgacaattattttctcgatggaagccataacgtaatgcattaattaaatggtgggtcatagtcatggccttcaaaattatttatagacatttattaacattgttttattttcatttttaatttcaacttgcctatctttcccccaaagaaaaaaaaaattcatacaaacaaactcataatatggtatgtggtagcatgtttggaaaatattatagaaaaaaaaaacgaaaaatacttagagagcaaatagaatagttttctcccttttttattttcggttttgctctttttttttttctttttcctcgaattataaaaaggaaagagatgaaaagagtacaacattatattgaatgttataaaaatttgatgttgtccaatacttgcgttgacttcatattgacttatattacaataattattcaaaaatttacataagttattatttttgttaaattttttacacttttatgtttaatttttttttttatatttttacaatgttcatataaataatacaaaaataaaagaaaattacataaaaataataataaaaaa

SEQ ID NO: 22862 - DNA, 1051 bp, Cannabis sativa
gatcgctaaaggagaaaacctagccgcattccacaataatttctcttctctctctcagttcaacgctaataaaaaaaaatgaaagtttaactccggcgaccctgaagccacatcacagcctcgaagccttgaagccgctgcacaaccacgaagcaagttcgtcggattccccaggtccatctttgttttctttttctcattctctgtctctttcccatgttttcctaacccaacttcatcgattggtattttgcaggtccaaactcttgcgattcatgttctctttctcagtttccttttctttctttctttttcggcaatggtgagacgaacgaatgggatgcatagctggtggccctggtgaaacgaatgcagagttcggattttttaatgttggccggagttgaacgaaaaggatggggttgggtttgcacctagtttcggttcccaaattgtttaaaattcgaaatctgtttcagtgccatgagattagtgttttggtatgggtttaagatggcaatttgaacactctatttactatgtattttctatttttttaacccttgctaattgtagttctttttagtatttattttattttcaataatctaagatattataaattaattattatatataaataaattttataatttttgaacaatttataatatttgaataatttttattatttattaaaaaatgaaaaatgtgtactttaacgtctaactttgttggactataaatgagttctcattttgactccaaatattatgtccatcaatgatggctagaaatatttttctagtccagcattattagactagaaaaatacactttttatgtcccaagctactatgtccaacacaaaatagactcaaaaaatttagctagtctaattttgatggacttaatagggggttttgtagtagtgagtcttcttttatactgatgttggtggtggttgatcctcaacctcttcttccacttgttgtctccttcatacttcttcccacttctcaaggtgattgccttacagttttcttttggg

SEQ ID NO: 22863 - DNA, 9968 bp, Cannabis sativa
tgttaacaactcagggttttggcgaaacctatggcaacttaagatcccaccaaaggtcaagaatcttctctggcgagctgcatctagggttttaccaacctgcttgaatctcagaactaaacatgtggatatctcctccacttgtccagttttccattcggctctcgagactatctcccatgctcttctttcttgccatttttcttcatgctgttggaattctatggatctacctgctggaattgctctcgatgactcttttccaatctggttagataacatctttcataagcttgatgctgatcgtgtttcccagatggtaatggtttgttggtctctttggaaagcaagaaactctattgtctggaaaaacaaagctctcactgttgcaaatgtcttagcttcagcacggatatctcttgatcattggattaaagcttaggataacacttccctatcctccattaatttctataatagtgaagatggggctgagctatggactaaaccggatacaaacacaatcaagataaatgttgatgctgctacgtttgctagtgacaacagatatggttatggcatggttgcaagaaacaacttgggcattcttattgacggcaaagctggatgtaatcttgggacctttgcacctgaagttgcagaaatcattggcatcaaggaagccttaagctggattaaaaaccataactggcacactgttgagctagagactgatagcttactctctgtccaagctattcgtagcagaattcctcttaattcggtttttggtattcttgttcatgattgccaagttcttttatcttcgatatcttcttttaaaattcattttgtaaaacgttcagcaaactgactagcacatactgttgctaggttgtctcggtctttatctgaacgtagcatttgtgtgtctaacgctccagcagttctgctggatattaggtattcagaatgctaaatttaatgaagttctcatttcatcaaaaaataatttattttactaaaattatatttttaataaaatttattgctaaaagtaggttgtaactaaaactacatttgtaaaaaaaattgtgattaaataaatctagtaactattttaagatttaacaaaaaattcaaaattgtcacagatagatcttaaatattaaggctgtgtttaattacactgtgcgatgttttttttggtaatttaatgggttttgtttgtatattaatttataattttattttgttgtatagttcttctaaataaaaagatattcgaaagaattgtcgtagaaagctagatgtcgtccagaaaggagttccaaaagtctagattgtccactccagaagttgtttgtctttatgggaagttagaagtcatccggaaggatattcttggacttgtaacttgtccatctaggaaaagcctcgttaaatgatagatgtcatttggaatggaattcttagaaatctatcttgtccactcccgaaggagtcttaaagaaagctagtctccctccgaaaaagagttttggatggctagttgttctctcctgcaagtgagttctggatagtcgactccagttgccacttttcctatttgagaagccccttcaacgtatgcactggtctttcttccaagaagcatacgtagctctagaagcgctttaacatgagctagcgtggagattttgttacaatgaagtttgttaaattttttatgttgtaactaacttaacaatttagcttttgcaaccatagattttgggatccatatctctaatctataaatgctaccaacacttatgattaaaaaggagaggtgtgattaacagatgagttttgagaggcatttttcaaacagagattgaatgtggagagaaagacagaggtacatagaaaagagagagattgggtttgggattagattaagaatcttctgtggatgaagaagattctagggtaagagtgtaagagataaataatttaagagaatccaacagacaatcgatctcgactgtaatttaccttattcttgctcaattaataaagaatatttttgtggtgttctaaaattagagtagagccatagatcacatcaatctataggacttgaatgaaccagtatatgtgttggtgttcattttattgctttaatcatttctagatttagatactctgttcatccctatttttatctccgattattgtttgtcaattgttaaccttgtcattgctaattgtttgtcggttaagatttagttgatttgactctggacattagttgtcattttcccacagatcatagcttcataatcgaataacgatgcagaatcaagatgcattttgttgtacttcttaaagaaataattaacatcgtcaatgaaaatatttgagttggagaaatttgatggaataggagactttgcgctatggagagaaagtttaaagtggatcctagtgcacctgaagtctctaaagttcttggagatgagaaattattggctgagaagaaactaggcaagatagttgaaatagaggagatggtttattgcaagatcatcatgtacctatcctgcagtgtgaggagaaagcttatcttagaaaagacgactaaggggatttggaacaagcttgaagaatttaacaagaagctatcaattgctagcaagattaatttgctagaaaggttgtatggttttaaaatgatttcttctctttcattaaattataatattgacaagttatatgagattattgtagggttcactaatataaatcataaggttgatgaagaaacctaggccatcattttcttgagatcgctcccaaatgcatatcaataagtcaagactgccatcaagtatggtagagatgtgattgcattagacgatgttcttgctgcactcaagtccaaggatttttaattacaatttgaaaaggaatccaagaatgaagatgtgtattttgcaagagggagatcacctaagaaagtaagttcaaagagtatataccatcactctaaatcatggccgaagtccaaagagaaggaaacttgaaagtgttaattttgtcgaaggttcaaacacttgtaaagaagttgcaataagtacaaggtgcagtaaggcttaaacaaatctcacaatggagatagaaaggacaaccgatatcatcaccacaagaaagattcagctgctatcacggaggatagtgatgattgcttaatagatggaaattttttttccatcttagaattctcaatcaaaaggaagtggattccttatttcagatgcacttaccacatgtatccgagtcgagaatcattttttggttataaatcagttgatgaaggtaaaattctaatgggtaatgatcattcttgcagggtcctaagaaccgaaaatgtttccatcaaatagtgtgatggtagaatcaaagtgctgaggaatgtaaggtacattacggagttgaggcaaaacctcatatctctaagtatgctttaagatgaaggatacagatacaagtccatgcatagaagcttaaggatcaccaaaggttcactgatagtgatgaaaggtgaaaagatcaatagtttatatgcatctgtggcatcatagacttttggtctcaatgaacaagaccaaaaagaactatacaaataagataagactgaaaattgccttaccattttgtgaagtctgtgttttaaggaagcaacataatctgaagttcattccagcaagggatacaactaagaaaatactcgaatatgtgcatgctgatctttgggggccacacaaagttcctactcacttcgataaataaaattttctttctataattgatgattatagtagatgtgtttggacgcatttactagcaactaagcatgagtgcctagaacactttagagttttcaaaacttaggtggaaggccaaacaaatctcaaagataagaacataaggactaacaatgggttagattttattaactccgagtttacaagctgtgttaagaacatgggattactagtcatagaattgtagtgaagaccccaaagcaaaatggtgttgttgaaaggatgaaataaccctatggaataaagttagatgtttgatagagaaacaaatttggaggaagttatagctactagaacctacctcttataaatagaagcccacaaacatagttataggcttgaaaaacccttataaaatatacattagaaccccaaacctaatgcattaaagaacttttgggtgtagaacatatgtatattacttaaggaaactttcctatgttatgtcttaggtactaagggttatagaatatgcatttcttaaaagggtagaccaaaggtagcattgctagaaatgtgattttcaatgaatttgaatatccccacttgacagccaggaaaggtagtgtgtctccgtgtaatgtaggaaaatcaaaaaataagtacactacacacatggaaatagagtacataacaaaacatattggaagaaggtttgcatttagtattatggaaacgaaagatagtgcatagacaaaagctaaagtttaactggaagataacgatgatgaaactgaggtttctgaaggatttcgatacttaggtcttaaaggttattagttagcgcgtgatagaatatgaagagagattcaccctctgaaaaggtttgttgaggcagagcagattgcatttgcacttgtagtagtacaacaaactgaaattaaagagtgtataagctttgaagaagcaattttaggtggaaacaagtcaaaatggttccaaccattgatgaggagatggatttgcttcaaaagaaaaagacttggattgttgtactgaagcaaaagaacaaaaacattatggagttcaaatggattctcaaggtgaaagagagaataaatgagaatggaccaataaaatcaaagccaggttagtgcctaagggctttactcaggtggaagaaattgaccacaccaaaacattttcacctgtggtaaagtagaagacgataagattgatgttttctttggtagctcaaagagagtttgaagttaaacagcttgatgctaaaactgcttttctcagtggattcttggatgaagagatctacatgaaccaaccacctaggtttaacatggacgatattatatataaagcaattgttccctagatagtttgcttcataatgatattcactttacttcatgcaagtgaatcgattgcctcttgaatcaccaagatgcaatgaagtcatctttaggtagggaggtgcatcactaaggtatgatccttatactgtaatttgaataaggcattagtctagtttggatcacttagctaaggtttaatgaaaaacaaaagtctgcaactactacttctttttctttcaacttagctcatagtgatgtaatttaatttaatatctaataaataaaattttcgagtaaagcttgtttgtacttcattgttattaatcaattgtagctcacagactcggcgacgctcttaagcgctgaacaaagcttctagggttagtcttaaggtaactatgcttatttctttattgagttaagcactgccaacccataaatctttggataagtggatgaatgctcacacatgtaacaacctgatacccatgatcaagaaagcccaacgagatttggtagggcgagtgaccaatgaaggcatttgtttgattacttaaggcacaaataagacatagtatataggagctatgcacgttacgtgatcattcacaaaaatcatggcacacgagacccatgtatgtcacatacactttggtatatggaatccacgtgttaccctggcatacgggagccaggggttgcaatgacattcataaaattttcacaccagagttaagcactattatgatatatgtgctagaggtcttataaatattaatgagtttattaatctaaagtgctactgcaagtgttcctcctcggatcacaaaaatcaaaaaagaaaaaaaaagtatcatcaattacagaaagctcgttctctggaagcaagatgctgcatcaagaagagattttctaattcattgaagaacaccctctgggagtgggatgctgccctagttgtgttattctttcattaactagactcctccaagtataagacactatacatagcaagtgtttagtcaaatttatttcttttcttttttcgcccttggacttttttctgaaacctttaataaaggtctataagttgaaatcctcaaagcaggttctccaacaacctgtgattttgcccctatccaaaggatcaatttggttggttttttcgcacaaaactttgacaatgattcatctcacttatgatcataaagtgagctcatgcatgagcaccaagcgcacaagcaatagtccactatacctcaacaatggtttatctcactgaaggaagatagcttcaacatacaaacttcaaagtttttcgtcccagtcataaagagatcaacaccaggaggaaagagaagttaagctcaggcagtataaatgaaatttcaaacttcatggcgacaaatgtgatggttaataatcaagcatcaggaactattctaatcaaaatagaccctgaaaagatctagtcactccctaagagaaccgaaaccatgcaaacagctcatgtatggttttaggtgagtcgacatcactccctgtggtgaaattagattaccattcacagtcaaaactgcctcgtgaaaaacatcactatgactattttcatagtgatcgacactaagtctccttggagggtcaacacccagcgacctccaagccatctcacttatctaccacctatctatcatgttctcaccatcagcttgtatcgaccgtctccttggcaaccaaacggtagaatgtgaatgttacaatgaatcattgaaattcgcctaaaagacctccttgattatgccgagggaatgaggaagacctcctacattgtgataacagtcaaggggaagtggaggacattctttactatcaagacaaccaaagggataaagaaggcctcttctattgtgaatacaatagaagggatgatgaatatctctaaagttaaagactaaggacaaaatggagaccatcactctaaggtgcactcgatacggggaagacatcacctccatctagggtatattaatttgggagtcaggcacatcctaaattgactaaataatagctagggactactataacacgtcgttgatagtcgtcaagaaagcctcctccactagaaagacaaggggatttttaaggccctctccactgcagagtcgatgggatgttgaaggcctccttcgctataaattagaagggatgttgaaggccccctccactataaagcagaggggatgttgaaggcctccttcactacaaagccaaaagggatgttgaaggccccctcgactgcaaagttgatgggatgttgaaggcctccttcgctacaaattagaagggatgttgaaggccccctccactgcaaagctgaggggatgttgatggcctctttcattgcaaagccaagcaggacgttgaaggccccctccgctgtaaagccaattggatgttgaaggcctcctgcattgtaaagctaaagagttgacaaaggcctcttctgctaccaaattgaggagatgaacaagactaccttcactgaaagacaaccaaaggcatgctaaagagcttcaaggcttcaacctaacagaagacaaagactacatcaatattcacataaacagactgtgtgataggagagttagtgctaagacaatagccaaagataagagtaaatgttgacattccaatgtcggcaagatttcactgtatctcaaataaaaggaaatcactgaaggagtcatcaacctaaaatttcaaattctacctttcaacagggaatggggattcaaaatcctactctcagtgggaattcttgaagaacggaaacaattatctaagattgttaaaaatgatgcccacctagtagttttgagagaagcgggcatagttcatgtaactaagtcaacctcaccccagtgtaaagttgaattgggggaaaatgtttgcaccaaaagtagtcctaatgatgtaggcatcaataattgacatgtggcaagaaagatgacatctcagagttaagtagtcacgagtcatagcaagtcgacctaggaggggtccctagccctgcgatcaggttgactttaggaactttaaaatggaagtttggacttcgataactcattttaaactcactatctttcaatattctgtaccatgaagacatggagcaacctaatccaaaccccaagagctgaaatttacatgaacctgtaacctggaagccaatctgggcacctagggtttcagtcatcatccaagttgacattctcaacaaggatttcacctttttggaccgtcttactgaaaataggtcaaaacttgcattgtgacatcaacttgacatatgacaaacatattttaggcatttgaataaaaattggagcacaattcatttttgagcacctgaggccctagggccccaagcacctcaatactcaggttgacaatttctcaacctaggcaccttccaagtattagatcaacgacctaacttttgcatcttcttcgtcttcatcaaaactggggaaatatgttatgtcgaggaagaaacaacacattttgggtactaaaagcaaggttgagtgcccaggttgacacctagccctggcccagcaactagattgagattttgtcaacctagaactattttgaggaggttttctaagaactcgtacgagcatattttttgtttttagtaaagatcgatttagattcaactatttttgaggaccaaacaaaactttcgaagggccaaaagggggacccagtgcctaggttgacatatttttaaccagggccatttctaatcaagttcaccaaaaagtattccataaattttttccgtcaatagagaataatgaagatttaagcaaactcggggagaaaactacaaactcgagcccctagaatctgagcctagcacccaagttgacaatcaacctcgtgcgctgctttcgattgctcaaatgtgaaatttgattcgaccaatgaatttggaatggtcaaaaatggggtaggggacctcatcctcaagttaatgaatcttggaattattaaaatgagatcctgggagcttgagaatgagtacccaacgcccatgttgacaaatagcgtggtgcactaggttttgcttatcataagtagactatatttgtcttaatttatatgaacattattcccatacgactagattcatgttccttataaatgatagcaatatttaaatgaatgattcaatttatatatgcatacaaaagtatttttgttttctgttcttcaccattttattattctccttcagttttatatgcatatttaatttatatatgatttcaacatcttgcaaaatttgttacaaccatattgtttactgaatttaatttggtagaggtaggactaggagccacatcattctccaaagaaatttaattaacaatattttgtgtttgaatataaactaaccaattacaaagcatgccatgaaataggagtgttcataaaatattcaatccaattcaatttgaacgagcaagtataatctgtaaagtgcggatatccgcacttatacgaatcagattggattgaaaatctaaaatctacacttacacggattagatattgattgacatataaaaataactgatccaattcaatccacatatatttatatatatgtatttgaaatattatatacataattaatattttaacataaaataagtaatttaaaaatctaatagatatgatataactatatttcaaaatatattaaatcattaatata

SEQ ID NO: 22864 - DNA, 6215 bp, Cannabis sativa
ttggctgtaagagagagaagacaacaatcccttttctttttattgctgaggcgaagagagggcaggcagggatatgtggggttaagggttttgccctaatagttatgggctgggctcacatgggtttaattaaatatatgtatggggttaattaaataaatataaaaattgaaattttcaaacatgcggtgcggtttgaaccgcggtttaataattcaaaactgcaaaccgcaccgcaccacgcggtttaggaaaaattcaaattgcaaccgcaccgcgaagaatttcaaaccacatattttttgcggtgcagtgcggtgagggcagtttgagcggtttgatgaacacccctaggtgtagatgagttggagtgactagtatgactaggaattgactcatatggaaaggtaaactcatcaaacacaacatctctcgatatgtacaacctaccactagtgtcaagacacttataccctttgtaattgaggttgtaccttaggataggacaaagtgcagatttgaattccattttatgcttgttgtatggtctgatatttgggaaacacttacaaccaaaagtcttaaatgtagtatagtctagtttagtgttaaacaggacttttaggggtgatttgtttttaagtataggagtaggaatcctattatgaatgtaaacagcagttcgaaatgcctcatcccaaaatttaagaggtaatgaggcttgagcgaagagagtaaggcctttttcaacaatgtgtctgtgctttctcttagtcaacccattctgttggtgtgtagtgggacaggggtgtctatggtgaattccttgttcagttaagaactttgtgaatgatctaaattccccaccccagtctgtttgcaagactttaatagatttaacaatttgcgattcagcttcaactttaaaatataagaaggttttgaatgcattagatttttgttttagcaaatagagccaagtaaatctagagtacacatcaacaaaatggatataatatttgtagccattatatgaggtgttgtgggaaggtccccaaagatcaaacataacaagttgaaaaggctcacttatgacagtattggaagcttttggaaagggaaatttatgtatcttactaaggcaacaagcagtgcacacaaaaaaggggaaattttattacttattggcatattgcaagatttgagaataggttgtacaactttctcagaaggatgccctagtctattgtgccacaaagtaaattcattctgcacatttgaattgcatctaagacaacttgacacaatggttgttgtgttatttaaagtgacagtgtaagtactcttagttttcagggtacagactatgctcttgggttgagactctagaaattattgaggcttgacacactgatttggactagaagagataggcccaacttgtgtggaatcaaaagtatacgggccattcttgtgcatccccatcagcaaagtagtatgagtcatctcctccttgacaaaacaaaaatcagcatgaaattgaaaataaacattattatccctggaaaacttggacacactaatcaaactcttagttattttaggaacatggaggagattgtttaagacaagtggttgagataaatggctgagattgttgaattgtgaagatcctctatcaccatattgttgctatttgaactttttgaatgcaagattagcttccatatcaggatcttgatcattgatcattcactgtcaagttggcactagcttcaacatctttgctagtcttttcaattctagattcagaagcaaggagcaaggcttcgatctctccaactgtgtaatttttcaattcgagtgttggatgatatgatgaaagtatcatattcacttggaagccccttgaagattgcagcaacatgatcacgatcagtgagcgtttccccaacaaatgtaagaagatcaacagtttgtttgactttcaggagataatcgttgaggctcaagctccctttcttcaggttatgcagtctagtacgaaactcaaggatcttagatgagacttgtagggtgaagtgcttctcaagagcatcccagatctgtttggctgagttacaaccaaccatacgcgtgaggaggctttctgtcatcgatgagagaagccaggaaaccagcaattgatcctggacctcctaatcaggatagactggattcactctgttctgtattcgataatcgtcactgagaaattcttcaggtggaggctccttgatgaatttcagcagacgatttcctttgatggcagccaacacttgttgtttccacaacaagaagttgtgatcgttaagacggatcgaaagactgtgattgaagaacacaagttcttgatttggtcgaggtttgttcatggtggcctgagctccagtcaaagcagcattgttgttgttgtttcccaagagtagccatattagttgtgagcggagggaactgctctgataccatgttgaattgcctattgaattgtctcgctattaaagaactagaaggaagaaacaatgggaaacacaaagaagaaaggaaagagagaaaggtagagaaaaagaattggaaagaaagaagtctcgaactgttattgatgaaaagtaaagcttatataaacaagcttacaacaaacaaaacaaaataaataacaactaacaacgtctaactgaattgaaacaaactcttaacaaccgtgacaacttaacactaactgtttataacagaattaactgtcttaacaaccattaattgtaacaccaagtatgaatcaataaagattaaaaaaaaggttattctatttagggaataaacagttgccactaccaagcaactgatcgaaccttattaaattggtgtgacttgcaatctgttttgtatttataattttattctcttgattagttaattaagttatgtcactaattatcattttcatttttgatcgttttgaggttattaaaacactaaaaaacaaattatacacatataaaatattgtctacagtgatagtactattaatatagagagtgcccttcaggcccctcatgcattaggtcccgctgtcctatcttctttatttttgttattgtttatatgtatcccaaacatatatattaattaaggtgtctcctttgtgcagcagaccttatttattgatatagtattattaacggtcaatacacccacacatatataaaacctagagctacacatagcaccgtatatatactgaattcacacagcgacttactcggtcaaactttgaagtattaaattaacatcgaagagtagtattcaaatgtaacttagacatggctatgcctaaatgttataacttgcactgtatttctgtaataatattatataaactagttacataagtcaaaatttacgactgtcatatgaccggcacttggtactagtttgatataatgtatttatacaaaaatatatatgccatatagatatagagaaaatcatgtagtgtgacactactcatggtttgtagtactttatatattattcaacacatattgatgttatatatgtatagttaagtctataaatataaaccgttcttgattaaaaagaatttacatatgtaatagagttttaattgaatgggatattgccaaaagtgtatgaggacataaagtcaagaataatatatatatatatatattgggagtgtgtggtgtaggacatagaaattggagggataacacgtgcaaaactgacaaggttgaaatataggctttatagtgttacatctttacatgtttatggccaaacttaatcatatcgtttcttgtctaccaaccattcctgaccttccacctccagacacacgtgtgtttacagttacacacaggagtactatgctgccatacacaaatcaagagagagggaaagggagagagatattgtagccaagtctaatagagggaaccttaaaagttctccaggagcagtatcagtcatcagcttggctaagggtttcacctattttgatcaggttgcatatcttctccaacaaatttgtcagttgtcacacacacatacacacatatatatatatatatatgaaattatatattctcatgcatatgatcagagcagagaagatcagccaaaactgaaaaatgtcagcacaatcagctggctcttaatggttaagtccttgtcagttgtcacataacttttctacattttttttttccacactgactgatcatctcatgatctttccttttttcctttttctaatttatcattctctctatttaacacacatactacttgctcaaaacagaaagttttataccatcacaattattataccaataatagtagtagtaatagtaggaaatcttatcatgcatcagagcccaacccttgaaattacaaggcctacctaaagggctagcaagagggcatattgctaaagctgaccagagtatataatacatttatatatatataacttattaaagtagtgatcagtgatgaacactttcaaatgaacagaaatatatggagccatcttctaaataaatgtgagccaaagaataatgtggtggggtatatacctagtcatattatagtagaaagtagaaaggtactatataatatataatttatatataacctccccctgagtgagtgtgatttatatatatatatatttgtataggtacatgatatgataccatgatgtgctttctcaccatcattaattattatgtatttttataaatgatatgatttgatgttttcgttaccattattattatcttagttgagtgccaaccaactatgtcccctcgtttcagttacataatgcatttttgtgggttgttccggaacaggcgtacctattttttttttgtacatttaaatacatacttgcatgtattaatttatgatcatcatatatatactacatcaatctcatcgatcgtttatatatgtaatatgctcaataatatatatgatgtgtatatatcttaataattgattgatatttatttgtcaaaaaaaaaaaaaaataattgattgatatacatatataatttaatgtatgtatatttatctcctaataatagacactttagagatgaaaacaaattacaaattactatttttattaagagtatatatatattatttgctatattatagaatgcaatcagatatagaatgtaataaaactttgtttatttatatgtttgtttcgatgtatgatgggaaggagggtcatgtttggtctaattattctcaacatgtgtacaattatttcaaaattatatgatattgtttgattaatttttttagcattaattcctcatatatatatatatatttatttatatataatacacgtttattcccatcttgctttgttaggagggacatatgagacatgactccctttttcctacattaatttttaagtctcctaattgttagtggttactatttgtctaattatttatataaaaatttaaattatttgaccgttttgttggcccaacaaatcgatatatatgagtgactaattgttacataacgatgatagttacatttttattgacttgtaatagtaggttgccaacatataaaaatttcttttttaaaattaaattaattataattaactaatttgttaaaataattattctttaatctgaatatttaatacccttttagaaattaatataaataattttatttttatattattaaagtctccattataatttttttaacagttaagccatttacacaacaaaattttattattttataaacattaaacttccacatctttttgctaagctcatcaagaacacatatgttcaagatccataacactaatatcaattaataacttttaattttttaatattacatattcaagaccaataactaataactgttattaattttcaaatcaataaccaataacgattagtaattttcaaacctttacaatatttaatgatttcagtactccgattaattgatacatattcaatatatttagaactgtaaagaaggaaaaagaaagcaacttcgtctctctaaaaaaatagaattacatgacagagtgtggaataaagtacaaatgtgtcgagtgcggcaaaaaaaattatctttaattttat

SEQ ID NO: 22865 - DNA, 3893 bp, Cannabis sativa
  modified_base (2958)..(2965): a, c, t, g, unknown or other
actattatactttgtaatagtaattaaaaaaaatattattcgtcgtaaatttatctttgaaattaatgaaatgctcatgtggttaaactatcgaaatatttaaaatgacaaagggattatgatgatatggatatgtgaaatttttgtatgtagggtaaatgtacgtatcatctttacttatcgtaagtacatcatttatttttagtaagtggagaaattataactattaatttttcttatataataacatagttataatagatattctttttagaatagttattctgttttatttaagagttgtattttttctaatattaataaaacttgtaattttgttgtctataatttagctaagtgagcattttttccaccaaaagttagtgttattctgatatataccattcatattaacattttatgtaatgaccgcaaaatttaactatttcatttgtcgatagtatgctttttttcaaaaaaaaaaaacattcttcgtattttgaaaatttcaaatgtcatggtgtgtcctttttcttttgtacacatatgcagatattattttaaattttattttacagaccataaattatttaaaattttccaaaatatataagatctcttttaaaattacaatatacaacttcatataaaaaaattataatataacctctaactctaaatgtccaaaatagagaactccctatattaatattagcaaaaataatatgctatatagtctcctaaatatatatgtatacaatacaaataataattaaaaagcaattgggttaattataagcaaaaagatgaagagcatattaggttaaagtgtctagtccagcataactatttgggatttttgaaggtgactacttctgtctttaggccaaagaaaaactacatatatgatatgaccatctggccacttcaaatgacaaaaatttgttcatgtttaacatcttgaattgacataaaaagataaaattattatgaaataatatagaggtttagttggtctgtacacattcatcaaataaggacaatggaaaattaactttgagtaaccttgattataaataaatattaattagaattaataatgtaaaacaataggtatagtatacctacaacgacctaaacatctatgtatctatcatatttattgtttgtgtatctttttcacaaaaattaatgaaaatgtactctatatttataacaaagatacttaacattacttaatgtgatacttcaccaataagatgaatacccaaattttgtgcacaccattagttgtcttttattattatttttttagtttcattgttttgtttttcatgcagatgaacaagagtccttgtttggtgcattatacatacatatcattttatgggatctacatgtattgtattacttattttaacttaaaaccgaaataatgctatttatttatttgacaaagaaataatgctaatttaaaatttataattcatttctaaatcataaatcagtaagctaagaaaaaggcaaagtagatattattgttcaattaaaaaacatcaaatattctgaggaaaaaaattaaatatcattttagaccttgtattttgtaaaaattactaatggtactttgttttgttaaatgacaaaatgtaccttgtaatttttaaaattgtacaaataggacatgaattgattttttgtcaaaataaaatttaataataatctaacaaatgttatgataaaactggttacattttctgtatctgttcgtattaaaaatggtcttaaagtttgttatattataaaataaaattgtttaaaattgagctcaagatcttatttttactattttagaaaatatagaattcattttgtcattttacaaaacataaagtctaattaataacttttacaaaacacaacattcaaaataatatttctctaaaaaaaaaagaaaacattaaatattaataatttttcttttaaaacaaaataacaagattctatggaatatggatagattaaaaaaaaagagaagaagaaaattagcaaaatttatcaaagggtgcaatagtaatttcaaaataagactttttgaagaaaagttgtcttatatcgcatttggaaccacgaaaagttgctatttcattggaacgttcctcgatttccgtgtttttatttatttttctaaaatatttatttaataattaattggtcgacttatgattgacgagttttttgttacaccttgatgagagcagccattctcattggtttggtttttagctctctgactctgactcactgacattctcgctcttctcaattcgatttgacgcgtggcatcttcacgagacgccgtacttccacgtcaacaacttactcttccgactttccgaccgtttaatctgacatgatctgtcattcattttcagccgttggatttgattacgacgattctttcatttctgttcatacatgacgtggctttttgttagtggtgattggtgcatcgtcacggttagattgtaggttgcgtggcatgggattatagccaaccaatgcggtgcctgaacccggatttttgagaggagggccagaatgagagaaaagttcaacgcggttcgaatctttaatgctgtgttattagcttgcacgatctgtcatcctctctttaatttttagtattaatttagtctaataatattgttcacaaaatattatgcaaaataacaaacaaaatatcaaaaatatatcaaaattttgttatgttttaagaaaaatgtttttagaaaattacactatatatatatcttttaaattcatattttttatttttattttttttttaaaaatctattatgtttattttttttaatgagattatttcacaaatatacaaaaactacaaaaaaattacaaaaatacgattttactgaattttaaatatttttacgnnnnnnnngattttatttatagaaaatacgttctttttatgttgtactcttgttaatttgttgttgattttttgttatatgtatgttattttttgttgttgttttcatgatttttagatatcatttttttattacttttatgttgtttttatggaaaatcgtaaaaatatatataagaaaatatgtaaacgtaaatatgtaatttttttacaaaaaaaaatggtgtcttatgtaattatctattttttaatcattctactaattttacccttatcactttaccatagtctctatttttttctaatcaaaattttaactttctcacaaacctacacatctatctccaaagaatgtaaatttattatatttgaaattatgtcttaattatgtgagggtttgaagataatttaagtacaatatttataaaaagacgtatatttgaattaaattttatttgaaggtaaatttgattaatgtataaaaaaaagtattcttcaatttctcccaatttcttttatcatctaggcaagtctcaaaatatatgagccatttaaattttgggacctttactttcaaaaacatataaaaaaaaattgaaaaagagtgtaatagaactcaaacccaataatgtgtcatgcaccgcaccaaccaaattgtgaatgtttgttgtttatgatatacttaattttacttaaataaaagtataatgaaacttttcattttttattttgttcccttgtaaagtgtgggccctatcacaagccttgttcacctatgcttaggaccggtctgtcgtcacattgtattatataaagaagattactattagacatcaatggtgtctagcaccacctagagatgagatcttgtgattggttaatgatacttcataaaaagtgtgtttggatatgaggtggtaattacagatcggaagag

SEQ ID NO: 22866 - DNA, 5990 bp, Cannabis sativa
aaaaagattgagagtagaaatgtgtataaagcttcaataaattctttggaaagttataaatatgtgcctaaacttttacgaatgaaagttgtagatgcaaaattatgtacacaagcatcacttcacatgctaaatttatacatttttttactctcgtagactagtattgtatcccacatgaaaattaaaataaagcatataaaaagaataaacaataaatagtttaaggtaagtgtatagcatattcctaaaaagaatgttatggttgattttttttagcataagtgtttttacttcattttgttatcatgattatataggttataattatttagaatcacctctaaatttttaaaagaatataaatagtttatatactaaaaataaaattttattgcacacgactattttttttttacgaataataaataactgtttgaacgttatttttaacattttaaactaagaattgtctaaaatttacagatggcctcaaatgactacaatgtatacaattatagaaaaaaaaaaattagactaaacaactcttttaaataccgaatcagatatgaaaatctaccaaaacaagaaggtgtatcaacaaattttcttaatagtttatacttcttccatgtatgcttttctcgaaattatgagggtgaaaaatactaattacacatctagctatatgagaaaggataagatggatgacatacgttggatatgagaaaggataatgggttaaggctaatttagtatatggtaactataaggtaactagttgccctaaaatgataacatattatctcaatcgtatacattatctagctgtataactaagatatgcatgtaagtttaaaattaagtttgtgcaatcgattactagaacacaggtgattagttacctctaaaatagtaacaagctatcttaatggtacaatacattaacttgataggctaatatattatataaattatatttatatatgtaaagttaaattgatgtctctcgtaacaagttactaaaatataggtaattgataacccctaatgctaaaacgagagggaggcgtcaagtataaacaaacatgcacaaatcattcaagaggttgtagcacagtcaagtaaataagctcccttacattcaaataaaatgatgaacaaataataagaggatgagaccgcttaaagagtaatactacctcaagcaaaaacctacttaccatagtagggaccttacgaggtcataaaagaaaagaaagactagcaatcacttgacaaaggacaatatcaaaggtctctcggtcaaagagtaaccctaagggtcactcgaccaaggatagcatcaatggtctcccagctaaagagcaacactaagggtcactcaacaaaggacaacattaaaggtccatatcggccatagagcaaccctaagggtcactcggccaagtttagcttcccaagtcactcggtcttgagtgactcaaaatcactcggtcaatgatatctcagctttgtagatctttctcatatttccatagcaacttgaatcatccaaatcagattagtattgatggatttatgctcaaatataggagtacaaggcttcaaggaagtcactagccaaggtttccaaaacatcattcggccaagacaatgaaatgtctctcaaccaagtacatttcaaccttgtagatctctttctcagctttccatagcaacttgaatcatccaaattggattagtgttgatggagttatactcaaaatacggaaggagtacaaggcttaaaggaagttacttggccaaggtttccaaaatgtcactcagccaagataatgaaatgtcaattggccaatgacatctcatctttgtagatctctttctcagcttttcatagcaatttgaataatccaaatcaaattagtattgatggagttatgctcaaaatacagaaggggtacaagacttcaaggaagtcactcggccaagacaatgaaatgtcacaaagccaaggatatctcaattttatagatctttttctcaactttccatagcaactttagtcatctaaatcgattaataataagggagttatgcttaaaatatgaaaagggtgcaaggagagcaagacccactcgacaaagaagccttgggccatatctcccgaaggtcactcaaccatacatgacttgaagacactcaaccatgaccattcaagagcactcgaccatggtggcgttaaagtcacttcgccatgatggaagccactttctttcttgtcttaggaaattaagaaggaagaaaaggaaaagagagaaaggccaaagttagattcgacctaaggatctcttagaaggaatccttgaagatcaccataaagttatggaggaaattgtataaaaaagtcgaaaaaaaggaggcttcttaattaaactaatttttttcccaaagcgcgtgccaagggaaaaacttacaatttagttaaaagacactagaataactagttaactagtccactagtccacaagtccacaagaacacttaaaagaattcttgtagactaggggtcaagtgttaagcccaaaaattagcacttgtaatttttaaggttagctgaccaaggtatgaaagatggaaggatgaaagtcactcgaccatgattttcccatggtcactcgaccatggccttctcgaaatcacccggccatggccttctcgaagtcactcggccatggccttccggaagtcactcggtcatgcctccttgaatgtcactcagccatgcctcattgaatatctctcggccatgcctcgtggaatgtcactcggccatgacctacccaaggtcactcagccatgaccatctcgaagtcactcgacaatgcttccttgaatatcactcgaccatgactttcccaaggtcactcgatcatgtccttcccaaggtcactcgtccatggccttcccaaagtcactcggccatgcctccttgaatgtcacttgtccatgcctcatggaatgtcacttgaccatgcttcatggaatgtcacttggccatgaccttcccaatcggccatggccttctcgaggtcatgaatgttgcttgactgtggcttggcaaaattgagtgtaattttccccaagaaagatgagggtgaaacaacaaaggtatggtcacaaggacaaggtatgcacacgaggaatgcacgaccgcaccttctaccaattctgaaagaagaggttacaagaagtgggagcatcatttctgcgtagcctggtaacctgattaagggcacactgcaaccactaccctacaacccgggaccacctaacaccagacaaaggtacatggcatgaggattccacctacaacctccagctcgtggatgcccctttatcccttgggatcaccatgtattccaggccattaaagtttataaatacctcttccttagatagaagagggggttggaaaatcacccttgtaaccataatattgagagtaacataaagtttttattttctctctactttgagatagagacttgaatttatatttcatctttttcttcctcttagttctaagcttgaagtagagttcgatttaccggccaacaaattagttgacaagttctcactgtcaacagcctggaaagggtttacgtaagtgtgatcccatgtctccgtatttgttcctcctttgtgtcaagggttagtcaagcgttattgtgctaatggtttgttcagtttctcttatgggacttctggtcctttcatttctcatttggtgtttgctgatgacagtctatttatttcaaagctaatgtgtttgcttgctagcactttaaaactcttttagcttggtatatggtgaggctttgaggcgaagcgtgaatttttcaaaaattgcggtttgttacatctccaatattgatcacgttgagaggaataacatgcatgattgccctgggtgtagtggggtggggggtggagtgccacaagaaatacttgggccttcagtgttttgcaggttataataaatcaactttatttgattcgattcgtgacagaatttggaacaagctcaatggatggaagtcaaaatccttctttatggttggacgagaaatccttattaaggcggtaatccaatctagtcccacctacactatgaatatatttaagcttcatatgcgtcttgtaagagaaattcataggatgtgtgcccaattttggtgggatgtgaatgatggtgggaacaatgttaaatagaaaatgtattggtgtacttgagaaacattatgttggcacaaaaatgatggtggcatgggttttaggagcatccatctttttaatcaagctttattagctaaacaagcttggcagctctataatcattctaattctcttgcagctagggtgctgaaaggcttgtatcataaaaataaatcatttggtgccatccacaaatctaagagaggatcttatgtctgggagaatattttatagggaaaggagctttttgattcatgtgctatttggagggttagagatggatgtatgattagtatttataaggatgcttgggtgccttcttcatcaagttctcttattctttcctctccgactcttggcattgatagtgttgtggctagtctttgttcaccttctggatgttggaataggcctttggtttgtgattccttttttcctgatgaagttgctgccattctttccatcttatggcccatttcccctactcgagataattagtttggggccatgactcttcgggcctttataatgttaaaagtggttattagttggctcttcatttggagagtttggataggtcctcttcctctacatgtttctctggttggttgaagaaactttgggagcttaacattcctccaaagattaaatcttttgcttgaaaaatatccttgaattggatccttacaaaaagtaatctcattagccatggtcttttaaatgatgatttatgcccttttgtgatgatcaatcgaaaacaactcatgatgccttgtagggttgttcttcccttactccttgtcaaaagttgagtggtttcaagattagcgatcccctcgcagtgtgcacagatttttagagtttttcaccaatttattgattctctccctacgaagcaaattgagcagattttggttattctttggaaatgttggtttcagagaaagtgggtacataaccagaagattctttctctcgagttggtgattaattgggctcacaattttttgttggactaccaacacgaaaaagatttacccagtttggaggaagagagggcgccgactggcggtctaccagtttctcacatgcctcatcaggagatgattacccattatgtgtcgcctctgttaggttttgttaaggttaacactgacacaactttgaacttatcctcaaattgttacaacttggggatggttgccaaaaataaaaaatgtgaggtcttggcatcaacctcttagttcttggaaggaggctatccaccaaaaatggttgaagctttggctctcagatgtgctggcaaccaatatcttgtccttggtttcattaaggttatttttgagaccgattgtcttagtgtagtatcaaaatttaataatcatgttttgttggatttttctttagggttgattttaaatgattttggttcgtcttacaaactatctaaaaggcgaacatgtggcaatgtcctagaacagtttatttgacggatcacaccttagctaagtatactttatcgactattgttaataaggtttggtggcccgatcatcctatttgtcttcaatttattattttgcatgatgcaatcaatgaatgaatagaggtttgtgtctcctctccttgttattgagtttttttggcttatccatgatggagtatcttgggacctttttctttcaaaaaatgatacaatttaagtagattag

SEQ ID NO: 22867 - DNA, 3114 bp, Cannabis sativa
tgattcaaccttcaccatgtcttctaacgatcaagacagtccaacaaatcctggagacggttctccccacgtatcgatcggagaaaccataaatcccttgattcaaaatcaacaagcgattcaacagagaaatcgacttgaagacccttctgatccatactacttgcatcatgctgataatcttggtaatgttctcgtttctcaactccttactggacaagataattatatgtcatggagtagagcaatgcaattagccatttctgtcaagaacaagctaggattcttggatggttcgatttctaaacccctgccttctgaaactactttgtataatgcttggattaggaataataacattgttatttcttggatactcaattttgtctctaaagaaatttcctctagtatattgtaggatgaatttgcagctgctatatgggaagatttaaaggttcgattccatcaaaaaaatggaccacacatatacaatttgagaaaaggtttgatgaacctaaaacaagataaccaaggaataagcatgtatttcactaagctgaaaactatctgggaacaattgtctaactatcgtcctacatgtgtctgtaataaatgtacctgtggtggtgttaagaaaattcaagaacaccatcacatggaatatataatgtcttttttgatgggtcttgtagattcttattctcaggtgagaagtagtatactgcttatggatccattacctgatgtaaattgtgtgttccacctgatcacacaagaagagaatcaaagaggcaattcgaacactgcaacagaacaaaatcctggtatggcatttgccctttaaggagataaaataaaccccaacaagcaggattcgaatgcccagaaaacccaatctcaaagaagaaatcatccattttgcacgcattgcaacatacttggacatacaattaagaaatgctataaaatacatggatacccacctggttataacaaaaacaaaggaaaggaagtagctgtcaatcaaattcaaaccagcagtgaaggagcaaattcttctaatgataactccaccttgctgccccaattgacttcagctcaataccagcagcttttgaatcttcttgctacacaacacactggtgtgggaacctcagaaccaagcacatcaacaggtaacacaagtattgttctttcaaacacaaattcatttcctaaaaatggatcttggattttagattctggtgcaacaaggcacatctgttctgacttctatttatttcagttcatatgcaatgttgccccaacaaaactttggttacctaacaatgaaagcttgcttgttaatagaagtggatctatagctatatttccacattttgttttgaatgatgtcctttatgttcctaacttcagatataatataatatccataagttgtctcactaatcaaaactccatttctgttaagtttgttgatgattctttcaccatacaggataccatccacaagaggatgattggcaaaggtgaatccaagaatgatctttacatccttgattcttctttacctcgatctgaagtccttgccattactgccgatgcttggcattctaggcccgaccatctcttaaataaatatcttgctttacttagtagaaaattgaattgtaatacttctactttgcataaagatactccttgctatgtttgtcctttggcataacaaaagaaactccctttttctagaaataataacttttcttgtaatgcctttgatttgatatattatgacatttggggaccatatatcatgtcacttctcatttaggacatagatattttcttaccttagttgatgaccacactagattcacctggatctatttgttaaaacaaaaatctgatgttagctacattctacctcagtttctgtcatacattaagaatcaatttcaatgcatgtttaaaaggtccaggtctaataatgcacccgaacttgtctttaaagatttgttcttgcaacatggtgtcttgcacgattttacttgtgtggaaacacctgagcaaaatgttgttgctgaaagaaagcatcagcatttgctcaatgttgcaagggctctttatttccaatctaaaattcccatacaatattggactgaatgtgtcatgatggctgccttcttgataaataggacacctactcctaacttgaaaaacaaatctccctatgagctgttattcaaaagacaacccgactacagcagcttaagaaactttggctgccttgtctttgcttccactctcacggctaatagaactaaattctctcctcgtgctaaaacttgtgttttcataggatatcctcaaggtgtcaagggctataaactctatgatataaacaataaacaaatctttttatctcgcaatgctatttttcatgaaaatgtgttcccattccacaaattaaatgataatgctactggtgtggatccttttactgaaattgtcttacctaccactgatgttgttaacaccccggtttgtgattatcctattagtgatactaaccctacaggtactacttcacatactgaggatgagaatgctacaacatcacctagtaatgttacttcatccacaccagcaacagcatcttcatcacccagcagtgttgcagtttctccaccagccacttcaaatgaacctccaacagtacctagaagatctacccgagtctcaaaaaaacctgattatctcaaagatttcgaatgttattccacaattcaggatcactcctctaccccacattaccttgataagtatatttcttatactagactttctaactcatacaaggcttttatctttgcagtgacttcattaaaagagcctcgaacctacaagcaagcaattcaatttcagcaatggcttgatgccatgaatgctgaattaattgccctcaaaaataataaaacatggactgtggttcctcttccgccaaggaaaagagccattggatgtcattgggtttataaaatcaaattcaatagtgatggatctgttgaaagaaacaaagctagactcgttgctcaaggatacactcaacaagaa

SEQ ID NO: 22868 - DNA, 3346 bp, Cannabis sativa
actgtagatttatttcagactaaaagatatttttagttttattttcattacgtatgcctttctcgtctactttcatacgcttcaagagagcccataagttcaattggtgacagaatttctaaatcttttatttcctctatcccagagattatctaatcatatttttctgtacaagaaattagtacctgttgtgtactattttcttgccaaaaattatttttccatggattcccatttgatttactatcactttaattctagaatagtaatttttttgcgatctcattctcttttattttaatattttcaaaacatcgatcttcaaagtttttgtagtctaactgtgcgtaccttgactgttccttggaactcctcctgcaacgtgtcccatgcttcttttatcgtcattccacccattaatcgtgggaaaaggtcgtctaccatggcttgctgcaagcagcataatacgtgagaatcattttgtttgttatcctgtagtgccatattttgatttttcgtgagagatatgaagtatcttcaggaacattgaccccctcttcaactattcttttataaattttgtgatcgaaaatatgtaggtcattattttgatggactaaaaattatagttttctccatgaaaaaaattaaaagaggtaaagaagagcagttggagtgggaaatcatggtgatgaattacgcccagtaatatttgaatgcggatctaataccactaatggtttgagaattaatttgtattagtttaaatttgaataggtggatacgaaagaataagtgtttgatggtttttgtgataaaagagtgtagtaatgatgttgatgagtagttggtttagtatatgagaatagtttggcttaaaaaaaattgtacagcggaaatagtaagctttattaatagtttgtagctttttagatttagatgttggttacacaatttagaacttttaatgaggtatttataatttcttactcctttgtggttagaattattttcctagatcttttttttactagaaggaattgtatgcatcacatctacatatttttaaagttaaacttaattagtatattttagattaatctaatctaaaaatcactaaaattcttagataacttttctccaaataccttgagtaattactattataaaaatatgtagcaacttctaataaaatcactcaattccaccacataataatatcaacccattctttctttaagaaaaaaacattcataatattaatgctaatatccaaaacaaaaacctaaaataacttgaagaagaaataaaaaagggggtgggtgtcttcattcatggccatggaagtctaatgaagaagctcttgaccctctttttctaagcaccaaaccacacagtcgatgttgtgttgtgcttcaaagagatgcaagtgaaaatttctccaacacaacacacaaacaaaccaataactaaaaagaatgatgtggactatttggagggatataattggtatttttctgaaactaaaatcccttaagtacttgactaaattaatcattgttagaaaaataaatggtaaaatctatatatgttaactaattaaatattttgactcatcattttgtttggttttttcttctctcagcaaacatatcatgatgcctcattatccaaaacctctctatctcttgtgctgttcttcctggaacccttcctgctattaagtcccacctgattatatattgaaataaatatcataattaatttattaattcatacaaaatattaaacatttaaattaagtgtgatctacatatatatttatattatattaaatgtgattatctaatagaaagtattttttttttataaaatattacaatttaaattaaaattattacacatatttttttttttatcttttttattatattgaatatgactatataacataaaatttatatatatttaatatcacaattcaaatttaaattcattgtatctattttttttaaaaaaaaataataaattaatagaaaaatgtttatatttcttaataaagaatgtgtaagactatattccggtcactgcaaaaatatctttccattaatattattttgtaataaaaaatcgaaaaaattgcaaaatatttttaagaaatgaaaagcattataaaattataatcaaaaacaaattttcaatattatttatgtttctttttataaatagcacttacattaaatatttttgaataaaaatgatgttatttattaaataacttaaaaaaataattaattatgtacaacatacaaatcaaaataaaacttaaaaatataactgacacctaatattaattttattatgtatatgaacatttaagtttttcttttacaaaatattcattttttatttttattttaagtgtctcatttgccccatcattataatgtatctgccatttcaaaacttataattattattttttttttaaaaaaaaaaacctttctgaagacattaatgtaatgtacagccaaaaaaaaaaattatcataaaaatagcatctttcttagtacccgagattcgagaagaaaaaacaacatgaatgtcaagactcaagtataatataccatcaagggaaaaaaaacaaataacaacatatattaacaattagtaacatatattaatttgaagatctttatataatgatcaagttcgttaaagtaagcatatatgatagtttttatcaagaaaattttcaaacttttgtcttaatacacaaataaaaatttcatatatacatatatatacatatgaaattatgaatcaaaattctttttttcttttattttcacttgcctaaacaatgatcaatgcatgcatcagagactatataaattaaacattcaaaaataaaatacaaaaagattattaaattattaattggtgaaatatagctataggagtatatttatttcttaagaaaaaaactttgttaagatatgttgtatgttaatttgtttgtcccacattgctaccaaattataaccttataatattatttttcataattcgataaatattatgtttggtttgattttatgaagaaaaaaaaatggaaaaaaattgtataaattattttttaaaacattaataaatacctatttcccacgagtgaaaacattctataaataagatcttcttcttgctcggtcatgtttataaattcccattcaagactacaaacctctgcaccaaaaagttaattaatttgaaacaaataattaattaatctcaacatataaaatattttcaacaatttaataaaaaaacacttaccttgatcaga

SEQ ID NO: 22869 - DNA, 2892 bp, Cannabis sativa
acgtccccgatcaaagatcctccttcgatctttcagctgcgttggtgaatcaccattaacaccaaacacaatctcacgtagctccattttacgattcgcaaacactcctttagcatcaccttcttctatgtacacgcaagatgatcggatcgcccgatcaagagctatcgagattcttgaatccccaatctccattcgagcagcagagagcttttcctctaccttcgacgaactgccattcaactttggttgtgctttgctgccatctcggatgagatccatatcaatagcgatgtctaaagcttcctcaggatcatccaaatccatctcacttctcactgattcaacaggggcatcaatgtggttattgacctctggagaatcgggttgaggtgaggaatccaatagtgcctctctcgatgggcagtagcgttcaaatatggcatctaattcctttaattgagccttgaaaagttgctccatacgtagtttcatagaactcatcatggatctaacgaattcaacaagctcttcatcagtcatagtgccgatctcccactgaaatctctctctgagattctctcaatatgatacacttaccgattgtatcaaattgcactcttcgagtcagtgccaaactctaataggaataatcctaattttttctcttttcattccttccccatttgtgtaatagtattacatatttatactaactagacaatattaataattactaattagtctctataccctttcatataacatttgttatactaatttcacgacgtagcagttctgctaagtcagaatatattacataataaatacataaatttataagaattattggtagtaagttgtaattatttcagagtaagtatactggtaaatggtttagtatgaaagagatacaagtaaatgttgactttataatcgaaattcaataaaaccgatagtcaccgttgactatttgtacccatctagaaagtgtgtggggatataaagaagagttcccgtaagagctagttatgttaaaagtcacgtacgcgggaagaaaacaccaacagtgatcgtcgattaatattatgaacgtaataagctagatctagtcgaacttgttaggtatgttttgactaacattttttattccctttagaaaggactatgaaaattcttacgtgtatattttatcttgttcaaaaagctcaagccaaataaattaattaatttaaaaagaaaaaaaaaaaggaaaaacacagcataaaacaatatatttgtaaccttacatggcttctataatatttctaaatccaagacttgtttatttaatgatatagtatatgtagtaaaagttcatttggtggaaaaggataaactcaaagaattattcgacatttcttaagcaattatgattggtcatggtaacaaaagtcagtccacaaaaatcgttagccggcctcatcagcacgtaatttcttaggttatcaaactcattaatcaaacttaaacaaaaatcaacctaattaattaattcaaacaaaaatcaaaataatttgcgaagaaagaaacaacagcaaaacactaagaagggaagaattactcacacgtataaccatatatgtatatttcccaaaatttgtaactgtataacatcttctgtaacatgatgaaaaaagaaattttagtatatatataaaacagagtttaatatataatttgtaaacaaaaatgaaattaattagtcatcaaatgatcatgatcactgtcgttcaaggtcattatgatgtataacatgatcttcttgaacacaattaggctgaattctttgagatgatctttccctactaagcattcttcgaaaagaaaacctgctcgaactgccattattacttatcttagcagactcagatgtggtaccttccacattaatgcacgaagacatagagcccaaccgctcaagaggcggagccgtaggtggcgcaaccacgctctccctcggctccggctctggccttggcctcggctctgcttcggttcggcaaattggacaggtcgactgggagctcagccacttgtctatacactcggcgtgaaaagtgtggttacagttgggaagtagcctagccatttcaccttcttccaagttgcttagacaaactgcgcactcattattattactaagactacttctctcttgttctgaaccgttgttgaaagtgaatactggcaaagacgcgatgacagagggttcgagccctgtttttggttgttgcggctcggctgcggaacgggcttcggtcatgctcaagcctagatgatgcagcgcttggcggcggcgctgggcttggcgccggagaacgtagcgagcgtagaggtgaaggaagagaacgaagatgactacgattgagagagagattatggctgtaagcatgatcttgctgctgaaatcgtagctgttattgtggggacgataccatgccctgcggtgatcatcgtcgtcgcttagaatcctcggtgttactctgccggaggacgacatagatgatggccggtcggtcgtcgttttttttggggtgagggagagtatatatatatatgcagagtttctttctggttcgaggtgttcttatatatatatatatgggaatgacgtgtttcggtttgggacttaggcttttaatttttaattagtcataatttcagaaaaagttaaaaagaaaataaaataaaatcttgacatttttttgtttttttattaaaatcttgacgatttttgttttctagattcgtaacttaatcgatggcgtctttttatttctttttctaagtaataatatttagggtggttattgattcaatattgttgaaaatatgttttttttttttttt

SEQ ID NO: 22870 - DNA, 3409 bp, Cannabis sativa
aaaatgataaagtctaaagaccagcatagaacatccaaacaggataattgctaccgtccaagcagcttccagccttacagtgaagccaagtactccgagtagggtaaacgcagcttaagcacaatttttaagatatttcccataaatatctcccgttcaaatcattatttttgtgagattaagacgtattgtaaagagataacaggaaactaacttagtttcctcttttattcctatttgttttgggaaactaatttgatgtatttctttctctataaatagtggagccattttattatttagggatccgatttctaatttttttagagagccattacattgtctggataactataaacttttcttaagaattattaagaaactcacttgaccaactccttgtgatcttgataattctccaaagtaatacaagtaaaagagtaagatattgccataatcacagggccgagtctctataaattctagtgttcttattgcttaaatatattaattattaattattatcttatctctttaattgactcagcatcgttggctaaaagggaggctaatattttggtattttcattaagagcaaaagagcattattttatcgatttgattctctttaaatcgttaagagatggttgtgactacaagacagtctaaatctactgtgattcaaccaatccaatggttatacggatcctaatgtgcaaactcttggtaatccaagaaaccctacggtgaggaatcttgatccaaccaatcctctacctccataagttcctccatcaacgagaccaggagtaacaacccctatggctagggtcaccccaggcacacaagaaactaacactaccaatactcactacattagagagactagactgggtatcggaaaaccacgtgttggagagccctgagtggatattggcgatgatactaaattacaaaacccgagggatgcataaactttttgtcatcaatgatagctcatgagatacatttgcgattctagccagcaccacgtgtcataaatttgtcacaaagaagcagaggagtactacaagctctcagaccccattacgtcctgagagctgacggggtaaatgttatccgtatttctgctaggtatgacacatgccatttaaggagaaggaacaatttaatcattccttaattgaactcctttgatattgctctatccaagaatcatcccagacagaaagcatgcagaagattactcatacctaccctggcttcccaaacgcagaaggcaaagcatctctcccggacccagaaggttttaatagggaagctcgctcagatgatatccggtcaggcatttaagggatttaaagaggatatcgaccataattaagtgttgtggatgtcaatcttttgtacatgccaggtcacccaagtgacggttatgctttttctgacaaagatcaaatcttgtttcctacatccgagcatagtagtgcgcgtaccaccaccacctttttaccagatggatgttgcagactcctactcgtaaaggaacgagatttgagcgacacatggcccctacttttaaaggttaaaccgcgtgatacgtgtccaagtggtacaaaatgctcctcgctatcaagttgatacacgcacaaccattatatttcccatgggatcctttggccagctctaacattgcatgtaatagttaaatttgagcagaaaccttaggtaggtcattgactgtccatacccggcacttagcctataaatacccttttattctcatgaaaaatgggcaagccaaaacacatagcaaaaactctactaagattacccttgatcctcttcttcttcaaaaagaaactaagggtaaagagtttgggtttcctgtaaaagtattgtaaacacatcaatatcacccttagatgttaatagactgactcgtggagtaaggttcgtaaatacctgaaccacataataaacctcgtctctttgttattgcaatcaattatttctttagctcttaaatatttggtttctaaaaatctcggtaaataattacatatcgatccagtaatgcataataaaattataaacatcacctttactacatgtttatccacatatgtgatccgaatcaaaattacacacacactagaagtatagtgtatagtaaaccgtacttagcagttccatattaaagattcacattactttaatactttatcgacttgttttattcatgttgtataatcttaattctcttatacctccttgcaagattataccttctccatatgaataagaaatgtttagatatgtaataactatactattataattaatgtatcatttatcttataattgtatttcatatatcctctaacatattaccattaatcacttgcttttacggcataaatctgaactgtatgtagatgacatactatttgttgggaaaagcatgacagaaatagaggttataaaggtctctcgagtagtgaatttaaaataaaagatttgggtgatgctaagtagatacttggtataaaaatcacaaaaaattgatctgagaagacctgtctatcacaaaagacctatttggaaaaggttttgagcaaattctacatgagcaatgccaaactagtcacgattcctttggttgctcactttaaactctcaaaagatcaatcttctcaagcagaagatgaaagaaaggtcatggatagtgtgccatatgaaagtgcagtgggaagcctaatgtatgttatagtttgtacaagaccagatatggcacatgccatgagcattagaagtagaataattactaaccctagagaacaacactggaagctctcaaatggataatgaggtatgttaaaggaacccttgatagtggtttagcttactatgctagttgcaattcaaaagaggaagttgcagggtatgtggatagtgactatgttggatgcataggcaataggagatcacttataggttatgttttcacagctcaaggtggatgcataagttggaaatcaacctgcaaaaggtagtacctctgtcttccactgaagcagagtatatggcaggcactgaagtaattaaagaagccatatgggtgaagggtttaactaaggaacattgctagcttcaattcaaaaagcatcacagtatactgtactaatcaaagtggcatacatttgatgaaaaatgccatgtttcatgagcggtcaaaacacattgacatcaagatatatttcatccgagacatcactgacagcaatgaagtacaagtaagcaaagtgaacactaaggacaatccatgtgacatgttcattaaaggggtttctattagcaagcttaggcattgcctaaagctgctaagtattgacactagcagctaatt

SEQ ID NO: 22871 - DNA, 7708 bp, Cannabis sativa
  modified_base (27)..(61): a, c, t, g, unknown or other
  modified_base (5959)..(5963): a, c, t, g, unknown or other
aattcttatgtgtttatttcattgttnnnnnnnnnnnnnnnnnnnnnnnnnnnnnnnnnnntgttagtaaatctagatcctggttaaatatatccaacagtatgaactatcaaataataaagagcatatgattttaaagaggttcgacccagttagttcggtaatagcctactccccttgatttgtattaagtcaagaacaaaaaatacagtgtttcctctcttgaacctctcacaatgaaatctttgagtatgctctcttagatttctctaaattaattcttttgaccaccttaccagtgagaatgggtcactatttatagggctaaatgcttgagggaaggtttcctttttgcttacaatgtctatagttcgtaagaacatatattacatatttagaatacatagattgtgggatttggacagctttccatatctctgtgatacaatcccagacttatagggattgcttttatgcttcacgatgcaagtcctggaattgtttagtgctgattgctgctcggattgtctactgctcggctgggaagacattatccgtgtaggtgtatgctgagctctgttcggaacatcgctttagccagatgtaaggaattaggtccacgtgtgaccagcatgtgctgccacatcatagagcaaaaaaggggataacatttgcccccaagtctgcacgggacttctgaagtcacgcgtagacttcactcgagtcgaccatccatcaagctggattacacgtgttggatgcgtctggtcatgatctgatgtgactctaaccaggagtcccttcacttttcagctatttaatgctatgattgaactgtacatcgagacgcacctttcactcgcacacttttgacggttactcttctctaggtacttgattgcttttattttcccaatatttacttttagggggaaatcaaagagttcgaaattctaatcgattacaccctttcactaattcgcttaaatatagggtagaaaatcctcataaaccacttttaccatttttcttgctaagtaatctcagagcaaaaagtagtttttttctcttgaattcatcgtgcaatctaagcagaaaagaccgataatctttgttcgaacaacatcaaagcttcgaacagtgagtaagtttctcatctttttcccctttattttcgaatattcaatttgctgggtttccactgtagaaaatttgattgttctttacttgttttaggaaaacagtagaaaatctaggcttgaaactttgtaactttgactgtaatagatcatataacttcgttattgcgacatttcgacttttaacttcgcaatgttcgattctcactttgcccgttcggggtttaatgaagattagcccttaattcaatatttttgaaattctgggttacgaacctacccttcacgaaatttttcatttttttgatttgttgattaaacctggtcggtatatattttcttgtttttgttcgatatcctggccaaatactcatctcgtgtattgtcttttatagatgaatcctggtgagttttagggaggcgaacactatatcgactaggatcttcttcagcttttgtacgaggaccaacctcatctttgtgccagtccgtcctcttcgagtgacagactttctaactcgagttttgaagattgggaggtgagtagcaaaagttcacctactcttgagcccgaggtgcaacaccatttttactccgtgcagatcgcaggagaaggctacgaacaatttgtttgggagcttaggaaggggtggagatgttaccttccatctaactggaccaatatcatccggctaggtgtcattgacactattcctataggccgtccaagttttggtgccttcggcatcccaatcgctgctcctgccgtgactgctgcacgacacacacaccaatacccgtccaagaggaggatgatggaccgtacaaaacagacgatgcagaagattaatgcgactgaccctcacgtggcccgacatgccacgttgtctagtgtcgagcaagatctacctacttctgaggaagaagactatgagggggacattgaagttcaggaggtggaagactaggatgacgaccgtcctgatagcccttctaaggctgaggaggagggagttgctcagcctctgcgctttggaggctacaatgaggtcggagagccgatatttgagcttggtgacgtcttggtcgagggggaagattacgtcacccaagagtatgccaaagcggtccctcataggaggcagggtgccatgagggctagatgggtgtgtcctccgtccatcgtaactaaggaccatttaaaagatttggagaaggctgggtatctgggcagagttgagtgcttcctccctactccaaatcactgagcaactagttcgagggaaggatactgtgcttaatcgggtgccacacaaaacaagaggcgatgctacctttgcacccgtacttcaaacggattgcagactactaccacctttttccaacctagttcacacccaagggcatcaagtatttatccgccttattcatcctctacgctattcaaggacggggtgaaccgtctacgcacgacaccaatgggctctttgatttgaagtctactccgaagcagagtaggttgggagatttcttcttctctcagctggacgacaagtggatgaagggcactgtgaacatggaggttagcaaaattgggtatttatttaatgagtattacttcgggaccggcatggagactgctcatactcagttttagcaaatccctgcacattgccatcctcccttcacgctgaggcttagggaaagggctcaaaaaattctccaactgccggaggctatttggaatatcactttgttaaccacagaggccaactttgtgaagtacaagcttcacccggcagattttatccccagcccgtgaaggagaagaataagaaatccaagccaagccaagctgaagatgtcaagcaagagaaaaagctcattcaactgaagcgtcaggctaagttgaagggtggtgttggagccaaacagtatgctcaaaaatattcagagcaggagaggtcgtggaagaagaagaaaacttacctgaccgagcaggcgccaatagaacatgccatctggattagggaacctggtgggcctgctcagccatcgaatcctgttgaaagaaaaggaaaagccatcctggaggagcaggatgactcttcggacaataattctccatccgtaattgtttgagagaatgctcccatcagcatacagagtactcaaacttgcatttattttttctaatttttatgtcttcacatattttatgtcttcttctgactgtattgctttatttgtgcagaaatgtctcagaagatgattcaggctctgaagaagagagtaggagataactcgggcctgtctcctccggccaaaaagtctagaggtggtgagactccttccaaatagaagatgtcggttgatgaggtaattgatctctctgaggagcgacctgttgtggacccttcaacccagaaggtctcgaagtcaaaaagttcctagggagggagttcagacgggtttgagcaagctaagactggatctgagcgggtcaggggtggatccaaacaaataagggcccctactacaactttagcgctgtgcacagaagccaggagaggcaaagacatccttcaccagtacgtgcctcggtcgcttcctaaaagttggagggaagcttcaccaggagagggaagctctccggactcttcttcgtaggttggaggaggaggccaagactaagaagaccagggaggaggaacttgaggcagaggtcagagggctcaagaaggagattgagagccaatagtccaaggtggagaagcttgaaggggatgtggatgccttagagacaggaggtctcgatattttttacgatttctggaaggccaatcccaaagggaactttgagtacctcgaaacttccaaggacatgtaccttaattactgcatggcctaggcggccaatgagaaccccggggtgacaacttccaacgctcctaccgatcaaaacattgatgctccttccatccagactgatgatcctcgagctcctttagacccagtcgatccttaccaaaagcctgggacttctttttgtatatgtctgtctgattgccttctctttatttttctttttgtatatgtctgtttgtccagtaggccttcttttgagacaaagtgaccggccaagaggtctttaaacttggaatatttttttcgttttttggataactggctgaccgagcagtttttaatcccgtatttacatgctttgttatccttaatgaatttcgttccttgttatgatcattgtgcaacctgtattcatttttgtttttttttttgtgcttgttatttatttttaccaaatgctttatacaggtatagatgcccccaagtgaccgagcaaacttttgatacttggtcacttgcttttcacaagtatgctttttgtctgttcgggtctatgggtacgagtagacctttgtacacacttaatcataaatttataacttgctaatagacttgacacaatttgaatttaaatatgcatctttattaatcatttatttgtcagatcatacttgttaccgtagtaacttacatagaagctattatattgatctaatccgatctttagcttaatataaaccaaaaaaattgcatataatagaaactgtactttcagatgtggtcatccgacctgagtactttttcatttcatccaaacctttaggcgtggtccgcctagaaggccacttacttaagagtaaatgttcttttgtttcgtacttaagacgatcatctgatctggtacttttactggtagtattttcttaaatgttccccgttccaataccttagtaccagaacgagttgcattttttcatcgtacttacctagtttgtatgctcataattccaaaacttcaaccacttgacatggtccctcccagttcggtccgagcacacctgtcgtgctgtctttggtgttcaagaatacccttctaaggaccatatctcccacaaataatttctgtgctttaagttgcttgttaaagtaccgagctaccttttgttgatgggccaccagttttaggttcgctacagttcgcttttcttcaatttcatcaagtgattctgcaaggagtgcatgattaacctcttggtcatatgtcaatcttctgtgggacagaggttctagttctgctggcagcatagcttcataaccatttgccatggcgaatgcagtttttccggtcgttgttttctcagttgtgcgataagaccataatacttcagggagttcttctggccagtttcctttagcatcttcaagttatttctttagagtgtcttgttgactgctttgacttgactgtttgcttggggatgtgccactacggagaaactttttatgatcccatggtttgcacaaaaatcagtgaaggattgactgtcaaattatttgccattgtccgagactatcttgtatggtaatccgaaccggtaaattatattttgtaccataaaatcttgcactttcttggatgtgatggttgccaatggctcggcttctgcccatttggtgaaaataatcaactgcaatcactgcatactgtacttcacgtttgcctttaggtagttgtccgattagatcaattccccaaatggtaaaaggccaaggactttcatctgagttagttcgttgagcggtggcatttatcacatttcttaacgtaggcctttgaatcttcaatcatggtcggccagaaataaccttgccttagaattgtcttggataaacttttcccagctgcgtggtagccacagaatccattgtgtacttcagacaaaagtcgtgcnnnnncttcttgtgtaacacacctgagtagtggcatggagaatcctcttttatacatgactccatctatgatgatgtaccgtacaacctttctcctcattttttgagcttcgttcctattacttgggagttccccagtgttgaggtaggctgctattggcgtcatccacttcggagacgtgctaatcatttcaatctcttccgtgctagtgatactaggtttttcaaggaattagatggcgattagattagccttatcatttatattgctgctcgcaagtcaggctagtgcatcagcagttgtgttttcttctcttggaatttgcttgagggcatagcttttgaattgtgcgagcatgtcgtgtattttgcttagataggctatcgtcttttctccccgagcttcgtactccccatatacatgatttaccacaaactgtgagtcactgtagatctcaatgtgtttggcatgcaattcccgagcaagtgttaggccagcaataagggcttcatattctgcttcattgttgattgctttaaacctgaacttgactgcttcgtgtagatgttgccctcaggtgtgataagggctatccctgcaccggacagttgatctatggccaacccatctacatgtaacttccaggttggtttgtcttcgatgctgctcggctgaggttcttgtactggctctgggttgtttttggaagtgctctcttctttgcccatacactgaactaccttgctaaggcctgccctttaatcgcagttcgagattgaaacatgattttgtattggcccaactccactgcccatttgagtaatcgtctaggggcatcaggtttttgtagtacttcgtgtaatggttggtcagtgtacacccgaataggatgagcttgaaagtaaagccttagctttcttgttgctaagattaggcaataagtgagcttttctatcagtggatatcatccttcagcttcaacgagtcttttgctaatgtaatagaccggatggtggataatgttctcttctctgatcagtacggcacttacagcatgttctgtgacagccaggtatatccctaattcttctccatccagaggttttgagagtacagggggtttttcaagttgcctttttagctcttgaaaggcgttcttgcattcctccgtccattaaaattttttgtttcctcgcaggatgttgaagaatggaacacacttgtttgttgactttgaaataaatctactgagtacagtaactcgaccagttaaactttggacttctttactttttgtaggcaatttcatatccaggaggggttgaattttttctggattggcttcaataccgcgggcattgacaataaagcttagaaacttacccgagctgactccgaaggagcactttaagggattgagtttcatgttgtatttcctgaggactttgaagcattctttcaggtcatctatatgccccccatccttcctagatttgacgagcatgtcatccacatatacttccatatttcgtccgatctggtctatgaacattttgtttaccaatctttggtatgtagctccggcgttcttgagaccaaatggcatgaccttataaaaatatagacccatatctctttggaaactcttatgttcttggtctggtggatgcatttttatttgattataccctgaataggcatccatgaagcttaatatctcatatcagactgttgcatccacaagttgatc

SEQ ID NO: 22872 - DNA, 2538 bp, Cannabis sativa
aacatcaacagatgctgatggatccccaagatcagaagtggttatttcacttactttaccatctgctacaggtggaacttggatgtccttgtcaagcataaaactcaatgtttggtaattgaagttggcatctggatagaccattggagagaccggttgatgattcacatcaccatgaccaagtacctacaattatgaactacagttaatcaaatatgaatcacttgatatcacagaatgtagaaaaggcaaattttcttattcttacatgtggaattgcagcagatggtattggatttacaatatcagaagtgataatattgttgccaaatattggctcaccttcctcgtggtgtggtgcatttgccttctgccttttcttcttcgagccagaattaagaggagttggcttctgcttatcagacttcctgcctcttttacgagagaccaacttccacttcaaagagcaaatgacaaggataaactcatcctgcatatttgaaaaatataaaaaggtattggtttcaaggtttagaccattgcattctcattcttacaagttctataatagctaattattagtgatcatacaaaatgtaatacaacttattgtgatttaggtttcagaaccaaaattgaatcatgccaacttaatttcttgttcgaagaagaaagtttgtaccttcttactagaaagagtaagaaaaaaaaaatcaccactggaaacatattatattagaactattagacaaccatattttccttcctaaaaagtcatttttttattattgaaagatgtgatgtttgagtaattacgtgtaattaaagatttgatgttgagtaatttacatgatgtgcaaaaaactaaagacatatttagaatgttaaattagttgaaagtatttttacattgatatttaacttagatcactcttcatgtgttttttcagtttagtttaacaaattgaactaaatgtactaaaaatatcaattagctcagatttgtgattttggaagttacaaattagtggaagtcaacaaaaatcattaatgggtctcaactaattcaataaaaaaaaggaaacttattaagataaataaaatatgagagcattaaattaataaagaaaaaagggattaaacctgatgaaggtgatgatggggaggaatatagaactcttgcatggtataatctgtcttttgggaagaattacaactacctttatagaaggtaagatatgacttctctcctacgctaccttcaattttctttccccttcctgttaccttccagaaccctgtttttgtcttcctattcttactttgggatctcgagctcctgtaaaataaccgatacaagaaccaccactcatctttattcgaccttaacttcgatttagctgaaaaatgtcattaaataaaaaccaacaaattaattaatgtgtatatatataatttatatataaacatatgtttattctctctcaaaccaaaaaaagacagacacactcattataccagctaattcgcaagggtcaaactccaatatatcgtcaacctcagcaatgtaaggatcaagttctgaatccattccgagatttttcagcctcaagtgattgatcacctgctgttccgttggactgaacgtaaatcccacaagcaccattggtgggttgctactcatttttggaaaattttctattctagctactaaatttgtgtgaggaaaacaagcaatgagagccaagtagtagcgagagtgagatggtgtttttattaatcaatgccactcattaattaatcaccagttgactatgtcactgtaaagtcttaccttattgccttacctaagaagttgtcttgtcctcaatttttttcctggggctaaaggggtgccttcgctttttgtttttgataagggaaatgatcgctttatcttttctgtacttttggacgtttttgctgggaaaataatgtacattttccacacatcaaaacttagtggaaatttgctatgtatatatataaaaaatggtagtctaattatacgagttacattacatttaacactagtccaatactagtcatcctgactagtgtagtctaattatacgagttacattacatttaacaccagtctagtcctacactaatcatcccacttgactaggcacatgatcagggaaaaggaaaataggacccacatttttgccttttacaacaagaaacatgaactctaacacacacttcagtcgtttggatggagattcctccccacttctctcaattttgttcattttccacaatatgttcccctcaagtcaacattcacctttattcgtcagttatgctccccatagactaatatttcttaatcaactttatgattgatctctgttttatattctttttttttttttcattggtggggattttttaaaatttattccaatttcattttcttctcaatctagctattagcactagtgcctaaaggcaaatgccttctggtcttgtggataatttaaacttttcatg

SEQ ID NO: 22873 - DNA, 2995 bp, Cannabis sativa
tcaaacattaatgtccacatcaccggtaaacataggttgttacaacaaccttggaatttttatatttaacggtaatttttaataataattttatttcattaaaaataaaaatatccttgccaatatatgtttgttatttttttttaatttaaaattaatttattggtaaaatctaaatatactctatatggttaacttgatcatggatattttaaatttaaattaaccataggctatatttttttaaaacctattatttaattaatttaatatccttggttaacttgatgatagatccaatggatcaaaattagccatagtaaattgatgataaattaattaaataatttttaacaaaggtatactcttctcatttctttcatctttgtcataaacttagagacatgatagagcccatctaaatcaacatgtaagcccatttattttagatgataaaatggactaggttgctaaataaaataatcaccatattgatagatttttttaatggtaaaaacttgtcaactaacttaaggtcaaaaaatcaaaactcaaaataaagacttagaattgaagacaaaaatataaaaattcaaaaccttaaagaaatgtttagagcaacaatggaggaagataaatgcttgtatttcttgaagtgaagttttacaatgattgtccaacccctcctcaaattcggaagaggtgtatttataggctctaatggtctgggctatattagtggtcctaagggacatagtgatattcatgacatggaggttgcaggtaacaggtggtggtctcacgccttgtaccttcgtttggtgtcgagtggtcccgagttgcaaaggtattggttgttgtgcactcttttttgggatgtacgcacttacaaaagtggtgtctccactactcataccccctagcatcagattgcaagaggtgtggttgtactctgtttgcatgcatacttcatccttagtatgcatgagtttttcttgtgatcgtacctccgttgtagacatattcaacacttgggaaaacttcattaagcattttttatgtcatcgaggaaagcattacaaattgacatgcatgcaagttttagcctagtgacttgcatgcatgtattacccaagagacttgcatgtttcatggccaagggatatgcaagtttgccacatggccaagtgacttacacagccatggttgagtgactttcttgttgcatggcaaagggatgtgtaagtttttcacatggccgagtgacttgcacacccatggctaagtgactttcatgttgcatggccaatggatgtgcaagtttgtcacatggccaagtgactttgatcttgacatggttgagtaatttgatcctttcatggtcgagtgaccatcaacccttcttggtcgagtcaccattaaccctacttggttgagtatctcccaagctagggtttggtggaatggcctcaggatacacacattgatctattcatcttttcccttactcttaaagatagtttttttaacatcttgagattaatcattgactaatcttgagaatttgccttgctaatttttaggattaacatttttccccttgtctataagaactcatttaagtgttcttatagtctaagttcaggatgcatcatcacttcttctcggttctgcagttgtcttcttaggcagttccgccttgagatcttttatttgagggagtatttttccacttgggctttcttaacatcgtttttatgtaaccttattatgaagggattataaactctttcaacggtctcgaccttttactggctacttataggatgtaaggaaaatgtttagcctcttgggtcgtgcgtaactttttcaagttcttggatgttaagggagctattagccaattgggtcacattcaagcttttttaagattaaacattttattggcggagcatgttgtccttaggcgctcaacctcttacatttcattcgtggtacttaaagttcattttaaatgctagatgatcgatactcctttgatataagggaggttgtgcctcttaagtggttctcagcctttttgaagattaaagattttattgagggagcttgtgcctcttaggcagtgctttaccccttacattgcattcgtggtacttaaagtgcgtattgaatgatagaagatcgataatccttttagagaggcgtccctcttaagatcgtatccaattcatcttttctttttttttttcctttttttagactgcttcattcacttttacaatttcgattgacaatcatagggagcaactcaagcaaaccagtggagagtgatgaatgccatatgtaaggtgaaaacttaacattttattgataaagaagacctgtgatcgcctgaatacacatgctatgtttggaggtcaaactaggtccccttttaaatttagtacaaggtattaaaggtgaacttgactacacaaggaatgctttcccacatagtggaacttcactttgaggaacatcttggatattcaatttttatgggttgtagagcagaggcttcactttaatacaccgacttacgagtgttggggcatcacctaatagaccatgtagggaaatgataagcttcccgaagagcactcactggtatccgtttgcaagactttctttccttcctaaacacggatgaacttccctgctctctcatagaagtcttctatgccaacaaattcccttttcaacatattcccccaaactctgcttccagggtgtactgcagtggctatggaaaacttgagttcatctttaaacatcttccccactttggtgactttcgcattgaagcgctggatgtagcttcataagcattccttttcccctttcttcacattggtgatacttgttataggcataatgtaatcacttgatgaatggtactgttgaaggaattcctctaaaaatttatttgaggatgtaattgttcctagtccga

SEQ ID NO: 22874 - DNA, 3838 bp, Cannabis sativa
gacatcattaccagaatgtagagtgttaattacaggtacaatatagtattaaagtgatcagtgggaaaactgcagtaggcatattgtttaaagaattagattgtacctgagaagtagttgttgatgccattgttagaaatgactcttcatcaaagacaacatttcaagctatatatatagcctaccctcctagttttcacaaagatggcctttgcgagttgtagtatatcccagaaaagtacatctctgttattgaattccattttgtgtttattataaggcctcaaatgaggatagcacacccaaaaggctttaatacagagtataatttggtgcagtgccaaacaaaaattcaagaggagattattggtgcaatactagtgttggcaatttgttaatagtaaatattgcattgtggaaagcatgccactagtaattaaatggtaaactatttctttgttgttgattcacgtcgatttgaagacttctggttaatttgtatcgctagaaattataattgttttccaattgtcccgtggttgattggtgtttgccgattgtggttgcaaatatttaaggagattaggtagtgttaatttactcacacacagtataaaagttaaaaattatattggaacagtataaatattaaatttttcgagtctcaatatttttgtaaataagtttagcccattttacagtatttgtgtaagttttccaatatttttttacttatgcaattattaatatttgtcaatatttattatttatttttcaatggtactttcatttaaacaacccatgttatctactacaatctttcggtacctaaccagctaaccttatcatcatcaactaattatatcgaagcattctatatatgaacttatatatattgatatatctatatatgacaaaaagaaagactataatgaattaattagccacatgtgcctttccctcaactatatatattatttacactactttttgacaaataatcataatatataataataccaacatgcatacatatgatttgcttatacatgcatacacacgtaataaatatatatagaatatagataatacatattctttttcactttataatatacatacgcgtgatgatatatatacatataatcatgtgtactttacaatacatatatggtataaatatactgagttaattttttattttttaattagtaataactttcattaattattatttggataaaaagaagaatgatcatgaagtgtaaaggtttacgtatgagataatgttcacacacaataataataccaccaattgatcatgacaatccaacggccagattttattctagtaattgtcatgactttttttttaaaaaaaaaaagaaatacatatttatatatctatataaagtagtcggttttcttttatttattttaataattagtagtagatatactcatcaagtgtatatatatataataaatatatatatgtaatgtacgtatatatatgtttaaagatttagagattcttatatacaaaagaaaaaaaagcatgcaattttagtcttcatttataattaaagtagctttaaaaataaaaatgaaaaatattaaataacatttttggagaaacaactaataagaaaaggagaccaaaagagaacaataaagtgtttatttgcaataaaaatatgaggtacagaccatgaacgtacagacaaaaataagaggaaaataattatacaataagaaaagaaaatgtgaaaagagcaaaatataattaataaattaattattgtgggttggctcaattaatttgtttggtatcttagtggggcagaaggcagtatggcataaattgtctcttaccaaaatacatgcacaatactctttatatatataattaattatttatatatatatacaacacacactagtactaattaattttcaataataaatatgtatttatatttatgtccttataatagttgtaccctatccacaataattttttttttgttaaaaatttctataattttacactttttaataaacatacacacggacactaatttatcagtgtatatatatagatataaaaatggcactttttatcttaggggaagttcatagaaaccacctttatataagtgagaatttttgttaattaatttaggttgatctaatcctagaattaaagtgcatattaaaagtaataaatcataatttaaattattaatcatcatgagctactattacactctacaatattaatataatgtaaatcataatttattaataaaaaacaatataaaattatgtaactcatttatcagagacaaagacttaatttatatatatatatagattttatttttcttaatatataacataagtaattaaaaatacataaatatttactacattctttaatttacaattgattgttatgttgtaatgatgaaaatataatttaaaacaatataaaaggttccatttttaaaaatagatataagttttgggatatttatgataaaatattttactcatcttaattacttaagaatattaatgtaataaaaatgttttttaagaactgatattgaccattaaaaaaattatttggatatattattttctacaagaataatatttgttaattaggtacaattgatatcataagctcaatatcaattaaatttggatatatactatatatattatgttgctttgggaaatttcttttgtaagcttaattcaattaatttaggtggtttaaagaaaattaatatgctagagacaaacaaaatatatatttataaaaatataagtattaacaacctctagtgattgatttattattattaataatattatcttttattcattgatgtggacaaacttaattagagtattaattatatagtgattctgttgttattaacccatcaaaacccaattttgggatacaaatgattctagtcaacttgtgggacataccatatgaagcctacttggaagtttcaaaaactttaagcttaacctttctaataaattaatatttatttttataaattgtaaaaataataaatacataaataatgaaggtattaatattttctcaactactcatgcagccctaccaaagaatccacgtgtgccaatacatcacaataaacctatcaattaatttcataatacaatattattcttggataatgaccctttaggtttaattattgttttttagtttgttgaattagtagtttagtttaaacttgagtgttaagtaatactttcaattgggtctttgtaaaatgcatgggagttcttaaagatgacctaagctattgcgattagcattaattagagtgttacatacgtactaataatgtctaataccattaaaaaaattaagtacttttaatgacaattttttagtcacaacataaattttttattactaaatatgatcacttttaacataatatttaaatgcaggttatcactactttagttttagtcacaataagtattgtgactaaaaatatatttagtaataataaattgtgatttttgttattaatattttttagtcacgaacattttagtcacaacataagaatgatgatttataattagttacaactcttttatttttagttacaattttcattgtgactaaaaaaaagattttttataatgcactactgtcaggcgacgtcttacaaataactaataatttatttttaatactaattattaaattaaaatatacatataatcaactaatataaacatatattataaattgtaataataataataa

SEQ ID NO: 22875 - DNA, 2352 bp, Cannabis sativa
acgttgtacttttttgttgtatagatatctttctcatctattattttgacaagaggttaagttaaaaaagatcaagtaaaatttgttttgtagttgctggataaaatttaagtgtagaaataggagttatcaaattgatccactcttttcctcagaaaagaactctgaaattcaaatctttcacccttaatagggcaaaaataggattagtggaagatttatggttgtaactaattacattatgttcaaagtcatcaatatcaatggttttgacttaatcatttcaaaggtttggtgatgacccaatactaattattttcacactttcatatattaagtatatgttgtcattttattgtatctgcaacaagcaatcactaattactacttaaaatgtagaaacaagtataaaaatactaaaaagtaaagatgcataaagagtatatttcttgtctagacagtttagttggagaggcttatataacaatacaaagattacaacatcaacaacttgattataacatgagtctactgtgccaatgcacttgtgttgtagacaaggagagcacctcctgcaagaatcccaagcagagtaacagcccatatggccaatccagttgtacctgcaaagtataatatgcaatatttccaacattattctctatctttacccaaaatttgatgattttagccaatgagaagttgtgttttttcagatatataaaagggattttattttttctttaaatgtttatacaaaagagttacttacctccaacatagacatcgccagaaggagaccactcatcagcgttgtagattggactgcatatcattatttatttacagactgttagcatatatctatatactacttacaattatagtgtacaacaacacaatcttatgttgctacatgcaaagttatttttatcaatatcctaaaatatattttctcaaattcaacttggtaacttcttattaagctatgttatacaagtgttagtgttagtgttataacgtaatctatgttaatgtaaaatgcatatgtgaggtgcaaaaaaacttttcctataatctataagccttctcttgtgtggcaaaaataagaataataacaattaatatgatataaaaaggaagagagagatacaagaaagatgcagtccaatacatgagaattgagatgagaatattttctctagttcgttattatagttttaaaagatgaatagatgaactttttaaatatttgttctttctatctatgatatatatatatatatatatgcgacatctactcctgttataaattaatgggtctgtgtcaatattttataggtaactttatcagtagagttccaaacatataatactattcattcatagctaaaataaataaataaaggagatgctaagacacaatattgaaagaaataacaataataataataattcaattaatacctgtatccatcgacattagcaccatatttgtctacatactggtacacaccctttccctgaatcatattatatggtagaaaagaaataataaatataaattctttcaatcaaataaataaaataattaagaaacataatcaaaaattaatttaccttaggcttccttccagaggcatcaactccatccctcaagtccatgctaccgttaattcctgtaaattaaattcatcataaagttttaatatatatatatatataattaacattaattccattaattatactcaaacccaacccaaatatcacaaatactactatacgtacataacaattaaatatgtttatagtatagttaaaaacgcttatttatatttgtaagaattaagtgagtaccatatggtttgtcggtcttgattttcttgactccactggcctctaccttgaaggagtaagaagctctagagagagaaggaaggcctctcacagaagacttttcaagtctaaagggagctggtttaaggctcactgatgccataactgaggctgccattttcactaagctaccttaattttctgattttcttttcctttgcttcggcaatttttttctttttggttactattagtatttcctgatataaaaatgccaataggacagaagtggctgtgggtgtgacacgtggcgttcattcagtgggaggatatctggatatggttgcaaaacgttatcaaaacgcgagctatttcaaccagtacttcttctcaatctcaagtatatcaaaatccagggacctatctgggtttctgacacgtggactctgcataggaaggagttgtacttgtaaattcttttgttatgaaataatatatgtagagtagatgttg

SEQ ID NO: 22876 - DNA, 1596 bp, Cannabis sativa
  modified_base (1564)..(1571): a, c, t, g, unknown or other
ggacgatttagtttgttgagaaaaaaatgatacatattgggaagaaatttgtggaacttatttttgtttttgggcccagttcttaattaatttcaattgatgtgtcaatttccaacgtgatcaaattaaagactaaagaattaactgtttcaatacataaatgggatcaatcaaatgaaataaaatcgtcaaagcctgtctcctaggaatactagcacatgaattacttcaatttgacccttcaaaagaagaaacacaaatcccaaaaggtttctcgtaaatatgtttttctttcaacataccatgattaattttgtttatatttctagtgttgatttattaattagcctaattattatttaaaaaaatttgaaaatttttattaattggtaaaatagataaaatatagagaaatgttaaaagacactagtggtgcttagcaccttcctatatgttattatcgttattagtccaattaagtatgagatgtttaatataataacttttaaggagtatcgctagccaatcacaaggcgacatgtctaaaagtgttaggcactactagtgcccaataacaatactccaaaatatatgataaaatcactctaaaaaaaacagaattaataaaattagacaaacaatatcgtttacaatattaggaaaaaaaactctaatagcacataaactaagagactaacaagcccccggcattagagcatcaaagaagtacgaagaattctaaatttctcatccaaataagtatgttacaaatcacactgaccaataataatgaatcactgatcttctaataaagaatagaaaaaaatgaacccactatgtaaaatcgaagtaagaggcaatgacaaactaacaattatggagagggaaacaaacacaagaaatttgaaatctgtatcgcatagtgaaaaactatgtatttcaatatgcaataacagattaaaaatctgtcacagcaaaacatcaatttgtagaatcaaattaaaaacaactgtgcaaaatgtaaatattggcacaagagaattgtatgtggtattagtattttttcgaacattttagttcacggggccatgcttagaaaatgaaatcaattagtaaagtatcaaaaattacaaaagcaattgagtacttaaacaaatttagaatccctctaatgatttaccttaaccctttgtaatcaaccttgtaaatttgatctctgaaacacaccaagtagtaaactccctttagatattgatgtgtgcttactttatctcgaagtaaggctttaacaaatcttctttcgaagatatatgctcacttccttctgaaacgagacttgaaaaagtcttcgcccgaagacccacgcttttcaaacaagttcttcaaccaattctacaaatagtataagaacaaatactaaaacctagctgaacactaggttttcacaaaagaaactttttctttacaaagatgaaaatatgaaaaatgaaattagaagaggtgaggacctttggttgccctctaggttacccatttaaaataaaaactaaggtggcgtttggtnnnnnnnnatgaaatggaatggaatggaaagga

SEQ ID NO: 22877 - DNA, 2218 bp, Cannabis sativa
cttaagttttgggatgaagcttttagagctgctgtttatattcacaataggttgcctactcctgatcttaggaatcaaacacctctagaagttctttttaagcaaaaaccagatcatgaagctcttagaacctttggatgtgcttgttttcctaacataaggccctataataaacacaaattggagtttaggtcagccccatgtactttcttgggttatagtctcaatcataaagggtataagtgtttggactcgagtggtagaatgtacatatctagagatgtcatttttgatgaaaattcctttccctttaaaaaacattctactgctaatgctacacctgttcattattccaatgattttttaactactggaattattcccactgtctcaagttctaacaagtcagctatcaatcccatacactcttctactcaaatctctccacaaagttctatgcattgtcatgcttctgaccaacatgctcctattgataaccaccattttcctacatgttcaacacctaacactaatcaatctaatgatcttgttgatgttggtattgctcaggattttgatacttcaccagctttttctactcaacctattcctgttgagattgcagcatctaatgctactcctactattgatgttcctgctgctgatttaattgcacaagatgcagttcttgttacaactgttcctgcagcatctgctgcaacagatgttgtacctattactgctgcttcttcttcaaccagtagtaacagcagtcttccattgaattctcatccaatgcaaactcgaagtaagtctggaatcactaagcctaaggtgtacatggtctctagagaacctcaaactcttgctgaagcattacaaagcttgcattggaacaatgccatgtctgatgagatgcttgctctaattcgaaacaagacttggactcttgttagactaccttcaggatgaacagctataggctgtaaatgggtttataaagagaagtgctgatggttctgtgaatagacacaaagcgagattagttgccaagggttttcatcagtagcctgggtttgatttcactgagacatttagcccggttgtgaaacaaataaccattcgtgttgttctgaccattgctttagctcgagggtggaaagttcaacaactggatgttcataatgcctttctaaatggcaacttgcaggaggaagtttacatgacacagccacctggctttgaagatccaaaaacccctaatcttgtttgcaaactcaataaggctttttatggtctcaagcaagcaccaagggcttggtttgagaaattgcatcaatgcttgctgagttttggcttcgtttcctctaagtctgaccagtcattgttcatttgctcaactcctcactctattacacttatactagtgtatgtcgatgatattttgattacagggagtgactctcaagttgtctctcaaattgtgactggtctaaatgcaaagttctcacttcgagatcttggtgagttgaattatttcttggggatagaagtgaattataccactgagggaatgcacctctcacaagaaaaatatgccaaggatcttctctgcagagccaaaatgcagaatgctaaatcctctgcaaccacgatgactagtggaacaaaattgtctgcctatggtagtgatcccatcgacaatgtgcaggagtatcaatctattgttggaggactccaatatctaaccattacaagacctgaacttgcattttgtgtaaataaagtttgccaatatatgcaccagccactacagtcacattggattgctgtcaagcgcattttgaggtatgttagtggcacggtgaagcatggtctgcatctccaaagacctacatcttcttcaatggatgtcgttgccttctgtgatgaagactgggctgcagatcccgatgacagaaggtctacttctgggtttgctatctatcttggttcaaacttagtaagctggcagtgtaaaaagcaacacacggtgtcgagatccagtacagaggcagagtatcgaagtttagcaagtgttgttgctgagttgactgggatgaatagtctgttcttagagctaaagatatcattgccacgggttcctaccatctggtgtgataatctaagcacgattttgcttacagccaatccggttcttcatgcaagaacgaaacat

SEQ ID NO: 22878 - DNA, 2735 bp, Cannabis sativa
agcttttccatgagtgggtatcaacttttagcgtcgattagtcttttactgatgtagtatacagggtgtttacaccgtcttcttctcttgttagcatagcactcacatcatgatctgtgagtgctaggtacacgcctagctcttcattgtctaggggttcagacaatacaactggattttttaaagatagaaaagtttatatgtatattaatagtaaaaaaaatataagatcaaaaaataaatattaaattatttaaatttaaaatattaatactttgggaagagtcaaacaaaaataataattaaaaaaactataaaaagataaaatagttgaaaaaaccaaaaaaatccattcattgttatacacagattataaattatagatagattatagattagcattaaaaagaaaataaagtttcacaactcctcatggtttgtgaaaaaagaggaagaataattatgtaaacatttacttaaagattatgcctcttctttcctagcaattgtgagattgtggcattatatacacccaaaatgttccatttgggaattacataaaatcttcatatagcttattcattttttagatcgtaaggatatatatatataagagacctaattaattatgtatatgtttatatgaggaaacttccctttaatatcttccgtgttaacctaattttcctcaagagaactgaacaataatacggcacttaagattttatcattttcctcttttattaatttattataatttttcatttgtatatagatttatttactatataatggtttatagctgaaaaataaaggtaggtttatgttgattatggttgtgaaaattccaggaaagttctttttatatatgtatacagtatataatagacgtggtacttgtgagatatatgtatttatgcattttgagtattgttttataataatgagccaagctgataccaaatacaagtaaaacatattgcatgtacgtggtcacagctagaattattcaagatgattatgtataattattatatttataatattatattacataatgtatgtaagtacattttccctttcgtcatgcattaaccaaaaattggtagatgcaataagtaattcactaaatcatgcccaccttaattcaataacgacgatctcatcggacatccatgtttgttatgcctattaatcttgtataattttaccaatagaggaacataaaacatgagaacttttttttttgtgtctttaaaaaaatattagagtattttttattaaattttttcttatatatttgtaatatttagtttctatatcatggtttttttaagaactaatctcaatatttatgagtgcattgataataagtgattttttttttagtaatatatagatgtattttctccattgatttttaatttggttattccaaataagtcgtttttgatttagttatttttatacaaatagtttttgtgtattaattttaatttgattacattacaaaactaatttttcagttttaaaatttttaattaactaacaaatgtaattagttatgatttaatttttattgaaccgtctagccattaatgaaagaaactgagaaccaaagaaagagaagaaaaggaaagaaagagagaaaacagaggaaagaaatggagaagaaagagtatctcaatttattatgaaagagaagagtacagcttatatacaaccaacacaatcgaactaacaactaacatgacatctaggataagcaacaaccagctaacaaactaagacagtctataactaacaaccacttctctaacagacactctaacagattgccttaacacctcccctcaaactcataattggatgactcaattttgagtttgtgtctgaaatcagtgaatcgttggcttgaaatagctttggttagtccatatgcaagttggtcataagctacaacgtgtttgatttgcaccatcttgtttagaaccttttcacgaacaaagtacaaaatcaagctctatgtgttttgttcgagcgtgcaaaactgggttttgtgtaagcattatcgtactcggattatcacaccatattgtaggagcttaaggaagctcgatatgaagtttagagaacaaataatacagccaagttaactctgctgtgacatttgcaacactgtgatacttagcttctgtgcttgaccgagatattgtctgttgctttttgcttttccaggcaattagatttgatccaaggaagattgcaaagccagaagtcaacttcctatcatctggatctgatgcccaatcggcatcacaaaaggcaaccaagtcacaagaaactggttttgtgagatgaagaccatagttcattgtaccactaatgtaccttagtattcttttaacagcttgccaatgagtggtgaaagggttttgcatgaactgacaaaccttgtttacactgaatgatagctcatgctgagtgatagttaggtactgtaaagcaccaacagtagaacgatacatttgaacatctgcaaatggttccccttggtgagctgataagcgaagaccactaaccattagagttggagaaggtttacatcccatcatttgagctttgataagtagatctcttgcatactttgcttgacaaagatgcatcccattactggtgtagttgacctcaatgccaaggaaataggagagaagtcctaaatccttaagagagaa

SEQ ID NO: 22879 - DNA, 4008 bp, Cannabis sativa
  modified_base (1464)..(1491): a, c, t, g, unknown or other
tatatgactaattgatctatccatattattttgtaaaggtataattttctccaatttgatcattagacttggacacatataagaaacaaatatacaaagacaaaaaaaatgacttcaaaacttttatgcacttagctcagagttgaattgttataaatgaaagaaatagactttaatctttcttttactattcttcagtagctgaatctgatgaagaatctttcttttctttctattttttttttaaatttttttttggaagaatctgataataagatgtataaattgaagggatcctaaattgaatagttgttgttgagactttttcatgaattgtgacccagcccaatattgggtcttatcccttcatttctaaatgggccagcccaattttatgtcaagtcagaatcagaattgtttgtttcccgggaatctttttgtgacttcccatgatttgacggaaaataaaggaaaatcataatttcataggttggattggaaccaattttgggtttctcataaaatacataattttctcattagtttaaacttttagaattgacttttttatatactatatatatgtaagatctattatagttgcagtaatatatattgggttgaatcttaaatatgaatttgagtttcctaacttttttttttttgcaagaacaataatttttttttcgtttagaaggtgataaaatcgttactaatttgcaacaaaactactgctaaaaatataactttggtaccgaaatgcaattgtaataatttaggcacttttaccacaaatatcccatttaatattattaaaaaatatattattaaatatttataaaaacaagtttacacttaattgtataactatatatatgacaaaaaaagtacatatattacataattatttaactacaaaaatacaaaaatcatatttggtgtaaactcagttactattaggtaacaataagatattgatgattagcataatctcctttcattgttgtgatctttgaccattaagtaaccaaaaacattaagtcattcaataaaataaaataaaataccctttatgtaattgacatagtcttggattttccaaaaggggtaattttgtgatgatgtcattaaggattaagtacaaaataggtaaacatgggcattgtttggttggaagtaggtatgtacctattattattatccaactagagcactatcaatgttattatgatgcattaatttataatcataacccaaatttgaaaggtaactacttgaaatttcttgaacaaagaatccaagatgttagaaataagggctatgataagacagaaagattgaggactcctttgatatacatattaagtgccattatcttatattatattaaactgaattatgcctcatatttctatataatattatattaaattttaatcgagcttttttatttttacacttcannnnnnnnnnnnnnnnnnnnnnnnnnnnttttatgaaattctatataaaaaaatactattgtaactaacggagcaacctaaatcacaaccaaaatccgtatagcaactcacataaaaaccaccggagaaaccattttagaaatccaaatcgaaaatttgaaaaaaaaattaaaaatagtacatgaagtaatttctcaatgttaattcatacataaatattatatatttatatacccataaaaactaatatcacatataattttacataaaaaacaatttaatataatactatacaatacaaaaccgtgtaatacgatgtaccaaacgaaccctaagtatcgacaatggcaaagaatcacagtcaacacttacaaaaaatattctaacaagtttattggggaaaagggtacaatttttgtgtttttttatcattatctccaaaacaaaacaatgtccatgtttacctatgaattatatactgtacaggtaaggatcactactatcttccttcatgaggtttgaaaaaaaaaagcacagatgaaaataatgaaaactaagaaacagccacaaaacaaagatcactagagtagcacttgtgtattgtgctaaggcgcatttgtagaaacaccaacaacagaagataatagacagaaacagtcttaaaactgacccgaccttacatccctatccagacgatcagcgttaagtgttccaggaagctctctgaaatcttcgttgaaaatagaatatgcgctgtaatatttggcaatgaaaaatgttatgagacagaaatgctaaggctgttccacaagacaaacccaacactagaatatgagaaagtacaagaaaagatttggcgaacatagagatccagagaagaaaataagttgcagaggttggttagcaagagatcattttatcaaatacatgaatctcaagatgaaaaggcaatgcaagtgtggttaaacaattcgacatccttgaatttcaatagtaagttaatgccaaagggttgaaaaagatttcaatactcaaacaggttgaaattcatcacttgttaggtctgtaagcttcatcatcatattcttcaactcttaactaaaatttcaaagatatgaatataatgtttcctatacactatcaatacctccctgcaaaatcctatcctgacaattattaagagtagaggcaggaagctctagcatattattagatcggccccatgaaaaactgaagagaaggttacagattttatgactatttccaataatgtgttgaaaaagaacacaacccaaaatctatttagagaaaactataagtccacttagcaaaaacacttcaataagtgatttatttgatgaattttccagctctacctcccctagaggaaccgcatacaaagcacgttcttatggacttttttttttaattatagataacaataaatggagaaatttaagtgtagggattaatttcagagtatcaatttcatatgaaatttgttctgacactaatataactgtcaatccaaccaaacatgagctacaaattgtaaaacagcacaagaccaactctctatcaagatcaacaagtaacaacagcattggaatattttaatcttcaggctgagctaggattaacctccaattcaattagcttactcagattggacttatctataggattagtgttttactttttcttatactctctattctcctttctggcattccaaacatagattgtgtttgcattagtttcattcagttagtgtggaatccatcttttcaattttgtcgtaaaatatccagcgtaagagcatatataaactacaagatcaaccataaacgtatacctgacatcaccaggctgccgctttccaagattcaagagaatgatggcaaagcccgttgcaagtacctgaacatatagcacataaataaattgtatggtatcttccttaaaaagctgccaacaaggcagctcaaatgtatgatcaatcatctctaatcatcattattttcttttacttggtcagtactttgcccccaaaatcaatagcactatctacatggccctttagagtagaacaaagttatacaaataaaaatatgtactttgtttgtctttgtttattatcaagttactgaggtgacatcatgcaaaatagaaaacaattcaatgatagatttttaaatggtcaaggccagagaccagaggccatggaaatggaagcactctagatgaaaacttttttgatgtggtggtaaccggttaccactttagacgacaacttaactacagatgaaggtaaaatttctgtaactaaatcgacaaaacattactgcttcaaagaccctggtaagatatgctttcatcttttatttttttctggttaaagataggacccaatacaagactggaaacattatgacttatgcttaaaattgttgaagaatgagaagagagggtttactttctcaacctaggtaccaacatgtatcagcaattagtagagaatagccatagagactaattctgcttt

SEQ ID NO: 22880 - DNA, 3535 bp, Cannabis sativa
taaatgatgatttaatggtgaaaataaacaccggtgttcatcaaattattcaaaccgcacaaactgctcgcaccgcactacagtgcaaaaaatatacagttcgaaattctttaccgtgcagttacggtttgaatttttcctaaactgcgtcgtgcgatacagtttgtgattttgaattgttaatatgcggttcaaaccgcaccgcactgcacattataaaaatatgaatttttatatttatttaggtccaatatgtgaatgtccagccaaagcccactaattatggtattgttgaaacttaatttttttttcatatttattttcaaactttatggtatttttgacaagtgttgctcgaactttgttgcatttgtgatagtttgattatttagtgatagttcaaattgcaaccgcaacaatcgcaccagaccgcaccatttttttgcagttttttagttttgcggtgcgggtgcggtttgagaaattagaaaaccgcacgtgtaggttggtttaaaaaattgtcaaaatccacaccacccgcaccgcgaacacccctatcgacaggacccgctccaggtaagttatagcttaaattcgtaactcccttggggtgaaatttagagtcgatagctttagaattgcgattaaagtgtgagacatgacttgatagggcattgaaatagcttccaaatacaagttgaatcacgtcaattagattaatattgagtgatgatggtcgttttattgaaggtttttctaggcccaacgcccaagttgacatcccagcgcccacatctagtgcccaggttgagcgtgttgtttctgcagaagattaggtggctgtcttaaaggaagacactgattctctagagaaaagtatggtcggtctctgagaagtggctgagagtgccaaagcctgagagagtagcttgaagaaaaacccggctgttgctcggaagaaagcttcaaaggttgaaaattcttcttgtctagcacttgataagaaaactttagctgctgctcatgcttgaggatcaagttaaacgtctgagagagcaagggattaaacgagaggacaaggttgttgctgatgtcactttttatgatggcttatgttttgatgttatctaccgtgcttggtcatctaatggaggagcacagtcgttcaactggtcaacattccctgacacagaagtcccattctttataaagtgctgtgagcaacattttaatgaagattctctctagagaatagactttaatatgaatggagacgagctagtagtcaaagaagctacaagggtctcaagttataataaatcaaattatctaagaggcgatggcaagcgtgattagtggaaactatccaatagtagctgtcagtgttgaggcttctctagcatggcatgagtattaaggaaataggtcgaggggagtcacattagtacgccctactccttctataatggcatcaacaagggttgttcctcctccagaattaggaacagcgatagtgccaacgttgaaggcaccattgttgttgtatgtgtttgtctgatctatatccatttcgattccccttcaaaatcttagaaataaaaatgtttcccacagacgacgccaaatgttgtcggagaaatttagacaacaccaaataatacaagtattcaaagaaagtaagaacacccactagtagttatgcgagtactcacttaaaatagcgagtactcaaagtataagctacaaaatagacaaaaaaagaaagcagaaatatagaaaacacaagagaattatagtagttcaatcggtttgcttagtccactttaggtaatattttccaacttaatttatttgatttagatcacccctttatatagaaaataagtatcctttaggattacataactggtcagtttagaccattttttacaataaatgatagaattaaaatcaaaagaaacatttaaagaataagtgaagaataattttgtccgctcttgacttaattacagcaatgtatatgcgacttgataagtcggagcttgtttgttcctattccgcacacgagctcgtaggctctatagtgttgtactggcatgatttacctttaggcctattttgttgaatgcatgcattctcctttgatcacattagtcattcggaccaaatctacataaagaaatgatctttacttatcacaagagagatatacttagtcattacatataatcggtatatgcgcgaccagtattagcttctcgcgatcctgcttatcttttgactgtgttgggcacaatatgcaactagaccctctcccgatcgcatcttctctcaagttcacatcatgtgaaataaaccgaccattctctctgaccgcattagttgtcgtgtccacacttcttctttctacgggtagcaacactttctgcagttaaatacgagagtagagacaagcacacacttgcagcaaatcatcttttcctacaaagactgactccatgtagcaacttttcacaagattatgctcgtatttttaggcaaaaaattaacactataacactagaataataaattatccaaaccaaatgaacaattattttacaacaaaaaaaaaaaaaaaatcctaacaataatcaatatatgatgaataaaaaaactttatttcacaataataataaaaaacatttttacttataaccatagtaaaaatattttaaatgtttttcataaataccatttaaaatgtcttcttttaaagatacaataatttagggctattttcttagaaaaggagaaaaaagtcacaataaacttcatttgtttttcaactctcaaaccaattcagtcgccgtcgtcgtcgccgtcgccaccgtcagtgttaacgtcgctttttttctcatcagaaagtttcgactggtggaaggaaggagtgttctggtaatgataatctcaaaaccatattaattttttcttttctctgtatcgataccacaaatgcccaatcaccgatttcaattcaaggttttgtttcttatatttctagattcttaaatttgagaagtaatttatgagaaagatgtagaattgagagaatttgttttatttttagatcaatttagtgatgaattaggggctggtgtatatgaaattgtcaatggaattagtaatgtgtagagattaaattgatttgctaatcatgttattttgattagtaatatttctttagacttatcaaattgagcttcgtaatgtgggacgaagctatttgaagatagaactccattgttgaaacagagggataatcatctagtgtattctgagggataatccaattgagctatttgaagatagaactccacaaaattttgactgcttaatgcttcaatttattttttagtgtattctgagttttgtgctctcttcaatatgaatcataagttcgaccttagagggtaactcaaatgagacatgtagtttgctgccataaggtccgaaattcgaatccacaatggtaatctagttggtatttaacggt

SEQ ID NO: 22881 - DNA, 3853 bp, Cannabis sativa
gaccctaattctcatcatcttatttaatatataaaaaataaaaataaaaaacaatattatagatccttatatgaaagttatagtgtgttttatagctagaatattgattaataagcttttaattttattgaaaataataataatattcattttaaattattatatatgtaacattgtaacataaacattgatcatttaatatttatatgcacatggttctaatattttagaagttatattctaaattttaataattgacccaaaaaatatacaatttataaaaatatttttaaatattattatatggttatatattttacaaaacactaaaaaaaactcaaattattttaactaaattgttaatgattccaaaaaaaaaaaatataaaaaaaatatgaaatgttttaaaaaaaaaataatagtaattgattttttttttcttgttgttgctaaaaacagtaataaaattaaaaatgaattttaaaaattgagatggaagtgactaataataagttgttagccctttaaaaagttaagttcattaaaaaaaacagaaagatattaaagaaaaaatatattgaatctttttttttttgtcttatgcagcagtagctcaacttgcacactataaagatcgatagtgcatatggagcaccatgcactattaaaagaatattatctcagtgagttaggtctcgcgagattgacctatctcaacagtaaaacctatcgtgaatctaaatgatcgtcgagattggtatggtaagagtaaaaaatactaatagagagctaagtatcatatgatcataaattttatatatcttaatttaataattatcacacataataatatactctactatttatgcttaagaaaaaccttaattatattatgtttataagaagagtatcatgtagatcgattcgattaagtttgtacatacaaatatataaatttatatataaatacttcattattataggtagctagggtggtgggaaaacagatgagataataatcgattatgagatagttaagtttcgatgatggacatgtgtggacatgtttaaaacacataataaatatctctgggatcgatcaacctcttccattcattctaaactatatatatacatatattttgtgtgtctaaatatatatatacgcatgtgtaaaacgcatgcagcatatagtttcatagtgacacatatataaaagcacatggtaccctcactctaaaccctaataactatatataaagccatgctattaatattagatacctaattggattgagaatcttctcaattctcatcactacctacacctataccaagccacacatacaaattaaaaagatagtagaataggtaggactgtatctatcaattacggggtctagggcgaaatttaaaaaatagtaagacttttatttaagaaataaaatgatatttatataattttttaaaccacgtaaattaattggaatcgtagaatttaaataagtacaaccagtatttaattacgaagctttagctaaataatgagcaaacacaatttgcttaatcaaaaagataatattcaaactaaaaaagaatttgtatatgcactctgaaatgcagaactcaaaaataaaagtcatatctaacgaacttcagatagcttagatcgtgaccaaactgtccgatttcaccactacatcatgttaccttatttctttcaaccaactcaacatctccttaactctgatagcttcagcaagaacaagatcaaccactcccgccatccagcttactgttcgagtcataataatctgaccagaagagttttgcgccacccaaccatactcatatttattttgattgctaaagatagctacatcaatattgatttagatattattaccaactattgcaatccagtgctcgtgcccttcgccgtcttgtagagaaaataaagaggaaatgaaaattttatcttgatcacaactccattgataaatactactcttagttaacaaaactacctctttaacaatcttattcttaccattccacgccttgtcattgcgcaagactacaatgcccaacaaagcataacaactctatattttatctcagaatcccaacattgaattctattatgaagccatcccccaaaacagttgtcaccaatctctatcactgttgtggaaatatacatagtcgaatcaagtaatataatgataaatagagtatcgttcccacgaggactgtagttaattactacacaattaaattcataaattctattaggtaacaataataataagaaaaaggggtgtaaattctactgagaaagaaaacaaataattagagtgaaattagcaatgattaaagcttagggtgattaatttcgtttgaatatactttatatagtttaatatatataatttaattccaaattctaattttcatctgatggcagatttattaaagaaacttatattcgagttagaatatataaatctcaacatatgtgcaaactttctactcttgtgataaatttaaatatataggaggcactaagcataaaaatcctaaatgctacacaaaccatataggtactctcgttgtatatcgaaatatgtgtctatttcactatggcataatcaatactcacttatcaaattttgtattgatatcataaaacatttaattgttgatcagacaattaaaaaaaattaagtacgaataaaatagatacacatagaaaattagagaagaattaaatcacattaaaactagtgtcaaacaatctccattaacaaccctaattaaaagtctagctactcactgttattgtgaacaattgataaaaactaattagaaacatgaaattaaagatagaagaaagaaattttttgaagatcaatggctgtagcctccaaggtcgctttctctctatatttttgtcaccctaaaagtcccaatcaaaagcctcattttaattttttaaattagggtttaaaaaaccctaccaggcccctaaaagcaggcgagccgtgacactgcaagagcatgttgcgaccttgaagctacaattttggcagtgaagcttcctggtgcgatgactaataattttttggccataactctttaaatattgcttggaattagacgattcaagatttttgaaaagctaaaggagagatctaaaacttttattcacaatatttttccctcaaagtgaatacatcatagtcaaaaattagcttgaagtttcagacttgattttcaatcacaagctgagcgtgttgagcatccaaaactcagaatctttcacacacaattatatattagaacttaaaattccagataaattcatcatattcatctcaattaacatgtttcttctcattttaaattcacattgtgaattttaccattcaaacctgaaataagtaaaaaaaacaagcataattttgcacaaaataaatacaatcaactaaacacacctctaaaaaaacttcataaaatgcacctaaaaatagtctatcaaactctcccaaacttaacatttactcaccctcgagtaaagattgacaataatctaaaataaatgaacaccaagcaagctttacttcaattcaaaccacatcaccgctattaacaagattcaactcttataaaaccaaattttcaatccaattgctcccaatactaactttagctctcaaattagaaaaaagaatatgactcataattaaaaataaataattgaaaatcactatacatccttgactcaatccataaaattccacaaactaattatcaataagcttgcatcatttaaccttctccactaatgtca

SEQ ID NO: 22882 - DNA, 8315 bp, Cannabis sativa
tcttcttcttctatagttggttttctgagttggggtcgtttgagtttcaggaggatgatatactgcggcagcaaattaatatccacggaacagagaagtatgagtttctttcactcactttttttctaggttgtactgggcatgaatcgattctctctgggaattgatatatatttatctttttattatttgtgattctgcagttgggcaatcattgcttcaaagttcaaggataaaacgactagacagtgcagaagaaggtaattagtaatgataataatggtgttgtcgtgttggttttctcttgtgattattggttcgtttctatttattctggttattgtttattgattttgttttttgtttttaaaaaatgttgctgtagatggtacacatatttgaattccgacttcaagaaagggggatggtcaccggaagaagacttgctcttgtgcgaggtaattgatattgataacatctataatattcagatattgttaatttgttagcttggtgaacactaaacacgatctactgcacctaatgtattaatggaaagtgaaatatatatttgatttgagtatttgacatttattttatataatcaattttcatttagaccaaaactaagataaagtagttgattgtttagtttttaatgtcggcaaaaagttaaacaggaaataccaattacatatttaccaatgatttaaccattattggttaaaatctaatttgttaaaggctatctacaggctcagaagatatttggtaatagatggacagaaatagcaaaggttgtctcaggcaggtatagaagctttgtcatctctttatctctcactgatgtgattttaaacaatttttcatgatcatattattaaatgtcctatcttctactgcctatgcagaacggacaatgctgtgaaaaacagattctccaccttgtgcaagaagagagcaaaatatgaagctttagcaaaggagaacactacttcatacatgaactcaaataacaaaagggttatattcagaaatggacttagcacagacggaacttcagaaacctcagtatcaacaaaaaggataaggtagaatgaaaatacatcttagaacacaatgttgttacttgtaagttagttagaactagctcattcttttttttttttttttttttgtctataatggaaaacaggaggagccacatatctgatccttcagaaaactgcaacttcgaaagcagattgcataaacagtgcagagcaacaactacgaaccagcagcagcttagagcgccctttgcagtcttagttcagaattcccacaacattaacatcatgccatctcaacatcatgacaatatcactaaggatgttgttgctgatggtaagtcctaaccttattttctgtagagaacctgagaagcagtgtgtaaaaagttttgagataattacacaatccataattagcctaccctacaaattttcaattttagaatttgatgagagattgtatcgatctgctattattccttttaaacctcagggtattctaatgatgttgctttcatttcttttccattagcagcacaaattaacaagtacaaaggatcatttctcagaaaggatgacccaaagattaatgctttgatgcaacaagcagagctgcttagctcactggcattaaaagttaacacagagaacacagagcagagtcttgagaatgcttggaaggtgagaacattgtttcagtctcaaacactaccgccattatgttagtttgaaaaattaaaaatagcctccttggctagccctacaatattaccaggaaactatagcattgtatggatgcgcctaagaactctaacattagagcttttaggagtaaaccacatgtctaacagtcatagctggatgtaagtaacaatctaataagccagtaatatgaataataaacttcacatggctcactcacaaattagagcttttttactgaatcttagccaagcaaattcagctcctccattaatatgagcccattatgaaagagaatctaataactctggtgtaatgttgtcgtgtcaactttttggatcgcttgcattcctccacacaatgcatatcatgcccaagaaagtttggggtagctctcttagttcttacacttctaagtctgcaactcttccaatattcatgaaatactatatctatacgcaggtcctccaagatttcctgaaccaaagcaaagaaagtgacatcctcagatataaactcagtgattttgattttcaacttgaagattttaaggatctgttagacgacttgaagagtagcaatgaaggaagtcgaccatcctggaggtaaaaaaaatggttgtcaactatacattatcgttattatatgagaatatttatgtcattacataagttctaatgaatggacattgcattgcaggcaacctgatttgtatgatgagtctcctgatagctctgaatacagtacaggatcaactaccatgtcccaaacagctgttgataaaacagatcatagtcaagccgaaacaggtgctccacatcaggatgttggatgtagttcacagtcgatccatgttgaagaaagttgtgttggtgaatgtgacaatgagatgatttgtggtggaaccacagaacaaggtaaagaaaccttctacttgcatcaaggccattgtcctattgctgcaatattatactgagattttctgacagttaatataatattttcagctgagataatcccaacttgcaatgaaggaaaaaatgatagccaagttgtttctgcattgtcaaatacagagtttggttctcctattcatgtcactccaatgttcagatccttgacagcaggaattcccagcccaaaattttcagaaagtgtaagttgtccttggaacttgactgtttgatatagatagagaagtattcatgtgggtgagtcagcaaagtaacataaaaaaaaaaaaaaacaaaaaaaaaaaacccaaagtaatcatacagggtatttcagcaaaataacaaaacaagaaagaaagtactcatatagggcattagcatcagcagcatatgtagtgggtaatagtaattgtccggattatgcaatgacagtattaaagttaacaaaatttaactgtgaggtacaaatataaatgagctttgatagccgttaatcatttaaataaaacctttaagattaaaaaagtttggtaagtgctaatattaattagtctaaacttataaaacttacatctattgatacagaaactttttgttttgtttgtaaaaattctttataaaaaaataaccttagaatgtgtatctcaaatttgattagagactaacagtattctcgtgaaatgtttcaggagaggaacttcttgcttaaaactcttggagtggagtccccgtgcccaggcactaatccttcacaaccaccaccaccctgcaaaagagccctcctccatagcctataactaaactcttctgattcagctcactaccacaattctacttctcttaagacccattgtcgggtcaccatctttgtttgaatcccttcctgattgcagcagcaaattaagcccgaaattttacaagaggcgtgtttgaatctgcatagtggaaccactatagatctagaatgttatggtacattctagcatactactaggaacacatctaacacggtgttgtgtgtgttcttttcttcttcttctctactgagtttctaccccagagaccagcctcacgacccagtcttactacttagtactactcacataaaatctgtgtgtttggtgtgtcattcttttgtttgtttgtcttatcttggaatatgtcattccagggtgctcccatttttggccttgatttgtcacttgtacagaaacctcctatttagtctatagtaaatcagagtgtaagtatacatcggcatcacgccaaatcccagctagaatatatatatcacgaggacgaaaatagaaagaaaaaaaagttcaacaaggataaccagttgaagctgattactatatattttttccccttagtttttgggtgtgcagagggtatagaagaagtttttcttattattattttttttcctgatttctgatgtactagcacataatatgatttgagtggaatgtgatttttgttttggtgtgcacatatactctctagttaaaattatatatataaatgtgtgtgtgtgtgtctggtctagaaggaaaagaatgtcagaattcaatatccagaagcacagaaaagaagaagcaacactgcgcaagaggaaaactttcacgtggataaagtaagagaagtgaaaacataattgttgggatagtagttaggaagccattgttgagcatcgttttgtttcaaaaagcagtataagatatacaagtcaagcaattcatcaaacaaagcaaagtaagtgaaactcagatttattttttttaaaaaaaagcaaagtaagtgaaacagaaaggaaagcattgaacttacagaggtgaggagggtgtgggaaagcttccattctggtgttgtactcaaggactttgacagagttagtttcgtgatattgatgatgaggtgactggtgaggatggtgttgtggtaaagaagggaactgtgttatttagaagaaaaatccaatgatggtggtggatggatggagtacaagtgtaattatgacaaaatcaaaagcaattggttaaaagagggagggaattctctacaaaataaagtgctctcatttgctattaaactttctcgtgggaaggtaagagtagagttttactattttgacctctggttcccacctcctcctctatttttttattatgtcctcctcaataccttattttagttgaccctacaacactaaaaagaataattatttttaacaactttgcctcatatagcagaatatgaaaaataccagaacaaacaatcagagaaattaacatgataacccaccaaggaaagaatgtcttattcattaataaaagagagtcaagattactgattttgatgtttgaacccaagtcaaccattaaacagaggaaagctacaatggatgctagtaagcaagcaaatttgtgtcctaaattaacaatggtcaagaataagttacatactctaaagcttactacaattagaccaatgtttaaatataaaggttttccaataagagaatagaaaaagaagacataaaattaagatgtttattcccctacgaagatacaatagcagacatagcaaattcagaatcttatggctaaaaagaaaaatggttttaatgcatcataaattgaacaagttgctgctacctgattatgcccatataaggttaagatgcttttttttcatttataaatatatatatatatatatatacatatatatatcacacagaaatagtcaaattgcatattcatttggttccttataaaataaaagtacaaataatctacttaatatatttctcaacagtaaaggatgtattcagttacatttactaatatccccgaccgagtaataactaagcttggagccacttaaccttatggctacattgatgctacaacaaatttataagaagaaaaaaaacaagataataacttcaaaattgttgaaggtgcctcttcacatgggctttctcttcttttgcactctctgcaattttctccatttgaggtagatctgatatgacaagccagaaaagaccatcgccacacagccccattgcttgcttgataggggattaccactgagcagggacgacaccacaatgctgacaaacttgcgggtggtggtgatggtggtattagcaagagaaccgaatctgctaatggttaagaagataaaattttggccaactgcaccacatagacaatatagaaaaatgtcccacgctgcttccgggtgctgcttgcagaactggactgcctcgaatccaatagcttgaggccatccaaacatgtatacgaggttgtatatggtaccccataagttcattcccaacattatgtcccaggcacttgtctttgggtacctgaaaatagatatattgtaagttgtttctaaatcatttgatactaaggttagagattttgaaagtcttcacagagaatgcaaatgaaacaaaaaggtgaagcagccaatgctgcatcatcaactgattacacagataaggaaggttcataacacaccttgcatttattgaatcctgagtagcatttgtaaatccatcaaaagcaaggttgaggaaacatagtccatatccaagaggagcatttggatgagccaacttgctaatagtctttgagctagtctgataccaacccacgctataaaattagcataattgcatatctacagacctatttggccgttcttataattctaataacataaaactgatgacatgtagaccagtttgaccattttgaaaccactagaaataaaacaacagagaaaacatgaatactactgcttcattctcattctaagctgaaataatgctaaccttcaaaagtgcaaatacagatacccctccggcaacaagaagagtgcaaaggtactcaggaaaagtgtacctaataccatagactagagtacccatcaacatcactgcaaggataacttatagggtcaataattatgttcttaacttctttttaggtatgtgaattcataacaaatgatccaccatacccaaaaatgacagactaaaatcgtatattataatttttctcatgcttaacaagtttatagcctcataattttctggacaatacgctaaaagaaatttggtgaccataagttacataattcatcattttcacaaatagatggcattttgcgttttttcattcaataaaagacaaacgaagcaaaggaaaccaagaaagcacgcgtatgaaagtaaacagactcagttgtaacttaacagtataagaactgcaaacattgacccacctggaatcattttagaagacttggccaagacctgaacaatgaaaataacaacattaatgttaaaatccactaaattatcattcacatactacaaaatatcagtagaaagtttaaagtattgcatgtcaacatttatgtaatttgttttcaagaatgaaattaattgtaaataagtacaggagccgttgcttagcaaaatctccatgaaccaataagcattcacaaggaaaaaagaaacgaatatgtaatgtccaaggtagccaatataataaaaacgtattagtgtgagtgcagtgtcaagcaacaattctaaattacatctcatacagcaaattctttccacataaggctaaaagatcactaagttgaacaatcccattctattaactcagtcccaaggagaaaaaggtataagaaatgtacctgggcagggtaactaatatacttaagggcttcaattcccatggcgggtccaatggtattcgtaataccagcactccagaatgtccaccatggcgcaccacctctgctgccactagaccaaagcttgatcactgtttaaccgaacacacacgagatacagtcaaccccaaaccatccctattgattccccccctcaaaaaaaaatataaacctatagatatggttaacaactcacttatataagaccagattaaacaaactacattctgagccaaattcaggaacgaaaggtgctcaaacctcttcccatctggaccaaatcgcttagtcgacctacacaaaagtcattaaaattattaaaattgcgtaacccaaaatgcaggaacagtagagattcgcagatcatggagcaaaatgtagtaagatctcggtccttagcaacgaaagagagtaataacttacagagtttcttgtaaaacaccttggtagatataggcagaccatattccggtgacgcagaaggctaaaactaagatacggcggagtccggagccatgagcttccatttccgccttaccaaaatcaaataatgcgaaaaagattggaggaggaggcagagagatagagatttgcaaaaatggagatccgaaagccaagtggagatttcttttcgtttttgttattaactgaaaaagaggcgggtgtaggtagcgccaaccgacgtggggttatacacgtggaagcttcctattggtttgattacttatctttctcttctcattggctgattaaacgcggactcttctagtcttctcttctttcccacaacgtttccactttccgaaccattccatttcttttttacatgttatttttt

SEQ ID NO: 22883 - DNA, 1953 bp, Cannabis sativa
gaatttgaagaatttgctatggtagggtgggctatttggaatttgaattatttggtatggtgcatgggtgtctagttcagattgtgaaaaatttgctatgatagggtgggctatttggaaggcaataaatgatgtgttttgaaatggtaaggttgttacagcaccaaaggtggtccgttaagcccttgactaattaatggagaaatgctcaagcaaacaagcagtcctcaatcctcattgttacttttatgatcaactaatagtctaataattaataatagtcatgagcattggtctaaaccatgtagatcatgaaaaggtcaaagtgaatgtagatgaagctctttttgtggctatggtttgttttggaatggggtgtttagctcgcggtcgagatggacacatgttggaggcgtttcgtactagttggtctggcgagggtgcagcctgagattgctgaagtaatcagtgttaaaaaggcggcgcttaactggatcaacgcaaagggtaaaatgaggtggcatggcgatggaaattgattccttagtagtggttcaagtggtgtcatttgatttgttagttcaagaatattgtaagatgtatattgtcttatttgaaaaaagttttttttttatattttactaaatgatgtgtaagtaaggtcactcattcactagtgagtgagtcttgtgagtattgttttatattagattacatgtttaatgtggataatgttccttcagatttgatgtctattaattatcaaaagattcaaaaaaaaaaaaaagttatataaagttaaaatataatttatttagcaataaattacaaaatataatttataaagaaaatgtctcatatgtcatcgctgccatttttatctttttaattaaaaaaaatgtaattagctaaaaaaaattaaaagtatgttaagtacgtaggatcaattgagcaactattcagtcataagacaattaataattacaatgaactcatgaaagcccaaagatttgtatagaaacaaaaataaataaataaaaagaagatgaccaatcacttatatatactcaaataattaatgtcacttattaagtttgaaaatatatattaaatgaaaaaagacaaattgacttgtattatattaaatttctgtttaaaatgaatttattttttcaaaataataatataataagatgaattttcgatgaaggaagaacggtatttgatgagatagtgagatgagatggtatcatgaattaatcttgaaaatatttcaaggtacatctagatagaccgttaaaactcaatattgtacctatcatgatttttattgaacaaagtcagctacttcctattttttcttatattgtatcccaaatttacttcaaaatttatagatattaatcgcccctctaattctttttctcttaattaatttgatcttcattaaaacccaactgatcatcatcctctctctttctctgccatgcatatactaattcatgagtgaaaaaaaaaaaaaaaaactaactagctaacaaaaaggaagttttaggttcgtgtctttttgtgattatcttgtatatataattcacattttaataattcttattagtgattttggttttggaaagatttcaaaaatagattgaaaattaaaaatatataaatcttatatatatatatatatataacttacttatagcaaagaaccttataattaattaagaaactaactacaattaattattatgccctcatagatatatagattctaaagaaatatatatatataaatatataaatatatatatactcagtgaggactcagaatttttattttctgaggtcttatttatcataaaaaaaaatatatatagctacattataatctaatggttctcccgatgtatactttcgcgattcattttgtaatttgtttcttattaatat

SEQ ID NO: 22884 - DNA, 2655 bp, Cannabis sativa
aacttttacatcatccattgctgaggatgattaagaaaattcatttgaaaagggaaagagttcaattgaacaaaaggcatagctgaagtccagatcaccttggcttgaggagctgccattgtgtcttcactcccccaaggaacattatgaagccagactgaaataaatggtccattgatggttctccagtctgaaatccctgagacaaaatcaggtccttggtagccatgcctgtggacctccatggccgtcgcttcacttggaccacaattgttgtgcttaaaactagtaagttccctcttatcacttgtaggctctccataggactcaaagccaggtgccggcacaaatgaaatacgtccgttatattgccttaaacttaaaatccgctgaagagcctgtggaatgaaaacaaaatcaaaaagttaggagcttggaacaattattggactcatgtaatgtagtgacacctaaaaattaagaacttaataatggactagcattagaggcaatcatcacggtaagaatggttccctaagatgcacaaacaaaattagtagtaatagcagcagtataacaaaattgagcacaacaaatgttagagaagaatattaaaaaacatacatagaaatcaagtcgggcgcttcccatccacctatatttttcagattcaatgtcaatatcggctattagacctgatatgaaacaaaagaaacatgttacatgattacagccaacagtcgttgtgaaccagaattccttacaagaataataccagtacaacagtgtagttcaatagaacaatgatggattttggcttaccccaagcaagcatcagtacactaaaatatttggtatctccttgaaatatggtggttacgtccaatgaacgcttatggcctatcagtagttaaatcattaagcttttaatcaagggagcaattctccccaaatataaaccaaagtaactattatgaacatataaaaaatgtgatcatacactgtttctaacctctaataatggcaagaacagcattagatactgcgcatggataacccaccgaatctagaagagattttgccataccatttcctgtacctgcatatgaaaaactaaaaattagtagaatacaaatttccaacattattgtgaaaaaaaataattaaccgaaccataaaccattttcttaaataattttttgtgtgtgtgagactgagagtagaaaagaatgaacctgctggaactactccaattggcatctttattgcagtgtcccaatcttccctttcaagcagtccatttactacctactaaagtgtgcaacactagtaagaacaagaatgcatagtagttaaaatagtcatatttaaagcacaagagaatgtatcaagtcaccctgataacacattaaatcaaattcccttagaacaaaaccaggcacatatttacaagaggtgtcggaagaacaatgttttgcgtctaggcaatgtgaagtacaagatgtcaagacttccttatattgataatttctgtaattgaaccataatgacatctatgtgttcactgattcatagcaactaacctctactagaatgccatccccgctaacacaaatgatgccatcatacttagcaagatctattgctctggccacttctttagcatgcaattgatgttgagtttctgcatatttgattaagaaagcaattaacacaaaaagggaaattggaaaatttattacataggaaatggatggtttagtgagtaaaaatcccaaccttgcaatgtaaattggacatcagcatcctcaagaagtggtctcacttcatcaagatatatctttgaagcagatttgttcccaccaaatggatttacaaacacaaacactctcttaggccggcctgaccattcattgaaatcccatcaacttttttttttttcgaatcaaaagaaacgaataattctaaatattttgaattcgaacaacttcgtattcttctcctaagtcgagatataaaatgggttgactattaaaggaacactaatataattaatccaacatcacttcactattatctgtgcataagttgttgatcgagtttcgaaaaaagaagttgataatgcaatgttcgtaatagttgatgattagtattaaattttcctacaaaaccaactaatcaagcgaaccccaaaagttaagacttttccagttttctttcattttacggcactttcccgacgaccaaacagcatggaaagccgagccaactaaagaaaaaatatatatttttttatataaatgcatgtagaaagagaaattaccgagagaatcgatgtattgacgaagtttgtggcagaagagcctctgagcatcctgagacataaactcgaatacaaagttggtcctaaccagagctcccctgctcggcgcacagcagattctgtcccctgtttcaatgagggctctgatcttgattttgggaccatccgttgcaaacccgagaacctccttctccacggtcaaacccctttgaccagactccgaccaccggagaaagccgtcggcagttaacgttaagggcgaaatggagccgtttacgatgacggtgtcggagaaaatgggttgtttgggggaggaatgtggttggtccatg

SEQ ID NO: 22885 - DNA, 6070 bp, Cannabis sativa
aaaaaggagtgagagatggcgtggtctgcggcgagagcattcaatgttcaggcggtggaaatgggcagctcactgtgccctcggtctcccttagctgcagccggattgggttgtgtctctcttgccggctctactctatggcgatcgtcttcaatcaatcgctctatgccttttgcttgcatgagcattgccactgatgctacctgtattaaagaagctgttaaaacagacaaggctcctgctgcattgggaccctattcccaggctatcaaagcaaataactttctctatgtttctggtgttttgggtcttattcctgagactggaaagtttgtatcagataacgttgaagatcaaaccgagcaggttatgaaaaacatgggagaaattctgaaagcgggtggtgttagctatggttctgtggtcaaaacaacgattatgttggctgacttaaatgacttcaagaaagtaaatgagatctatgctaaatattttccttcacctgcaccggctcgttcaacatatcaagtagcagcattgcctttaaacgccaagattgaaattgagtgcattgcagcgctgtagcgtagcctccctcctcgaaaaggttgttcattttactctcagttaaccattttggattaataatgtgaaaggggaccccagaagatcctataatgtatcgaagtaacttttgccgtatggattataatgttgttgtaacgttgttctctgtaattcgcttacctgtgacactgcagttttgtgaaatggtatctcaaaatggagaaagaacttggctctctttcaaaaaaagaaaatgttacaatttagttgtttattaaaatttaatattcaactttaatgttgtttctgtttagttttatacatagtttcctttcctcggttgtctgttccttttattttgggaggatttcatatttttcttttaggctccttttcaaaagaaaaacaaaattatgttatgtatttactaattatatgaggagtcatctctcgaaaacttagaaaaccacaaacattgttagagaagccccacgaggccagaacacgagcaataacagaacaagaaaaagactcgaaaagattaaagatgttaaaagcaagcattgcatgagtccaggaaggagttcgccctaaactttgacagaccgaaatgtgaacacaattttgcagatgaagtaattgtgccatcttgagacctgccaatagcgcacgcatctcactcttgaagacatcaatagcagaggatttttccacaaacagccctttgagcacaccatgatcatcaactacaaccgtcccagccacagcgtggctgttcttgaaggcaccattcactgaaatacgaaccgagtcctgcagaatctgcactctggacctttccttagcaggcaaagagtgaccatctctgtcacgattgaagactccaaaaatcagcaaaggccttctgaacattctgaaccataacatcaatagggagcttagctttgttatggtagcaatcatccctaaaaccccagagtttgtaaacaagaacagctgcaaacacctgaaattccaccaatgtagatgtctctcttaaaagactacctattcttgttctgcttttcttttataaataactcatctaacttagatttagatgacaagtgtgcaaatggttacacactatgaacctccttaagtagcagataaaagtttaaatttattcaacttttcatctaatgacttaaaaggaagaattcccatgcaattaattttaatgaacgatgtctacattgtgtatctttagttgattacataaatgatgtttaattaaagttatagaattaattatgccagtttttcatgaggaacacatccttcttaaatttatgcattgtactcttcaactcagcaaacaaaacacaaaaagtttactatttaattaggcaaaccaattaattaagcagctgcaatgcaagtatgactttgtaataatcaatcaattctagagtcactgtttttagttttccaatctcagtactattctagagttcaatatactaaattagttattaacaagtgttaataattcttaacataaatattgtcacgtctattgcttaatgattaaattcaaggcttgaagaaattccctacctacaatgtgataattgaattcagtattgagttttttcctattttttttttcaacaatgtttctatctttctgtttttgtttgtttttatttaaaaaaaaaaaaaaaactcaaattttatacatatatagcaaaatgcatgaaccgcataaaatattttggtggagcattctattcattgcgcttttagttagatccatccttaatgaacggatgaacattaaattgtaacatggcttctcatctgtgaagagtttctctttgagatttcattcctgtacatgaattggggactagatcgtggaatttaatcaaattcatttagagttttagtgtgaaagaagtgaatgttgacgatatatttttatatgcgtttatcgtagttggcccttggcattatatgaagagcgaaaaataacaagatacataataaccatatgtataacatacattgttatattgattctaattctaatttttatacatagcagaatcacttttttttgttccattacaactttttcttgttgtcactaagtgagctcctccacccatagactaaatcaaacttaactgcaatgtggtagttagggaaggaactatgatgcttgcggtagtggctcaagatcatgtaagaaaggtgctttgagttggtaccaagcttttgccttttgctaagacttacaatttgttattataggatgtaattcctttgacataattattaaaactgtcaaggggtaaaactcaaaataaaaaattgataattataatttttcgaaagtttctagatcttttaattttgttgcttataatttagtcaagtagacttttaatcaagatgtaattgataagattgaggtaccatataacattatttgtaatgcctactaagagtgtacatcaaactgctcacaacacaccatatcgcataaaaaatataatttgaaatcatctacggtgcagttgcaatttgcattttcatcaaactgcacaatacattttgcaattttaaagtctaacggtaaaattacaatttgaaaaattacaaaaactacatatgctttaggtttaaaaaaataaccaaaactcacaccgaccgcaccgcgaacacacttatattaactcttattttattgaaatgtcaaacaaagtgaaagggtttgcactttgcaaagactttgacttgcatacttgcatactcatgaaagtggtaaacccgccaatcggagacagaggccaacaatcccatttcccatggagaccactttcgtttctcttctactcctcgccaccatccactcttccctctcatcactccttggagttcatcctctaggtaactaatttcaattaccaatttcggatgttttggaacatacccacatctcaaatattgatttctgttattcaattttggttacagatgagaactactttgcttcccaagtaatcaaatgcaaggacggttcaaaatcgtttaatcgagatcgtctcaacgataattattgtgattgtgtcgatgggactgatgagcctggtattgttttcttattattgtattgttttcttcaccaattgctgctatgaatattatgttaactctgtttttttttttttgccctaattgcaggaacttcagcttgtcctaaaagcaaattttattgtagaaacttaggaagcacaccacaatttatattttcttctcgtgtaaatgatcgtatttgtggtaaagcttttttatttacataaccattttatcatgacattctttttcttcttttgttagttacttaaggactgaagcttatatagaatatgttttttgatccttacattgtgggcatatgttgtctgatttgaaccaaaaaagaattttaaaagacaaaggggggtttgaaaatgaatgagtgaatcaaaatttgcattaatcacaaatgagggattgatcaaaattagtagattcatctgtatagatatcatcatctacattcagaaagccgtatgtaaacttattgaatattgtttggaatcccattttcttgttcctgaatgatcttcttgaattctttgtttgcttgttatatttgcagattgttgtgatggaagtgatgagaatgatggcggtatccgttgtccaaacacatgcatcatgggtggaaacatagaatataaaagtgacaatggtgtctcgtttagcaacaatgatgaagaactctcaactgtcagtaatcttggccagaccaaaaagggagggatgaatttggatgacttgattgaaaaacttaaacgtatgctattattattccttaacatacatacaatatttgttgaacccaatcttgtatgtatttcagtgttcgagtttttggttattccaggtttgaagatgctgataattcttcagttagtcctcatcggcttcctggtgatcctcaggatgtccagaaagcgcgcagcagtctctaaaagaagacggcgataatagcatgaatctaattgctatacatttgttgcttctatcttgggttgcgtcagatgagaggcctaaaatggcctgagtttttttttccttcgggattttctttttccctaacagcacctctggtcaatgaaaagtgtcggggctcatcttgatttgctctttccaattgtgagttccgagctgaggacagagcttgaaaggaagtacttggatatgaaataattttgttataagtatgtctcttatacaagagtatgactttgtaataagatcattttacattctgtgagaaatgcaatggagagttgttttttctattaattattggatgtaagtagatttaggaagtatctttcttcttattgccaatataccaggtctttccttccttgtgtttcttgagaatttggcaggtttgtttgttgcttttgctggttgtgtgtgtttggaagtttggaatcaaagaattagaagcctcattcaagggagtgttatttgtaatgagaaggcgatctattacggtaaagtcaatgttctcagaaattctcaactgtagagatcaggtgaaaattcgaaaactgctactatctggtttctggtgaagactttttctttgttgatgcttcttggaaagaagggctgctgctgggtattgcagcagtgtgggtgaacaagcagcaaataaatggtttggtcgaaacttgttcagctcttgaagctgaagcttatgctttggttttggcacttgattgggccaaggaagaaagggtgaacaacaagttggtggtttactctgatgcgcaggtgatgatggtgagtgctttctccaaaaagttttgactggttgattggaaatgcaggaaaacttcttgtttagttttaaatgctttaaagagccttgggtcgtgatcatgtttggtttgttgtaatggtaagcataatggaatcatgattatcattacaatattcgtttgcttttaaaagtgatataatagaattacaatgtaacaaggactacattatatacgggaattttcgttacatgaaaaaacttatgtaatgaggattacattacaaaggattatagaataaagttaaaatgactctagtacctctctttatataaatttataaaataaagtagtgatagttttgtcaatttatcacttattttaatattcattctaacaacaaactaaatatggtaatcaattctcattaccatttttattctattacattattgttataaattactattattattacattctaccaaagcaaacatcactttagtttcgatataattcagttttcattgctaatagcgtagctgatggtctagctaaaagtgctacaatttcttgccagaatgttagtgttttcaaaggtaggcacccccacccaactgtggctaaag

SEQ ID NO: 22886 - DNA, 2567 bp, Cannabis sativa
ttttttaattttttctttaaatttacggtttgggttgttctggtagtttatatatgagttgctatgtaaattttggttgctctgttagttgttatgtgggttgctatgttaatttttgtaaagatgtaaaaaaaaaaaaaaataaagtgtaaaaataaaaaaatccctataaaaagaacataataatatatagtttacccgtaatacttataattttataatacttttcatttttttttagaaatatcacacttttactttttatttttacaaaataatagaaatatatttttttggcaaaaaaaatgataacaggaagatatattttagatatgtacaataggttaatattttttttaatagtgatcaaaatcacacatgattaacaatgcagtaatctacaatcgtcggcagcacctcctcgaatcagtatagctcatcctctaacaaaagggcatgctttgccaaaccatgcattgtaaaattcttatcgtgagctacatgagacaaaactacccctaaaaatttagacaataaaattataaaatcttcaaatagcactcccagctcgttaaaaaaataaaattataaaatcttcaaataacacttccagctcattaaaaaatacatttcctttgttgataattgttactagagaaccaaagtttcgacttataatacagaaatactacctgaaaaaacaaccaacaaaaaaaaaaaaaaaaaaaaaacaagtattagaaaagaaaatccttgaattaaacttaatagactaaattcaaatttaaacacctaattgaaaaactaaaactcaactacaaaacggaatcctgactaaaacctacagagaaccagccaaaagtataaccctttggctaaaagcaacaaattaagaacactcagcaaaacacgtatgattttgattatattaaaattaaacttattggcaaagtcttaataattgtaggcactccacaaaaccaagcaacaaattaaataacaataaataaaactatattacaacaacatttaataaaagttaaataatgtgaaagaaagatggcaaaacaatccatatccataatataatataaaataatccatatcaaatataaagacttaaaaaacttgaaatactaacctgtaaagtcgttgaagtagaagttatgagtacaaaatagatcacttctcttactcaataaccatactataaaattatcttaaacaattaaagacaagtcataataaataacacacaacaaccgtaaaaggtacaaaagctgcaaaaggcatgcataaaatccctaaaagacatcaaaaacattaaattattgtgcaaaaattagctcgattgtattaacttatatactttaaaaacatactaatactctttgaatattagttagtaaggaaaaacaaaatagacctacaataggttaatttttgaatataaatgttataatatattatgttgtgtagtcatattaatataagataaaagataagattgataatatcatatacttttttttttttttcagatagtaattaaaaaaaaaattccaagaaagtaataatagatatatttttttagatgagtataatgagtttaaatttaaattgcaatgttaatacaaaaagtattttatgttaaatagtgagtttaaatttgaattgtaatgttaaaaaaaataaaaatataaatttaaactatttagaattaatatttctttttatatattataaaaataataaaaagtaaaagttaaatatagtataatataaatggattaaatttaaattcaataaatacttattttataggagttttttttttttatatatttatacttttataattgatttttttatttatttatacttttataaataatcttttattcctttataaaatagaaacatcataactttgaaatagaaacaactttataaaataaaaacagtataacttcgaaatagaaacaacataacctcaaaatgaaaacagtttttataaaaacacaaaaatatatataaaaaaacgtaaaaatatacttaatttaaaatacatattaaaaattagtatatgttttttttaggctttttttttttatttttatactttaaaatagtttttttttttatatttttacgaaaatttatataaaaattcatatagagacgaatggagtaacttaaatcgtaaccaaaatccacatagcaactaacatagaaataactggagcaactaccggaacaatctaaattgtaaaattttaaaaaaaattaaaaaataatatataagataatttcttttcagtgaatcttatacataattttttttctgagtgtgcatgataaaagtaaaaagtctctaaattatatatataattgaaaaaacaaaaacaacaaccatatatatctttaattaactatgatgatataataatttatttgttatatgagaatgagatcacatgcatgcatgttctgatttttatttttcattttgaattaataataatgatcatgtttttcgattttgaatattgcatgtgaatacttgt

SEQ ID NO: 22887 - DNA, 4201 bp, Cannabis sativa
  modified_base (2639)..(2639): a, c, t, g, unknown or other
tgactgttatatatcactctggtctactcaacttcgtgacatcatcctcctttccacgtgtcaaacattgatgtccatatcactagggaaagtttctgagttattaataacaacctactaaataatccctcatcaattattcccactctcaagatccccttgagtaagctagatgaatcccttcactagctagattcaaaatccctttcgaatcagatctgaacctttgataactcattcatgtggccaattttggggcccgactcgttaggaccgtcagacaccatctatttctccattggtatgatattatttgctttgggcctaagccttcacaaatttatttttgggcaccttcccaaaaggtctcattcgaatggagatagtgtccatccttaaacacccaagatccttcccatttctagccaatgggagactttagttgtacacccaataattatctttctacacattaacaatgtgggactctctaacaccccctttaagatggtagctatttcattcgctcaacatcttagctaactcgatcaactcttttttagctcactattcctgatcataaatagctcttttgttctatttttaaattggtatttttaattttttttagtttttaatttttcaatgtgagttaaaatgaacaacgtatattaaaataaaatatttcaatcacactaataaaataattcatgaggcccacttgaaaattatctgaaaaattaattatatatcattaacttttttttagcactttattattattgtatatatagtttttatgtatatataatataactgataattaaaggattacacatacatattagttagaagaataattttattaacatcaaaactatataccatggagccaaaaagtcaaagaagaagagtcattatcatcaatggcttgcataagatcaattactacaaaataacttttaaaatttattggatgaaatcatgtatcaactactctagtttagaaatacagtatctagacaaagacctctctgttaccaaagtttatgataattaattattatataatactttcattaagtaaacatatttagtataataaatttatttatcttagacattaaaatatattaatggtaaattaataacaatttaatctggagtctaaagtcttgctttcgagttatatatatacaaaacttccaaacacaccttaatcttatatatatcaaaagtgagagcttgagaaaatacaccaaagctaatagaagagaatataatgaagaggaaaagatcagaagtattggagataaatgggtcagagataagatccgccattgaagagcttactatgcttgtcaagctaatcaatattaataaaaatgatgccaaaatccccaccatgccttttcttgctctctgcaacttattacttctccaagttcttggttagttctctcatctcatataatcttatcatatatatctaaaaataaatggtttttttttggtatatttcagataagataggaccaactatgactgttcttagaaaagacatacatcaaaacattcaggtaaatatatatattagatcatcaatatttttgggaagtttaatttttaattttattcttgaaaaataaaattatttataattaatattcatgatttgtttgtagagagtggaaaaggttgtggaatctgatccttcagtgtattcaaatgtggtgaaaatattgaagaaagaggaaactgaaggcacttccaaaatgagaactagttgtagtagagcctttgtttggcttacaaggtaataaaatagagttaatattatggggctttttcaaatttatagagttaattaatttaattaaatttactccatcttcatttaatcaattatcaaatatatttattgttccttacaaaaaaaaatctttattattacttgctatggttttctattataaatgcattaattgttacatatttacaaaaactttggggtaatctaaatctcccaaatgattgttttggtatattttctatttgtttgggcattagggtcactttttagtttattttttttaatcgtgtttattgtagttatttaagattatatgtaaatttttaaaaaatataaataatttatagtatcaaaaataatatttgaataattacttactttttttttaaaaaaatcatatttaggaaaaaattggattaagaatttcattcaatatcaaatcaaacaaataaataatatactagaacaactttttttagcgatatttttctaaagggatactggtggcaaaattacttgaactttatattttttaagacaactacaaaaactaaaattttggtggcaaaactacccaaacttccttgttgttagctatttactccttccatccaaaagaccatgttaagtatcacgttggacatgccacagtgcacacatgacaaatttttagtggtttacctaattttaatttaaaaattataaaaaaaattacaaaaaatattttattttatttttttcttttctttggacatgctacggtgcacacatgacaaatttttagtggtttacctagttttaattattaaaatattataaaaaatantttaaaaattataaaaaaaaattacaaaaaatattttattttatttttttcttttcttttttttatctccttttttttatttcttttttttttcctgaacaaaacagaccctaatttattatttatttttaatttttaatatttaatgtatatatatatatattttttttttcatattttgtaataattttgaaaatatttttataaaagataaaaaagagaaaagaaaaattaagttttgtaataaaaaagaaaagaaaaagaaataagaaaaaaaatttatcattattttttaaaattatttttttttctattttctaaatttttaaatatttaaaattattttttaataattaatattacgtggattactaaaaatttaccatgtgtatacttgtgtactgtgacatatccaccgtaacaactaacatagtcttttggagggaaaggataaatagctaaaataaaaggagtttggatagttttgccactaaaattaaaattttagtaattaagtattaaaaaatataaaattcaattgattttaccgctaatattcttagaaaaaagaacatttcttatttgttttccttttgtctttgggattatgtgcctaagccgtaaattgaggatagggacatgtgagttgttttcagtctctcttgttatggagaaattagaagcccaaggcataaatagttttggagcctcccaatacaataaaaattacaagaaatatattagcttttctttttttttttttttaagaacgtaaaaaaaaaaaaaagtttgctaaatattatttttttttaaaaaatgattatattcattttttatcttaggtatcagttatttttgaaaattgacgttttagtaattggttatcgttgtaataaactgaaaaattgatggtggtaactaataactacaacttcacaatacaaaaatgaaagctagcaaccctagcattaaccagttaaaaaaaaaaaaaaactcaaattaatgtacaaaaatagaaaaagttatattttggttggcattaactttatgttcatatttttgtaatctctttttctatatgtatatataaagggtagtctccagtactacactctgtaaaatattatttagagttttttagtttattttattattattaaaacagaaaacaaacaattacacataaaaaaaaaaaaaaaaaacagtatctcatgcaataaaatatttaaattttataatttttaggagtgtaattttttcataatttacatatagtcttaaccgtacacactaataaaaaaaattaaattaaaaaactcttctaaatacgaacaaataggaattatttgagaacaatcgttttgtgggtatcttgtagattctcctttataaagtggtatttttctaaagtaaatatcaactgtgataattttaacaggcatccatagtcagggtcagagaagttgaccctgatcacctcgaatcaagatcagctcctatacggtcaaatttccttaaattattgttcccacctctctctaggagttttttttttttttttt

SEQ ID NO: 22888 - DNA, 2788 bp, Cannabis sativa
ttaaaaatcgaagtagacatagctccattattatcgtgatataggtgtgaactactatacatttgttgtgtctctcttataaatatttaactacttattcattctcgccaatctaacaagcgtgtgtggcttagaagtatagtctaaatttttgagtcaaaaaatataaaataaagaaaatactataattatagaggtttgaccccttgatgatggtaatcgcctactccactttagttgtattgacttgtgagaaaatgaacaagaaaaccttgatctccctcaaaaactcttagaataatctatgtgtacttttactcttgaatctacatttatgccttgtgtttttcctaaatgaaaatcaagtccttgaatagcgggattagttcactttttatagggattaattacatcaaattaatttcctaaaaccagcaaggaataaaatgggaaatttatttactttctataattacaataagtagaataggaaacttggtaggtttcatttctccttcaatactatgaatctattccatgaatttagggatagtgtcgtatcttgcaagcttgaggatatacaggatatatctcttaaattatctaactcgcatcccctagtcaatgtatgcgagccacctgcttgatggaagctggtcgggtgtcttcgcatgctctgctcaaatgtcccaactaatgtttatgacttcaagtatcaattctccatgcacggctcattaagagtagaatccactttctaggtgagcattatctttctcaaaatttcagtggtcatttcatatataagattgacaaaccggtcaaatctaggtacatccaccatcatagtcatatcatcatgggcgatctaaataatcttttctaccttagaaacaccactgctctcattatcattcctttataaatcatttagccaaattatatccccaatactaggattcaattcctaccctcggactaagtccttcattatacaaacattccttttgtagtattgagtagcttaaaccacttaaccttcgtcttcaacccacctgaagtctcaaatggaagttgtcatacctatctgctatcccaccttcaatggttctgaatctcctctagagaaagaaggttccattctctgaaccatttaaacaaccgcctctaataattattcacattctataactcactcgggcacatcaaaagaatttaacttatcagaatatcattttgttgctttctcaattctctaatctacttatttcatcaattaattttgtctataataacatatatctctttatgttctaactgactataaattactgtttctctgattatttttaaactgtcaaatttccctttgaatatctcaaattcacacctgagcattgtacccaatgatttaccactcattaactattactaattatactgctcacataacaataatgttaataagtatttccctcaattcgcagtcaaacatataaatctactacactttctcaactagtagaagctcataggatactactaataaacttaaaactcatgcatttctaaacatatttctaacaacatcacatatcaactaatcacataacaagtaagtaaataatacttactattcatgagtcgagcttgtctttacaataaatgtacatatccaactaatcttcaggacctttaaaaccttggctgctctgataccatgttgtatgtcctaacctctaagaatgccacatgtgtacttttataaattaatttatgataataaactaatggtttaagtaaaaatgtgatttactaaatattttgttaattaatataaaatataaaaaccatggcataatcacttataattggggatcccctttaacatattataagacatgctattagagtattattacaaaaatacacttaaaagtttagagcatctaaaaaaatacaagtcctaacaactcaacataacttgctggataagttgaaatgtacatttgcgggagaagatccctaactcatggctctccaaacatttcttacctaaaacctacaccacatagcacccgtgtgtcataaagacttagcaaaaaaagcaataacaacaatcacataaatagcatcaattaaattcaaacaatcaaaatcaaacgattgtatattattaatataactaattcttgatcaacacaaatattcaatcacaataaacaccggtataaaaacattcgataatacataattactagtctaaatatacatcccatatctgttacttcataaagtaacatttttcgttatttatctaacaaaacaaccttaatgcctaacccgacattccaatatccttctcgttgtctaataagacaaccctaatacctatcactggtatcccaaatattatcatcgttgtctaataagacaaccttgatacatatctctagtatttaaatgtcacaatcattatctaataagacaaccgtaatacatatctctgatatccaaatgtcccaatcgttgtctaataagacaatccttatacctatctctggtatccaaatgtcatcatccttgtataataagacaactttgatatctatcttcagtatccaaatgtcatcatccttgtataataagataaccctatacctatcactggtatccaaatgtcattatcgttatcaaactagacaaccgagatacctagccaccagtatccctgatatgagaaacctaacaacagtttcagtttatagtcatgacttttgatacctaa

SEQ ID NO: 22889 - DNA, 4051 bp, Cannabis sativa
ttggtgtttcacttcttaacataggctttggcataaagggggaagaataatagttgcttggaatccgttgagctttgaagtaaatattatctcttgttctagccaagctatgcatctttttgttgtctccacagataagaggcatcaatgctttgtcacttttgtctatggtttcaataatgaggagggaagatttaaactttggtaagaattgacgctccacaaaactgatgtaccatgggtagttcttggggattttaatgacatcattgagagagatgaaaggataggggctcgggtaaagtacaatccttcttcctttaaggattgtattgttgtttgtaaccttgaagatgtcaaatttggtggtagttttttcacttggaacaacaaacaaaaaggtgaggatcggatatattctaaaattgatagagtaatggcaaaccaaagttggatggaatcttttcctaatgctgaggcactctttcttaatgaggggttatttgatcatactcctgcactgcttacggtttatccttccatccttagcggtaggaaaccgtttaagtacttcaggatgtggtcaagtcagcgtctttatcagcaacaggtggaatcggtgtggaaaaggaatatcaggggcactaaaatgtataaaatggtggcgaagctgaaagctcttaaactggtcttacaagagatcaataagcagggttttcatgacattcaagttgctgagaagaaggccaagataaatttggaagagtctcagaaggctcttcaaggggaccctttgaatattgatcttcagcaagctgaggaagcttttagagagaattatactaatgtgtagaaagcttacatttctttcttacagcagaaatccaaggtggaatggattaagaatggagactccaatacaacagtttttcatgccagtatcaaaaatagaagagttaccaacagaatcttgtctattgaagcgagtaatggagagaaagttgaggagcctgaacaggtgacacaagatttcttggtttattaccaatgccttttgggaactaagatgccggggagattgaaagtgaaacattcagtgatagcagaggggccggttttatcagagtcacaagctgagtttctcttacaagagttttttgattctgaagttaagaatgcagttttcagcatccttggaatcaaaagccctgggcttgatgggtttgggagttatttctttcaagacaactgggagcttattaggaaagacatttgtgaagcagtatcctcttttctgcactcaggtaaccttctcaaggagatcaactccatagtcattactttaattcctaaaatcaaatgccctaataaggtgagtgattttaggcccatatcttgttgtaatgtgctttataaggtggccactaagttgatttgctctagattggattgggatttccttgaggaaatgttgatagagttgaagttcccatcaaattttataagcttgattatgacatgtgtgaagactcctagatactcattgatgttcaatggatctcttcatggtttttttggagctaaaaggagtttgaggcaaggggacctgatgtctcccttactttttgtgttaggtatggagtacctaagtagaatcctgatcaaggtggggaagaaagaggagtttaacttccatgaaagatgtggttaattaaggcttaatcaccttagcttcgcggatgatatcctcttattttgcaagggtgacttcaagagtgtgtatttcttaatgcatggccttttgctcttctctcttacttcaggcttgaatgttaataaggagaaatcaactatgtattgctcgggcatgacagatggagagatccaaagaatattggatatgtctggttgtactagacaaaatgacccgttcaaatatcttggagttcccatatgtgcaagaaagatcaatgcagccgattgcagttgtctagctcagaaaagggctgcccgaataaaggtatggggaacccgaaacttatcttttgcaagcagattagttcttgtaaactcagtccttatttcaattcatatttactggagccaaatgatgatacttccaaagaaagtaataaaagagatagaagccatatgtagaagtttcttgtggacagggaaagacatgatggcaggggctggaagcatctcttgggagaaaatctacactcctaagaaagaaggaggtctcggcataatgaatattgcctcatggaacatagcagccatggctaagcatgtttgggctgtagccaataaaaaagacaatctatgggttaagtgggtgcattgtgtgtacatcaaacaacaagattggtgggagtataatgttcccacaaccagcagctggtattagaggaaaatggtggaaataaagaacaaaatcaagcaagtgcagtagccgcaacaatttactgctgtaaaatatcaaatatcagctggttactgctggtttgctcctgtgtttgacaggtttgtctggggcaatgaggtctggaatagacttaattctcgtaaacatagcttcttgatgtggttggctgtgcaaaaccggttgaaaactcaagaaagactttataatttcaatatcattgactcacccgactgtatactctgcagcaggtcacctgaaaatgtcaacacttattttttaagtgtgacttttctcttgtttgcttgaagatgttgaaggtttggctgaattggagggtgtaggccgattctttgcttgggctgctgaagtgtatccgaaagtccaaaatctccaaattctgcaagggtgtaaagatggcagctgtggctgccttggcttatgcaatttggagagcaagaaatgacttattgtggaatgcaactagtcaccacgcagctgatttagttaagcaagtgaaatgggaagttaagaatagaactttgtatgttttaccaaaaaagtaaagcaaaaagatctagcttggtttcaaaatttgtaaatacaaagtttgtttggtgcttataggttgtaaaattgagttttgtgcaatgaacattctcattcatccaaatatatatatataataatattataagattaataaagaatattctgttaattaataggatcaatataaatatatatatataaaggagaggtataagacggtgacatgcagtttagaattaaaaaaaaaatctaaatatctaatctctctttagttttctcatttttctaatttttctgttctacttaattctcttatttttctatttttttattctgctttatttaattagagatcactaattaattaaaaattaaaaaaaaaataactatacatttctatataaaaactaataaataaatatatatgttaaataaattaatgtacatacaatttttttcacagaaagatatagttaatattaactaatataatttatcaaaaaaaactattaactaatataccataaaaatcaaaattctaatgattatgtctatcagctcatctcccatcacataataaaaataagtacttatcgatcattatttaatttattttatgtacagaataaatctaggtactaataatgattacaagtgaaatacggtgatgacatcaactttaaatacagtggtgactataaatgagatatgatgatgatagttgttttaaaattatatgatgagttttctatagatttattgtcttctttatattttagatctctattttgtgtaagaattgttgagtttttaattttcttcactataacattgtacatttaaaaaattgtatgattttatatttacatttaaaaaaattgcgtgattttatatttatataaaaaattgtatgataatttttttaattatttagagttttctacatagatttatcattttttaataaatatatatttttctttttaaagatatgcataaaaataaatttgaaattattttgataccaattttattattcaattaataatcatataataatttaactgtcgc

SEQ ID NO: 22890 - DNA, 2954 bp, Cannabis sativa
aaaaaaaaaaaaaaccaaaaaccccaaaaaaaaaaaaaaaaaaaaaaaaaaataggatatatactcccgagctattaccatatgcaattcttacctctaaagtgtttccctacgttaaaagtaaaatcattttgaaataaaataaaaatcaaaataagggcagttttgcttcagcaaaataaagtcatttgaaatttatatttcatgtagttgtgatttatttattttgaaataaaataatactatatactatagttactactgcattgtatagtaactggtattaatgctgaaaattagcttaacaataaattaaaattacgatatacaattctttataccatatataatctaattgaataataatttttgttagtttacacaatctcctttctacatcaatggtcattctcttgttctacttttttttctttttaagtgagtcagtacatttaattattattcatgccatatcactttatcatttttttcaatcaacttataataaatgaaattacctttttatccctaagatatttttatcacttacaatgttctctcgattctcagtttttgggcttgtgagtgatttcgttcagttcagatgttgttgaaccggttatccaaaataattctcatacgtgtcattaataagtcgtaattgatttaatgggcatgtcatttcaaatttttgggaaattgcctataccctttcttattatcctgatattttcatttaagtttgttatttgtgttttcagatagagaacacgtggaattctaagacggtttcagttcaattgttccaggtggatccattattagggaagtcaagtctttcggatgcaatgctagacaaacgactcatctagacgagatacatcttcatatagtgtatctctggatagcgttgaataaatttttcagatattaattggcatctaaatatctagttctgtatcatagtaatttattgccaaattccataaaaccaagactttatttctaggatcacatccagaatttttatcttccaaataatgaaataaagtaattgacaatcatgcattaatgtgtctttattatctgtaaaagtaggacacaggttgacaattatcaaagtgatgtagcctccatgtcagtagaagatcggaacctcacggttgggcctcaccaaatcgacccaaatatcattagggctaacatattgactgggtttgaaacggacccggacaacccgcgcggacctgacctggtcaacccaaaaaattaaaaaaaaaaatccattttatttgggcgggtcgagttcaccccgttacactttcaggcaggtttgcgggttggttttttatggtcgccgagtttcgggttaaactcgaacccacccgccaacctggtcactttttatttttattttttttttatttttcttacatatataatatattaaaaattaaaaaattcctaaaatctaatcattttatttttactacataaataacatattaaaaataataatgtataataaattatatataatttgtaactttgtattttaaatttaaaattaatgcattttttattttattttaatctaacgaatatagattacagtgttataagtttatagcttatatgcttatatagaaaaaatcacgtaaatttaatttttttaaaaaaaaaaaattgattgagttgtcgggtcaacccggtcaacccgcccgatgttcaatcctaaatgtaatcatattatttgtaaattctagggttcaaaatactacaaaaacactaatccataaatattttctagttttatcataataatatggattcgtgaactaacactcgttaacgccgcaacttcgtaaaaattttatgttattattctttctataattgatttctttaagttttattatattctattagttttcaaaaatctcaataaatatttttgtgtttttattaagagttgaagaaacaagtgataccaacaaagttatatactgcaatcatgataaccacctgaaccaccattggcaaatctagtattcgtgatgggatggtaaagtaatttttagttgctattaaattacaccaataataataataataaaagataaataaaacatttccttttatacttaagaaaaaaaaaaaaaaaaaaagcatttccttttatgagtactaatttggaaaagaaagaaagaaacaaagcagtaatgaaaatggcggtaatcctgaaaatcaataataagaaaaaccactttcttcttctactctctctctctttctctcgtagctctagctctacctccttctccacccctgcctggtacgcctgcaactcctcctcccctactctctctcactctcaccatcccaatcccgatcccatactcctctctctctcccaagctatcaacagcacccaaacaaagtctcttgactcatcactcaactctcttctcccttctctcactgcttctcactttatcgacctcatcaccttcaacccctgctctctctccccacactctctcctctccttcttcaattggctgtcttcccgctcaacttttcgccataccctccattcttatggcgccatggctgggttcctctgcgccaatcgtatggttccagaagctcaatctctcctacgcttcgttgtttctcgcaaggggaaggattccgcttcctctatttttgctgctattgttgagagtaaaggtatctgttttcaacagagtggtgtgtttgattctttgattaaggtttatatcgattgtgggtttgtgtcagatgcaattcagtgctttagattggttatgaagcataaattttgtatcccatttcgtggttgtgagtatttgcttggtaaagtgatgaggtcaaattcagctgagtctgcttggttgttttactctgagattttggactgtggttatcct

SEQ ID NO: 22891 - DNA, 4396 bp, Cannabis sativa
tgaggacgggaaatctcactttatattatgtataagagtacttatatgtttgtgattttttttttttaaattaaagatgaaaaattaatgtgtatatatgaaaacagacactcacaaaaagatatataaattataatgttgtatatacttacagataaatttcataatatttatagtaaaacttctatgaattaataatttatctaattaattattaatttatattcttttattaagtcgggacaaaataatataatttaattaattgagtattaattatgaagcatttaattagtatcgtagcacatctgatacccctttaccattgctgttcttctaattatgaattgtttagagaatagaaatatattcttatattatatatatggaaagctattgatgagtttaattcaattcacatgatcacatattaatagttgttatggctcaattcatatttaatcaagaatccacaaacgtgaccttaggggtcaaatattctcctctagatgtagggtagtctttatatatatacctttctggcttttcggcacaaatcaaatgatttcattattatatatacatatatatacttatgtattaaattcgaataaggtatataaagcaattagctacagatacatagatcacagaagcgaatatatagattaataaagctaatctttgattattccattacataaaatcgttgaacaatatccttatattatatgcaatttttttccccttttctcttcaaataataaaatttgtagttatagatcaaaatactaattccatgtgatatctttctataaaaaaaaataaagcacccttcaaatctctctagtaaaaaagccttcaattacggggttcatttttatgcccaaacattcatcaaatctagctacatatatacctagtatataacattaaacatcaatgtgtatttttctaattatattcgaactaagaataatgtcatgtttggtacagtgatgatgatgatatatatatacatatatatgtggtggtatattgtacgtgcaagttgtcacactgtcaggctctgacaaaataatatatggttttaaagagatttgtgatgataaatatagtgaaaagggaaacagatatctcagaccagacatttattatagggtattgcccataattattgatttcagccaatctttgttctgtaatctacaccaaaaaaaaaaaatagtactagtacactgctcaactcatcaataatagagtacaaaacagtatatctttcagagccttcggataatagacaaaaaaggttacttatatattatatatacactcatctcaataatagaaatccaacagtaaattataattaatgttcagagagcacagcatgcatcgtggccaattaatatacaagttttgcataaaacgtaaatatagtcatgcaccgattatattttatattcatgtatatatagttaaagatcaaattattactttgataaaatacttatatatagtacactaaattgtatatatatattgtgcgcacacagtatttgatttttttcttcttcttttttggtatttgattttctgtgtacatgcatatacaataattttcctttgtttttaatgctcaaacgatgattaatatattgtgtaccatatcaattatatatcatgaattctatagctcataacttttatgcataatattattgtatctaaaaagttaatatatgtactatgtacccacctagctatacatgtgtcccaatttattttctaggaacaaattttttgaaacatttataatttctgtgctacttatctacaattcaacttttgtatcatatatattcttaattaattaataatgattattaatattggtactctgtaatttgaacattaatatataacattgtcatatatatatttgttttagtgagaaatactggtagtttgttagtaaaattgagtcaaagcactcttttgtagtaatttttaaataacaggatatcttttaataatgattatcaaggacataatatacaaaaatcatacataccaaattaatttattaatttttctctatttgaatgagcctagctaagttcatttatatgactatatataaagatagaaatacaaaaagttctataaagacatacacacataaataattatagtgtgactttgatatgacaagagtaaaaggtagcagtagtagtagtactgtgtataatagagtggttggggcaagtctccggttaatttggcaattgcaaaacaatgaacagtgtttgacattattattattataaaggcagatcagtagtagtagtaagtgtcataccaatctttaataatttattattacacaaaactcttgtgttgtgtgtatgtagtagtgtaagtgagtgagtgagtgagtgtgttttgctttccatattactcaattcattaattctctctcactactgatagaagaaaatgctctttgcctccccaaactggtcctaattatttctctcttaatatatatatatatttgcctttttgtcacactgtgttttgttttttcaggtactcttttgtatatgttttgagggcctagctagctaatttcatctctttctctctctctcatctctctctctgctgcaacaactatagctatagctatatatagctagggtttctctggccactacagctgcctgctcttaattcccactcgatcacatccaacagtatcttttatttcattcactacttcaatttcccccttcttatcattttcaatccaaatatacagcagatcttgaaagagttctctcacacgaaggataaatataaaggtaataattatcaccgtatatatatatacatactatgtttttctcatgaagaaaatctaggcatatatacatacatatataatagtgatttaggataggtttcgagagttggatattctaagctttggctataatactgatttagtaaagatataatactgtaattaggttaattaattaatagagatataataaaagaaagaggatttgttgacaaatattatagttactatttatataagtatatatatatcaaggttaccagattatctaattgaaacaagagtcaaataagaaatttaaagtgatatatcaaaataatattttgatggccaattggattcaacatcaacaggtcaattaatttgaaatctatcaaaacaggaaattaagactatattgtcaaatatattaagtttgaataatatatactataaatatatagaatttttgtagggtttctattaatacttaactaaatatatgttactatataaaatattcatatgatcattagaattattaaaaaagaagttgcaggcactggccaaaaaagtaaacggaggttgaaaaccaaagtagtatatataatatggtgtggtggcggtggctgctgttttctgtcaccaaataataattaactaaatgtgaacaaagtgtatatatggtcctcacacacacacacacacatatatatatggagctaactaaccctagtccacactgtccttttttctaaacattaatttccccttgatttaatattaattagcccttaatgaaataattatctgtaatatgaaaaacgagttataatatcttcttaattatgagattaattaataacatcatcagattcagattcagatggcttcatcaagtagctactccaactctccctgcgcagcttgcaagtttcttaggcgaaaatgcatgccagactgcatattcgcgccgtatttccctcctgaagagccacagaaattcgcaaacgtccacaaaatatttggggcgagcaatgtgagcaagctcctgaacgaggtcctccctcaccagagagaggacgctgttaattctctggcctacgaagccgaggccaggatgaaagatcctgtctacggctgcgtaggcgctatctcagtcctccaacgccaagtcattcgccttcaaaaggaattggatgcgaccaatgccgatctcatgcgctacgcccgcaccatagaccaccatggttcgtctcattcttcttctgctaacagttccaaccattatgcaaccactactcaaaactcatccttctatttcaccaattctccatggagctgtactgatgatccatgtggagatcatcacggccacggaggtggtggaggtaataatatgtaataattaattaattaattataataagctatatatgtatacatagcttatattatttaattactagctagttactataagtacggcttggtggataggggtagcttatcatgatcgatgtttgtttgatgattgatcatctacat

SEQ ID NO: 22892 - DNA, 2466 bp, Cannabis sativa
aggaaaataaagaagttagatagcggtcgttacataatatatttttttggtatagaagatatcttgatcataccaataacatttttagcgaaagcccacctggttaaattatgtgccgcaaaataacaaagtctaaaaataaaccaaaaattgcagctaaataaaaaattagagagcttttacattgttggatataatatatcaatacctcaattagaacaatttcttttcagggtattgataatcgtctctgagtcactctcgatcataacaaaaatgtgtaatttaactgttgtctccaaagctaaccgacataccgcaacttctccaataagcgggtcaaagaaattaagcatgttagtagtcattcacaaaacaatccctatgtgatccctagctaaagccaccacgcacatagaacaactgctcactctaacatcacaattaattttgacccaatcatttgaaggaggggaccaaacgagagacacaacagccaatgtcgaagcaaataaacacaacccataatctgtgtaacaattagaaataaatcaatgcagtgtgtatatgttatccagagaattattatctaatatattttgaaatttttaaaagtttcaaggttgaattttcaggcacatatatatattttttttaaaaaaaaaaaaatagaagttggaaattaatctcttcaatcacctctaaaataacattttccaccattatgctaaataataatttttttcttcataatttcaaagccctgagctttcgagggcttaaggcacacaccttgctacctcagggccaaccatattttttagactgatgactagccctacagattaatacaagtgtttttaaagtatttgtctttattcgcacactttttgcaaaaactttcaaggaataagtcaaccatcctgaaattactctagatgcaaacatgtttaattgtagaattttttcgtgataggctatcaatgtaccttgttgatataggtagtactatgactatcaatccctttaagtactcttcaactgtgtagtctcgtacatgtacagtctcaaaatcatcacactaaactttctccagatagtatgagattatacaacttactcaataattttttttatgaatcacgaaatatatgtttcaaaaatatagtcttacttaccatatatatttataaatatataatatatatgcatatgtacaacaaatgacagtccctagcatgctgtgctgccaccaatatttatgccaaattaatggtcaaatgcatatatatatatatatataaataaatttatatcacatggtctgtgatgatcagataaacttaaccctagcctcatatatataataatatttatatatataaatatcatgtatatttattaattcttaacatgtacacagaattgatcatcagtgcatgtatatagattgcatgttcatgtgtgtgtctgcaaatttcttaatataattatttctatcgattggaatttttaatttctaaatatataaaaacaagttattttagcagtagtttttttttttcttttctttacttttattaatttaaataattataaataaaatttaaaacaatactgagctggacacatatccataaaaggagtagtttccccacccaagagctacttttatgaatttaatggtttcaataaactcctcacacttgtttgtcttgaattagatttagaacttctctcaacaatttgtgtagccatagaacttatttgatcttttcattgaaatttgttaactttttgtatactattccattgtaaataatgaatgatcttaggataaatctattgtgatctttaaaacgaataaattgattgcaaaataagaaaaatcgggcaaattattttctggagaggtccgtttgatactcaaaaattgctcagcaacagtcgaacaagtgggaaacgttagggtaaatcatatatgatatgtttcttaattgtttacttatttttttactatattatttctctttaatattattgtgtgtatttcttcaaaatctacattacatctaataatctttgtttatgtagtaattcttattgtatttttatcaattatatttatatctgattatttatttttcttataatagataattatataatacttttgtgtaatttattatcattcttaaattgaagatattaaattttaagtgttaaaatttaaatatatatattttgttaaggaaattcaaacatattttagtactctcacatctgtctattagtaaaataaaatttaaattttgttataaaattaatagctaacaattatatatatatatataaaataattcaaatataattattgtaaatatagcttctttctaacaaattaaaaagtttaatttattttcttaaaattaattactataaattaaagaaatatatttactgatt

SEQ ID NO: 22893 - DNA, 2723 bp, Cannabis sativa
ttgaatgctcattttgaacaaaaagaaagacataccttacaatatctagtgaaatatagttgcataagcagtttgtaatttctttaacaaatattgtagtaattatacattgttagtagcaccattgccatattgtagatatgaccaatgagtacaatttcacttgagaggcactattcatagttgcaattcagcatgaaaagaaagaacatttatttgtaagtttctgaaggaaaaagaaaagacctttccaagctgagttagtccatccctcaactttggaatgactaatatatgaacaggagcctgtggattaacatcccggaatgccaagaccttatcatcctcatatacaacacttgctgggatttccttagctataatcttgtcaaatctgaaagaaatgagaaaacaacagagctgctcagttattaggatcaaatatgcctcagcaatgaagctgctgaagctccaaacttcgtttttttaaaaccattaatggaaacgctgcctttataagtcagatatgcatcttaaaattctgtcattcgacatcataatggttcatcccaatttaaactactcgtaagaaatcttccaactttccgaagatgttggagaatctcctgcacaattaaagtctgccactaattttgacttctaagttggatgcctattaaaagatcccattataatttcaaaggtaaatagcatgctattacttgaacatgagatcaaaccagtttcacaatggcaaaaggaatgatacatggttggagctccactgtcagcatctactgcagctatcttggcagctgcttcttcattgtttatagcattgatatgacagtaggatctggaaaaaaaacatttgcatgtgataacttatattaatgataaagaagacatcacatgatatcggtaaaacaaagcaataagtcaagatattccatatcataagtcgtaactactacatcaaatcaaacacgccttcatctttcatatactgaaggatcacccacatttattgcactaaattatccccaacatacacgccttttgattaacttactgttgggtgtacaactaaagtcacacattagctagaaatagaaaggatcttgagtatataaggatggacactatctccattggaatgatgccttttaagaaagttaccaataacaaatccgtgagagcttcggcccaatgcgaacaatatcatactaatggggaaatagatagtgtcctacggtcctaacacttaccatttcattctaaaagcttaaactagcacttcgataataagttaggcaaccgataaagaaatatatattttcaggggcaatgttagctagtttagaatctagattgataactttgattagaatgggaatatataacaaaagagatcagcaataaaatctatagtaacttttcccacacacccattctatccaaaaacaatggcattttctcttataactgtactagcaatgtagatacaatcttttccttcacaagcttaagcaatttatgatagattttctttgacatttagggctagtttagtatgtcgtattaggtcgtattgtattgtattgtattaaattaagcaatatatcatatttttatataatattatgttaaattttactttatattaaaatattatctatttatatgtcaaataccacttaaaattttatatcatattaaaatattatctatttatattaaaagtcaaataccacttataattttatataaaaatatgacataaaatataatttaatataatactatacaatattatacggtgtattagggcgtactaaacgaactcttaaagaagatgataaaaatgcatattataaaaggtttcctttattgctaagttcatgcaactctcttaatatgatatggtatgaaagaaagcgtactagctttttctccaattagcttcacatatcattactttggtttaaaatcttgtttaaggttaacatattataactaaaataagttgttcacaaaactacatggtgatttatgaaaccctctaaaaataattataaatatataaatataaataaaataaaataaaaagaagtatatttcacaaataaattaagtcaatcgaaatataaactaaaagaaatttggaaaaattaaagaatacaaaaataaagaagggaaaaaaagaagaaaaaaaaaacctgcgtgtttgaagaggaataaactttggaaaattgtggttataagttctgacagccccaaaagcccttgcagtggtcgccgcagaattcctgtagaagaaattccaccagagcaaacaaaattcgcattatttctgagaacaaaattgaattttacttccaaacaaagaaaaatatgtaaaagtaactgtaaaaaatacctaagtagcgaaaatgatggaattgcagccattacagagttatcctaataccttcttctcgctagctattctcagctataacagactactttttgcgagaaatttcatttagattttagaataattagccactcaactttggatactgtttaaaatgtacggtgtattaaaaattgaggaattttatttgcatgtaaaataataaatacaccttattattaaaataaataaaaatttaaataatttttaaaaattatttttaatattttttttaatttttttctatgttaatttcaatacttat

SEQ ID NO: 22894 - DNA, 1825 bp, Cannabis sativa
tttatggagatgaattacttttaacatctttcttttaattgaaggaaggctttatcgaaaatcggtgcttgaagatgttattagctcgtgtgttagcaagggatatgtgtttcaaatggagatgatagttcgggcttctaggaaaggctatcatattgaagaggtacgtttacatttcatacttttgttaccattgttagtgtttgcattacaaaactctgtgaccattaagtaattctttacaacttttaacttgcttgccagtcttatgatatgtgattcctatgatttagagcaattgtctaaatgtgtgcataatatgataatatttatgtcttaatgtgtgcataatgtgtgaataggactaataaggttgtttgagtgttcagccattaactgttataaccattaatatgctatgcctttcaacataaatcttcaatattagaatgtgcaaaccattttgtgtcatatcaattaataatggccaaatattctttgggatatataaaaccattaatagggtttccccttctttattttttttttggtacaattaggccattttatcatctttaaattgaaataactttaatttgtaggtgccaattacattcgttgatagagtgtatggaacttcaaagcttggaggatctgaaatcgttgaatacctcaaaggacttgtctatcttcttttcactacatagaaaatcccttcattttaacctttttttttggatctttcactaaccagttgtgtttgaatttatattttggtaaaaggctttttcgagttgtatgaaagatttaactttttttagactatcaaaatgttagtattgatacgaatattaaatgaatatttaagatatacatgaagaaaaaattaaaataggaaatatgagtttcataagattgtgtgatttgtcattaattgaatggttgcatattaatcattgttaaatatattaaaactttttattgtaattaaaccatgaaacatttttctaagtaaatctatacaagtccttatatacatacataatagtgattcaaattgctatgatgatgatgattattatgaataaagaattaatagtattacttcttgttttctttcttcttctttttgcctttttttcttaatgaaatgtcttctaaaatagtcataatctcatccaatacttttccacatacacaacaacatctgcaatttcacataaaaattaaatttggtaagtttctaatgatttcataattaaagaaataacaatttattatagcaataataacataaagatataattagaaatacttacagaaaattgttcataagattagttgttgagtgttgtccacagtgagagcaccaaatctttgccatgaagaattttaacaaattaattgtatgaaatgtttaattttgtacctctttttatgtataagtttcaaaatgaagtatttaaattttaattacttgggaatcaagaaattcaaagtcaacagaatctttctttattttttttattaggattattttttttctagtgtaaccagccttgaaggataataatgagagttctcactagcttagtttagtttagatttatgtatatttatatatctatacatttaagttttgtgtcaatttcctttttggtttaggattcaatttaagatataatttttctttttctttttttgaaagaaaaaaatagtaaacgatataaaaaatgaatttattcttagtgaagataaataagatattaattacttggttattaaatttagggaatttttcatttttacactttaaaataatttt

SEQ ID NO: 22895 - DNA, 1777 bp, Cannabis sativa
taaaactcaatttattttatcatttaaaataaataaaagtgtatttttaaccactaatcaaagggccgattcacctagtcaatattcttcaatgtatagcgagatagatgtctcgctatatattatctgtagttttcttgtgattatacttttcgaggtaagatggtctctcgttaatataggaatttatagttggtgtatccttgtctcgcctaaaactatatagtcaatgagttatgaatatactctattaattctgtatttaatgagttattctattttgcatttaatgatataatcgttattatatatgttggttcatattccatgagattgacacgtgtcactctctgaagtacagccgaattttgggtataacaaattcaattttcatccattattagcactgcacttactggatgttcattcactactaagtatattgacaactcttctccatcgaggagttttgaaaggatttttgactttagcaatgcttggattgttttttttaggattttcttttatgccttttaatttaataatgaaagttgtgcaagatatcgatggagttgaatgagttggtggcgagaggaggagctgagcaattcagatacattttgacaatggcaattcaaggtttacttttattcactgatctaagtcaaagttcaatcacatcaacaatttcttcttggatgacaaagtaaaaaggtcatatatctatttaaatatatagtgtccttatttaaagatgtcggcagtaataaaatttacttttggtttgttctttctcttctttgctatacattatttaaattatattttaaaatccagtacatttttcaaatttatttttatgatcaaactatcttttatgataaatatcaataatgttatatgatcatttttccaagcgtatatgaatttgaagttataggaatttaaagattgatgtatattatatcaggggatatttgctctgtggtaattacacaaatactttccaatgccaattttaacagtttttttctccttgagttttttctattctcaccaccagtgaaccttctcgctatttatgatattctttaatggtttcacttttataaattagtctatatgtaaatatatgattgcttatttaattctaacaatagtaagtttttaattctgtagaattatggatgatcatttatacaattacatataaatttttttttgaattagacatatatagtagaagttctttcttttctttcgttgtgattcggcatgttttaattttctccaaggtatctttttaataagtccaataatggtattataattttatgacatttatggattttttagagtgtttttagttattggttattatagttataaagatattgagttattgaagttaaagagttattggaatggaaattttcgagttttgcgacttcaaatgcttgcttcgctaaagaacaacttttttagcagataagttttttttatggtacttttatctcattataaataatattttgtgatttatattagttgttaattttttttgtattttatgcagttggatcatcttattttcatttgtaacatttggagggagtagaacaagcatcaactggaaatttaggtgtggaagatggagattcctatttcctagcatttcaagcatattttctagcaattttagggccagtttggcacagctgtgccgtgggaaaaggcagttgtagctgtgctgtgagaaaaagcagttgtagttgtg

SEQ ID NO: 22896 - DNA, 2089 bp, Cannabis sativa
ttgttaacactaatatgaatatactttggaccttttcatcacaagctttgggtattcatctaatttaatccgcactattttgcttatagtgcatccgattttcactttgtggattaaattgaattagatcataccgattaaattaaatcagctattttatgaacaccctatgtccttttttaatcttataccaaaatacctatataaatattaattaatgttagtcaaatttatcaaactaactatttaaaatactaaaatatataaaataacctcacttaatttactctatacgaccatgataatcgcacaacataaatttatagtcattttacaccataataatcgtttatggtcgcacagtgtaatttataatcatttttgcgaccataagttattttgctaataattttttctacaaagttattttactaataaaaattttgataaagactatttttataaaacactgctaatgttaattgttatatgtgtgtacctaaacttaaattttttcttcttattttattgcctaatgcaagttacttataatgtatagcttaccaaatactaatagttttgattaattaatacatatcttcaagtctataattggagccctaattaacaataatgttggctacaccctatacttgtttatcttaattaataaagtataatttacaataaatactaaaaagagtgtttgtgaagtgtgactaaatagaaatactaaaggacactcacagtatctaacaatatctaaaaatttatactattactggtaagatttaatttaaatctcgtatatattttttataattattataaaaaaaacattaataatctgtaaaacgttatcttataatggtgttgggcacttccagttatactaacaatgttcatgactaaacgaattaggtaaaattgtaaggagaatgaccatttagacataattaaagctaactacatacttaaagagaattgttaaaagacactgtttgtgcttagtattattttcgatgtcatactgttattggtataaataagtagcggatattatataacttaagaaaataatttttgaggaatatcattaaataatcgtaagataccatctataaataatatatactagacactactgatagttactagcaatactcatactaaaatacttattagcattaattaatcatttggtgatagatttgtcattacatatagagagagaaatatggggctaggtttgtcaatcatagaagactataaaaatttaatctaataatctttgtggcaaatttaagtggttgggtactaatctaatttaagtaactagagagctctatataatataaataatatatatataaatatatataaatatatagaacatgctacattaaatgatgagccgtgatattagaatataagaacatttttctttcaataaaaaacaaattttgtgaaccattattaatctacacaatgtgttcacttataattctttatagatccaagttttttataaataaaataaaataattatattttaaaaaaataattattattatttattattattagggattgacaaagaatgaataatgtacaagccaaaatttataattagattccgtgttttaaggaattgacattatgaaataagagtaaattaaggaaataattatctatatttttttgttcaaaaaaaaaaaatatctatctttttatttttaaaaaatattatttttactaattaacacattagtcatattttttataattacatttattgtttcaagaacttaagtcactcaacactatgaagtaaaattagataaaggaaatagtttatcttttttatctttcattttttttaattattattattatttttgttaattgaaaatgtaataaagaatattttgtaaaatgcaatgataagcatgcatgtcaacatgtgtcgttggctatagtttaacctaagataaattgcggcattaatacttaatatttccgattttatacacttaaatatttaatgtttattttttgtgacaaaaatacctaatgttacaattctctt

SEQ ID NO: 22897 - DNA, 4469 bp, Cannabis sativa
ctccacctgacttttcttacccttccataagagttgatttcgtgcgaaccaaattacccaaaccaacatcaccgcctgaacaatttgttcctcacacagtcatgagaataaatgaaaaaaccagtccccaagcgactctacatcaactagaatcatagccaaactcgctacccgccaacaattgtgcaaaatcacaggcaactaaacaatacaaaattaattcacctgccccgtgaaaaattagacacaacaaagagacatccacgtgtttagtcttcaaatgaactctcgtaggaagacacccattaacgaccctccatacacaatttttttacctttggaagaaatttaattgccaaaagttattccaaaacgccacaacctccccgtccacactaccctcacggtttgcctataataatttaaacgcacccttaactgtatactcaccagagattcaaacccccaatactagtaatccttagtaaccaaattgaaaagggaaataccaagaatattaactgccacttcttcatcaaataaatctttgacaacatcaacatcccaagctttctcacacaccacaaaaagactactaacattttcattagccaaattaggatccaaactaccttgacttgaaattgactcattcggaagccacggagcatcaaataaaagagtcttctctctattaccaattccctttcgcacccccttacaaatcaaattctttaccgcaacaagacttccccaagtataacaccaagttttaccgaaagaaagttctcatttttaaagtaccgagctttgtacactctagaaaccaacgaatcaggcttggtcaagaacctccaagtttgtttacccaacatagccaagtggaaatcacgaaaagagcggaacctaaaaaatttttttttagtaattaattttttagcactcaaattattgagatatttacagtaaattttataataatttaacattattatgcatatgactctaatgaaaactatttacaataataaatcttttgtgccattaaattgttacaactatattattttaactaagtaataacaagtttgagatattatttggttgcaatttatttcatttgacgagtgaggaacaaggcttattactataaaaagttaaagtttgaagtttgttctaaaattgtaaataccgatttagggacgattattagtacaagggatagtaattggtttaaaagttttgttacatgaatagtttagtaagctttgatgtaagttgtaattgatttgtttctttatatatactagtatatgaattacatacattgtatcacattaaatttactctcaagattatagtaattttttaaaaatcttgcaaaaacttaagacataaataagtgaataataatctttattagttttaaaaatatatcatatttatttatattttatgcaataaacataattctcctttaaattaagttgctaagttagttatttttttttccttgcataagttaaaaatttataattttgtgtatttaaactttctatattatttctatctcatagagaaattttatttatacccccaaacttataaataaacctcatttcaataatttttattttacattaaatatatatttttaaatatattagttttttttttatttttcttccaaattattttcttaaaaaatatatctattaaacaaaaataaattatattataaatattataaaaaaaataaaaaaaaattgtgaaatttattagaaaaaaaaattatacacgatttaaaaaaaatatgaaaataaaattaaaagaagtgttgaaattaacacaaaataatatgagaaaaaaatataaaaattattaaaagtgattttttaaaatttatattaaactcaatttttttttaaatattagggtatacttttaattttgtggagcgcaaatagaactcccctatctcatatcaggggcgaagctagaaataaaattgaggtgagacgactagatatttttatatattgtccagacctcaaaatttcaacaagattatagaattagatattataaaatgtatttaattatattaaagtgacttttatagaataacattttatattttgatcttacacagtttctagatagttcaaatcccaacaataatattttagttattcttaaaaaaaagtaataaaaataaaaataaaaaaattaagaggtggaatgttgaacttttgacctttttaacttttaaaaagattcagtgctacattaaataatcttacctaattttgtttgactagaaatatatttgtataaagtcctaaaaaaatttatttagacctaacttcataagactacacctaaacggaaactagtacctgagaaattttaactactgttgacataataatctataaccactataaaagtgataatatttttgggctttcactaagtaaattacataattaaccttcacctgatattaaattacaaccacatacactattattcaggtcaatcttaatatttctctccaattaacattttgtttttttttttataattttctataataatatttcttcctacaaaataacttatattatgttatttaaaatacttcttttttaaatataaaaaattatttcgatccataaaaaataatttatttattaatcctatcttttttactcctatataagagaactttgtgtgtatcaaattaaatgcaggtaaatatgtaaacttcaaattgtataagcaaaagtgtgttttttttattaaataaaataataaataaattattttttatggatcgaaataattttttatatttaaaaaagaagtattttaaataaaataatataagttattttgtaggaagaaatattattatagaaaattataaaaaaaacaaaatgttaattggagagaaatattaagattgacataatagtgtatgtggttgtaatttaatatcaggtgaaggttaattatgtaatttacttagtgaaagcccaaaaatattcccacttttatagtagttatagattatagatatatatttggaggagagggaatttgagcttgggagctcctctttgtttgttaatttgttttggatgtaaaaaataaataaaaaaattgaaaacgagaaaaaaagaacatggaagtaaaggatgagtcatgtggccaccttttaacaacaactcacaattcagcaaaacaaaatagtaataataattataataaaacacacttgtttctcagccaaaaaaacaagaaaaaagaaagaaaaaatatagttaattatattatgattaaaatagaaaataaaccacgcttcacgtaagattatattttatttagtaacaattaaattaataaaaaaaattgtcgcaaaaaaaactaaaataaattatgtttttttttttttttcattttttaagatactaaataaaaggtaaataatttttttaaaagaaaaaaatttattgctttattaaatttaatttataagtcttattaaataaatgaaatgagaactttaaaaaatccaaacaaaaaaatcatcatacaattttttatctaaaaaggaaattaaccaaagaggtatctttaaatgttatagtaaataaaaaattagtagtcaaagaatctcacataaaatagagactgtaggtgttaatattggtttttatggtccatatcaaagtggaagcgaaatttgaaaaaaaaatagtttttatctaataagaatcataaactcaaggagttcaacataatatatatagattaaatctagactattaaagaaagatcatacctcttgaagcctaccatggtatccttgtttcttttagtacaattaacgatcatccaatctaagaacttccaatgaagaatccacaccttgatctttcaagccagtctcaacattcaagaatagagtgagctattagatcttatttggatgaattaatttaagtattacagtatgtactcaactcatgagacactgcaattgagttataattaataatctcacacacacctaaattggtatatgcgtgtacatatatatatatagagagaggaaaaattaattcctctatcttttttgtcaacttagttgccttctaattgtctgttaatttatgataatatatatcatatatatagtgctataaataaagtattatatttactctaaaataattctattatgatataatactaatgattgtttattattattattattattacattgatattttttgatattttaattttttcctactataactttatttagttataatctctcaattaggatataattttcttggtcccaactctcaagtgtattcttggatagaagttctactatagtagatttaaagagatcttcaaaaatatactctgtaacaccctaactaaca

SEQ ID NO: 22898 - DNA, 3674 bp, Cannabis sativa
acaaaatcaaattggttagctcaagtggtaataggcaagtctggctttggacataggtgggttaaacctgtgcctagaggctaaaaaaattatctcattttatactgattttgaaaaatattatattttttttaaataagaactcaaaagtattttttttctatggtccactaaattttaaagtcgaaccctgacaatagagaattattagaggtgcgtgtgtgaggggttctggagtcgaatcctaatttgtgtaactcaaaaatatacatataatatgcttcgacaaaaaaaaatgaaggataccacattatttttttatacctaaaatataatacatgtataagtttctagaagctaggtttagaaatatgagtatagtaccatatgttgattataaattattatgtattaagaaaaagtattctgaggtgggagattaatttatgttaaagatgatataaaccaaagctttgcctcaacagtgttctttagcataagtacttgtctctcttgcttacaaagattccacctccactcaactaagttaacataattatttgtctttcctatgaacataattaaatatgagtaaaaagggtatcgttattgttgtctataggcaaagacagatttgagaggtttcaaaaccaaaatgattaaaatcaaattatattattttagttttaatccactaacataataatgatatcagatttaaaaaagtatcaaaactaataaataactttttacatttatatttctcatatttgaatattcttttgggaattccttaaacaagttggtatatagtaaatttggcacactctttaaagtggatgttatggtacactcattatctattttggattaaaatggatgtgaagagttttttagtttatttttttatttaaaatcagatgtaaattttcaaaaaatttaaaataacttataattttaaaaattaaaaatcaaatagttacttaaaaattcactaatcgtactaaataactacagcgtacataattatgaaaaaaattaaactaaaaagttctcatgatccataaaatgaaatattctacttaagagcaacgttcaagaacaagaagactaaaacaaagtcttattaaaaccaaaacaaaaaacaagaaaaattgatgcagcaaagaataacatgagctatactatattcctttgtaaaaagagtacacaagtaacaacatttcaagatttcagataaaactctgatgatcacaataaattgtttgtaaaattacaaaacaaacaaccaactcactacagtttttactgctggttttgctgtctttgttgcccgaaattgggatgactctgtggattgctctgcaatgttgccatgctagattgaagattctgagcattttgggtcatatttccaaatgctccttgtgtattatgttgttgctgctgctgcaacaaagatcctggatttcccgctcccatgttaaacactgcaaggaaaacgtccgaaatgcagttttagccaattgagcaacatatagtgcatcagatattgaagatgaaaggaaaaaggagaaataagacatactttgatcactcaaaatctgggaagtgtggtttctttgtggattgttagcagttagtccgaattgctgcagtaaacaaaggattaagaataagtggcaaaattaaaatgaaaagaaagatgtgtaaaaacctatagcaatattatatcaacatggggctatgatacatcgatgcacatccaacatgggtcatctctatgtaattttaaagaatgatacattattcttaaaattatcataatctctcaagtcatttttaagctgcaattgacactatcttaaaaatcattatgtgcaccacaccaggttagacagtgatacttaaaacctggaaagactttagcatgtctcagttcgtactctaagagcgttacttaacactctgcttattcaatcctcaacttcttccatatacatgacatgcaataagcacacagtttcactactgacctgcatccgtggcaaaatggacgatgatgacattgtacctgacatgtttggaatctgaaaaaagaagtgaataaagtcaacaacagcatataccatgataaatgatgaaacagatctattgcatgaagcagagcagaaaattttaggctatacttcattgccaagaatgagtgggcacatgtcacatccaaggcattcaaaagagaatgcaattatattagaggcaaccttttgaattaaatttgcatttgacatcaatagctgaaaatataatgcacatccatcacaaaggcatcgaaaaagaacattcacaactccaaagagatgatcccaatatagattttaaagttcttctgatgtatatgaaaaatcaatgtgacttgagagtgtaaagggctcaataataagtcttcctttctattaagagaaaggctttgtaaccccaaattgcagagtggatctcacaaggtatgaaagatctcctttcaagttgtgcataaagttttcatagaaaatagctttacttataattatcaacatatctacgagatcgggtataaaaattgtgtctactcactataaggtgagcatttgtctcccccctctttttctacctaaaattggaaatccataaataagtccccactgttgaaccttctctttacaaaacactcttgtatccctcaaaaccaatcaaacacccttgttgatggctctctactccaacaacatctagggttaatcgaacaatgacatataaatctttaatccttctctatctttctgagactacaaagcattcttatatacctcagtctccgcattctcgtgaagacaatttgtgtgtttcatgcttttaaaaaaaacacacactgcattgcaatatgacaatgaacgtaatgatttagaatggaagtgaaaaaaaaaaaagacatcaatctgaccatttgaggatttgctgttgtctgagctgcattaaacatagcactatttgcagcactagaaaactggtttaattgacgatttatttgacttccttgattgagttggctttgaccaatgccatgttgaagatgtccagaagacagctgcctaccctggaattgctgctgccccattgactgagaaaattgcatttgttgttgcccatgtaactggacccaaaacattatcaattacaaaacaagcagaatgaactctctttgtgtaagttaaatataactccattagtatattattcattattctatgaaaatcttgctaacaaaaaagtagaaataagtttcattctaaactttatcagtcaaactaaattcctaatcctaatacaccaggatttagaagtaagaagcatatttgccggtacattatgctacataaggataacaagccaaatacaaatgtaaatccaaacttagacacatatgccttgttgacctttggaacctacctactagaagatcaaagttatatgaaaaataatattgtgcacactgcacagcatctaaaatcaatcctaattcccaaacaccacaacacaccagtagtaaataaaggaaaagcttgcaaatgttaccgattgaaacttttgcgaagtctggccttgtagatcatgcagttggggtagttggttctgca

SEQ ID NO: 22899 - DNA, 4020 bp, Cannabis sativa
ctcgggtgccaaatttgtaacggctcgtggtactttgcctctgtaccggtgaaacacaaatggaaccttacttcgtcaccgatcgtcgttgatcctgcaatcagtggcttgaagggccctatctccaaacctattcgtcgatctaggcgtgcattgatggcgacgtctcatgtgcctgctaccgttggtaatatgaagcaggcggtgtagtttcccaagcccaggcctgatagtcgtgtgttggatattgctttatctggtaaaggtggggagaacgacattctgcagagtgaaaagttgcctggtattatacctgaaatagcgatatcagatttgaaccattcctcaaatgtgccaaatagtttgaatatgttgtgtgctgtgggccaaggtacgaaggcttttccttgtgggcatgggtctctcttaaataatgctggtgggcccgagggagtaaaattggtgataaataatcaagatggtggtgagttgggcctaattcggtcaagagaaggtccaaatgtggcgtatgggccttttgttgataacacccaagctagtaaagggcagaatgggtcaaccagtaaaatgggccctttaattaatttagtttatgggcaagaggtcccttttcaataagatgaggatagggctttgtctaattttttccaaacccaagaaacaatgttgcaagaacttaaacaattttggcagttggacttgtatgagattcgggccttaggaggcgatattggtgtcaagcctacttctgaaacaaatgaaagaactactccttttaagaaaaggaaattaaatgaagtctcttcctctttatgctccagacctaagaaatttttttgaaagcaccccaatgtcatccgtgacttcccgtgggacactaaggagcaagatcttgagtccaaggtggtcgttgaagaaccttctgatgataactcgaattcctcaagtcgcatggatggaattttgaagaaccctctagttggctcttttctaatttaagattttggctctagtgtgtctgttcactctcataccactgtggatgagaatgtcaaatctcctcaacaggagccatgagaggcgttgcttggaactgtagagggttgtggtagacctctacagttcgtgagttgaagtccctgatcagatcgtgctctcttgattttgtctttctgaccgagctcaaagtcgatgccactcctctgttacgtactcttaaatcccttcacttttactttaacatttatttgttgccttttggtgatgctggaggtattattttggcctggaaggatggttttatttttgagtgtatctcttgttctcgcaacaatatatatctttggcctcgtttactcggatccttcctcccacccttggtttggtggtccttggtttattttgggtgatactaattttgtgctcaagattcggaacgtgaaggatctacaggaagggaccagtttatccctttcatctctaacctggttgattcacggggacttattaatatacctattcagggtgacaatatgacttgagataatcaccgatctggaaagaaccatgttaaatctactctcgacaaaggcttggttaatggggcctggctcagattattttagagagttattatttgctcatcttagacgagtaactctgatcatatacctctatgccttattactggtgggatggaggcaaagtttaaaagatgttttaaattcgaagaaggttggacgctggatgacagaagtaagttggtggttgcccatgcctggaattcagttggtcactcttgggctcccgcccgcgtgtttaaaaaagtaggagctacatgggttgctattcttcattgaatagatctcaatatggtaagcttgacacggagctggagcaataacttaacttaattcatagcttacttgcgggatcccgtgattgggatactcagtgtagcattcggcggtcactaaatgaatctttagaaagaaaagcattatactggaaacaacgggccagaatctctatgcttaagaaaggggataaatgttctaagtttttgtttctctcggctgctattagaggaaggacaaatgccattgagagtatcttgaacaaagataatgtctgggttactaatcgagagtcaattgggtatgaattcattgatttctttaaaggaattttctctgggtctgatgatggacatgctcttaattgcagtcaatttttccatgagaggatctctttagcggaccaggaggagttactcaagtgccctacacatgatgaagttcgaagaactctctttgccatgggcaaccataaggctcctggtcctgatgggatgtcagttcttttctttaaacactattcggaatcagtgggtgaaaaattttgcgatgcagttactgacttttttgtgtctggaaatatgcacaagggcattaatgctacgaatatagttcttattcccaaggtccagaacccaaaaagaaccaaccattttaggcctatttctctttgcaatgtgatgtacaaggtaatttccaagataactacgaatagaattaagcctatcttacctactctcatctgcccaacccaagctgcttttgtgccgggtaggaatattcaagataacaatgtgattgtgcaagagattatccacttgttcaaccagaaaaaaggaaaagaggattactttgccattaaaattgaccttatgaaagcttacgatagactgagcaggagattcattgaccatgttcttgcttgttatgggattcctcagcaatttcgcaattgggtctcccagtgtatctccacaaccactctcaatatctgcatcaatggggggcaagttggtaagattaaaccctcatactgcttacgtcagggtgatccttatctctttatttgggctgttgaagtgttatcaaggcttcttgaggatgctctttgtaagggtactattaagggtataaggcttagcaggggtggtccgattctatcccattttttcttcacagatgacttaattatggttggtagggccaatttgaatgaagctaaaagttactagcattgtcttgagagattctgctcttggtctggctagaaatttaataagctcaaaacttcaatctttttcaataagaatacctccaacagcataaagagagggatcagggaagctttggggattggttctccaaagggttatattaagtacttgggtcttcccctcttcaaatcaagacaaaaggatgctgatttcaacttcatttttagataatctcactactaagttgtagggctggaagccaaaaactttgtcgaaggctggtcgtgctaccctgattaaatatgtgagcctgtctttgcctatgtatactatgcaatccaccaagctctcaaatcgccttgttcacaaaattgatggtttggtgcgtgatttttagtggggttttgaaaaaggtaaccatgggcttcaccttaaagtttgggacaagttatgccttccccaatgtcttaggggccttggctttcggaaaactagagaaataaactaggcttttctagaaaattgggggtggaaacttctgaatggctaccaatctttgtgttgccagattctagaagttaaatatcttaaaaggaaggagttccttaaatgtagatataaagattctgattcttgattttagaaaaatattgtaaaagccaactcaaattggtggttgatggtagggatactagtattttgggggacccttggatccctcatagcaaagatttttccccgaaaccaaatgacacatctgctaatggtgtgaacaaagttgttgacctattgttaaatagtggtgattgggatatcagtaaattaaacaacctttttttttatcaagagactgtctctacaatcttaaaaggtggcaacccctctggccaaggcaaagataggtgggtttgtgttgggttttatgccct

SEQ ID NO: 22900 - DNA, 2480 bp, Cannabis sativa
tttctaaatttcttgatttgaaattttgaattgttatttatttgttcaattcacttccatccaatctatcaattttaactgataaaagggcttcaggattggagactggagtactgattgacttttaaatgtccttatcattgtttcaagatcaccaccacagttcttttagaatttaaaagcttgttcactgcacaaagaatataacagaaattgcttctagtattagtatttaaaaaagaaaagctaatagagaagatggctctagcatttaccttaaagttaataactaaactgaaaatgatgatagcaataaagctcttttacatgaaatttcaaagcaataaattttacatagaaatagaaaacaacatgaatgatgatacacataccttccccaacttcaaacaaaaagaaaaatgataagccatttaatcataagtcctaatacaaaattttacagaatgatgcattaaatattagaaaataaattaaaatgttaagagaaacattatacaaattataagggattagttaaggtaaaagttactaaagatggaataaagttcaccaaagtataatcaacacactatatatgaaacataaagtaccaaataaactaaatgtgttcacaataaacactaatattatactggagcagcaagatcaataagaataacaatcagactcaccagccttttcaatctacttaacacgatatttgctttgtgatactaaaagtagggatttgtcagcattgattgttgatatttcaaatcatgaatattcatctttacatattgctgcacatatatgagtactcaaatcactaagcacacaatttatttttagagattagatatcttgaccatgtaaaatttattgtaagtccaaatttacttttcatattatttggagatatttttccatattcatcctgaatttagtattgttcaaacaaaaactcttattatattattttaagaaagagagtttcatggtttcccacttaaccaaaagattctgaagataaatataaattaaaatgtacaatctgctgtagcttgaaattattttcatttaaaacaaattcatgtacaagaaattaaattttaagtattgaggaattgtttttccaaatagatccaaaatattatgtgacctgatcaaacattaaaataattgttgattgtactaatttatgaaaagggaagcaatatccaaaaatatgttcttctcaaaacgcacataatataacaaaaaagctgaccttttctggtggcagactatccccaaatttccacgagatagaatgaaaccatctgtttcttgtagaatctcatcaaattgagttaatcccttgaaagatagagagagatgcatttcatgtaatcacaatgtgatgtaaaggagaaggaaataatagcagaataaagatatttattgtatataaacatcctcatccatgtagatgtgagttgtacgtactaatatgatatgaattgaatatggttgcagaattaaactgtgaatttaataaacccaagtaacatcacttttgtgtatattgagtctacaatataggcggtatctagcagaaagcaaatgacataatcaattataaatttgtcaatatggatgacctctatattctcaatataataatgataataagccaaaaaaaaaaacacattaaaagtacaccaaaatataataatgataataaaattcaaaagaagaagaaaaatttacctatgaaggcctctatggataatccttctttgacaatcattgtgcaaatctggttgtaccaatggttatgttataccttgttttccaatccatatgtcatatcttattttccagtaatgtggtctgatatactcactctgtctttcctattctgagaattcacttcattctcattaatatatatatctttatatatgtgtttacctgcaaaactcctcaacaatggtgaatgtaaagatcaggcaaatagacctactccaagcagcttgctcgcgcttagagaaagggttatcgaaccaaaaggtccaagaatgttcgaaagggtgagattgatgaagtaagagttatctagaataattgtttcaaattcaagtcctatgctagtcaattttaaatcaatcgttgatctaaataacacacgagataaaaattgaatctatcaaataaaattgagggagagagaaagaggaacctggggagaaagacatttgcaatggccacaccagggagcgtagaagtcgaccaatacacagtcgaaggcggcaatggcagaaccgaactttgaatcgtccaactccaaaacctttccatcaacgactcatttctctgccgaggtgtgactgtgcaattgaaaattttatttatattttagggtttaatatattacgattgaaagattaatttatatgggtttaattttttttaagttaacggaagagtaaaatatc

SEQ ID NO: 22901 - DNA, 3617 bp, Cannabis sativa
gataatatcaacaaatggagctgttggatcaccttgagtttccatcatcagaaagacctgcttttgcccaattggccgttcgccttgatctcattgaatgaggagcagtggattgagttgtctgtgctgatgaactctgtgttactttcttgctgccttggtcaacagtagtcgcgctaggttcattcatacatgaatactcactctttggcaattcccttttgcaaatattttcaatgagctcctgcagatgcagaattagtaaagtatccagggtaagactgtttaaaatgaaaaagacttactataaaaatatattgtttgcaattattatatacctctaacatgggataaaatcgaaatagctgccatgtttcttcctctccactgcgatcttttcttgctgcttggtttttctgatattgatagcaagaatcacgttgaactgtcaaggcttagtcacatgcttctttgagctattaaaactgttcatgtactcaccttctggccgtcgaacttcagtgagaagccaccagtcgatatctttttggttgaagatcctccaagcaatttcatattctttacaacattcatgtcctcgtgtgataatttggctagctgatttggcaaaggaaacagttaatagtaatttaagcaaatcgtgatagcggaacaattaagatacatacgtacatgtaaaaaaaaatgatcagtttcaatcttaggttgacataagtgtagattagtcttaatagctaataataagattgtgtcaagtttgtatagaatgataggttagctgtgcccacctgcattagcttagaggctttgtcaccttcaaatttgtccgggtaaactgatgcataaatcatcaacaatcgcaatttgttttctggggacgtgttctgcatgaaataatgatgtgtttattctagaaaagaatcaccgagtagcttacataaatcacagattcctatacgacacctgctttgtcctcagaaagttgatgacatccttcgctccagcatctccaaaaacaaggtcctgctccagttgcccaagttctcgcagccccatgtccctaataattttgttaatttttccagcaatctgaatgggaagagaataaatcagcaggaacactaatcattccattcattcatttcatagtcactacaagtaaaagtatattccttgattgggtctgcttatacttatatcaagttcatatgctgccccattcttgcagatcacaacccatttcccagcttcccttagcatttttgtaaaggcttagtgtaaaaaggaaacaaacctcaacgtgaagagaaatcttttcaacttgttcagtgtattgtggtaatgcttgaaccatcttttgtaagtcccgcgtagatatctcactactgtctctgcacaaaattaatgcaaacagtttattagcttgtatcatatgtcattgtgattgcattagacagccatgaatcaaagcgtcatcgaagaagaacaagatactgctcaaaaggacaagtaattaataagcatctgaattaaaagataattatagaaatgaaataagtgaaataaaaaaaatgtttcatactgagcaaagcataaacgaaagaacaatgctgaacacaaatggcaatgacaatttgaccagcattacttgaaccaaccttcctctttgttggatttgtgcagctttgttcttggatacgaagttggtcattttgtcatgcaatcgttcactagcctgatgttcagtcagcggaataaagcatcataattttgacatatatgttcattaactactaaaaattaacaccacgaaatatacatctgctatgtgggcatggcgaagttcgagccagattgcatcatggtcttccagaagaacctcttttttctcaggctgaccacctgttttactgggaacctaatgtacattatatgttatacatatatacaacaacaagaagaacacaaacaagaaaatgcgtagagaatcaccaaaagaagaaaaacaaaggggataacatggtggagacctacctcaaacacgtatttgttcccatccatctccaacagatcatgacacatggcatcataagtccattcatgtatgacaggagcaatctgctcaggaaagcccaacacgataaacagtgtccaaactaaaaattataggaacatagaaagcttttagtgtatttggacgattacctgatcaatagacctatccaaaataagtagttcacatgtttcagttttcggaaagtttggaacagtagatttatagtttgatatacaattccaaactgcagatgcaagttttgttggtatagaatcacgcaatttttcagcagcagacagatcatcttccctggcagcacgatatctcacacatggcaactcctgacaaaatgcaaaaaaaaaaaaacaaaaaaaaaactggtgagacatttgcagcaacaggaaagaaatgtacccttgaaatttggagaaaaattctggaaggaaatgtagtacaatagtacaagattcaaattaaacatggatttcagtatctttaaaaaatatcagaattttttttcattgaagtccggacctcataccttcaacgaagcaaaaactgtagcgattcgagttgccattgtgttcaagcaggcattgtattttcgagaattctccacatcaccaaagagatcttccaatgctctctcatgatcagtaataaaagcctataataataatatttttaacaaaagaataaatggttaaagaacataaaatagcacagactagatcacaagaaatgtagtcgcatgtcctgctgtggtggaactttaactgtcagtaaccaagtcatttgtcatagctgtataagatatacaagttaaaagtcccattttattggggggttgaaaagacttaagaaatactaaatgatattcaactccatttaaggacaagatttaaattatatcttgaataaaatctacttgctaagcttgaggggaagacaagatattatggttcgaatacaaattgtgtatgaaacaatagagaggtacctgtctgtctataggaaaatattccaaattcatctgcacattataaatcataagatcagatcaaaacaacaattaggataaaattaaataagagttacacatactgagaaccattacaactcaaaattgaaatttggacctctctcagtgcgccaatgcggggcaatacacttgtatcactcttgatgtgattgacaaactcttttggaataggcgaactgaaaaacacaaatgctctgaaacccaataatgaaaaatgaaagtcaaaaacaagatgttactagtttgaaatttttaatattatgaaaatgactaatgtaaggattctcatactttctgtataaaggctcccttccagacatgtcagacaagaacatgacaacactgcatgctagcaaaagacagggttagtgtttcaaacttaaaccattatgagctaaatggaacactgattaatttatgttgagaatctcattataaagacgagaggcgtctgtttacatttacagtgacttctaattactgatccatgcacctcat

SEQ ID NO: 22902 - DNA, 4926 bp, Cannabis sativa
  modified_base (1812)..(1815): a, c, t, g, unknown or other
  modified_base (3711)..(3730): a, c, t, g, unknown or other
  modified_base (3789)..(3794): a, c, t, g, unknown or other
gcataaaacccaacagttgatgagggggtaagaaacatgtatgaaaccctccttcgccaatcaggtttcccccatcacttataaggcatcctgagcctcctcgtactaatgtagcaccaccacatcaaccagcccagagaggaaggtcacgtcaaagggaggcacctcatagtcattttccaggtcaagacttgctttgaatccctagagataggcaagaggactcctgagttaactatgctcgctagggacctcaacctagaggatgtggatgggaaaggagatgcaccgtctcccgtgataactatgcctattcaagatcgacaccctaagagacttgaccacaacatgcggaatctcatccaccacgggacagtaactacttatcaagatcttgaactatagcaacacaatcgtatgctcaacaagggcctgcacctcagggggcacaacaatagaggacaaatagtttcatggaggatagttactgctctaactcaaagagccaatttatgagcattcataacacaatgctcctcctccgtattatgaggagcatcatcgataccccccacatgaaccaaggaaccctaatcattagaaccatctaaatcgaaggtgacaacctgatttgagagatcacttgatcatagggggcaggcaaaaattaatggaggctccttattaggattcttaccctgaaaagcctataaagatatttttgattattaattaagagttgaatattttgatatatgcttgaatcttaaattattaatatttattattgaataatttatatgtaaatatcgaaaaattccttattcatatatgaggttgtgacttgtagctgtacatagaactaagatcacttagctatgaataaaatagtaagcaacatattaaagttatagaatctttaatcaatggttgctagtacggtgcactgatgcccatttatcagcgcaagtaatcttagttcagattactaatatagtatgacatctaagtgaaagtgttgtaaataatagatatatattatatatgaaaagaaccaatataaataaagctatctttatttaacatgtcttttactataaagatctaattcatatcataatgataatcaatagtagatcggcctaaatcttgagtaatcatgaactcatgtttatgttattagtttttttaattcactcaaaatttttcagagaagatgatttttaaaacttctgttttgaaaatttaataatgtgaatggtagggaatatgatatacaattgtagaatcttaactttcctaacggattgaatattaattctctttctgtgttaagtctcgaactagatatagataaattctctcatagatatagataatatattacaatgtgtgagtctactatagagttaaaaaggaaatactatgtatagtaattaggtcatactataggaaaatgcttaggtagagtcacaaaaaatgtgtctacatacagacatttttttacattatgtgtcactctattatttaatactaataattaattaattctttttatattatttttatttctttttttttaacaatttagtgacccataataaggaaagttacctaatattcaaaattgtggatcctaaagcctcatttactaaaaaatcttcaaataaagtgttttacatgcaattttttttattgaaacacgtaatatttttgttttgatatatagtgaaacttagagattaaatattatgtacacattagacatataaaatcaaggttttaaatatatttgattgtacaattaattannnnaataatactaatttttttaccacagttcatatgactttcgataaatattaattagcaactttctttattagggttcattaaattattcaaaaaaaaataataaaaataatataaaaggaattaattaattattagtatgaaataatagtttgacacataatgaaaaaaaaaaaaaatgtctctatatacaagcgttttttgtgactctacttaagcattatctcatactataattcgatttaagatgttttcccttaaacttataatttaattacttatatataacatacatacaacggtagaagcagctttattaaaagtgtatacatattttgataaaatcttaagacataaatagctgaatatttacagtgggcatttattacaaattcactcaataaaattcataataatgtttctataaacactgttatttctcctaataaagttacaatcgaaactcaatatgtacaacttaaattgacacttgaaaaacggaatgtcattgatgggaaatttaagccagcaagtatatatggcaagttttcagaaaccagttgttcaaacaaaatctcagtatgtaaaaaaaaaaaatctgtaaattaaattaaagaacataaaaatttgacaaatatacatatatggataagattgaaataccaaatgaataaaaaattgattaattatttcaatacaaaaattaaacagataacaaaaacagagtcttttatggacagtcaattttttggagtgccaaatttgatcaaaccaagattttttttgatggacaaaaatggtgagattttttttttttttgaaactgatataaatgagattcaatgtataaagaaagatctcttttccaccacaataaagtcatttgatcatatatccgaaccttgtatacaaaattcaaagtaacgaaataaaagaagaaaaccaccataagaataatttccttccatctagccaaacaataatcataaattgttcatggttttgatttgttcatggtaatcagtgttgaacggtgaggatccttttagtcatcaacagcctgcgtttcgcgtggttcagatcctgcggtgtgttatttagtggaatttctgcaacaaaagaaagaagtattctttggcttggatcaattcatacgtaagtactatttcttaattgaattatactgaagaaaattttgatccagtgagtatatataaaatggttaatcatgctaataccatgaataaatgcaattaatattaatacgttccattgcaatagtgtaatattattaatacatgtacagtacaacttttccaaagtaaacgacgtcgtacgcgactgtgccatatgtgaaccaaccatacaaaatatttcaagtgctctgtcttaataataatataaccagctcatcgatctaaaggtaaggtttcaaaattttggttcatgttatttgtgaaattaattaaggtcatcatcttaaatttagaattaagacctgaaaatgtttttaagcataagacattacaaaagactctgccggctttgttgcctaacatatatatgatttttggtgttgttgttggtgatgttactaaaaaaaatactttagctgtttcagttaattaccataacatttatatatataatagaggatgacgtaatgacgattagtgaattatattttaacacgaggtcacttacattttgattttaatattttatttattattatttttttaataaagtaatctcatactacaaacaaaaaaaattactacttttagttataataaaattaaaatattatttttgactaaaatataatatttaattacaagttgtcactaatttaattttagtcacaataactattaattgtgactaaaaatatatttnnnnnnnnnnnnnnnnnnnntttgtgactaatacctttagtcatggactttttggtcacaatataagaataataatttnnnnnnagttacaatttttttacttttaatcacaaatttattataactaaaagtaagattttgtgtaatattattttgattcaataaattatattcaaaatctctaaaaatcatcaaataggagattagtatattgttgggtgccaaattataatggtagctatataattgttgtttgaaataattatatgtgtggaacatggaaaaaattgcactcactttgtaggtttcattatttatttatttattttcttttcagtcacattccgcgctgttaacacgcaactactagtcttggtcttctcttatatcttttctttgacgacatttaagacactcacattgactcttcatatttacattattttattttctattgcatttattgttatttagcttcctattttccaagctcattctttataaccaaataaataatttagtataattatcaaaaaaaaaaaaaaataatttagtactataaacactacatcaaagtcaatataatatattgatttagagtattattattggccacggtagtatataatactttcaaacagcgagattttttaaaaattattacattaaattatataacatctgatatttaattagatatataataatattaacatataagagagtacttaacaccgctaccgctgtgcttttatagcatttatagaaacataaataatatataataaaatgtcctcctcagcccaaaaaaaaagtaataattaagaaatattaataaaaccagacgtccctaggtttctcatccttgtggtgttgttctactttctagtttctcccttatcaccccctcttgtctgtagaagcgtacatagtttcgtatctcaaacgttattggggttttcataatttttctatattctaaaagattttcatccatattaaattgtttgataaggtttattaggttgactagctgctttttctctacagctgatcgtaaccatatatattttaatttatacatgcacatgaccagcctatatatagatatttgaacagaaatctcgagcttttttctgatttgggagctgctacagctattagccggaggagaaagaaccggttgtccaagcttaataagcaagagcgtaccggc

SEQ ID NO: 22903 - DNA, 1831 bp, Cannabis sativa
ttaatgaaaattaatcaattattaataattacaaataataaatcttatttaaaagaaaaaattgaggaatcaattttgggttaaaaaatatggggtcggactaattgaattttgatattgagttactgaaattatatttgaattaaattttaaattaaatattatatatattttttattttaaaaaattaaatatttttttttttatgaaatactctatatgatatattaagtaatacataaaaagaagactgatcagttgagaaaatatagagttttctctctagaattttcaaaatactctctttgtgaagagagatttttatcctcatctcataatcacaatgtctcatgaatttagtctttgtttagtgtgtggtgaacaggaaaaaatgctgaatacttgttttttaaaatgttaatagagatgtttggcaatgataaaaaatttgttgggatggaaatcacaagggaattccctgctgtcgattttgagagggagaaccccaacaaattcttcttcttttaataaacaggtgtataccatggttattgcttctctagtatattatcttcagaaaaattaaaatgaagttttttggtttcagaaagtgatatgtttgccgacattgactaattgtattatacataatattaaaattagaattccttttattttaccaaaagcaaagaaaatgaaataaaatgacttagactagattgagaagttataatacaaatatatataaagttgtttttcataaatatatttatacttattatccaatcattatttaaaggattatagaacatattattgcttaattgggttgggttttcaactaaaattaactgattgcataattttattttattttttggcaaaacgagaaaaaacaaacatgacattattaagaaagcaaaagttaaacaaacattatacatatctctaatcaacatgttaatcgtttgagttgaacatgtgtaccaaataataatgtggtgtaacccccaacaagcttatattagttgataaaatatgatgccaacttcatatctaattaatgagtaatgaagacaagaggcttccactacttttcttaattaaccttataatttacccctaattaatacaacatgtcacactttccttaaacaatatatttaagccaatatgtcacattcatattgatatattacaacccaccaaagttaattacaatgctttgaaggcacaagaagaccccataagatttgtatataccatattttttggtctaataaaactattgtgtagaatttaagttccatatctatgactataacatcccttgaattacacattgaaaactataacttattccccaccaaccaccccaacaccaaacaataatatgtatatataaaaacatataatatatgtgtgtaaagtctaaaatttctagctaataaagtaggtgctcataagtttgaaaagagagagttcaataagaaatttaagtgtcaaaaagggacccaacccaaccccaatgaccccatttcattcatattatgttttcgttttctagtggtgttgccagctatgtgtggccccatttatgtttcccctaaaagattaattctatatcttcaaatctcaaaatcattataattataagtttgtactgaaaagtatagttgaaaagtataataaactatgctggggtttgtgcttgcaagtgaaagaaatgatgatatatcaaaagggtacttattatttttattcaaccacattacagattcaattccaaaacgagagagatactctcaataaatactaaatagtagatgtt

SEQ ID NO: 22904 - DNA, 1791 bp, Cannabis sativa
  modified_base (1691)..(1701): a, c, t, g, unknown or other
ccctaactagtagtattatatgtgacatatgtgcatttatatttttgtagtttttgctcggtaaccatagaaacatgacggattggttattagagtcacaccggtatgttttagaatcctttgtttttagtggaacaatcacaagtaatatttggaatagtgtgattaggcaagattatggtattagatcattttattcttaaccctaaaaattacttaagttttaggtagagagcaaagaatttttgtctatgatttattttttccttttagcgggttattcctaagattgatttcaaatttttgtttcaattaaaccaattttaattttcttttagttaaaacaattagaaaggaaaaattaagaaaagacaaaatttgcctcttcctgtctctctctttctttctttcgacctcaagaaaaacaaagattttcttcacataatttttggaattttcagcaagaaagctaagttgtgcaatagttctaaaggtaaaccctaaacccttttttttttttttgagttttttttggatgttttgattggtgtatgcatacaattttgaagagttagttttgttcaagcctagagttatattgggttgttttccaaagttaattgaagttattttatgcatatttgaattggttttggcagctaagtatggtgttgagaaaatttgagttcaagaacttaaacttggctcaacaatggtagatttggtttctatgagttttaacaaatgttatcgcgatagttatgttcattgatgtttaataaggcattctagagtgttttaccaaatttgggattaattgattgagattcgaagctcttgggatattctgcaaaaaatgattcaccgttaatagttttcccaggcaggattccaaaaaacggtttaccattttggaaatctggtttatcgatttggcagttttggagccttagtttttgtgtttcctcaatatttagggtattaccacactatttatcgatagggaaacttttagttttgagtttaggtacccaaaaagattttaacaatttatttacccgttttatgtaaatgtgacataaggcctccgttcagcgtataatttccatttaggttgaccggcacacttgaacagaaaactagataagattagtataacatgtgtatatgtatgtgaatatttaatatgcatattgtattatatgatttatatactaccaacactagtacgagtgcagtacagagtgtatttgtatagtatatgatgttaaaggggtatgacacaacattatttacacaagtatgggacaagtacagagagcatgtggtgcaacaatcagttgtactcgatgtacgattcggccctaccaacactagtacgggatgagtacttagtgcatgtggtacagaggtcatacttccgttaagaacattcttgatcatttgttaagccttgtaaataggtgtatggcttcctagatacaagtcgataatatgttatatattttatgtttttcttactgagtccgtcgactcacagatattgtttacatgtgtaggtaaaagaaaagcaaaatctaagcactagtgagtccaaagcttgaagatgattgtacatatcaagatggttagacctggagtgttcgatttcaagacagcgtgggtctttattgttggaatatattttaccnnnnnnnnnnnttactaacaagtatgttgattatattctataatctaacaccctaaagatgaattcctaaaacaataataataaacactataaagattgac

SEQ ID NO: 22905 - DNA, 4143 bp, Cannabis sativa
gcaaaaacacggtttttcaaatttgaagagagaaataaaacagtacttagagttttttctgtggttggggcattaacaagccttaatccatgagtcaatgtcattatatattttagctagaaaagtctttgagaatacaataagtataagttctctatttttgcttgagcaaatactgcaagagagttcaacccctaatttgaaggatatattgggtatttctagtgtttacatcaattatacttagtttctctttctctctaatagggagtttacataagaaatacataaattagtgctttattcgtgaggcctagcccatgatgcgataagtgtgctgactaggcaggttgagcacgatcagactgtcattaccgtgtcttataattatgaatcaattacttaaccttcattttaggtagtttctccttttagcttgatacaatcttctggccaagatttgtagaaggtaacttccttattctatgcgatttgataaaaaaagaaattgtactaggctttcaggaacactttgtctggccttttgtaaacacgatgcttagactactttcaggtatgggctatccttggcggaagctcgtttaagcgagaaaagtagatatgtttttgaaagttcttactgaacttggacctggcccgagttctcctctgtaggcccattgggggcagctttggatgctaacctggaatccacatgtcccttgttaaaaacacagataacatttacccttcaagcttctagaatattgtggattatagaagcttgcttcaatctgtataagcggataggtggaggctaaacctttacagttttctaaacgaaattgactattgaagacaacttttatttattttgttttaaggttttgacatggtattatttcatcaatttgcgaggcatccattccattgatgaggcatgtgtggcaacacaagcattttgacagttatttaagtatgcataagctttgaggagcataatattgtgcacttttgcattgattgtaagcgatgcattaaatgctggatggaaggctctttcaaccgttagatctgctttgtgtttttagaaggtttatttcatccgtagatttttgaattcattgggattgtgctttgtgactataaatacttatgaatgccacttttcatcattttttattttactttgaattttcctgtcttcacacttatgattttcaggagtcaaagctaaaacccaaaactgataataagctgaatcagcctggagcgtgatatggacctttgtatccaccttcttttaaaaattagggctcgagaatttcgaaacattctacccccagtgattgctattccaacaccaaaagaaattacaactctagattttaatttcgagatcaattctttgatcgaccatgccaatgccattgcagtaagacttgagtgtcttaatggtcgtactctggagagagtttccctaagaccctcaatagatgttaacatgtgctctcctagaccacatttctattcaaattcaaattcattgtctagttctttaacagttaagatttcatccttgttacttttcgaatcatgttgcatgttcaaggtgtaagagtaggaggcaaattatctgctgtttaagaattaggatttgagcttgtgactaggatactgttgttgattagtgtagaatgttttgattatccccttaggttgccctaaataatggtaaaagttgaattcttttattacactgttatgagaaattctaatttgcaactgaaatgctagcaagaatctctattcctatatttgagatccttattgttttggataacctatggaccttcttgtttctcactcttgtgatcctgatttttctacttagaacaaatgctgcctgaagattttgtttctggatagtaaatcaagtggggacctcttccaaggaattatgaggaaggatttctccttgcccttaatatctttgttggtctaggtaactaactacttagaatgttctttttttagcttccattatgtttagaagagcttagaggagagcaatgaaaattgttgaagaagttgaagaggtgaaataagttcttgcctcaaaaattatgttgaatcaatctctatgggagatggaccagtacaaaaataagttctgaacttatgacaatcttcaaaaatatgaaacgcaaagaggacttgaatgtattccaggactattctggaatagattgtctttttaagagagaaaccaagtcaatgctctgaaggatgcttcaatgcttagagctagggttacgtggaaatgggagttgaccctcctttgagatgctactttgtagagttttgcgcagtagttggagtggctccttaccaatttattctcaaagtataccgtttgctcactggatggtatgttttgtgcttccataagaagaaatctattctaatcccgaaagagatcttatatttctatatggtcaaagctcaaaatatgagaaatcatcaagaaaattttggtttctataggttggaaaggcattccaagggcttggtgtatctagttagttccgtgaaatatacatatgacatctgggactattagttttatacttctggcttcctactgaaaagtgtcccaactctcagtctcgactttagtattgcaagtaagtgttattgctggtttggccttctcttttccttattttcttactttcgatttgatcttatttttcattccttacagtttctctttcttgatcacctaactctggagatagaagcaagatatgctttctataattccttatttttcattcctaactctggagatagaagtcagatatgctttctacaattccttatcagtagaagagttacaagttggagaacttgtgattactaaaaagcttcaagaggctggcttgataattcctcattagagtattgatagcatgatagtgaaggatcctattagggatcttttccatgatgatcctggtgaggtgaaggaatagccattgctgtcattattatagaggaggccttaaacgctgttaagttcgatgaaaagtggttagcagattggaatcgtcaatacttgagaagctaagtgaagtcgaggagcttgctatccgcttcaaggttgttatccagatgaaggtactctgggagcaagtactttcgagagcagtaagatgccattccatgtcatcagggctccatctttggaaacttagataattttgaccaaagcaggttcgactcttattttttgcgtttatatcaccatagatatcccatcaatgactatttagatagggtagatgacatcattataagtccaaactatttcattctaccaacacatgaggtatgggtagataatcttaataaaatggtataccttgggttcttccaatatgaaagcttcttagacagagaagatataacccagtttactagggagaactccaattatgctaagataaatggtctggatctaactcatatgttgtatttaccgatattattataatacttccttatttgatgtttgagcttgttattttgttatttcctttttcagatgaactacttacacttcaaatggctctagtaaacaagtttcttggtaccattcacgagagatcaaataaggtaaaggaattagccaagagtggttgtgacaaaagaaaaactatgcaatcttctgatgttggaacgaagaaaatgacacctttaaagggactcttggaagctttctagaaggtttctaatgctggtactaaaaaaacaatgcttccaatagaactcttggaagctgtccaagaggctctgacttcaagttccattgtatgccctctggctgctcaaggagaagagggagaaaatcctttagctatcatttcttcacaccatcccattgaaattttggatggtagtgaagatagggatgaggatggagaagatgatggagaaggatacgtccttctcccaaggaagagagatggctttgaaatgggtggagataaaaaaaaaaggtccaaggctaaagctaaagataagctcttataattggctgcttcctgaagatagtgttggaattattttacaaggatc

SEQ ID NO: 22906 - DNA, 878 bp, Cannabis sativa
atcattctcaagatgtacttcttaaggatatcttacagttgttgtttgatgtttgtcatggagttaacttccatatcatagtcctttacagttatgaattacttcttgaacataacttgtagatcttccattacgaacaaattcaagagataacctttttcacaaatctttcgtgaattttttttaagttagagaaaaatagagacacttggcattgttgcttacttttttccacttgcatcaattagacttacttagataagtaggccttagggttcgtgttacctttatacaacaccatttgaggcatcctgaagtgtccaaacaaaggtgtctctattatccttctcacacatggttcaaaatcttcttcttcgacattagatacaaaacaattctaattctgggcaagttgctctgagaacttggttaattcaacaacttgttcttttgaacgtttagttgttgcgtcttaagattcacgtccgcaaatatgatcattaatgttattttctgagattgttttcgtgacaatttattttctcgctcctagcttttttcctcattgcattcaattgtgctcaaaggtcttatgtggtcatactgtaattagaaagctgttaatttccttatcatcatcattgctccggtcaatagaattatcgctgtgatcactgttttgtcgaatagtaggcctttttcacctgggcactaggcctatctttatacacaactttccctctcggatcaataagattttcaccccctcgagcattggctgcccactttttcctttgaggtttgctgacaagattcactttatttagtgaagtggtcagatcagtcttcctcagaggttcttgttgggttttatgccc

SEQ ID NO: 22907 - DNA, 1636 bp, Cannabis sativa
tttactaagtattaggtaggtgaggctttcttgtcactttgacaaattgtgtaaggaaaataaataaaacaaaaaaaaaaaattgttttgtcttgtataaaatattaataattaaattacgcgaccccaaaaaaattatagtaaaatgtaatataatatatatgttttttttaaaacaaaaaaaaaaattatagtaaaatataatatatgaataatgatttgtatgtatatcaaacctttggtaataattttaatattaaatatgaaagcaacatgtccataggaacacccacgtgatttaaaactaactttttgtcacctaaccccaaaaatattaaatctaaaaaaatattaataatattattattccgattaaaattgatactattttagactatacgttttataaaaattatttattaaattatttattttattaaaaataaaataaattttatatttttaaaaattatatgaatagaaccttgaacttaattttcggcaatttttataactcgaagacaattcttaacacgaagaaatacaataaacgtaattagttttgtcataaaacttctattaggttattaaaatcagttcatagtactattttaaaaaatacaaggtctaatttatcatttatcaaaacaaaatattcaatcaataacttttacaaaatacaaaatctgaaatattcaattaataatttttacaaaacacaatatccgaaatattatttaccttttgagaaatgtgattttattattcgaatattaatattagacagtatacaacttgtacatggaattcttctctatacaagtaatcatgctcataaatttacataaataattataataaaaaatgagtcattttttcccttttattctaatgcatttttatgtaaaacaccctgatttttcttttattattttaaaatttcatatacaaaagtttccatttttttttcattaccattctcaatttacacaatactaagcctaaaaactaatcaaagaatgcacaatttttttttcttcttaactttgaactcacaattctttacaaaacccaacttttcttcaattgtttctgtaattgtttcttctcttctaattttagattcagaaaataagaatgtgatgtgacaacatactgcaatggttgagatcgtggttacattatttcagcggccaagactaaactgggagatttcttatcttctaattttagatttaaaagataaagatgtgatttgagaacacactgcaacggttgagatcgtagtcacattatttcagcggccaaaattaaattgtgatataatgactttatgtattattgtgcataatatgataatagaagatgaacgtgatctaaatacatcaattgaagagcgagtaatagtgtcaactccagaagttgagatggtagaagatgataatgctcagtttcaagaatttcttatcagacatagaaaaattaaaaataagaaagttcacactgagcttcaaaatgcattaatcgaacaattatgaaacaaatatggtaactcacaaaattaatataatttaattaatttcaagtgtgttttaagtttgatttaatttaatgtaatttctttcgtcatgaatgt

SEQ ID NO: 22908 - DNA, 2865 bp, Cannabis sativa
tagggttttaatctctagatcttggtaaaataaattccaacaggttctactgaggtgttccaagtactgtaagttgggacaagatcccttcttccaaaaagtagtctttgaattcaaattccaaataattgctaccatgatctaaccgaaatgtctttaatgatttgcctaatttcttttcagctatagctttgaagtctttgaactttccaaaagttttagacttcttggccattgggtaagtatgaccgtatctagaataattgttaataaaagtgacgaagtattcataaccacctcgatcttgattattaataggtccggacacatcattgtgaataagcttaagttgttctttggctccattacttttgtagaaaaaaggtcttttgtcatcttccattctagacaagattcgcatgccgaaagagttccaacttttggttctctcaaaggaccatgctttcttaacaagtttattatgtctaggccaatgtagcctaaacttagatatcatagatacgtttcatcatcatttaaatcctttgcctcttatagtgttaaggcaatgctactcaattcattatttaaaattaattgtttgcttggcttgagcacataaagtcaatttctttgttttttagaaaaaaattggcaatccattttgaaaataatagtctcattattaataaacttaaatggactttcccaacacacttggtagacagttgtgctccattgtccattcttatggtcacctttccatcaactagttccctcaacaaatcaagtatttacattgaagaaaaatatgattagtggctctagaatcaataatctataacgatttatcatcctccactaagttagcttcaataacaaataaattgcacttacctttcttaagctcagacaaatacttattacagtttctcttccagtgttccatcacgccacaatggaaacacttgctttttgcctttcttgtcctcggacataaggttattgttcttcttggctttaggtgccttcttgcctttcggcttgggcttgccactgcttgtccttaccgtccctttcctttgcttcaacattgtttgactcaccttccttgaacttatcattgttaacgttttcaaacatagtcaactcgttcaactattgaatcatgttgaactatagcttattcatcacacaacttgtggtgaacactttaaagcattgagtgagggactcaaggataatgctgacttgagtcctcttgtctacgatagacccatgtgtctctgcctcatgtattagcacaatcatgagcaatgcatgagttcttacagagacactactcagtaaggaaaaatttagtggttctcacaaaccaacatcatatttagattagatttccacttaaggaaatattcacaattcagtttttcaatagctagtaaagcaattaagggattttggcatagtagacattttttttaaataaataaaatgacataataattatacttgacaaataaatatcatttctgaattactataaacatgatgcatgagcgcatacaagtaaaacacataaaattttgtttatgttattccacgataaatttttttgacaattgatcgttgccttagggtcagtattgagtcaatttcattgagcctatgagacaattctcgtctttattattttgaaacctaaatatctcatatttcctttttaaaatataaagtaccactttttgactaagttaacaactaaccactatgaagattagttacactttgtgagtgtaatttattattttagatttcatgacataacttagaaacacttccttaaggatcggtatcgcactaaaatatatcacttcttcttatcttagttaagagatcaaccttcaacaatagtatagacacataccttccttaggcggacgaaatttaagtcgtctcgaggctagtttatattcttttggtgttaaccaataatggaagtcataggttacattgacatatacttctgctctccttcattattttaggttaatgtgtttattttattaattctcaaaattaatacatattaataattttaataattatgattagtttatttataacaaaagccttaaattattcccgtcacaattattaaatttgaattaactttttaatttataatttaaaactattttaaattaataggttaattttaagttaccaagttaattataaattaatcttagtcagcttacatgtttttggtttgaaaaaatggtgaacacataaacacataggacaatcctaatatatcatgtttctactatgagatgcatgataatataactgtgtgggatttctatgtatgacatgttattcactaatgtataagcatattattaatcaactattaatgaatatttatttaaaagtaataaataaacaataatgatgaaccgataataattagatatttctaattttataacctttaaaaaaattaaaaactaaattataaagctaatctccatcgttgcaagagtatttttataattttttaagatcgtcgttgtaatgtcctgatacataggcgcgctacagtgatttttcaattttagtgccacctttgctaatcaaaggatttttcttgaaaatcgtgtcaaattaaaactttggatgtaattgctaaactttaaaaacttttatacatttatttaaaaaagtcaggatcccgtatttaaacttttacatcactatcaaaatataattagtcaagtcgcacaacgactacaaaataaaaccccagatgtcccgagaccgaacactccaggtcctgtcgccatgacatgtacaacatca

SEQ ID NO: 22909 - DNA, 2937 bp, Cannabis sativa
  modified_base (2899)..(2907): a, c, t, g, unknown or other
gtaatgggttttatttagggcacaaaacccaacatttttagacttgaccagcatgtcatccgcatacacctccatattacggccagtgagatctttgaacattttgttcacaagcctctaataggtggcccctatattttttagcccgaagggcatgaatttgtagtagtataggcctaggtctgtcatgaagcttgtgtgctcttgaacttgtgggtgcatcttgatttggttgtaacctgagtaagcatccatgaagcttaggatctcatggccagttgtagcatctaccagttggttgatccttagaagcagaaagcagtcctttagacatactttgtttaggttggtgaagtctatgtacaaccatcactttctgttttgttcgggcaccaacacatggttagatacctaaagtggatagaattctttagtgataaagtcatgggctcttagcctttcgacttatatttgagcacttgagcactctctttgtccaacaacatcctttttttgttgtacaggtcaaacgtttggatcaatgttgatggcatgggtcatcatagaggggtctattccaaccatgtctcaatgtgactatacgaagaggtctaggtttgtccttagaaattttatgagtagtgattttattttcgatgctaaacctttcccaatcatcagtcttctagctggaaaagtaggatcaacctccacttcttctagttcttctgtaggtccaaagtagtctacaggatccctaaagtgaggatctatgtttgcctcccaactttaggctggacttcattgcctttttttgggctcttcatcagagctctgggcgagcatcttctctttcttggctttggacaagcaaagttgtaacagtgatgggcagactgttggtctcccctcaaacatcctaccccatgccttgttggaaacttcaagcaaaggtggtagatggatgttaccacccttaggtcgtacagagttggacgatctatcgtagcattgaaggctgagggcacattgattactacaaataatgccatcagcattctggttgttagattctctccaattgtcagcgacaatccgatgtaccccatgggtacaatgcctaggccaaagaagtcatacattacttgtgcgtagggttccaaatcggttagttacagtcccatcttttcatatgtggatttgaaaagaatgttggaggcagctccgtcatccaccatgcaccttgcaactgttatgttctcgatttatgtagtaatgaccaaggggtcattgtgcgggaagttgacttgggcagcatctcattctatagaaaagatggcgggttccccaagcctgagttgcttggagcccctttcttccatggctaggatgtcacttttaggctcgcaacgtagtgtccgagcatagtgttccctaaccttgttgatctcgcttgcaatgtggggtccaccaatgatgacccctaagtgacccgccactggaggtggcataggttctctattctgtgaagcttgtgtctgagattggttgttctgcacaaaacgatgcaagtggggattgtttctccttataaggtattcaatctcccttttcaagttttgacactcgttggagtcatggtcgaagtcattgtgaaatcaaaagaacttcgacatgtccattttgctcatctccctattgatgggagggggcttcttgtatgggaaattacattgagtggccaagaatgctctcaggtttctcagttagaagggtgaagcaggtatactcttcctccttatctttctaattttgtggtgtgggagaagggttgtacttcccttttttgccactttttcttatggtgttgttgttgttgcgcttgcttccagtgttctttcacctagaggtctgggtggaattgctagtgccccctacgcacctgacaagtcgtggggctacagggcaccctaagactgcctattgtcgactttccatgtctgggcttgtcagaaaacttcctccagcttgataaatttgtcagctctatcaaggaactccttcatattgttggttaagattctccagatatcttccaaaagtcactcaatggcaagatggccccagtatggtcgtataccggtcttcttctgttaggcctttgaccttagtggcctttggcatgaaactttcaatctaatcctttaaaatttctctttgtcattgtctaacctcaacaaggtcttctagtttcgatggtatcagtctcgaggatgagaactgagtgtaaaagtcttgggaaaattcattcgaagaattgaatcttcctcggaccagcttgaaataccattgatgagatgtttctgacaaagttgctaggaagatctaacaccgcacatcactagtaactttttggagatcaagttgcatctcgaagtacttgatgtgtgtcagagggtcttctcatccggtataaattttccatactaacatcttgaacttgggcaagggcaatgcattgatatatgacatgaatggtgagcctcttgatctatccagttcaagatttgatggtttcgggaaagccaagcccttgatcttgtctctcatttgatccaattgtgcctgcacagaatgatctgacgctgcaggggcttggttgattggcccttcttggttgagctacaaccatgtattagctagatcttggtcggccataccctaggagagggtatgctcaaggccatccagccctatgcctggcagttggttgtgtccggctagccctgggagtaggaactggccatgactggccaataggggtgggcaacctccaatccaacccaattgaaaagaaccaatccaatccaatccaattacaaaaaattggatatccaannnnnnnnnattggattggatgctaaaagttggattcta

SEQ ID NO: 22910 - DNA, 1561 bp, Cannabis sativa
atgatgttgaacctaataactaataatatttttttatttatttttaattgtatcactttttaataacgtagaaaaaaactagcataaaatttatagtataggtccctcgcacgtaattttttgctagtataggtgataattaaaaacgacatttattattattttactgtaaatgcacagttaaaattgcaataaaacatttagaaatgggtaggaaataataatatataattccacaaaacacgtcctttataattagttagtataatattatattttcttggaaagggaatataagcttcacagatgaaggcttgtacttctgctcatgtagaaatgtactaacaaaacttatgttgtactacaagtgaccagttttttttaatcaaaatatataatacaaacttttgaaattcgtgatcagtttgctgtacttgtacctaaaaacttgtccaaaaccaaattaattatctttaattatattgtcaataattaataataatcaacagcagatgcaaatggttactattacttgcttcttcttcttggttttcatgttcatctgatcgaaggaagccaaacccattttaatgtaagttattctcttttaattaatttgcagaaaaataaaataataatatatcatggaatattaatcaagtaaagtcatttggtttatgacttatttatttattttaaaagagaaacccttaataatgtatgttgcatctacttttaaaggtaaagcttatatagaaaaatagtaaatatatagtatacacttagcattactcatttggagattattaactagtacttaaatatatggtaaaaagattataaggtgttatgttaattattttagattcgatattttcattgttaaattagaataatgcctcttcaaaaataaataaataatgcctcttcagaactgatgatatataattcgttgacttttagattagctatagctaaatatttgatcatcgtgaaattatgaaatatgtctacgttattatgaatttgctattccttcaattttctctactatattcctaaactattattctcttaaattaactccttgtgggtttaagatccagctttatgatatgggaggtatctcatcaataatcttaatttgcttctgtctgtttcattaaatacatacatacatatatatatatatatatataaacacacacagatatgtatatataattttcttatatagacttattttcgcagtggaaattttttaatgtattgaattgatacatcaaaattatgctgtaagagaaaagcttattttttgtgtttatattagttatggtttacttcgagtttcgatcgtaaataattaatttgtataataataaaactattaacttaaaattatagctaggattgcaaattaatatattccattctatatagactagctaaatatttgttgtatatatagtttcctctcttttatgtgtttaagggatcgttcttgaaaaatatatatataagaacagaaatgatatatatatttataggtcatttttgcttg

SEQ ID NO: 22911 - DNA, 1863 bp, Cannabis sativa
ttgcccataatgtagctaaatgaatttttgtcaaaaatattactgacatagttaaactttcttctatactaaataagattttatgtaatcaccacgagagttttattttcttttcttggcaacttaactatcattaattcttattagaaaggtcatatcatataaagaaaaagaaataattatttaaatatattaaataataatataatatcttaaaagacattcgacttgtgcgagcgtgtctataaattaaatttgataggtgtccaaactatttaaattgatttagttgcgtacgcattttggactatttttttttttttaattgatttaaagaaaattcaaaacaaacataataatataataaataaaatcgtacaaatatttaaaataattatattattatatatatatatattttgtatttttgaaataatctcttagaattagttgtaaattgatttagttgattgtaatttattagtttcttaaatatgtaaaattaatatataaaaaatgttgaaaaagttaatcaaacaacaaaatcatattataggacttaattaataaattgaaaataaaatttcaatcttaaagtttaattaatcaaaatagctaattacaatatgtataagataaaattattttaaattaaaattgtgtttagaaccgacaagattaatctaataatttttttttcgcggcaaaactagccaaagttacgaaaagtgtaattctattattaatacaacttatatctatttcttgtatttttcttcataaattgaaaacaacaggtctttctgggttcgtttggatgaccgtataatttaatataatattaataaaattcaatagaatattattgtgaaccaaatatagtgcaatttaatataacatacaaataatttaatactaaacatagtattatattacattaaaataatacaatacagtatatcaaacgaactctaaattatttttttaaagaacactgtcaacggttctattcaaatatatagaatattaaacttttaactcttaaaatattaattaagctctcaactatcaactaattcttggaaattcttggaacaatcattaattgtgactataacttttcaaaacaaaaactaaagcaatgaagaaaagtcatatggacagaactttagttatgttcaaatgaattattgaatcattttccctttccaaaggaccacacccctttttcttctacttctaatcttctttgctatacagtactgaatctctctcaagatcctaaactgaaaaaccatggctgagttaatggtgggaggagctcttctttctggtttcatcaatgtcctctttgataggcttgcttctaaagacgtccttcacttctttcatggggacaagctcaatcaaaaactgcttaaaaagttgaagactatgttgctttcggctaatgcgctgttgaatgatgccgaggacaaacaacttggagacaacaacgtgaggaattggcttgacgagcttaaggaagtcttgtatgaagcagaccatgtgatggacaagataagtactgaagctctacgactcgaggtggagaaggataaactcgaaagcacatcagcaagtaagcccttcagctttgtctttaatgatccatttgaaataagtgttgtgaaatctgaattagaagaaattcttgatagcctaaaggatcttttagaacagacagaatatcttggtttgaaaaaagttgaccatataacaagattacatagaccacatgctcctttgttagatgattcacaggtttatggaagagaggatgataaagatgctattctcaagttattgttgtgtgatgatgat

SEQ ID NO: 22912 - DNA, 1383 bp, Cannabis sativa
taaaaaagttatatattatgtatatagatggctatatataaattaagtacctatatgtttcttggaggttctgcagttgctgccttaagattgccacctccctttgccaaaactatagcaacatcaaaattaacaaaaccaaaacaaaagtgagtatctattacacaaagtatcatcatattacttttcaaatacatgtaatatgaactcatagctatccagtttattttggcacattttcctgtggaaataatatatatgctaatcaacataagtatgtatagcacaatttcatatacattgactttccagttatatatacagcatatatatactctatcatgcttaaggtcagagatattcatctattaagggaacaagattagtacgcgcgagtacaatattataggactcatattaattcttgatagcagattctgagtaaagatatacagttataactcactacttagctaaattacataaattaatattatataaatgcacacctatagtacttttgtaaacaatgtgtaaggggctggaaccattaagccatatacattaatttgttgagaattataaggttctatcttaaaaccaattggtaatgagtggattagcccatattcgatatatgactcaattctctaccatttattctatgtgggacaatgtgcacaacaatatatatatatatatacaacattatagtatattcttcctgatctatctttataaagttaacagcagacagagtctatctttgagtaactgagaaataatatcttttgactggcaatatataatttgcagcaacaaaaaaactattatatatataagatgactaatagtactgctgcacccttttttcatcaaataaacaattaagcatacagtgagaataatacctttatctctgatgttgggttgagaagttgctgatgttcctcctttgccttgttatatcgttcaattatcgatttcatgcagctggatatgaaagtaatttactatcatcagaacattaattattacttaggcacattacttttgtccttaattatcagtacaattctctctgtaaatatatttagaaaatatttaagtatgtatcacttttgttcttagtatagaaattataatatgaggtgaggacccaatattatggttatcaaagatgctgtttgtttttggaaaattataaataatttacaaaatataatttaaatattcacttatatgtatttgttgttttttatttttttcttacatatatatacaactgagacttctttaaattgtatctttcacactctaaactattcaaatttttttgaaaacaagtataagatgttagttataggttataattatatatat

SEQ ID NO: 22913 - DNA, 5114 bp, Cannabis sativa
atcttgaggaccgaatacgacatggtggactgatgtcgtaagttgtgccactaatagtaagtttttctttatcctaggtacatgatagacattctggagtgtaacttcttttgggatgaatatatggcgtgattgttgttttatcgatgtgtacatgtttgcttagctaaaatttctcagtcagctagcaaatttatggccaaccttgtattgtagccataaaagttccatattctggccttaatccatgaataataattcttctaattctagcataggaaatactagcaacagagtctaatgcagaaattttgcgactgaatgattttatcttggtgaagtatattggttgattgccatgttgtgctgcctgattgagaggagctcattccttagaagcttcaatcttgtgccattcttcttggtgagcagtgatgcaaaagtgtcccatgcttccttcggtgtctttgccaacctgatgtgctctagaatttcatcttcaactatagtttgtatcgcaaacttggctgtgccttctttaatcttccatctcgttaaagcagtttcgtcctccggttgtgtgactttgttgccaccaacgatctcccacaagttttgtccttagagatatgcctccatgtgcatcgaccacatgatgtaattttagttgttgagtttcttaattgcaccgaccacttgaaggtcacccatcgtgcaagctctgtagtactaaaccacatacgatcactctaagaaactcaacaaaatactcttttagaataaacccgactcgtctttgataccacttgttgaacacgacaccacgtgaaaaatataattaatttattattgaaaaagtaattacacaaagacttaacactttttactagaccacaaatacactaaacactcactctcttattttaatgctaaacacatttacaacacttgtataaatataactcacatttttgggacactcttttgaatatttagattacactcaccacacaccaccacaggaccaactcctatatttatattattcatgagtggtggattaatgtggtggattaatgtgctagaatattctagcaattgtcaattttaaaactttcttgaaaattcttatggatattaattttatgtatttctagatgattctataatttttccaaaatgatagaaaattctacatacttgtagaggaagtgttgatctgtagaaattgaaatcagtatcaataggtaaaaaccaggaagaggtaaaaaccagaggaagcaatagagagcaaacagagaaatgaaatggaatacttgactctctttgatgagagtttctattatttatagaaaaggttcagttgtacaagaaggcaagaaaaactaactttgacagtcacaactgaaattaactaagtcatcgaactaataacagaaaacagttttattggttaacatcccccctcaaacgaaaaggggtagcagccatttgaagtttgcttttgagatatagaaatcgatcagttgaaagggctttggtgagagcgtctgcaatctggtccatagcagggacatagcgaacagaaagttctttggcaatgatttgatcacggacgaagtgttgatcgatctcaatatgctttgagcgagcatggaacacgggattagcagccaaagcagctgcactttggttgtcaacccaaataatgggaggtgctgaaagtgagacttggagttcttgcaaaagaaaggttaaccatttcaatttagctgctgtatttgccaaggctcgaaactcactttcggtgctagaacgagcaacaacctgttgctttttggcagaccaagagaccaaatttccaccaagaaaaaccacatagccaccggtggaccgtctgtcgtcgatgcagctagcccaatcggcgtcagagtaagcaaccaagtccatagtagctactggtttaaggagcaaaccatcagaaattgtgcctttgagatatcttagcagacgcttacatgcctcccaatgaacaacagtcggagcatgtataaattgagatagtttgttgatgatgtatgccacatcgggacgagtaagggtcaaatattggagagcaccaagtgcgctatggtacaaagttacatcaggaaaagggtcaccagcagctagagacaactttgatgtagaacttgctgggttgggacaacttttagcaccatcaagttgtaatttgaccaagagttctgctatatatttactctgagataagtacattccagcttcattcctatagatctcaacaccaagaaagaagtgaaccggccccaaatccttcaaggagaagcatgtgttgagatccatgataagcttgtggagaaggtgattattcggcccagtaagaagtatatcatcaacatatactaaaagaataaccaacatagcacccgaaccataggtaaagagagaagtatctgaccttgaagctttaaacccccattgtagcagtgtgtttttcaacttttcgttccatgcccttggtgcttgttttaacccgtataatgccttatggagatgacagacatgagtcggtttagagggatcttcaaatcctttaggttgtttcatgtagacagtctcatgtaagtctccatttaagaatgcattactaacatccagctgcttaactacccaatttgaagtgacagcaagcgagagaacaatgcgaacagtggctggcttcactacagggctaaatgtatccgcatagtcaacacccggggtttgcaaatatccctttgcaacaagccgagatttgaacttatccaatgtgccatcaacatggagtttgatccgatgtacccatttgttgtctatgatatgcatgtgaggttgataaggaatcaatgtccaagtgtgagctttctttaaagcaccaatctcatgattcattgctgccatccattttggattggataaagcttctttaagtgttcttggctctttgggaaagagagcttcaggtaagggatgtttagaagctaaaaatgacttgggtttcgtgatgccattgagagcacgggtggtcattggatgagttctttgtgtacctgtagcagtagaagttgttggagcagaatggttgattggagtaggtgatatctgagataaatttggatgtatgtgagatgttaaggagggctgtatttgaggggatatatctggtgtgggctcaatatttgtgagatgttggctagttgatggttgttgtcgctcgggttggggtaatatagtagtctcaagtggtatgataggtggagggggtggatttgtgtataaattgggtgtagcagcagcaggtacatgatggtgtggagaagaaaatacagtaggattagtagagttcacaccagtaggaaagtaggaaaaagcagtaggtaaatcagtgggaggaaataagggtacctgagaattggagtttggtgcagaagctatagcagcaggaaaacaagtctcatcaaagacaacattgcgtgctatgtaaattcggccttgagaattctcacaaagatagcccttatgatgagaggaatagccaacaaaggtacacatttcagacttggaatccattttatgcgatctatatggccttaaatgaggataacaagcacatccaaaggtctttaaaatattttactcaggtgctctttgaaatagacattcataaggtgtaataaaatccaacacaacagtaggtaatctatttatagtgaaaacagcactttggaaagctaaccaccaataagacaagtcaagaccagcctgagtaagcatagtgagtctcgtttctgtcacatgttgatatttccgttcagcacgaccattttgctcatagtcatggggacatggatgagaaaaatgaatcccttgatcccttaaaaatctttcaaaaggccggtattctcctccccagccagcatgaacacccttaataggtagattgaattgcttttcaaccatgctcttgaatttgatgaaggtatcaaatgcctgagattttaaatgtaaaggaaaatccacgtatatctactataatcatcaagaaaatgcacatagtatttgtaaccttctttagacaaaacatgggagggaccccatagatcagtatggatgagttctagtggctgtaaggcacggttgggagacacatgatatggtaatttgtggcttttaccttgttgacaagcatagcaaaatttaaggtcttttatggtgccagaatgaggaacatgggaaagaattctgcttaatattacaggggcaggatgtccaaatttattatgcaatatattgatagtatttggagtagatgatagcaaagctaaaggagaacaagtagagacataagaagaatgtgtagttttattaatatcactagaattacaattgtcaactaagtcatgattgtgtgaaatacaggaggtattacaacaagaatgaaaattagacttaggtgaagttgcaagaaggcactgaagagaattggaagaacaaccagtagaatcaacgccaagttggtaaagaccatctttaactcgtcccttgagcaagactgtcccagattgcttgtccttaacaaaataataatttcggtgaaactcaagaaacacatcattgtctttaatgagtttagagacactaacaagattctttttaatatgagggacttgaaggacagatttcaaatgcaaaagacaagaagaagaagataaagaagaagacccaatatgagtaataagaaggtgcttaccatctccaacagcaagagattcggtgccagtatagggtgttgaagtctctaatttgtctgaactgttagtaacattgttgtttgcaccagtctcagcaaaccacgcatgatcatcaccatagtcaggcactagggttgtagaataggctttaagatcagtgaagagctcggtctcagtgagaaaagcacgagagccaacagtaccaggcttgggtgtggtccaagatttgtcgaaacggtagtgacaaacagcagctgaatgtccaaatttaagacacacttgacacaagatccgttgggagga

SEQ ID NO: 22914 - DNA, 6504 bp, Cannabis sativa
  modified_base (3884)..(3884): a, c, t, g, unknown or other
atagatattatagatgggttgtaaattaatgggcgagtgaatcttttaagaaatatacagcagatattgacgataatttaaaatcatttttagggcaagggaaaacggataaaggatcattgaagagtttaccattacattcacattcagctgccaaactaggattttattttatttttatttattattttaattaaaaaaaaaaagaagaaaaactaaggttcacatgtttgcttcgtgaagtggaattaatcattcactcaataaatatatatatagagagagagagagagaatataagaagaaaatactaaccctagtagtaataaaggcacgttcttcgtacgacgcagtttcttctgtgctcaccgactaaaccgcttcaatgatacataagatcataccatggttaatttaccaaccttgcatgggttggtattttattaatatatatatatatatttatgaattagcattgtattaattagttagttaaaaatattcaatagaaactatcttatagacttctcttatgaatgcaaatgaattccaaggaaaagcttccagagctgcgtgtcatcgcacgattggtctgcaccacagatctcccaacggatttcgtagtaatcgactagctcaagataatgcttctatcggagtacataacttttaatatttatataatatatagttaaaagtccacttcttcaatttaccatatatatcatgaaatatatttaaattcatatatattaaataaaaaaaaatatacatatatacattattgttctgaccggccggccactcaaaactttatctatgaaatattatattatattatttgtctgttgttatggtcaagttatatgtatattaatatatatggctaacattttttgcattgaaatctctgaaactgaagagctcacggatcacatataagggttttgaacagaatatcatattatgtgaataaattagctatatatatatatattacatgcatatgcgcaccgaaacaagaggtatacttatatatctaaatcgtctaattaatatcttccttaacaagcaagaagattatataatatatatatatatatatgccaaggaatccacttaaatggtatgaaatttatgagcaattgtttaactgtgtgaaatgatgaaatgatgaccatcgagttactcatggatcaaaagatatttgtaattttgtcttttcatcctctcgcttcaacatcaatttttaatttcttaattatggaaaaatttgacaccgaatcaatgtttgaaaatatcgaatatactgtcaaacaactagttatataaattaaaataattaaaaccctagctagtagctttagcccacaaatttgacaaaaccacaagccaatatatatagattaatctcatattgtaaaatctacgcttattttcaaaaaaaaaaaaaatctcatattgtaaaagcaataactaataattaattactaatgtactagaaaggtacccaaaattcatgtgtttattagacaaataatcaacttgagataatcaagagaaattaagcaccacaaaatttgacaatcaatcaaaccacacaaaactccaaaacttaattatatatcattgctccaagttgatatgccaagttggtactgggtattattattgcctgtatcaaaacatacatctcacatgcccattaataatagttttaaccaatattcatgtaccatctaattatttgattccactactctaaaacaggaattggtatctataaaagcaaaaatcacttccaatatttttcatcaatcaaacaaaccatttcataaagagctatacatatttttctctcttttgaatccttaagtacatttgtttgagcattttactaagatccctacatggcttctagggcacaagtgtccacttctcttcttgtagccctaaacttggtgttcttcaccatggttagctccacttatgtaccatgcccaccaccaccccacaaacaccaccacaaaaatccatcacctgctgtccctaaccctaactataagcccaagtactgtcctttggacacccttaagttaggagtgtgtgcgaatttgttaaatgacttggtgaaccttgttgttgggaccccacccaagaccccttgttgtacactcataggaggtttagttgatctagatgctgctgtgtgcctttgcactgcccttaaagctaatgttttgggactcaaccttaatgttccgatttcactgagcttgcttctcaacaactgtggcaagcgcgttccctccggcttccaatgtccttaaaattgtttggatttcatttctgtttatctttgatatttctttttctgtttaatttcctgtatctttaattctattttattttattggttattggctcatctcatgccatgataacacaagatttatgaataaattattctgatttatggttggagttgtttttattgataagtgtatctattcatctaaattctcttctatactacttcgattatccattatttattaattttcttttttgaaagaacttcgatccattattttatatatatttatatattgttacatacaagtatacatggaaattattattcccaaattactaaattagtctttggctaattaacaggattctttttttttttttttgtggaagataatgaaaatattcatattgactagttaatggacgtactttatgatcaaacagcatgatacatatatatatatatatatatgcatatcaaatcgatcgtgtacacaatagtcaagtgcatgtaaaaaaactcatagctattccaattaaaagtataaatatttatagctaaattgttgctgtacagtgaaaacaaatatttattatgccgatggaataatataccaatcctaacaatgattaatatcatttatcatcttctaaaagtactaaaaaatacttaatagatattaattttaattataattattacacaataacattataaaaaagacttataaaaaagacttgtgactaaaagtgaaaaagttatatatgactattaatatttataaatcatcacttttattttatgactaaaaagtctgtaactaaaggtaatagtcacaaaaattacaatttgttgtggctaaatgtatatttagtcacaatacttgttgtgattaaaactaaattagtgtaaaaaaaaattatgttgtgattaaaaagttgtcactaaaaataaacaatttttgtagtaatataaaaaataattattaattaagtaattattacatcatttttctaccatgtacaaaaaactatatgttataaactcctcttctcataatctattttggctgaaattagtgaagtagttaatttcggtttaccttttgcttcaaaaactcaacaaatcatttttgatgataagcataagagcctgagctgcattttcctcagttaagagctattgattatttggatccatagctaaaaggttttgaatctcaataagatggtgttcaactttgtgagcaatattaatttccctttagagcccctacttctttgctcatcacactacaaaaattttacttttagtcacaataaaatttgtaactaaaagtataaaaaaattgtgactataaattaccataattcctattttgtgattaaaaagtccacggctaaaggtgtaaattagtaatgttacaatttgttgtgattaaatgtatttttaatcataatatttattgtgacttaaactaaattagtgacaacttgtatctaaaaactatatttttgtcaagtatctttttattgtgagtataagtcatatttaatcacaaaaaatntatattgtgactaaaaagttgtcagtaaaagtaacatttttttgtactatcattttcaactgctttaacacttttcaacttggaacaactcagaatatatttttccctctaacaacaccttgccaagcatctttaaccatattttcataatcattatagtcttgccacatcttaaaataactaaaaggcttatttcctacatcatttctacaatgtataaaaattaacttttgtaaactcctcttctcatcttctatggtcgaaattagtgaggagtaatataagtattctcaagcacaattttatcctgtggttggcaagacaatacaaattgaaaatttgtgataggctacttgcataggattgggattgcaacatgcccaaaatgcttgatttgaggtcttgacatagaggaagtgaaacatcttttttctcttgcatttatagtcaaacatgtatatatgttcctaaaaggagctacttattatatataaattaataattaattttgaaaatacatttatattgcataatttaattaattaaattaatttatttcttctaattttttatataattaatcataatatttgactaagattttttataactagtatcttttgatatcttttaaaaaattgtctctctcagtctgttagaatctagcctacaatcttatatcctgtgttgatcctcttcgggcttacatgtggttctggtcggatttcttatttggtatgttgggggtgagtagatggttaacaacaatctcgattctctctttattctcctagtctatctctatttttccagtagtcgttgtgtgtttttcaacctcatgggctatggggtggtggtgatcgatccagatctagtaaaggaggaggtttggccattttgggttgggctggctcttgattcttgcaagtaaggagtttgtgttttgttttcgaggcatgggaggagtgtgaggctgtgcatgggcttgggttcataccaagtgtctttttgtcgcttgttagatttggtgtgtgggggcttcagtgtatggtgggatccttaggagtttgaacttgggtagtagattgttatcattggtttgctcttttggttttctttttttagatttcatattgttatttcttgtttgttttatttttataataatggtatgttttcactgccctacaagagtagtagggatgatattggtctggagtaagatgcaagtgttgtctcctattagtttatgggtgtctcatcatcattgatgattccaaatcattttagcaaggacataccttggtctctctcatgggttgtcagatctgggggatctccatatctatattgaccatctgttatgtactccaatctttaattattaagcatcacaacatagttggtcttattatttaagatttaaaaaatttggttgttatgtctcaatttttattagaagataattggctgatagtcattgataagtagattctgtcacatacttcacacatctttgatgttcgaatgttggtggcttattaattggtttcctagttgaggttgttactagggttttcttccatgatattggaaacaatttggtatgcttattttttgtattttttctctatgagctatattttcatgtaattgaatttgttcgatttaccttttaatggatatttccatttttctcaaacaaaaattgataactaaattaaaatgttattataaagattaaagagaataaattagaaaaaaaaaacaatttaatgttgtaggggctatacaatatattttgtcacaaatcattgtgttagggtattatgagctatagcaatggagtccaaggattttgaaataaatttttctcaatgaaaaatgtttggatccctttacaatgaagaaatgactctatttataggaagagctgtaacgggttggagtagcaaatttcaacaaatatatgtatcattttctcactaataggttgttagattttttttttcttttttcagtgtttgccctacaagataatccaatataaatggtaggtggtattgacctaacttgtctattctgtgatgtgacggtgattttcttagtcgcctatgaacgcataagaaaggtgtatatttgagtaatgggtgtgtaaattccaatatatatttattcttcttgatggagaactcggattgtctttagtacggaaggaacaagctacagtgtcagtgctttccctattttcttgctggcatgtggggacacctagttgtggctattttctttctctcaaagcctttccctagagaggctttgagagccttcccgtcaaggatcgagtttgtgcatcttaacttttagtatctttcaagatggccttgggattgggattcccatccaatccttaagctgagcttcttacctggtgaagtgataggagtccttgaccatggtcactggcaatccatccggtcatcctactcatcgagtgcacatgaattatctcatgtggcctttccagtattgaatcaagtggtaacacatgtccttcccattattgggaccaatagtttaatcacaaaataattaacaagtcttctctctctctctctct

SEQ ID NO: 22915 - DNA, 2011 bp, Cannabis sativa
gtatgacactaactaacataactgtcaaaaacagttatgacagttagtgtcctagatatagggaagagtattagtaggcacactagagttaacattatgcatatttgtcaatagaaagaaaacatttataatcacgcacaaataatataacaaaaaatgtataaagaaaataaattcctaaataaataaataaatttggaagcatgtcaatagttattattattgtttcttttaagagtgtcaatagtttttagtgttacattttttttttactattaccgaaattaatacaaagaaatttttttattggacaaaatgtgaagttctcacacattaataaaaataaaaaatactatttatattgtatgatgttttaactctacttaaaatataatatgtgtattgatcatatccatattgatataattacattcaaaaatatataaatatatcatatatatatatatatatatatatccattatatatgatctttagagaaaaaaaaaatgataaatcaaaactcttcaaaaaatacaattactaccatgtataataatataataaaatagatataaagtaaataaacatattaaaatttgataaaatataacaaaaacaaaaaagagtaacatatcaaacttgaaaaagaaaaaatatatctatcttaaaaattaagtatgtctttttttaaaactaaaatgtaaattctagtctctattaggctaattttttacatttttaagattaattaaaatgatattgatcaaccgttctcatagatatcaccatatttacaacaccgtgaataatttatgatctatttttaactggcctgagaagttgaagggcacaataatacgtaggtcatagttcagaattgaaaatcctaaatatcctaaaaaaaaattaaaattaaaactatctattaattctctacactcattttctcggggtggtaccataattttttttagaaatatatatcaatttttaaaaaggaagaaagtattgtgtagatgggaaatcaaactaaatccaattgtaaatttcaataaatttgcattattgttaaacgacctcttctgcaataattatttcaaatttaaaaagaaaagtaaaaaccaaatattatatcttatttcttttcctcaaatctcactcaactcgatgttacaaattattgaactagaactcttccaataccaaagccgaaaaaaatgcaaacaataaaaatagaacaatcacaaagttactcgaaatagcttagagttagaaaactatttcaaataggtcattaataaaaatcaacatttgggaagatcagccggtggaggaagcaacttctgattaggtaactttccatctaagactaaccaagccattttcaacccccaacttgtgtgaatctccaagtgacaatgcataaaccacacacctgaccaacacatgcaaaatgatcaaatttttgaactatagacaaagagaaatgctacaggacaccaatagtatctagcatcctcttatgtgtcaatatcgctattggtctgctaatcgaatgcgacatgtctagatgtgctaagtaccactggtgcccaataacaatgctcgtagataaatatgacacatacatatgtggtaaatcactttagataggtgatcttaaattaaaatgattaattgaaattacttgtcacataaatctaagtccgtgtcaagtttgtgtgtatataaacaaaactattaataaacacttgatttataattggatactgacctggattatctgctaaaaatcttatagcaacccatccgccagatggaacaccaacggtatttctttcgacaggatcaattagattgaatttggcagggtccttatttggattgaaattgccaaacccttgtccaactacaaaaaagttaaaaccatggagatgaagaggatggctttcagcaccaaggatgcttgtgtcttgcaacactacctccacacttgtgttaaatggaag

SEQ ID NO: 22916 - DNA, 2638 bp, Cannabis sativa
  modified_base (275)..(292): a, c, t, g, unknown or other
cttccattatattaatttgaatagtatttttgaattaataaataaatttaaataccaataatattatcatttattataaataaaatattgctatatatatttagtctgtgagatcgatttttttaactgagttatttatatgttattagtaataacatatatatatattcattatacataaattttatgcggacggtgtacacaaatgacatagcaaacaaaaataaataacgtagtgataaaatatatagaaaatattcattttaattaataannnnnnnnnnnnnnnnnnatatttactaattaataaatatatatacctctgatcttgttctctctctcctccatggcgaggaagaagaaaccaggtcgcaggcggggctttaaggtagcgaagggatctccggagaatctggatctggagaaagagagtaacgagggctcgctcgatgatggacaaccgctagttcttgctccagagcaactcgcgaaggagaatagggacgaagtggaatctctgatttcagtgagaaagagttgggccgacgaagtggaaactctgcaatcggcggcttatacccattggcaacagttctcaggaggtaaggtgttaaattctgatgttaaattgacttatattgaaccaatgattaaagagggtagaaagatagctcatatagatatggaggaggtgaaattggaagaagagagtgtgaaatcagctgtaatttgtatggttttgggtgctaatgtccctgcagtggtgtttgaaggatttattcgtagaattttggggcacttgggtatagttcagattgttagaatggctaaggggcttacaatggttaagttcaaggatgaagcaacacgagacgaggttatcgaaaatggaatgattcaattcgacagaaaaccggtcattgttagaccatggacagcggacttgaatgttgttaggattgtgaaatcggttcctctttggattaggttacctaatcttggtcttcaatattggggaaaaaacattgagtgctctcattagcactgtagggaagccgataatggtagataagcacaccaaggaaagaacaagagttcaatttgcttgagtccttgttgaaatggacataacgaagaacccaaaacgctcattctagtttgttaatgaatatgggcaactcttagaacaaggaatagaatatgaatggcttccgattaagtgtaaacattgtggtggttttggccatataatggctgaatgtaggaaggttgagaagcctaaagaggaggaaaaaaagcaagaaagtaaggcagaaaaggagggaatgatggtggtgctcgtgctgtaattgagcagcctactggtgagattgctgctgctagtaaggatgaggctgaggctactgcccctgagatagaggcagctgctatggcagtaacaaaagaaaaaacagtcattggacaatggaaaaaaactgttgtcaaaacagttagtggggattggatttctccaaagaactgtgtgtctaagggctctggtttgacaaggagagatagtgacaagggtgagaaagttcttaggaattcctatgcgatattaacaaggcgataacatgaagaagtagagggagagaatgacttcagcttgtgttgtcaatggacttttgcaatattagttgttggaatgttaagggattgaataaaaaggagaagcaagaaaaagttgttgaagtttggagagttaataaagttggcattggagcccttgttgagaccaagattaaaggggaaaaaattcaaaaaatgatggtaagtaactttttgtgttgggatttttattcaagcaataaagtggaaggtcagattctccttctctggaggaagaattttgttaatgttgaaatcattgaggattccaagcaacatgttcattgtcatatcaaaatgatagggcagaaaaaagattactttgctacctttatctatggagctaacaccatagaaggtaggagtgatctttggactgtcgtatcaatgataaatgtttctaaagcttggatcatccttggtgactttaatgcgatttttcatcatgatgacaggcatggggggaatgatattagtaactcagagcttgttgactctaataactggattgctcagtcttctgtgggcctatgaagcgcacgggttcgactttcacttggaccaataagtaggataataggatattttcttgaatcgaccatgtgtttcacaacgaggagtgggtggatgattttctgaatacctctgctcatttctcttgggagacctattctgatcactgtatttgtgtggttcattcggttgctacaaaaagtattggaagcaaaccgttccggttctataatttctggattgatcatcaggattacaagaacattgtgttagatagctggggcaagcctcttagatgtggtgggttgaaggggatttatttaaaaaccatgagactcaagcacaagttaaaagctttcaataggcactcgattgggaacattggagatgcttatgagaaggccaagaacaattacaaggaggctcaattccaatgtcaagcaaacccgaacaacaatcatttccttgaattggagca

SEQ ID NO: 22917 - DNA, 2516 bp, Cannabis sativa
  modified_base (1757)..(1759): a, c, t, g, unknown or other
  modified_base (2212)..(2216): a, c, t, g, unknown or other
  modified_base (2489)..(2489): a, c, t, g, unknown or other
agcatgaaattgctccgcaaaaacatcatggtcatcatatgccaatatgcaccagttgtaaaaaggaaattatgttgaaaagtgaaaaacttcttagagagagaatcatggataatgaaatgggccctttcaataaattgagtgggacagagaccgtgtctacctgaaaatatgacccagtacgttgtggactaagatcatctaaaagtgggtcaaaaaattttggcccaccacgcatcccaactatcctactcaatctagtccatcagtctttagcgttaagtgggcctctagttggtcttgccaaaaaagtccagcataagttataggcccacccatgattttatttttattttctgttatttaggggaaattttcttattatcaaataaataaataaatattccttctaagaaaattaaatgaaataataataaaggttgagtgtcggaggcaaaagctgagaagtagtctggacccaaaaagttaaaatttgatggacacaaatgaatgagagcaataaaagttttggtgtggtccaaatagaatcagagaattaagttgcataaattacaaaaagaaaattaaaaatagtaataaatacatttatgcctcctttatctacaacatattgaattttcttcccgctcttttgcacgtgaaaaatactatgaagactgtcattattatttgaaaaaaaaaaaaaaaatcagatcagatcagaccaccacatacgattatataggaactttcatctctcaaatctcaatcaccattttcaattttcatgaatagtccctttctttcttcagcctctagccattttgagtttttaacatctagtctgctagattagatataatgaaaataaataaataaataaagtgcctcccattttaataatatatttactttattgttaatcttgtaaacaattaaagaaaatattttttttttttggcaaaattaactataagggtaaaatggtatttttactaaattctttaaagtgatctaaagtggattcaaagattcaaggaattcaccacaagactttataaatatttatatatattttcttgtcttgtacagtaatttttaagtccatacttaaaaaaaattttaagtacgaattttggcctactaacttgtacaataagttatttcaccaaatgatatttaaaatttttaaattgacttttaaaatcacatatcatttaacaaagagaacaaaattgaaatttctaaaatcgaaaaatcgagtaaagagttatgtgcgttttagagctgaaaaaaataaaattttgccattgccctatttttggtctagcgttttctaaacggtagaccatttttcacgaaaacgacatataccatttggaaaacgagagactattgttcctatgatttttttgaaaatgtgttaacagctataaacagttagtttttgcttaaacactatataaactcaatttttactcaaaaattgaagttggttgagtatttatttcatataccaaacctattcaagtgagtttaatgaactcccaagtttaaaatttaataaatacttttcatacactgagccaaaatttgtgtttaattatttaaagtgtgcttgctaatcactttaggttttccattatttcatcatacttctagagtgagtttgcttataattttaaacatattttcaaattgtgattgaaatgagattgacaccggtattgtaaacaactcggttagagtgagattgnnnctacaacaatctgagaaagaggttgatagttcttgacggtgcaaaattattgtaagaggtttaaaaaaaccttggtgaaaaattttcaattgtaaaggttagtcaagcccgttaattaacttgactaaatagtgaaactcaaagttaggtctatagcttttaagaccaaggacgtaggtggcttagttctaccgaactttgtaaaaatcgagagttcgagatttcttactcttaataaactttttaccttacaagtttgattatttgttctatacaattacttcccatattatttacatttacttgattaagttgattaattgtatagttttgtgttaaaaattttaatttactaaaattagcttacatttctaattcacctccttttaaaaacatattttagattgacataaggtgccgtttggcagcacttttgttttctaattttttaannnnnaaatgaaagtaaaatttttgttttgaaatacaaaaatgcgttctgtaaccacttttgtttttcaattttaaaaacagaaaacagaagtgtgttctgtaaagttcatttttattttcatttttttgattttatttaagtcgggtctagatccggggtcgaataattcggatccgggttagaagtcgggttcagcacaagggtcgtgggagacgatttaggtccgagtcttgtcagagtccaaaatattgattaagaaaaaaaactgtttaaaanaatattaaaagtgattttttttttgtt

SEQ ID NO: 22918 - DNA, 2826 bp, Cannabis sativa
  modified_base (2355)..(2362): a, c, t, g, unknown or other
ccagagttgtttacttctctgcttccaaaacacctctttctgcagtaaaacttcagcaagctttcccgatgccactttaaaattctcaacagaattcgcatcccttcctttcttccatctcctcatctccaatttacaatcttttattctttttccaaagtttcctgaatagtccttaccccattccattaacacctccccacaaccaattattttttcaataatggacttcatgggatcattactccaacattcttgaataatctttaaacacagcggctctttcaaccagtaattttcaaatcgaaaactccgattattagcaatcacaatattgttggcagtagctaaatggataggacaatgatcggatgtagaaacttcaagattataaagtttagcataagggaaaaaatctaaccatgcttgattaaccaaggcgcgatcaatccgaacttctacccaatcagcagtaccacggcttctctcccaggtataagggtagccacacaattccaaatcatggagattacattcagcaagagcttcattaaaaccatccacgagccaattcggatacgggttgccacctctcttgtcatcttgagaagtcacattgttgagatcaccaatgatgcaccaaggcaagttcattctattattcagctcactcataagatcccaagtttttttcctttggcttctatttggttcaccatacatgcctgttaacctccaatttccactttcattcccacatatcagtacatcaataaacatgcttccaaattccagcaccttcacatcttcttcaactctccacaataaagcaattcctccactcctcccctgcacatcgacagagatagctccttcaaaaccaatcgcaacacgcagcctttccaccacatctctacgggacaaagtttcacacaaaaacaagtaactgggcttcttttggaacacaatatccttaatgaattgttgagcccatgggttcccaagcccatggcaattccaagaaattacactcataatgactggtgggcctgagtaccaaggcccacctttgaaacgttttttgaaccatttgcttccactatttcagaactcatattcggcccattaaaactttcctcatccatacattcctcaaatcccatacgtctcctcttactatccaagaccactaacaaatcctcctcattaattgtctcctcctcacttccagccatattaatttggtctctgggaatatcttttttattgacaatagcatcattactacccataatgcctttattcttgccaagattcatgggatcacaattagcaccagtatcaatgcgatcaatttccataattctaggctgaattgattgccctccacgatcacccatccgcctggaaacattgtcaccaccatcaactccgccatcgtccttctccgtacgcagccactgagcaccgatcaagtaacttttcttcttcatttgagctttcatcccaattccataaggcttattgacgagctccaaaggttgatcaaatcgtttaggacaaaacctctcggaatggcctattatgccacagacaaaacaaaaagtcggtagatactcatactgaaagttagcccatatccaatctccattctctttgcacagcttcatccttctttttaatagtttatcgatatctaccgtagctcttacacggaggtaatctctccacaacccgttgaaattcttggggtccgacttaacataacctcccacatacgcaccagcactcctcaccaccttatctagcataaatccagtccttaaaccatgaatctgaacccaaaaatcaatcttattcaataccacagctttaggatcctcaccttttttcaggcgatgaaacacaagaggacacttgttaaacgtccatgggctgccatctataaccgattgtatatctaattcatggtagaattgaaaaagatatctattagtgccaagttccttgatgtataccccctttcccggttgccaaagagatgccatcatatgcctcattgcatcaaaatcaagagtccttcccgtgataaaccttcccactaagcaccatctatcatcaaacaagattttctccccttcatcttccccacctatgagtattccttcctcctcatcctccaaactgatttgaccatattgttcattaagatcaaaatcgttacgactgctcgaagccatcatacgcaagacaacaagaacaaagaataaaaaacttagaaagacttagagaacattagaccacatgtcaatagacaagactttttttatattgatcatattattattattattnnnnnnnntattattattattatttacttttgtcaatttggatcaataatgattttaatcttagaataaattagagcatcgaatattctcagtaacataattaaatagtattttcttgtgtatgtttggtttcacaactaacctttttctttaggaaagttttcatataagggaaggaattctctttatggaaagtttgcttaattggtttatttttttaaagaattgacttttccttttgctagttatttttttttttttttggttttggtatgaatatagcagatcatataatctttatacggcatgaattaaagtctaaattgtgatcttagacttatttggaaagtttcccgattccgcctggtctgccactgaagagtgctattttgtcgctgcaaatcaagatttaatttagaaaagttttgtacagctgtaaaaatgtgtttgtggttgtctctaaggtttttat

SEQ ID NO: 22919 - DNA, 3518 bp, Cannabis sativa
aaaaaaaaaaaaactaaaaaagcctttaaaatgataaacatatatagtgggccctttactttgttgggccctgagcatttgctcagcttgcacaggcttaggaccgggcctggtgatacgtttgagaaaaaatattttggatacagttgtaaactttaaacggaatcccaaatattatgtaaagttatatatttattatagttaaagtttaattttaaagtttgaatttgtcatgttttttaagaaactctttgattaacagaagcatgcaaagtaattagaaatttctataacgtgcctaagcaaataggcattacaaatatgtttaaaataatttacttgtttttttttatgtgttcatgttaattgtatgtaatttgatggttttatatttatgcatgtttctttgaacaatatttttcttaggcttgttttagtctttaaaatattttagaggctattattggttgagaaaatgactaaaagcacctattagtgcatgccccctaggatagcctttaagtcccgcgcatgcgtctctggtgtctccatctcatggtgcaaatgtagttcatggtccatatggttattggtaaccatatatattttttttttttgttaccaaccaataactaatgctattttttattatttttggctaaaattttatttttaattaaaaaaattagataaaatttttgaaaaactatatgtagaaggtagataccttgagaaacaaaaatggcagaagccagagcaatgaaagtaaaacataacaaacagaggagaattgaacaaggagccttactcaagtgagtagctcaatcctttatttatactgcataaagagatacaagtggataacagaaaatcagaaaaatacaagtagttataactaactaacaatatatctgtcaaataatagtgtcaagaatgtgtttaacatcccccctcaaacgaaaaggtgtttcagccatcttgagtttggacctgagatacaaaaaccgttctgttgacagagacttagttagaacatcagctatttgatccacagctgggacatatcggacagagagctgtttggacataatgtgttctcgaacaaaatgtaaatcgatctcaatgtgcttagatcgagcatgaaaaactgggttagctgtaatagcagccgcactttggttgtcaacccaaagtattggacattgagaggtggagtactgaagttcagaaagaagggacatcaaccatttaatctctgcagcagtgttggcaagtgatctgaactcactctcagtactagaacgagcaacaacatgttgtttttttgcagaccaagagactaaattaccaccaaagaacatagcatagcctccaatactttttctgtcatccaaacatgatgcccaatcggcatccgaatatccttggagattaagagaatcagctggtgtaatgtgtaggccatgagaaattgtgcccttgagatatctcatcagttttttacaagcttccaaatgggaagttgttggtgcgtgaataaattggcttaatttgtttattatgaaagccacatccggccttgtcaaggtcaaatattgaagagcaccgagggtgcttcgatacaaagttgtatcctgaaatggttctccctctttcagtgatagtttgacagaggcactagagggattaggacttggtttagctccttccatgttgagtttaactagtaaatccgtgatatacttagtttgtgagaggtacatcccatttgaattgcgacagatttcaacacctaaaaagtagtgaacattgcccaagtccttcacagagaaggtgtgattgagatcctgaattagttggttgatgagagaggagtttggccctgtaataagaaaatcatccacatataccagcaagattataagagactgaccagacccgtaggtgaataaagagttgtcaaaccttgaaattttaaaccctctctgaaccaaggtatctttcaacttctgattccaagcccgtggtgtttgttttaatccgtaaagtgctttgtgaagctgacaaacatgagtgggtttagaactatcaataaagccctccggtggcatcatatacacagtttcttctaaattcccattcaagaaagtattgctaacatccatttgtttaacaatccaattgaaggagacagcaagagtgaggattgttcgaactgttgctggtttaacaactggagagaatgtttcctcataatcaatgccgggtgtttcaagataaccttttgccacaagttgagatttcaatctgtctaaggtgccatcagcattaagtttaaccttatggacccatttgttaccaataacagtcataccaggtgagaagggcaccaatgtccaagtaccagccttttttaaggcagtaaactcagtgtccatggagtttagccactgtgggtgtttaagagcagcagcagtattttttggttcagaaggaatgagggcagagggcaatggatattttgtggctaagtaggattttggtttgacaatgccatttagagatctagtagtcatatggtgtgttctggtgacagggttgggattggtgggaacaatggtagaaggtgagcttgtagattgtgttggaagggcaacaggaggagcatctggggtgggattaatggtggctgctggacattggtgcaagtagcagtggagttgtttgggagagcaatattaattggaatatttggtggtatgacagtatgatgtggctgttgtgctgctggtgtgctgtcatttattgcagcaggatgagtgtcctcgggttgtagtggcattgaagcattgttgacagaaggaacaatatgattagtgtccacataagaattagtggaaaatgtagaagtaggataaggatgagactcatttaccttgagtggagtagcaacagtaggtgaaccaggaaagtgggactcatcaaataccacatgtcgtgttataaacactttgccattaggatgctcacaaatgtatcctttgtgatgtgtagaatatcccaagaataaacattgatcagatctaagctccaatttatgtgagttgtaagcccttaaatgaggatagcagctgcacccaaaaatctttaaaaggctcagaccaggcttctttgaaaaaagacactcatagggactcacattctgcagaacaggtgttggtaaccgattaatagtgaacacagctgtggccatggcatgccaccaatattccattccaagtccagcttgtgctaataaagtcaacccggtttcagttatatgtcgatgtttgcgctcagcccttccattttgttcacttgttctaggacaagggtgctgaaaatgaatgccttggtcagacaaaaatcgagcaaatggtctatactcacctccccaatcagcttgaacactcttaatgggcaactgaaattgtttctcaactagacttttccatttaatgaaagtgtcaaaggcttgg

SEQ ID NO: 22920 - DNA, 6054 bp, Cannabis sativa
  modified_base (6011)..(6020): a, c, t, g, unknown or other
tttttttttttttgagaaagataccatgttatcataaattaagacaaatgtcatttacaacaatagagtatataggtggaggacatgactccaaccaaacacaatcttcatccaactttagagcaaactttgccaaaccgtgggcagccatatttgcactgcgcttgacatgagcaacaacagctctagggaaaaaggacaaaagactagtaatatctaaaattaaatcatcaaaagcagtaaaagccactggcggattatggattgcattggacaccattaaagcatctgtctcaatgtaatcaataggaagttgcatctgcagtacccaattgagaccatgaaataatgctttagcttccatttcatgggaagcaaaattcccaacaattggtttagaaagagcagcaacaacattcccagcagcatctcttacaattgctcccacaccaataatattactgccgacatttaacgctgcatctacattgagcttataggaacctgaaatgggtggaatccatggaacctgcctatgaattgctggtgctgtagcaacagcaggagtcgggggaggcagttctttctgtcgagcagcaaagtagtttccaagatatcgagatgcaaaaccagcaaggctaattacaggtttagccttaccaccatgaacaacctgattgcgctccgtccaaatacaccaaagggtacaaaaaatcaattccatttcagctttgctatggacggtggaaagatggatgatgtagtccccatttgtcatcagagtagcattcgaccaatcaaagctaaaccagcagctctccaaacagatcttgcatatttgcacccaaacattgcatgcccaattgactcccaagcatgacgatagaccaaacaagtggcatcagtaatgactttttttcgcaccagattctttgcaactggaagtgcatcatgtatcaatcgccaagcaaagattttgagtttcgggggcagattcaaagaccaaaaaaactgccaccaagatgatttcgtggtggaaaccgatggattagacgcgtcctccattgaagcagctatgtgatagcccgatttgacagtgtattggccgctattatgatgatgccaaatgagacgatctaaggtagggaaaaaactgagaggcagggtcatgattctttcaacatccacaactgaaaaataagcttgtaacaattggctattccattctcgattctctgttatgagattggcaactactccattggcaggtccatcatatcggattgggagaaaagagttgtgacctagtatccaaggatcacgcccaatcaaaactgaacgaccttcaccgatcttccagtgcagaccattttgcagaagttcacggctccataatatgccttgccatgtcaaagatggtgaatggccacgatgggcttccaggaaagaattattaggatgatacatacattgaaaaagcttgctacgtagagaatttggattttgtaagattcgccatgcttgtttcgcgagcaaagcttggttgaagtgaatgaaagagcggaaacccaagccaccattaactttagtcttgcacatatatttccaattccgccaatgaatctttgaaccattttcattggatccccaccaaaaattggacatcatagactctagttggctacagaaagtcactggtaatcgaaagcaactcattgcataagttgggatggattgaacaaccgccttcaagagaatctctttacccccacccgaaaagagttgctctctccactttcgcataagacgccagattttctcctttactccactaaagagttcttttttgtttctcccagagaaggcaggtaggccaagatatgtctcatggcactcacaaatggccatatgaagctgcctgcgaaagaagacttgtatgccgagagtggtgttcggtgaaaaagacatgactgatttatctggattgagcagctgtcccgaagcccggtgataagtatcaagtactcttttgatggccatacaagaacgttcatttgcttgacaaaatagcaagctatcatcagcaaaaaataggtgagatattggggcagcctggtgagtgatggcaaagccattgagattacctaccctttcctcgtgttgccaaagccgtgagaaaccttcagagacaattaaaaacagatagggtgagagtgggcagccttgtctaagtcccctagttggcaatatcaaacccgtaacctctccattcaagagaaaagagaagctattagaagttaagcaggccatgattaaattaatccaagctgaagcaaaacccatcttagtcattacaactcttagaaaatcccattcaacacggtcaaaagccttactcatgtctagcttcaaggcggcaataccccgacgacctttgtctttatgtttcatggcatgaacaagctcaaaagcaacaagaatgttgtcctgaatttgtcgatttgcaaggaaggctgactgagttttagagatcaccacgggtaagacatgtttaaatcgaccaactatgaccttggtgaccaacttagagataagattgcacaagctgatgggacgaaagtcagtaatacgttgtggcttcttgatttttgggatgagtgttataagggtatggttaagtgcagtggcatcagcccctttattgagaatctgtaggactactttggtaaccatctcaccaacaatttcccaattattttggtagaacatggcggacataccatctatgccgggacttttatccggacccatagcacgcaaagcaccttctacttctgcactagtgaaaggcatgagaagttcatcattcatagtcgaagttaccatgggtggaatagcttgcaaggttgcatgaagagcttcatcatcaatagcagaagtttgaaaaatatcagcaaagtaggactgaaccacagcagccatgccgtctgttgaggttatcttcgctcctgcagagtcaattaaaaatttgattttgttattagcctttcttgcagaagcttttgcatggaaaaattttttgtttcgatctccaagacttagccattccacacgggagcgttgttgccaatagacttcctcttgctctaacaactcatcaagaattgattatgattttttaatttcagccgaatgattcaagttggtggaagagatgttattgaggtcagacaccttttgttgagcttcctttattgcactcttcatcttaccatacttcttaatatgccactgttgtaattggtttgcacaagcatcaagattgttctttaattgagtgatagcattagtggatgacaaagtgggggcccaagctttggatatgatttctttgctgtctggatcagataaccaaagcttttcaaatcgaaaacggctacgctggtgttttggttgacaagtcaatgctggaagtccgaaagtggctgaaattgctctgtggtcggagctgtaatagtctaggtgctgaatacgtggcaaagtaagagaattttcccaatggtgattaacaaagcaccaatcaagtctttcttttagagtattcacaccatgtctattttttatccaagtgaaatcatctccatgacatggcaaattcgttaagtggcagtggtccaaagcttgtctaaaggcatccatttgagaatcatttcttagagaaccacctaccttatttgcattggacaggatttcattgaaatctcctattgcaagccatggtagaagaggggctgaatcagcaagcctttttaaaagcaaccatgaattttgacggtttccgacttcaggagcaccataaaacccagtgaagtgaaacactggctcattattaaaagacatataacaatcaaaataagtcggtccatagtggagcaaagtaacatcaacagtgtcatgccataataacataatgcctcccttaagaccagatcgaggagcttcgagaccatgagagaatttaagtgattgttgtaaacgagagattgaatttgtacagagttttgtttccattagaaacaaaacatggggagattgctgttgaacaagcaacctaagatgcctgaatgaactcgggttccccaaaccccgagcattccaactaataattttcatggcgaggagcggggttgcaaagcaacctctgctgagcagtcaaaagcatcagtagaatcatcaaatggcgaagaaactactgaatcagaaccctgttcaattgacgaaagagaaggggtagtagaagcattaccacgacagcgttttagagtcttcctcaaagacaaagagtcatttgggcgtttgtagacagaatgggggccaatgttttcttttccaatggtgggggttatatgtaatgtgggagtagcaggagtaaaaatttgatgcccaggggattgaatagaaatttttttgagggagttaatgggaggctgtaacagagtggtgctatgggggtaggtggcaaatgggtgggaaggaaagtggcccacatcaggagtaaatatgtgggatagatcagtgacatcatgggaagatgttggcaaagtaacaggtgcaggtgaagatggtagtttattttttggagacgccgtagtatgtgaattagaggatggcgatgaaatggtggtagtcggggtggtaagtatacctttcaatttaggactggcatgggcgggattatggtgagtggaaagggaatgttgtggagaggataatttggtcattaacatgtcattgtgaacatcaacagacagagttgaaacagaggaagtaatatttgtagtcatgcttaagttgttaataaccggagttgatgaagattcacccgctaaaagatgtcgtggttgtggttggagtcgagcataggaaccaggtattgatgctgtgatggtgttgcgtgccaggcgagtaagcagcggccatgcatttccttttgagaaatcagtgcgatatcggtcttaattatcagtaggcaaacttgctcctttcatccacgggccaaaagggagatcatcatcatttccgttatccatcctttccataaatgaaacacattgttcaaaagggtgaccaagccggccacactcaaaacaaaacacaggtagtctttcataacgaaagtctatccaaaattcatctcgaatgtttggaagcttaatcatacgtcctcttggcaaaggttttgtgacacagagtttaactctgattctcaagaaaggaccccacccctcattggttgagtcatcaaaaacctttaggaattcaccaataagatttcccaaagcttccgccaacatagctgatttacttaagaaaggaaccctgtaaatttggacccagaatggagtgaaaaccagatcctccactgaggcatttttcgaagcatctggagtgtgcaaaacaatgaggttgttctggaaatgccaaggttcctttcgaaggacccgaatcttgtccccagcacaagcaaacgagacatgaaaaatttcaccattatagtagagatggtgacaggaaaacgacccttccatagtcccgacatttgatcataaaaacgaggtttatagaccggtgtagtggttaagacacgggcaagaagaacatggacagaggatgttttggttgaagttggaacagattcaggcagaataaaaacatcactctcttcattagtgagggatagtgtcgagttcagggaatgcattagtggatccattagtgaagattaaagtgcagaagcagaaaaagatatagacaaacccaggaaaaccattcaagaacaggcagttaaacacgatagataagaagggaaaactgtcaccatgatagaacaatttgaaaaaagagggaaagacagttaaaaagaaaaaacagaaaaaactgcaacaaaccctacacgggcacttactatttattcttaaataaactcatttttcatgacacttaattaaatnnnnnnnnnnttttaggttgaaatttaattttttaacttaaatt

SEQ ID NO: 22921 - DNA, 5602 bp, Cannabis sativa
attttaatgtaaaataaataataaatatttttataacaattaagcccccacagatcaaaaattctgggtccatcactgatgatgatgtttgaactttgaaataaagatataaactttatttattagcttatgttatttttattttattttatatattattttttggttgaagaagtaaccctactgcactatctccctgttaattattttataaaaatatttgtttgggtagaatatgggtgatttaacttttgtataagggtaataaataaataaattggtcaccatatcatatcttggaatttattaattttcaatatcaatctattcatataattccttttttcaatctcgataattaattatatcaatacaatttttaattcatcattatctattttccaacaataataatctaattaaatttacatataatttcatgctatagactattgttttttcacatattatgcacgtacgtactcattattaattagttgtattaattagtttattatgttcatgcacgttacagcacatatgcaaaatatactaattatataagaatattttatgatgttatataaaaattaattaacacatatatgcacatgcaaatattttttctatcataggttgatacatgaattttctatattttaaacagtactaaatatcactttggatcttattgtaaaagttactaattagactttttatttcgttaagtgataattcagttcagaccgtgtatttttaaaatacaatacaaattataatttaattttcgtcaaattaaaacttaataatataacatgatctggaggtaccatgaccagactaattacatttttattcgtggtagaaattgattttaggttagttattatattagaaaaattgaattcaaaatctattttgtatttaattacttttatggtgctacagggaatatgtgaatgcccaatatatatcttctataggtcttatgattggttaacgatatttcttaaaagttattttcttaaattatataagatttaaggtggcgtttggttagaataaaaatataagaatggggatggaaatggaaataggaatagtaatagtaatttaaaatgtataaaaaattgataaaaagattattaaattttttctcatcatgtattggaatggtctttccttttatttcaaaatagaattgtcattccaccaaaatagtggaaaagtcattccactgaaatgacatttctacactttaatatgcaaccaaacaaatgaatggaataaagattgtttcttttcctttctatttcattttattacctctaaccaaacaccacttaatacttaattagataacactgaggagagtattaaaaagagaaatactaaaaggcaccagtggtgtcaaacaccctcctacgtgtcaatatcgatattggtctaatttagtattgggttccatatagtttaatataataacttttagcgagtatcgttaaccaatagtaagacgacacgtcttaaaggtgttaggcaccactggtgtccaatagcaattttcaattaaatatgagcgttgaatttggccaacctcaaaccatatcattattatgtggccaccaggttctatatgatttaatatatcaataattattctcatgtgggttgtctttttctcttctaaattactcaactaattcatttaagtaacctatatatggtactagtctactagaccaatcttaattatttattattctttaaaacctaaagtttaattatgtttagtgctgtactatattgtataataccaataaagcaaccctaatataaatctaataaacaaaacaaaatacattgtaaattggtgattccaagccttgtggagtcattacaaggatggtgccaagatgtttcattttaatttttttataattaaaataaattaatttccacaaacagaatctgacattatcttacttaagtcttaataaccaaataaatcagatccttcattgtaagaaatcacaatcttcagcgtgatttaagcttaagtattacaattattgctattattgttaagttaattatattttgtattattatcctaaaataataattgttatatctctataataccctttactctgttttactcttaactaactttactgttgattttttggtacttttattgtggcagtagaagctagcattgaaagtactaaactttctatctacttacatttactattttaccaaattaataattatgatgataaaataaaaagtaattccagctacttacttaaataaaattattcaattttttttttttaaagaaaaggcaatttttttcttacaaaaattgaataaattttaataaaagctaatcaattatcaatcttctttcataataatcaaaatcttcacatggtataaaaatattgattttgttctgttttatgacaaatctcataaaatctacttcaaatttcaaatatgataatataaagaatgttactgcaaaacattagtgatatcatattttaataagaacatttaaatagtaagtttcaacatgtagagtactatagatattattggtgtcctatttggaaaataactatgtaattgtatttgagtgtaattttgagtaattataagttttgatacatagtaactatgtaattagaggtaattgataaatctcaattatattctccaattttgatgcatcaataagaattaagtaattaagtgtatttataaaatattattatttttagataattaattttattaaaatactaattcatttaccataaaaataagaattcatgtataattattacttcacattcaaatatactgtattttaagataaagtataatcactctaatatataattattattttaataattacacaattctctatctaaaccattttcatagcaaataaccaaatttgacacttggctcacaaaggatataagtttttaagttttgtcaatgaaccacttgagggtagttcaagtggccataggagagtgcgtgtgttggaggtcttgggttcgaatcccaagttatgcaatgtaatatataaacacttaaatttaaaaaaaaaaaaaagttttgtcaatgagattgtaaacatatccacattcagctactgataattattaactcttatggatatgaaagtcaacattacaataacaatagttcacatttttattattagaaggaatcatattattatttacatacgtggataagtcataattttgtttacaaaataaaataaaataaaatatgtaaaacattagttgtaattcaaatgaacacaagtacataattaattagaataataaataaaagtgttcactattacaacggtattatcataaaatctaagacacaaaattttaatttgaaaaatttaacaaaacccaagttttgtttttttactaaaaatagtagagagagagaaaaaatggctatggtgtgagtggaggtctaccttcctagattggctatggcttggcctttggataaatataaaattacaagaatgccactgtcatgaattgtgcagaaaaagacggtttgtaataatcgagacaagtagacaaagctcatcgtggggtgtttgccaaaacaaatccaggtggctctttggtatggccgtgatttcagctcattctgagactttcttcctcatttccttccttatatcctactcactctttctcaacctaaacccttgtcctttctgctataaatatagccactaaagcttcttctctctccacacacacactacactgcacccctttcatttctcagctctcttcttcttcttcttctaagctctgaagacctgagaatggctacattatactcagctttgtttacagtttctttgttgtttgtaagttcagcctttgcagcaaaatatgtgccttatgaaggtaatgcttcaaatctgaactacccttttggctgttagtgtagaatatcttgtccttgatctattatactatgcttaatcctttgctaatgatagttttagtaagtacaacaactcatttgttggaagaaaacaaaaacagtattttcatttggatcttgtgaactcaaatctattctaaagttgagatctttgtctattgctctttttaatttttccttttgaaagtttatgactttatttttgggttttatttatttatttttttgcttggtaatgaagggtttggtacaataatagaattatacaaccttgtactctggatctttgtgcactgagcttttggtttttgagcttgtatctttgtttgttgtgttttcatacattaaaacaatcttttttctctagattttgttaactctaacttgagttcttacaaagttgggatctttgtgctttgtctattagatgttgttgtcttaggttcttataaagttgggatctttgtgctctgtttattcagacattatctttgtttgttgtgttatgttacattttaacaatcttgttcttttgagattttgttaactctgtcttaggttcttataaagttgggatcttttagcactaaacatcattacttaccaacccttttgctcattttcttcaggactcttggccaatggcaactttgaagaaggaccaaaaccaaaagacatcaagaaaactgtactcattggaaaaaactcacttcccaaatgggaaattaaaggctttgttgagtacatctctggagggcctcaaccaggcggtatgtacttcccggtagctcatggcgtccacgcagttagacttggcaatgaggcttcagtttctcagaccataaaggttaagacaggagctttatatgctctaacttttggtgcttcaagaacttgtgcccaagatgaggttttgagagtctcagtgccttctcagagtggtgatcttccattgcaaactctttatgacagttttggtggtgatgtttatggatggggattcagagccacttccaattatgttactgtaacattccacaatcctggtgttcaggaggaccctgcttgtggcccactcttggatgctgctgctattaaggagcttttgcctgtttaccctacaagaggtaaccaatcttttagtttgtgccattaaaaacttgtgtttgataacttagaaaactattcttgtgatcatataatgaatgtgtgtatgttgttggtatgaatatactgaaaattgccaaactaacaacgctaatattattttggactctgcgtaaaagttaccgattggactatctattttattaaatgacatttttcaaaatagtacaaatagaatcttagaacagaaaattataattgtcataatacttctagaccgagttattattatgttttattttgacaaaaaattcaaatactatttagtactattttgaaaaatacagaattcaattcgttatttaacaaaataaagagtgtaatcaagaatttttgcaaaacacattcaaaatactagtattttatcataaaaattttaataatgatgatttttacactgaatatgctcacc

SEQ ID NO: 22922 - DNA, 1643 bp, Cannabis sativa
  modified_base (1561)..(1576): a, c, t, g, unknown or other
atcaactacattccaataaatctttaaaaggatagtctagaattaccactaattaataccacaaagtgaagtcttgtgaataattatataacaattatatatatatatatatatgtgtgtgtaaattccatgtttaatgtttaattcgagctcttagtatatatatgttgcttgaaagattttgaattaaaaagccaaaggatgtactgagaaaaattatatatatatatataaatataaattaatgaaggaaggaaaaacaaatgaactaggatatcattatatatatatatatatagattccctagtagtaatgaaattgatctttagtcgtgtgtatatgtatcataacatgtataaatctcttcaggaaaaaaaaaacatgtatatttatctaatacatatacacgtacacaaaagtccagtacaaataactactcattcatgactatattatatatacagacaatatacatcatagatgtatgtactttcatcaacaccctttatgtatagtcaaaaattaagatgaaaaatgtttggttttatgtgaagagaaagtttaagttaccataatgaaaggtgtttaccataaagattagaaaagaagggacaaagagaatgagaattgacatggtgagagggtgcagcctctgattggggatccttagagaacaaccacaaaggagacaagcaactgttttttcatttattgatgtttcactctttcttatctaattggctacctaataataagtaatttctactttatttttcaaaaaacaaagacaaaaaataaaaataaagaaaaaaggtgaagtgtaaaggccaagctacttgattagtttctttctttagtagctgggttcaaccttcaattaagataagataggcttcaccaccaccattttcaccagtactttctttggcatgctttcgtgcctatgtttttatcagataaaaaaaaaaaaaaaccttcatttttttggggttataaaggatttttatcccaaaactagtgttgtaatgcgggttaggcttattgatacaacatgaaactatcacaactacttgaattcaacaggcacaagctcaatgtggcacaaaaaaatatagactcaaatacacatgtataatattaaattggtatgagataacataaaaaatatatttgttaagcatgacaagaaaagttcgaagacataacatgtaagtaacatttgaaaatgttacaatttctaaccttaagagatttgttaaactagtagcatttgtcaaaaatataacttattctagtatcactatatataacttgaaatgtcactgtattgagttttattgacacttaaaatatcattaaaagtatttaatttaattaaaaatatattattttattcaaataaaaaaaacaaaattagtgatttgaaaaatgctactaaattagatttttaaaatttactatttaaaatgatatatatatgttattatttttgtcatcgttttattttgttttatatttttgaatagataattatgtgagggaaatttacatggtatactnnnnnnnnnnnnnnnnttacaaaaatactgctaggcggtattttttacttttttactgtgttttttataagtttcatactgca

SEQ ID NO: 22923 - DNA, 1770 bp, Cannabis sativa
  modified_base (786)..(793): a, c, t, g, unknown or other
tcgtaggcagacagttagtagcagtacgccataacaagtcttttactttcggaggaacacttagcttccaaatagtattccaagaacggaattatcatcctgtgcacccgcttttcgatatttttttaatactaccaacttgaagatagtttttagtacaaacaatccaaatataaaactggtgtaattcaatttataattacatttgatactaacattttcgaaatccatttatataaaactaatttaattcaatttatgtaatatatattatatttatttatgtataataaaaaaatatctatatttcatttttactttttttttattaattttgtatggagcttactatatctaattatagaaacccttaaaaataatcctaaccaccccacatatagtttaattgttatgtgtagtttttaatttttttaattaatattaaaaattaagtgtgctgaattgaaatccaactaaaaattctatttaattaaatattgtagtcatagacatagtttagtaattttatatttttcttcacaaaaagaaagtctaagttgatcaaattttctcttctcaaagtaaaagaaaaccctctatttaaatattgagttttaaaatctaattagattaatgggataataatttttcaaatttaattattaaattagatttaattggaagttggatttttttttttctttttgcagaataatttataatataattaaataattgaataatacctaatatttataagtgacttttttatttttatactttaannnnnnnntttttttttttgtatttttactgaatttaatttacacaaaattcatattgtaattaacggaacggagcaatttaaatcgtaactaaaattcgtataacaactcatataaaaaccaccgaaaaaactaatttgaaaacccaaatcataaaattgaaaaaaaaaattaaaaataatatacgagtaatttccaaatttataaagagtagagtcttctgagcactcataaatataagctatggcttataattgacgggacaggctccaaagcaaaatcaatggaaagatcatactctgcaccacacttgtgttctgctgtgtgcatcgtttactttacttttgaaacgaccccatctactttttgttcgtgcagtcctaaggaaacataacctttaatttattagtattattcctccaaagtccaattctataagatcttttttcttttctttttttgaaaaaaataaataaataacaaaagaatagtgtttgggattgggacacttcagttcaagtagtcttccactacaattgactcaaaatctacctactcgatcacacactttcatttacttagtaattcaataaataatataaataagattctagaaagaaagaaaagaaagaaaacaaaatattttatttttaatcacagttaaatttgtgattaaaaataaaaaaattataactaattataaattataatttttatgttgtgaataaaaggtctatgattataattaaaacttaattagtgacaacttataattaaatattatgttttagtcacaagtaatattttattgtaattaaaattcacatttagttaaaaataaattatgatgtgactaaaaaattgttactaaatgtagtagtttttcacagtaaaaataatacccagttaagtataataattagggataatttggaaacccggtaaaaaattcttggctcatataatatcatagcgctatgaacta

SEQ ID NO: 22924 - DNA, 7296 bp, Cannabis sativa
  modified_base (1875)..(1889): a, c, t, g, unknown or other
ttctcttattatatatatacatatattatgttacatgtgttgtaatcttctcttttacctttcatatatatatataatatatggatgggcatgaagtcacgctttcaactatagacattagattgtatcaataaataatttattactatcctaggactggtaataaatagaattaaataatacttatctttttttattaattaaaatctgtacttaatacttcacatagaaccggttgtagctggtaaaaaaatttcgttttttgtgcctgctgaatagtctttttctaagacaaaataagttctccctacataaaaaataaatagataaataaaatccatagagagatagattataatggtatttattgggctagattaagttattttggattataaaaatgtccttgtttttagaataaatagcaccaacgttatatcaatttttaattttaccttatgtttttttttaccttcataatattttatttgcttaaatacttataaccacctttggtaggaggtaaatattaataaaatacatttttttatttgttacaaaatattaaatttatacacaaaaaaattcaatatttttataaataaatggtaacaaatctgtaactaatcaaaggggacaaatcactaaggagtaagtccaatcttcaacgagtccctaatttattttaaaaaacataataaggttgatttttcaaccttagaaaattttctgaatgatgcccgacatcttccaaatccaaaaaaagtattagcgtcgtagtactcactatgagtgttattggtcaaaatggtcaaatcactaaagatagagttcgatcatcatatgtgttatttatttgtgatcgcataaagaataaggttgatttttcaactttgaagacgtttcaaggttgatttttcaattatgaagacgtttcggatgatgcccgacatcttccaaacctagaagtggtgttagcttatgagtgttattgatcaaagtagtcaaatcactaaggatagagtctgatcatcaaacgtgatgcttatttgtgatcgcataaagaataaggttgaattttcaacctcaaagacgttccaaatgatgtcgaacatctcccaaacctagaagtagtgttagcttcgtagtactcactacaagtgatattagtcaaattggtcaaatcactaagaatagagtcttatcatcaaacgtgttgtttatttgtgatcgcataaagcaataagattgatttttcaacctcgaaaaaagctttgaatgatgtctcacatagaaatgctaatttttggcaaagaacaattctgaatcagtagaatattcttcaaatagattataggagacatagttacttaactctaaaaattatctctactcactatccatagaaataaataagacaatttttttatacaattaatatcgcaataaattttgagcacgattttttttttttttaaaaaaaaaaattggtattacatttgacctcaaaaattatctctactcactatccatagaaataatattgactattaggccagttaagtgagacccaattctgattggagggtcatttgtacgaaatagtattgtttgatagtgatcgttgggcatgatgttagcccaagatatgtttccaagagggggtgaattggaaatttaagctaattaaaatttttaacacaaaatatgcaattaaacacttaatcaagtaaatgcaagtaatatggcaagcaataatgatagcaaatagtaaagtaaaaagtttaagggtaagaaattgcaaactctcaattttcacaaggttcgatagagctaagccatctatgtccttggtcttcaaagctatgaacctannnnnnnnnnnnnnnatcgagccaagttaatgggcttgactaacccttacaaccgagaaattttcaccaaggtgtttccaaacatcttacaatagtttcgcaccgccaagtactattaacctctttctcgaattgttgtagtgacaatctcaaagtgagtgaaaagtgtttgttggatgttaaacttgggagttcattaatgtcacttgaataggttaggtatatgatataaatccaccgaaaaagtcgccggcagcaactccagtgactttttctacactggcagctactccgacgactttttcggtaccgaaagcaaactccagaaaaagtcattgaaattggcatggtcgccgaaaaaattaccaagaaactggtttcttgatgttcttgctaaagaaaccaatttcttgatgaagaaaccagtttattggtaattcttccggtaatttttatggcgacaagccaattccaataatttttccagcgccgatagcaactctggcgactttttcgacattggtagttactccggcaacttttctgacaccgacaacaaactttggaaaagtcgtcggaattcgcattatcgacggaaaaattaccaacaaactagtttcttggtagttttttcggtgatttttctggcgacaatgccaattccgacgacttttccagtaacggcagcaactccggtgactttttcggtaccgacagctactccggtgacttttccaacaccattgataaccctggcgatcactttagtttcatttgttttatttttttaaaaaagaaatatgaagagaaatttaatatttttttattgtaaactacttggtaagcatattattattgatttttctttatgagctatattttcatgtaatgaactttgtgtgatttaactattaatggaaatttccattttctaaaaaaaaaaaattctaactattcaattttttttttaaaaaatagtataatttaatatatactaggtgtactccataatataaaattaacttttgtgtaaagtaatattttttttacaagtctacatttattactcatgtatgacttatatatatccattttgtttttgaaaaacttgtgcttcattaaaaaagagaaaatatacaaagcaacaagttctaactcattatctaatccaagacctagcttagcaatcttatgagcaatcacattacaatccctaggaatataagaaataactagacttggactgaaagataacaagttcttaacctgaattagaacatcatctagaacactattgttccaattacaataagcaagcctatccactatagatttacaatcggtcaaaagcacatctacatgaagattaatcaattgagcccattggatggcctggcaaatggcctttgcttcagcaacagcaggcgacactaaaccagcaaaagggatttcaaaacctgctaaaactctattacaagcatccataaccaccactccgatattgtatttacggttataagaatcagtggctgtatctgtgaaaattctgaagcgacctgaaggtgtttgttgcactgatgctgcatgagtagcaaatttgggacctgttgcctgagcttgctgcacatccagaaacttaaaaaagaaattgagactccagtcatacacttcccgtgggggaagagatgtttgattgtgaaaaaagttatttctctgattccataaagcccacaagaaacaaaacaaaataccaatattatctttatccaaactttgaacaataccaataaaaaactcatcaatgtttaaatgtttataattatcataataagtagcaaacctggaatattgccaagcttttctggacctggaacaatctagcagagcatgcttggtggtttcagtctccaaatgataaataggacacaagggtgaatcaatcacacttcttttaaagagggatgaagctacagggagagcatgagattacattctccatacaaaaaatttaaccttaggaggagtaatagaggaccaaattttagaccagaattttttagaactagagaaggaagaggatgaggggagatcctggtgagagaaagccaaatgataagctgatttaacagaaaacaagtcagaactttccctttcccaaatcaggtcgtcatgaccataacatcctgaaacaggtacctcaagaatatcattaatcatgacattatcaaaacaagattgcaatttcccaacatcccaagttccagagtcagtgacaaagtaggacaataaacaagaagaagaggagaatcattggtgagaaaaaatttatgtctatgattagggagccaatggtcatccagagttagaatactactcccattacccaccttcctaatgagccccgaagccattaagtcccttccccacaaaatgcttctccaagtataagagggattgtgaccagggacaacaataagaatggaagatcgaggaaagtgacgagctttaagaattgaactgagcaaagagtcaggatttttgaagatacgccaagcctgtttagcaagcatggcctaattgaaatgcacaagagatctgaaacccaaaccaaccctaaatttggactgacatagaaatttccaagacttccaatgaatttttctagactcccgagtagaaccccaccataatctgggcatcgcagcctcaatacccttacagattttagtaggtatcctaaagcaagccatagcatacgcagggatagcttgaataatagctttcagaagaacctctttcccaaccctagaaaaacacttagaagaccatcctctaaggacagaagcaaccttatcgcagagaaaaataaaagaatgatatttagaccgagaaaggcattgaggaagacctaaatacttataaccaaaaggcctatcttctagattaaaagtttgaaaaaacaaagcacgaatttcctgagtagtgttgggagaaaaaaggatagaagatttagagaaattaatagcctgcccgaagccctagaatagatattaaaaacctcctggagagctaagcaagaatttctatcagcagaacaaaacaaaaggctatcatcagcaaaaaaataaatgagagatagaaggagcatgcctagagatagaaattcctttaagagactgaccatcctgcctaagccgaagtaaagaagacaatccttccgcacagagaataaaaagatagggagacaaaggatctccctgtctaaggcccctagaaggcctaagagaacctctaacaacaccattaataagaaaagacagcctggtagtataaatacatttcatgatcagattaacaaacttaattggaaaattaaaatggaacattaagctttccaaaaaatgccattcaacacgatcaaaggccttagccatatcaagttttaaagcagcctaacctctcttaccagtattcctagagttaatagcatgaacaatttcctgagtaataagaatgttatcaaaaatagtatgcccagaaacaaaagcactctgaaagggagagataattttgtgaagaaccaccttaaggcgattagcaagaactttagagattactttatacatagtagtacaaagacttatagtcctaaaatcctttaaagaattagcatgctgcttctttgggattaaaacaatgagagttgtgttaatatcagaaaaatcaactccattatttaggcaatctaaaacagcatgaacaaaactaacaccaagggtgtcccaatttttctggtagaagaaagcattgagaccattcaaacttggggctttatccccagagagactaaaaatagctttcttcacttcttgagttgtgaaaggctgggccaataaatcaatatctgactcattcagggaaggccctaaacagtccaatatttgattagtggcctcaacatcacacccctcagagctaaaaagagtggtgaaaaaagaggaaataatatcaaacatagcctcaggatcattagtattgttaccaaaatcatcttttaagtatttaatagtgttattcttcttcctatgagaagcaaacctatgaaaaaacttggtattcttgtcaccagctttaagccaattaactcgagaccgttgtctccaataaacctcctccttataaaggagagcatcaagctgggactgaaggaacttaacacgaaggctagactctctattattagaagcagaattctgaatcctagcaatctctttctgagtatcctggattcgagattggaagatcactttagtagacttgttccaggattttaaggccgaaacacaggaatcttgacaaaagagaaactagcttagagcattttcatgagcagaaacactacaagaattcagccaggaatcttgaacagtggtatagaaatgagggttatcaagccaaatgttttcaaactgaaaatgtttcctaataaaaggattgctagagacattagcatcatgaagaagaaccttaatggctcgatggtctgagccataacaaggcaaatgatgcaagcttacagaaggaaagagaatcttccaggactcagacccaagagcccaatcgagacgctcatacacagtatgattgtgccaagtatatttatcaccctcaaaagtgagaggtgaaagacaaaattggtcaagaaattgggcaaattggtccatatctttatggttataatatgtactgcctattttatcatcaaaagacaaaaagctattaaaatcacccatgataagccaagggaggtttggagcattagaaaacgttttttcaagcaaaattccaagtaaaagaacgattagaagtaaggggagaaccatattagccagtaaagtgaaacatttcattatctttaaagttaatattacaatctatatgattgctaaaaaaagataaaatatttatataaacagtagctttccacaaaagaagaagtccacctccaaaatactttctagggacttcaaatccattatcaaaacctaaagctactctaattctatcaacagccttcctaggcaagcgagtttcagtcaaaaaaaccacatttgggcagtgatctttaaccaaaagggagagcctcctgaatgcacgtgtactccccaaaccacatgcattccaactcaaaacactcatttttctaggcgggtgtgcaaagcatcaccccctgttccacatcagcagcagcaggagaagattcctcctcccgatctccagaacaagcacatttgagttgggaccttacaaagtttccaaccacaacatgttgaggctgaaacgaaggtctcttgacaccagagactgaagccagacccttcccatgaacaaaggagtcaggctgaccctgaggagagctaac

SEQ ID NO: 22925 - DNA, 1890 bp, Cannabis sativa
  modified_base (931)..(935): a, c, t, g, unknown or other
atacttgtaagtagatctaagatcctggataaatataataccaacaactactgccccgcaattgtctaaatctcctcctctagttcataataaagttacaagtatggagcaactaaatgtccccttaccacacttgtccacactgccaactatgtcaatcccttcagtcaccgaagcatcaaactaacacagtgtcccggtgtcacgagccttttccactattatggcagatttaacgacttctcaaacgatgcaattttcccttggagtttcttctgcaccaaacctcagtgccccaagcgtccctctggcatcaatgaagctgagttcaagaagcttctcaagcgcaatcaaagtctcacaaaatacttggatgaaagaaaccccaatgaggcaggtgtcgtgcaacgcacccgttaggagccatgattctcatcagttcgaatgctcgtggattggggagtaaatgagcattcttccaactttcccttttagttaagcagtttaaaccaatcattttgtatattatggagactaaactacctattggtgctataaataagttttgtactaagttagttttgctgacggttttgaagtccctcaggtcggccttagtgggggcctccttttgttatggactcaagatgttgatgtaaccttactttcttataatataaatcattttcactgctataattgattgtccaattattgtcctttcatttttactggtttttacgggttctacatcatacaatcagactaacacgtggcaacttcttcatcaccttggagattctattcacaatttgccttggcttctaatgggcaaatttaacgactttctctcactttctgacaaaattgggggtgatattaacaaacgacctttgacatcttttaagaaattcctcgatacattcactcnnnnncccattcatggtcatggcagcccctacacatggaccaacaaacactctcatcacacccacatacaagaaagattggactggggcatctcgaacctcatgtgggtttcttcttttcccaaggcccatctcctccatggagacttttttggatctgaccaccgcgttctaaccatttcccttcattaggatgaggatagcctacgacctcataagtagcgcttccattttgataatagatggcttccagagaatggatttgaggaccacctttgaaaagcgtgggcccaccaatcatgattcatgtgaccacaatcatatctctaatcgtacaaacaaactccaacattgtgcactcactctctcacagtggcaaaaatctattgtgtaacgccctaaataaataggcacgctatccaatatacttatgaaaccctaatcccctaaacaggattactaataaaattagcacgaaaattaaactttaattacaaacaaaatcaaaataaacttgtaatacatttttttcactttacaaaataaaagatacatgtgtcgagatcccggaagtattttacaaaatgttattgcaagtttgctttctctacccgacctaagtggcaaaacagagaacaaaatacatcacttgtagaccccaacccacttggtctagtgtggcctgaacatgtacattcttcatccagctcctacactcatggctgatcagcaatagccttaccctttcctgcacagtagatcacccgtgagccaagcccagcaagacagtataaaaatatcaataacatgtttatcatactatataaaaaataatgccaatctcacatgcctgtatgtcacatacatgcatgttatgctcagatgcctatttatgtctacatggcgtagacctacgtgttgcgctcacacgtctaaatataataaggccttagaatagttc

SEQ ID NO: 22926 - DNA, 4252 bp, Cannabis sativa
ctcaacaagctaatgatcgagaaactatgggaaccagtaaattcgcaagccactgaaagacaaagtcaatgagtaagatgcgatctatgaaaaggataagattttctagcaattactcccaaccagatctgtgagagcacttgaatttgaagaaacctgaccttcaccaccaacttggtccaaagctagaggatccaatccaattgcaaataaatgagctggaggacaagttcaggagatatcaagtgggggaattcaggaaactatctggatacgactctgacgaggaacttgagccgtatcaccctgatattatgaataccccttttccttcgggattcaaaaacctgcatgtctcgtcttatgacagaaccacaaattcggtctcgtatttgaataaatttaacacaatcatgcgagcgagaaatgtgacaaacaatttatgctatattttgttccccacctcgcttgttggagcagtgagtagctggtttagcaagtttactcatcattcaataacttcctgggagcagccgtccagggatttcaagaagcaatgttaagctgctacggataggcgacccaaagcagcctcattaaccaatataaagcagcagcctaacgagacacttaaggcgtacgtaagtattttagcacggctgccgctagggttagaaatttgggtgacaacacactagttatagcccttcaggcaacaatctctactgatccattaactagacggggcaagttgtgggatgatttacaaggacgtccagtgagaggcatcactgagttcaacgaaagggctcaagtgtttgtccagaaggaagaagcctgaaaggaaataaacttgttgaaaataagctcgagaggcaaacccagcaatgtttcaacatgtactgcttccacgagaatagatagctcgagggcttttgggccgaagagaaaggacagaagtaaggaaccgtcgaaggacagaaagaaacaaaagaagcataaaaaatacgtgctagtgtatactatatataccgagcttaatgaaactcgagagaatatttacctcgcacatgagcagaaggtggccttcggtaaacccaagcatatgaggaattagaggagcaaaagagatcaaaaaaaatattgtaaattccataaggatattgggcatacgactgatgaatgtcgccaattgaaagatgaagtagaaagtctcatcactcgaggtcattttaaacagtacgtgaaaagatagggccaagaatacaaccagccggtctgcccaataacccaaataacaaggggttacaacctatttcgggagggcaacatatcttcagggaaattaatattgcccagaaaagatatgtgaaagagataaagaacgagcagccagtctttaccatagaaccttccaagaaggtgaaactgaggaacctcccattacattcacggaggaagatcagaaaaacgtgagatatcctcacgtcgatccgttggtgataaccattccactcgccaataaaaggatcaagagagtattgatagataatgggagctcggtaaatatcctttataacgagactctaaagaaaatggggtcaaaaaggccaagttaagaccttgtatggtgaatctttgcggattcactagagatagcattgctagccttggcataatcaagctcgcattaactttaggcgaggcacctttatctgctactgttatgcaagatttcttagtcgttgacttgcccttggcttaaaacatattgttgggttgaacaacactgatcggactagggccagtcagttcgatcaagcacctattcttgaaattccaaacaatagatggcgtggaagtggtgcttggtgaccagatcctggctcgtgattattattgcatagagatgtagcattaaaagccggtcatcaatggatgatgatattggcaggagaacatgataagaaaaatgaagatcttgatcgtcgagttcaagatgaaagaaaccaactaaaaccaattgaagaattgaggaggttattctcgacccaagaaatcccaccaaatgtgtgtacattgggaaaaacctggacgagcagctcaaatagtaattaataagctttttgaaagtgaaccaggatcaattcgcctggagtcacggggatatggtacgaatcgaccctaagattttctgccatcacttaaatgttgatcccaactacccagcgaagagacaaaaaaggaggcctttggattccgagaggcaaggggcactaacacaggaagttgacaagttgttagtcaacgattttatacgtgaggtgttttatccctcgttgatagccaatcctattctcgtcccaaagcctaacggaacttagagaacttgtattgacttctctgatctgaataaggtgtgtctaaagggttgtttcccactttccaggattgaccagttagtggatgcaactgctgggcacaagcttatgtcatttatggatgcgtattatggatataaccagataaaaatgtatgtcccagatcaagaacatacaagcttcgtaaccaacatgggatttattgttataaagtcatgctgtccggactgaagaacgctggggcacgtatcagcgactggtaaacgaaatgtttgcaaatgaaatagggcagaacatggaggtttacgttgatgatatgttggtaaaattgataaaaagtaaagatcataccttagacctcgcagaatgctttaaaatattaaaaaagtataacatgaagctaaacttgaaaaaatgttcctttggaatcttctcgggaaagtttttgggattcatagttaacgcaaagggttattgaggcaaatcctaaaaaaatcaaggcattaatagacatgccatcaccgacaaagcttaaggaagtacaggccccgacaggaagaatggctacacttaacaggttcatttcaaaggcaactgataagtgcgtgctattcttcaacatattacgaggcaacaaaatgtttgagtggacaaaagagtgcgaaggggcctttcagaacataaaaaggcatctagcaacgcctccggtttttgcaaaaccaataacgggagagacgctatttctctatttatccgtgtcggaggatgcaatagttcggttatagttcgagaagagggcaagcaccaacaacctatttactatgtaagtaaaaggttactaagggtagaatcccgatattcccctctagaaaaactcacgttatgcctagtccatgcgtcttgcaaactacagctatacttccaggctcaccccgtaaaagtgttaaccgatcagcccttgcgacaagttttatcaaaaccagatgcttctgaaagatttataaaatggtcgattgaactggggcagttcgacataacataccatccttgaatatccatcaagggccaaaacttggctgacttcttgatagaaggtataactctagaagaaattcctcctaatcagcgagacgcagaaaccgggaacttatatgtggatggcgcatccaacgaacagggttaaggttcaggggtaatattaatatctccagaaggctttaagtttaactatgctctaagattccaattcgacgcatccaataacaaggctgaatatgaagccttgattgctgacttaaagatagcagaggcattgaaagtcaaaaatctcatttgccatagtgattcacaactgatcgtgaaccaagtccttggggaataccaagccaaaggcttaaaaatggcgaagtatttagagaaatttcgaaagaacttggaaagattcatttactttaaaattgaacgaattccaagagaacaaaactcgaatgtcgatgccctagcaaatctggcctcgcagaatgacctggacgaattaaatctggttctggtagagatgctaaacgagacaagtatatgtgaaattgaagatgtcgagatgatagatagctctccaacatggatgacacctattattaattatttactcgatggacaacttccaaacgataaaaacgaggcgcgaaaactattgtatttagtgcctcgctacacaatgatcgaaggcaaactatatagaagagggtattcaatgcccctacttcagtgtgttctccctgcagaagcagatgaaataatcagagaaattcatgaaggcttctgtggggatcatgcaggctggcaaagtttgtctaaaaagatcattagacaag

SEQ ID NO: 22927 - DNA, 10657 bp, Cannabis sativa
ttctttttacttataaatgcaaatacgttgtaattgacggacccagagacggtacggacaaaccaccggagctttctctctctgggttttttggactcatctaaccactgttatcggagagagaaactgcccggacctccgtcttcaacctcattctccattgcccctctttctgctcctccttcaactcttctggttcttaggtaggagtttattgcttcttctctctccactctctctttgtttcgctatgcgttacttctctctttaggtttggttttctggacaaagaagaagaagtagagaacttaggggtgtggtagctcacctttgggtgtaagtttttcatagccctaatttctctttttaactttctgtttctgttgattgttttttcttttgctggcattacttttcttctgcctttttatttatgttattagcttaaatggatctttttgttatttaaagttcttgagtttgtcatttgtatggggattgagctattgtcttgtctgcttgggggggaggtgattttgggtttttagttttgttttctagtttagggtttcattgaggatcacttttataataaagttttctactgtaatgggatatgatggggtttggattatttatttatttaatggagcatatgattttaaacaaaaggctgcctttttctagaggttttccataagacgtgttgggctggtaatgctgttatgcgtgaacaaatgactgtgttgcagtacttggttggttgtgacttcttagagcacttagtgatgctgagcctgaagtgttgagattgtattgtattgtgctgtgtatatagtttaataaatgcacactttttaatatgtgcagacggaatagcctctaagattcctactttttaacttgactaattgtgtggatgttgcttatgtgtgacggctgttatgattttggttcagaaaaaaaggggcctttgttgtatccagatggtgcggatagaggccgatgttggcaacgggagagagaggagcccacttggtgaaaatggcttcttgaaaggcccacaaccttctcctagtacaagtggttcaaatacgagtctgagtacggttcagagtaggttcgaagggaaagatgctctttcttatgccaatattcttcggtcaagaaacaagtttgctgatgctcttgccctttatgagaatgtcttggaggaagatgctgggaatgtagaagctcatattggaaaggggatttgcctacagatgcagaatatgggaaggcttgcctttgacagttttacagaagctattaagttagatccccagaatgcttgtgcactaacgcattgtggtattttattcaaagatgagggccgcctagtggatgctgctgaggtatgcaatcctatttagcacatgcttccttaggattgtttaaattactgttctttttctctcctggaggcaccgtcttttctgtctagtgattttttttaacactattagaattcactggtatgtatgaggttattaaatttgttttgaagactttttttggataagaaacacaaatgttgttttactaaatatacaaggcaaaataaaatcttgtggtcgtagttgtcccatgtcaagcactctaactaagctgggttgtcacctgtaagatgtttgtatacgttcttagcagttgatgcatatgtgttctaagtagttgattggttgtttgtaattcttttaaacatttacaaattaattttgctttggaacagtcatatcaaaaggctctgacagcagatccttcatacaaaccagctgctgaatgcctagccattgtattgacagatcttggaaccagcttaaagcttgctggaaatacacaggagggaattcagaaatactttgaagcattgaaaattgatcctcattatgctgtaatttcatactccccatttcaatttttaagattgctttctacatcactctgtcaaatcttaattatactttggttaaaagtttcaaatttgtgacaagtgcagcctgcttattacaatcttggtgttgtctactctgaaatgatgcaatttgacgttgctctaacttactatgagaaggctgcttcagtgaggcctatgtatgctgaagcatattgcaatatgggggtaatttataagaatcgcggcgagttggagacagctattgcatgttatgataggtaggctgcaacgctgtataacctactatttttctgagtatccctatcgagtggtctacacttgcacatgttgttattgattgcttattcttatgctttatcaggtgtttagctgtgtcaccaaactttgagattgcaaaaaataacatggctatagccttgactgacttgggtacgaaggtaatattttatcctgttgattgtttatcattacaagaatgatagtttgaaagcatatggctcctatatttttagcctcataacaataatatttattcttatgatttatctttataatggttcatgtcctatacacgaccttgttagtttttccttttattgtcatatgcaattatttttcttttgtatatctgagtttggattcagttatatgactgtttaggttaaattagagggagatattgatcaaggtataaactactacaagaaagctttgacctttaattggcattatgcggatgctatgtacaatctgggtgttgcatatggtgaaatgctcaagtttgacatggtaagtaactcatcgactaaatttttggctgtcttattctatgggtcaagttctgtaagtaaaaaatgtgctgtaattattttctctgcaggctgttgtgttctatgagcttgctttccactttaatcctcattgtgttgaggcatgtaacaatttaggagtgatatacaaagacagagacaaccttgacaaagcagtagagtgttatcaggcaattattcatttatgcagttttagtttttttctttctcttgctggaatttgagtggctgacatgtttaaatttttcttatagatggctttgtcaatcaagccaaatttttctcagtcgctgaacaatctcggtgttgtctacactgttcaggttgtgtaatcgatcctttttgtgatgttactctaaatgaccatctgacaccattagctgataaacttagttgctattggcaggggaaaatggatgctgctgcaagcatgattgagaaagccattgttgcaaatccttcttatgcagaagcatataataacttgggtcttcatcttttccttgcctttccgaattttcacttatttcctgttacatttctctccatactgtgctataagtttggaccttgattaagtatattttggctggttgaatataagaattaatgtaagtcgaggttgtggtatcatacctataggtaatttgagacactctagatttggtgagagggccctattgctcttttggatttaattaggaatacatcattgacacttaattgcacttcttgattgagattatatcttgttgtgtggaagctaattcatggtaatagtaacatgggtttcagttttcttcttcctgcccagtttctttctttgctataaattttattttattttctatttcttcatctataggtgttctctacagagatgcaggcaatatttctatggctgttgaagcttatgaacgatgcctcagcattgatccagattctcgtaatgcaggccaggtattggtttctgttgatttattcttgcaaatttgaacttattgcacttcaatatgttgtggttccctattgaacacttccttgcctggaaactggtgcggtcttgtcatctgtctaggtctctaggaccttatgggatctcatgctgcatctttactctgtattgtattggattgtgcacatacaattcattaggaattaggtttaactattaagatttctgaaacatctggatggtttgtaaagtggtatcatcttctgcaaatttgttcagtgctataaaagttgaactttattgttgatttactctttccatttgagtgcggtaatttaatactaaaagctgccattactggataggttttcttatataattaaatttattaacctgcttcttgcagaatcggttgcttgccttgaactacataaatgaaggaactgatgataagctctatgatgctcacaggtttttaccttagctccttttagatttcattacatctttaataattttcacaaggtatttggaatttatgtgtgtatatttataagataaaaactgataggtgataggcctccatctacaggttttgttctttgttttgtgtatttatgtccctactttatatgtattaaaagttatatatatatttgtgtgtggatgtgttctgggaatttcgttgcaaattggggcttcaaaatatggtgggcatatgcttctttagaggtttacggtagcatatgtcgttaatgtacttttaaacagtgactagaagtttgaggtgtttggctttgaaaattatcctgcagggaatggggtaggcgctttatgagattgtatcaacagtacacttcatgggacaacccaaaggatccagaacggccccttgtgattggatatatatctcctgattatttcacacattctgtatcatattttattgaagctccccttgcacatcataattatgcaaactacaaggttgtggtttattcagcagttgtgaaggtatttatcatgttcaatacgtcttatctatgttccccgtgtttcttatgtgattttcgcgacctgtattttcacttatttgttggttgtatttataagtttaaagacatcttctttactataggaagttttgagaaaaaataaaataacttttcctttgactcactagtatataaaattattttgctgtttgctattgacagttttaattaatctgtacttgtacttttttctacctttgttaattgattgataacaatataaatgtgaaaaactgttactctattagcaaatgaagtacaaaattgggggactaggtgttcccaacaaactactacaaaatagaagatcaatacccaaacaaattgaaacaataagcttttgtttccaagacattgtggtttcagaagctaatgttattattgcattatatttgtttcatttttactatagaattgacttctatatgccacagggagatgcaaaaactatcaggtttagggaaaaggtcttaaagaagggaggaatttggaaggatatatatggggttgatgagaaaaaggttgcaagcatggtcagagaagataaaatcgatatcttggttgaacttactggtcatacagctaataataagttgggaacaatggcatgtcgtcctgcaccacttcaggtatgtcaatcggaatgccttgtttattcctttcactattgttcctctctccttttgtttcagtcaaataagaacaaggttaaaaggtattatggaatgaagttagacttagtttacatattggtattctttatgttgaaggccttgtttgttactttaatactctctctctcccctcttgttcccgtcaaagaggaaccaggataaaaggcattatgaaattatgttaagacttggtttgaatattattattttatggattatatggaattatgctgcgtaattattatgtttgagttactacactcttgtagagtgtaaatgttacattagttctacatgatgcaattatggtaaacagctgatctgttggactacacaaacacacacatattgtatgttagagaatatttacctgctattacctgtttttcaggttacttggattggttacccaaacactactggtttgccaacaattgattacagaataactgattcacaagcagatcctcctgagacaaagcagaagtaagggattttttcgttgctattgtatcataatttgagcatagttaatgatctagagaaggtttattgatgatttatcgtacttaaatacaatactcttataaatggcaggcatgttgaggagttagttcgattaccggattgctttctttgttatatgccctctcctgaagctggttctgtatctccagctcctgctctttccaatggattcattacatttggtagctttaataacctagcaaaggtattggatgtgtttatttagaacttatatcttctgtactggtagaagtatatgtattctaaaattatgtgtattttattaagtttttattcaatggtcttccctcaatcagattacacctaaagtattacaagtttgggcaaggatattatgtgcggtaccgaattctcgccttgtggtgaaatgtaagcctttttgctgcgatagtgtgagacagagatttatttcgacacttgagcagctgggtttggaatcattgcgtattgatctcctgcctttaattttactcaaccacgatcatatgcaagcctactctctgatggacatcaggtaaaagtttaaattactttcttacatatgactatggtcactattacctttatgctatcagtacattatttgagatttcgtagaaatatattgttgatttttaagattgtagtttcagcctaagtgccgtatgattagtgtgtgttgataattggagaggtagcaataaatatgtaaactatttggactgaaatgtttcttgttattaaatggggaggttgtgtttctatgctctttcttggctttcctatagaggttctaactcattctcctgttttgttatttctcatcaatatagtctggatacttttccatatgctggaacaactacaacatgcgagtctttatacatgggagttccatgtgttacaatggctggttcagtacatgctcacaatgttggcgtgagtcttctcagcaaagttggtgagcagttctccaatctattgaattcttaatttttatcctattgtaatataggaaagtctcaaaggtcttgtatttttttctacaagcctccaatatcttgggaccagatgaacagattattatgctcaatattcattatgttcaggtccagttatggtaggaattagttaactgatgtggtgcgaagttgctgcctttttatattggggcatttttcagcctttcccaaaatgatttaaccaattgagccggtgaagtggaatttagacaatggcctggggacatgtttttagtttttgtgtttttgttcagtggtggcccatcattgtagtcatgctcaactttttatacatttttaagtagcattgttctctatacattttctgattaggtatatttgtatttcagggctggaacatttaattgccaaaaatgaggatgaatacgtacagttagcactgcagctggcttcagatgttacagcactatcaaatttgaggatgagtctacgagatcttatgtcgaagtctcctgtgtgtgatggaccgaactttgctcgtggccttgaatcaacatacagggatatgtggcgcaggtactgtaaaggtgatgtgccatcttcaagacaaataaaaatgctacaacaggaggttttttctgaagaaacagttactaaattctcgaatgaaagctctactggttctattaagagtaacggtttcaatatggctccagcatcaggacctaatattttcagttgtgaagaaaatggaaccatatcaaagcttaccggaacctgaatctgattgttaacgtgagattggtctgatttggactttgtaatagccttgttgaatatggctcattctacagcaactgaagcatgtggatggaggatcaatggtgttgatttccttgttctatataacattttttcttcagtaaacaatggtggtgttcaggaggaagctgatcttccggttacttgagaaagagttaagagaacagaagattggaaaagacttgatgctgagttgatatttggatagctgattttttttactgaactctagtaggattgtggtttgtaaatcattagattttttttgtcttttaagctttgattattatatttttggtgaaatgatataattttagaaattacccacagtgtgttaggtattactattatcatttgtgagatgtagtcgtttctttagtttgattaagttctcagaatgaaatcttaccatttaccttttagatactattattatcttttacattgtattcagttttattgctatttatcatgtctcaaaatcatgccgttgaaatttgaaaggaaaaaagaaagaaaaaatctccaacagagttcataacatattttaatttaatgaaacagagggtcatggggataaatttcccttttcctatattaacacaatactacgactaagaactaaaaagcaaacacattacaaggtttttaacataaaacaaaattgttcaaggaacagaacccagaagctggaatgtttcagaagcaggtaatgaaggttgataacagttacatgtccctaatctttgactgacgtccttagaatctttacttcttgaacgggtctgaaatgtttaagaaaaaaacacaactagttcgttagatcatattacaattggttttctgtgaaaaatgaactagtcacgagtactacaagaattataaattaaatttctctgcaacttatggggtaattgggttatgaatacttatcttttcaccaaaaaacatgaacatagaaatatcacaaaaataatagaagtggtagcttctttcacaaaactactctcatgttctcatgtgattttatcttgaaacaatattaaggaagtggcagcttcggttatggtcaaaactaatctgactatgggcgaaacttgtttttttgaattaatttagaccaaaatagtagaaaataggtgattggaagcaatttatatgaacactagatttttgtggcatctatgagaacgttaaagatctttggtggaaagcatgatttttttacgattatatcactttatagcaaaacattaaatccaaatcaaactcaataggagtatgagagaaaacatacctatcagtattatcagtttggacacttccaagtcttttgatgatttccatccctttacatactcttccaaatattgtgtgttttcctgaaagatgcagcaatattggataactcattagaagcaatgtagcatgatatattcttctggtaaaaatctgtagtcatgaagaccaattagaaaagcaaattgaaaaccgctggtttttgtttatattttcggccatgacttcaaaaactatttcctgtgggcactctacaatactacttgaatctcaaataatgtaaaatttttatagctttgaaaataactaacttctgaagctcctcattgttgcaaaatgttaatagctttgaaaataatgacagtaagactttgctccatccaaattcgcggactactagcagattcaaaatgttttaaaaaataaaaagcctacttttttcatttcaacttagttgtagtacacaacaaaacattgcaaaatatgatcagtttggaaattcacaaatcatggtcatcagtatttagttcaaagacaaacatcatgaccacacaacaaaaagtgtaaaagatgcatgttgaaccagccaaacacaaaaaaagtcgatatgtttcatttcatcaattatccaaaatatattcattagataaatctgtaagtaacaagatagaaacaaattaccatccaaagaagggcaaggagcaagtgtaatgaagaattgacttccattagtattgggaccagcattagccatggataaaattccagctccagtatgcttcagctcaggttttatttcatcctcaaactttgaactgaaattgcagtgataaatccatacaaaagaaacaagagttaacaaacctgcataaatcaaaaaccccaaaagaaatacccacatcccataatgatagcacaaagatcatccatagcataagaaattgataaagaatatcaaccacagtagtaaaatgcattacccataaatagattccccacctcttcctgttcccgtgggatccccaccttgcactataaaatcctaccaaatacaagtcaacaaacaggctccgtaagcacaaaatctcactaagaaaatccctaatttactaagcatatatatatatacatataagagaaaagaaaaaaaaaccttgataattcggtggaatttgacattgtcgtaatagcctctacgagaaagctcaaggaagtttctgcaagttctgggggaatgtttgtaatagagctacataaaccaaaattgaaactgacattgttatataatgattttgagggaaaggtaaggaggcattggtgtgtttagtttaggtatgttgtattttgtgatgaaccaaaccaagtgaaaagcattaatttacctcgattgtgaaagcacccattgaagtctcgagagtgacctctggagctcctccttctgcacttgcccacatctttttttggcacaaagaacagaaagaagaagaaagaagaagaagaagaagaaagaccaaccgagccgagctaatgccttatgctctctctctctct

SEQ ID NO: 22928 - DNA, 5900 bp, Cannabis sativa
aaaattgcttgagagaaaaggaaaactttttataactcagtttttttatttatgtttggttgacaaaattgttgtttatagattcaaattcttaaccttacttttatatattatgtctcttctaggtttcaggtaagtataatatgggttattcaggaaaatacaatgggccttaaatcactcccttggcaaacacctttataggtccaatgggtttgatttttgttatttttatttcattcaataaaacttttctatcttttttctaaactactattttcctgttctaattatttaaatgctaattttatctatttaataattataaataattatcaaccaaaattactatttaaatatatttattaattaggctcacaaagtatcttaattaataaataaaaccctctctgttgacattcgatttgctcaactgacagcggagccttatttattattgacaatcaccacgtgtaaattataaaagcaaataatgaagttgacacgtcaatttatagaggtccggcctccttatttactgagaaatgacctactctcctttttattgtattaattttggagataataccacacagattacatgcttttaccttataatttctagctatggctctctttgaatgttataatggtgagaaactaatttattatatattctgaacaagtgagatgggaaaatagacttagtgtctaatgactgaggaatagcgtgtgagagagaaagtatgagagtgctctagggcttgagggacataaaattcagcccccctttcactttgccctaatgccctttatatagtttagggcttacaaaagatccatatttaaataagttaatctctctcaaaaatagggaaaatactcttttatcatgtatttatgatacaaaaataaccaattattatccctaaaaagataggaagataatctgaggttgaatccctacttttgtgggttgttggagctgtctcgtaactgaaattaagttgcgatccatccaaaaagatagtcgtggaccccaccattcaatcgagcttcctttgatgctctttatttgtgctggatggccttgcctttgcttgagacgtgctcggcacatatgctccattggtcagccaaggtatatatggtccgactagacctccttggttggccatttccttcaacttggtcttactcgattacttggaacccttgttgattgatgtgttaatacatgatgactttgcttattctattgacatgctgtattccatgtggacatgccacatcatgtgggaaaaaattgggataatatttgtcccccaagtccctgtgcggacgtctgtacagatatggacttttcaactccaactctagctgctaaaaccttaattgggtagcaatggtcggtcatatatttggcctttcaaatgacccactttatgacaaaaaataattttattggcgatcattatgtagttattattttttttttctttttttgctacatattttcccacttacgaacctttggtcttctgcatagctattcttgtggagaagttatcacccactaagttttcggggaaaaggtgtatcagaatctatataaggttcattttgattaactttttatttcacttcaacatctctctctccttcaaattttcttcaagaagaagaagactctctatttccacattgcactcgatgccccaagctcctcattccctgaggtttttgcttctttcaacgatccaaacatcctaggagcatccatagtggacttcatcagtgggtaagtcttcaaatctcattttctcactgttttcttgaatctgccattgatgactttaagttttttttaagctttttgaaatttttaattctcacgttatagtgtagtctttttcacattataatatgcatgataactttaagatgtataatgtatgacttcttgatgaaaaatattatgttttgagcttcgtttagattcttgactctttaagtcacgaagaacacaaataaaactattagcatttttgaaaaataggattttgatccttaggaacccttggccggcacacaaggtttgtttatgaccctcgccggcacatacttttggcctaagaacctggccagctcatgcatttgttttaggaacctggccagttcatggccagttcatggcttcaagcatgagaacttggccagttcacagtcttgtcctggaccctggctggcacatggctttagacccaataacttggccagttttggccttaatgttgaatattcatggctttttatgcctattttgcctttatccattacttgattcccataagaactctgtatggcataggtctagtctatcttggccaattagcagcctaaactcaatgttgtttgatttcttgcacctagatcttgtactttgctgattaacaactttgtacattgactagtacccttaggtttagttgactcttatcttgtctaagtctctttattttgtccagttgctcacctccctctgcctttttttgtacatagatgaacccgcatgacttttggggaggtgacaaccgaatcgataaagacttacttagtcttctcttggaagaccatcgtccagctccttcagctagttcttcttcctgggattctttgggtagcccctctcctgaaactaaggtccaacaccatcaaattcgaagtgaataagcgatgaattttacggtcagttcatttgggaactgaagtaggggtggaggcaattcctccccatgataatgctaatcccaacatactgttcaacaaacttaataacattaatacgtgaaaaaagtattttttttatctctgcttaaaaaagagtaattaaagctttgtaaaaaatagctttttttttttccaattgcatttcatattattcagcaaacttaataacattaatacaaactgaaatcaacaattttatggcgtaggtataagagagcaagagcttcaatcatctttttgttttatgaaatgcaattagaaaataaagagagataaaagatttaaggtgtatttaattaattaaaattactttttccatttctctgtcccataaataaaattaggaaaaatagaaaatgggggagatggagatgtgatctgggatgatggtgatgaaaaatagaaaaatagaaaaatagaaaaaattgggaaaatatgtgatatgcgatgatgatgatgaaaaattatttttttttcaaaatataaggttaattttggttgcaggttaatttgttcaataaccaataacaattttaaatttttctattggggtcaattctttgttttttttttgaaaatgaaaatttaatatgcatacatacaatgttaaacaatgtaaactctcaaaagtcatataaatgagtagttaaaaaaatatatgtataacttaagaataaaacaatagtcatcaccatagaattattctttatatatatgaaatattttttaatgagtattacatggttactaaaactaattgtaaatttcaattttagaaatattttttgtttttttgtaagaatcaattttagaaatattaaatgattagattttgatctaatcaccaataataaaagagaaatttactcttccctcgtatgatatgtcggtctttcttctccctgttgatacatgcaacaaacttgaagggatgatgtccaagttttggtagcgttctgatagttcaaagtcgcatggtgtccattggaagagttggcagaatttaacaaagcataagcattttggtggtatgggcattcgagatttaagagattttaatctctctatgttgggtaagcaagcttggcagttggttgtgaatgagtcttctcttgtaagtcgtttatacaaggctcggtattttccccgaggttctttcttcaatgctgaacttggtaacaatccaagttttatttggaaaagtattcttgaaactcagaagttaattttgtctagggttcggtgcaacatagggcctggtacttcaattaatattcagcgggatccttggtttcctgacgcattcaatccctttgtgacgtctcatttggtggggttagatgattgtcaagttgctagtctgatggaggttaatgatagatgctgggacttggatgtgttgaatgatctgttcaatacccgtgatcgagaactgatttgtaaactccctatctcttcggcttcttctgatttatggtattggtctttcaattcttctggtgtgtacaaagttaaaaatgcctataactttttacataagaaagatggtttacaccttttagctgatgagaagagactgtggaagatagcttggaacattaatgtccctccaaggtgttgcacttcttgtggcgttctctctctgaaactcttcccacgaaggttcagctggtgtcgaggcatgtcccgcttgatctgaactttcccatgtacaattttgaggaggaatcaattgtgcacttgctgatagaatgctcttttgctcaaagttattggagtagatcatctttaagtgcggctgttttattgggaggtaagttctcaaattggtttgagttgtgtgttctgccttctaatgccgatgttagagaggaagcggtcatgatttgttgggccatttggaatgcacgtaatgcattcacctagaaaggtaagagcacttcggcttcagatgtaattttttctgctagaggtaaccttaatcaatggaaaaatgctctaatgaaaaagaagggtcctttgtttttggcttcgggtgagaatgaaggaagggagcaatggtctaaatcggttaataataagattaaggtcaatgtggatggagctatattcgattcgaaaggctggtatgtgactggtatgatggctcacagctatcatggccatcttgtcgaagctttttcttgtagcaaactgggctttttagaggctgctgtggtggaggtgataggcattaaggaggctcttagttggatcgaagataagcagtggaagtgcaactggaaaccgattgccttcttactgtccaagccttacattcttcggttctattgcgttctccctttcgcgtggtaattcaagagtgtaaggagttgcttgcttatttaaaatttgttcagattcaatttgttaaacgttgatctgctaacaaggctacccattatatggctcgtagctcttgttttcatttagttcgtatgttcaccgagagtaatgctgcggaggatcttttgaatattgtattggttgatgcaatttgctaataaaatgtcactattttatctaaaaaaaaaaaaaaaagagagaaatttaaatttgatttagcaacttaattaaaaaatataaaaatgcacatttatttacactatcaaaaaaaaatatgtttatataaaaaaatttaatataaattcaacttttttcatctatttttctttttgctgaatattttatttttatttctctctgctgattgaataatccaagcttgtaaaaaatcagaatttttttattaaataaataataaaattaagtacaaaaactcaaacttttctaataatatggaatgcacccacatatatataaatatataataattatttaagatatacttctgtatattaaaaccatcattaaaattaaaatataaaattgagtagtcagcatagccaaattctaattcggacatctaaagagaattgtgaaactactagatttactcatcatcaccactcgattttgtaaagaactatatcccaaacaactatcatatatatatatatatatatatatatattctatataaagtttgcctatataactgaaattcttgg

SEQ ID NO: 22929 - DNA, 2540 bp, Cannabis sativa
  modified_base (2507)..(2514): a, c, t, g, unknown or other
aaattggagatatagaatctaagattgagatatatatttgagaataacagtagtgacgagtacgagtgagcgacgatgatcgatgacaaagaatacgatacggtggtgataacaaattaaatatggtgatgaaagcggataagatacagtaatgaaaacagatgagatacaataaaatacattataggaacaccttaattttttttttctacaccactctatttatttaattttataacaaaattttttaatataataagtagttattttttattataatactaaaaaaattcaatttatcgcgcgaaaagtagctatattaactagttgaataatattaggttttattttattggtaatattattctatatatactatcaaaacaaccctcaataaaatgtaaatggaacaattatggcctcaattaagccttacaaaaaaggttcgatacatgtatgagcctcatcaagtagttaatttgcccaaaaaagtatatgatactatgagcctcactatgcctcatcaaaaaagcgtcataataatactatggggagccatattacattattggccaaaaagcagccctaattatagcatagggattttttttttccatctattctagatgacatatttgtcaaccggcaaacaaattcacatccttattaggattgattatatagatatatactgtcaagtcattattgcacatataatatatatgctgatcacttatacacgtatatataatacacacgcaaacccaagaaaaaataattatagcaactgccgactactcctgtagggatagcggccaataattattatgtgtctctctttattaagatatatatattttattgattatagttagaaaccttgggaggcctactttatcaccggtgtcttgaacatccttttggatttgacttttgtactctctaaaagtaaagtccctataaagtgagctttgtctgtcgctgcaactctctattcttgcatcgttgttagggcagtaaaaatatgcagccgaaaatctttcacttctaccactgcttgccaccaccctgtgccttatgcttttgtaaaccccattactcaaggcctatatattgatatatatataaatatatgtatagatcatcagatttctatatttctatatgtatatgtaaaaattagtcagttatatataagtaaagaagctataggctggtgctgcatatacatctgcctgccaaaagggaaaatgtgttgtgtggtaagtatgataagtcttcaagagttttttatttccttatttcattcgtttgaaaggagagtatcaatagacaatctctatacatattagtaggctttcattttgagaaattaagaattagctgtacgtatacctgaaataagtcgccaatattgataacaagggctcttggattaggtttaaccgcaacccatctttcatctttaaataactgtaggcctccaacatcgtcttgggagacaacagagaggaaatcactatcagtatgagggacgaggccaaacagttggagattggaagagtatggacatggcggatatctgttgagccgaacatagcttgagtttggaggacagttctcttcgaaatagctgcaactcacccccaaattccctgctagaattccagctaagtttttagctaaactgaatgctttatttccaaattcttcaatcgctaatctacaaaaatacaaaatgtatggtctgtcttaaaccgccaaacataactaatattaaacacacgtacgtacacaatatttgtatttgtaacgtaacacattgtattcaacacgtacgtgtactatatagagaaatgctaagggatcttcaagtgacaaatatcataaaaaaagtgtcgtattattataatatggagtgttacatatttttatttaataaataacttaggataccgctaactaattgaaaaccacaacatcagcgtgggcttattagccaccaaaataacaatatacgtttacgtatggatacatataaatatatcacacaaagtggggcggagtaattgaatgtgtgaactaatttgatttagtgtacaataattttataaataaaatacatatataaattataaagagtagtaatatacggaggcccaactaaacagttaagctcctgtcaagcgcaggagctccacagagatgggggacggggctctgtttgttcacgtgggcatgggagacgaggctttatttgttcacgtgggcacactgtggaagccccgtggtgcctcgctggaattctcgtgccactttttgcctttttgaatatcctagtttttatttatgactggaatgagagtattttttttatcaatattgcaaagttttgatatcatcctatttttattttataggtaaaaaaataaaatttgaccgtaatttatacgaaatattttaaatatatgatttattaagattttatttatatctttatatattannnnnnnntatctaacggcatttcttggtttaac

SEQ ID NO: 22930 - DNA, 4588 bp, Cannabis sativa
  modified_base (2977)..(2978): a, c, t, g, unknown or other
  modified_base (3031)..(3042): a, c, t, g, unknown or other
  modified_base (4385)..(4392): a, c, t, g, unknown or other
  modified_base (4475)..(4489): a, c, t, g, unknown or other
ttttataatatattggatattatatttagtattatttcaatttttaatatcaatttaatttaaaaattaatttgtaaataatttttttttttaaaaaaaaaacattttaccagcgagtaacatgcgccggcaaaagtattatataaataaaaaaataaaaaaaccttttcccgacacatggatcgccggcgtagagaaatttaaaattaaatttaattttttaacttacgttttgccgacacgtaaacgcgccagcaaaaaacaggcgccaaatgccctggttcgcgccaaaacctttgccggcgcagtacatcgctggcaaaacatcgtcagagacacatcagctggcagatttattgctggcgattacgttataccggcaaataaatgcactggtgtaaatacttttaccggcgcaggtcttgacgtcgccggcaaaaggtcattcgccgacaagctattgccggcaacatttgccggcgacaattggcaatggcaaacatctgccggcgcgttacacatacttttgccggcgagcttatgcgccggaaaaagtggcttttcttgtagtggtatcgacaacaccttgccggacagtatatgtctagttggatggaagataacatccccatcctttcttcaattcccaaatgaagtggtcgtacccttctcttgcgatctgctcggagtaagagtgatgttgcactacaaatttttgagtaggagaacgatcaccactcacctcccaatcttcaaagctcgagttagaaagtccgtcactcgaagacgacggactagcacgaagacgaggttggtcctcgtacagaagttggagcaaatcctagtcaattcggtgttcaccttctcaaaactcacagttcatctacaaaagacaacacatgagattagtgtttggtcgggatatcgaacaataaacaggaaaaagcactgaccaggacaacccaacaagattaaaaggacaaaaaacgcacaaaaaattaagtcaaaatccagaattttaaaatttttgggttaagggttaaatttcacaaagcttcaagtgagcaaggtgaaagtcgaacaatgcgagattaaaggcagaatgtcgtaaacgacgaagttgtacaaaatattacagagaaaactacaaagtttcgaacctagattttctgtctatcttctacaacaagtcaagaataatggcattttctacgatggaaacccataaattaaacatacaaagtaaaagaggaaagtaaaagaggagaagattgaaaacttactcactgtttgaagcctaaacgtagtccagacaaagctgctcaaatgtctctgatagaaatctcacaacagatttgaagaaaattcctttttgctctgagtgtgtttggtggagaaagtgatgaaagtaaaattttgaaggagttccagctttatttataggcatgctggtgaaaagaggtaatcatttcaaatatcctcaaacgcttcgattttcccccaaaagtaaatattgggaaattaaaaaccatcaagtgcaaccgtcaaaatgtgccaagaggaccgtgtttcgatgcattaattaagtcataacattaattagccgaaacccaaagagacgcctggtcagactcacatcgaatcacgaacagacgcacccaatatgtgtcacccattcaaaggtaaaggcaactcggatgaagtctccacgcaactttaaaagtcctgtgcagacttgggcgacaaatgttattccaatttttgtactctgatgtggcatcacaaactagtcacacgtggaatcgactccccatatctgcctgaaggatatattccgaacagaacaccacatatacctgcacggacgaagtcctcctagccgagcagtggacaatccaaacaacatatcaacacttagcaacttcagcacttgcatcgtgaatcataaaagcaattcctataaatctaggatcatatcacagagatatggtaagctgtccaaatccctcaatcagtgtattctatatatttaatgtgtaatcttaccaattatagacattgtaaccaaaagggaaaccttccctcaagtacataaatagtgatctattctcactgggcaaggggtcgcaaaattatctattaaagtatactcagagatatcattgtatgaactttaagagaagaatctttgtattctttgttcttaagtcaatacaatctaaggggagtaggctattaccgaactgctcgggctgaaccactttaaatgctctgtgttctttatttatcttatcgtattatatctataccatatcacttattgcttactattaagactcattgtcgttggcaaaaactgcggtcaatatgtatttattaaatatttgattagtattattaatgtttatcatgctattattaatcgagtatatttattatgataataaatataatttgtttattaagaagttctaacaattttaaaaatgaatcatttaagtttatttatttatttaaataagttttttgtttattaaaaggtcataaacaattctgaaatgtaacattgatgcttattaattattaaaaaatgtatttaagaaaataaacgaaattataattaaatgtgaccttatgataaagactatatttatattattattaataatatttattaattattaatttaatatatttgttatgataatgtttcatatatatatatttttttacaagatttgcgatgatatgcacgtataatgtgtttattaatttttatatacaaatttaaaaataaaatatttatcattcattttttatatatgtttatgtgtctattattttttatttatttattttttatatatgcaatagaggtttttttatttttacatttcaaaataatttttttttgcatttttccgaaattctacacagaaacccctattgcaactagcgctgcaacctaaattacaannaaaaatcgtatagaaactcctattgcaactagtgctgcaaccactttagaaannnnnnnnnnnnatttgaaaaaaaaaaaaaagtttaaaaaaaactatatggggtaatttctctaaaatatatttctcataattaataaattgtaaataaatttttatgcacatatattgtaattaagtactataaagtatataaagttataattttttctttttttatgtaaaatatatttttttgggtgaattatattattattattaatagaatattattatttggcaccttagagatatgacacttaataattagttaggagtttactatattattcaccaaattaaaatttgtaagacttaatattgaatgcactagtaacggtatgccaccatttatggtatttagcacttccttaggcatttttcttataattctttttttgttaattttattgagctaaaaaaaataagtcaatattatatttgatcaaaattttataatagtgctcttaacgcatttaaggtagaattaatccattttttatagatagatataaaaaataaacaaaaaacattaaattcttattaaaagtatatgaaattctattaaatatataaataaaatgtaaaatatatttaattatattaataaatggtaaaagagtaaataaaaatgtaaaatttattgcatataaaatttggtccagcatatattttgtgcaaaaattttcacaaattttagcatgtgctaaatttttatacaccaacattggagttcacatttatgaaaattgtctaaaatatgcatatatgtacaccatacttttaactatctattgaaaatgttcttaatcagaatttatacacatattcttatttattttaattagaattttaacatattttttttaattgtacataactttataagctttattttttttttgtaccgtttgttcaccgcttatatgagatttttctatagtttatttttgttaattattattttatttttcttataaactttacttattagcatgtaatagtagagcaaatcacatgagatgatatttaaattgttagagattttataacaatggaagaaaatcaagatattacaactctattgcaatataatacaatgactaacaaagagattaaataaatgttacaacacataatatataatatatatacactatatatattatatatataagaaaggtagaagaaataagaagattacacaatattatataacacatatatatcatatgaagaaatatacatatactcacaaccttgagtatagattagtgaggatcaacatgacttgaacaaggtattacacttttgtccaaaagcttatttctccctatctctatgcactaagggaactctctaggaaannnnnnnnggaattatcaagccttagggatttctagcaatgtgctttcttgataggaaacttcatcgctcactctcaaatgagcaccaaannnnnnnnnnnnnnntgtataggtgatcacttagaattcaaaatacacaacactcatttctctcatataaatgagtattaatatagtttgtaacaactatatttcataacattt

SEQ ID NO: 22931 - DNA, 4568 bp, Cannabis sativa
cagcacgtccctgtcctccattgattgtgtcaacaggtgttgttccattacctgggagtggaacgttctttgttccgacattgaaagaacctgtgttgttatctcaattcgtctggtttccagccattatgattttcctccgaaatcaatagtaaaattgcttccacagatggcgccaaatgttgttggaggaatttagacaacaccaaataaaaatataaacaaaagtatgtgattactccacctagaatggcgagtattcaaactatggacactcagacgtactgaaaaatataaataacacaaaagaagtataatggttcagtcaaatcacggtctgcttagtccactgttgcaagggttttctgtcttgttcatttcatattggatcactcctttatatacaaagcaagtgcctttgattagacaaaacttgatttaattatgaatccatttttacattgaatatcaatatttaaatcaatagaaacgtaaatataataaataaagaacagtttcggcccaatttactaattatagcaacatatgtgacctcggtggtgcgagttgtgtgttcatattcttacataagctcacgggcttaatatgcgtataagactaaacgagtcttacgtgtttcagatatctacatcctatttaagtcacgtgtatggatatcttgtaaaaagttgataacttgggacatgctagtccttatcgggttatcgagcatgttaggtcatccgaaccggctcgctgagtaaagaatcgatctttactaactcgcaggaaaacctttatggtcatcgcatatatcttggtatatgcgagtcttaaatctagtcttcggtcatgcatcgtgcgaggcataataatgcgattagactctgtcggggtcacattatctcgctgagtctggttcaggcgaggttcgtactcaagtggtctccttttgacagcttagccctcctcgaggacagtgaatccacgtgtcatatttatgggagtatggtctcgagtttctaggtgaaaaattcacactataacagtgctagctggacttgcagatgtatcccatgagctatcatcaagcattaggatagtaactgtaggtaccattagtgtggcacgcatgcgacactttcaatgtatttgttggtgacacacgcgccaagaggcttgttccttaggggaagttgcaatgatggcaggacgattgaggtgacctctcctttaatacgtacgagacacgagacgtgaaatgatgaatattaaacgtttgggttgtgcattaaatgtaatctttttgacttcccatctgtcggataaaaagatgccttttggaagaggtgatctgggtcgtctatttcaaactgcaatggttacaactggagtataaataggtttcaagaacccatttccccttttttcatcatcttcaacctttagaagccctcttgcaatttttgaatcagagcctttattttccaaacactctcgccttaccgttacctttaataatgaatacaagaggatctcgactgtcttgtccagtacctccttaaccttcattcattttgtttctcaaatggtgaacccataaatccagacctatttcatccttaacctcacaagaacttcaatatttaagccggctacaaccacgtgatcgactgggttcaacactagtgggaggatttgcacaaaaacgttccattctccatccaaacatcaagtaagttccttgatgctctgttgaatttatgctatttcatatctaagatataaatactaagtttaagctatgtctagaacatactgcacatttgaatggtcaactgttacccatagaagtgtattccaaggattgggttgtgtgcgaatctcctatgccatgggtgtccgtatcgcgtggcaagttagggtgctagacgatccttggctgccacgatcacacacgttcataatttatgataaacatttcattcttgatcaaatgagggttgttgacttaaagcttgctaatggctcatgagatgttgatttcattaaagcattaataaagacaacacagagctaatcttgactataaccagtggtgactgggcgtttgaagataatgtcatgtggccttttagtaaaaatagtgaataattggttagaagtggatataaaacaattgttgcgatgagagaggaatcagtctagtctaatactttgaaaacaaaggcctggtggaaatccttgtggcaccaaaagatctcccctaaagtaaagcattttgtttagaaagtttgtcacaattggctccatacatatcatgctttttagtgagaagggaaagacctacttatccgtactgaagtcattgctcaatggaaaagaaaaaggatgttggtcatgtactgtggggttacttacagatctattattctggtttggaaataatgtggattatgggatcaattccattgatagcgtaccaagagtatcatcaaatttctgagtcatttggctgaggtatggtctttaacaacttttaattattttcttgtggtggcttagaatctctagaatgtctgtaacagtgtgaattgtggggaaactaagcctagagcctcagatatggtggagtggtgtagtcaatttctccaagaataccaagatgcagatggtgttggagacagacaaaaatctaaccagcgggagaaggctagatggaaccgacctgatattgactgctgcaaaattaatgtagatgttggagttaaggttcaggaaaggtatgtggctgctagtaatgttgtcagagaacataatggtgaagttctttttgctgctattaatattttgaaccaaccaatgaatccactaacaactgaaataagcgttattcgagaaagcctaaggtttggtattcaatgggggattccatcagtttatggttgaaacaaattgtcaataagcgatacatttgatcaatgacaaagaagactaatgcaaggaggtgaagagagtggttcttaagatttaaagtttgttcaatcacgatcaagtatttggtttgttttttatttttaggaaagccagtcaagtgtctcgccaatcaagctttgttatctaaagttagtgctatgttgattggagttgcactccgtatgttcgtcaaactcttcagtttgacgagttttttcttttgtaatattttgaattaattgaattccatttcaaaaaacaagtatattatatttgtataaataaagataaatggcaacatgtgtaattattaattatttatttttcatcctcgttttgtcacccataattaatattttagtaactagtgacaattatatagttagttttaccttgaccacattagaaaaagactaatacaaaattacttttcaatacgtggaaatgaaataaattattaaagaaatgtaagcaaataaataaggaattagaatcagaattaatatttataatgtaaaaatagaattataataattttattttgtttacttcatgagtaaaccaaatcataatatgtaaattgattaatttttttttttgattaaaatataatataagatacttattttgtaagatttattttataagaaaaaattatctttaatattaaaaaagattaaatagccaaatttcttaatggcattcttggagggagaaatatttacattcttttatccattatccattttccattttccatttgttagccaaattctgtcgttagtaaataatagaatagaaattactccaagttgaacaaaatagaagtgaatgatgatacacatacaaattaataaataaataaattttggaatgaaattgattgtcccaaaggaaaagtgaatcaatttaaaccaaacaacccaacaaagccgagtgtgaacacaagtgttgaatcattacttggcgaataatttgcatccctacaaaactgacagttggccaactaaagccttgatatgtgtaatgtaagattggaatgatatttaaaattaagaaatggtaatgggcacactggtgtgtagcacatttttatgtgttaatatcattattggtttaattaagtatcaggtcttatatagtttaatataataccttttaagaagtatcgctagtcaatcgcaatgcgacatgtcgagtggttccactaatgcctaataccaatgctctttaaaatttgagaaatactaaaacatatcaatagtgtcaaatatcatcttaggtatcaataacaatattaatgtaattaaatattgaatatctctctcaaaaaaaaaatatttagtatcgagtctcatataattttaaataataaattttaaaaaatttcgctaactaattacaaactgatacctctaaataatactgcaatcacaatcctcttcaaacacaacatcaatcatctttatgcatattagattatgaaatgtaggagcagtggcggaaccagacgacaaaataaggaggggccaaataaaatgtattttcacctaatttttttagtatgtagtattttataaatcaatataaga

SEQ ID NO: 22932 - DNA, 2949 bp, Cannabis sativa
ctcttcaaattttaacagattcaaggtagatttaaagttgttcttggtcatttaagtgtagtgtatcggaaattagggataaacttaataattgggcacccaaaaaaaattggactactgtaacagaagaacaaccgtgtatggtttttctatagttattttactattgtttttggaatgatataatgttaatttattgaaattctatcaaaatgttatagggtatgaaatctatagcagtacttttgaagagcaatggtcgatattgggaagaaggaaaaaattatatcgattacgaggctagtggagaatcataccaaagaattgcaagtacgaataattcgtacagattctcctctcttcattggcgtgcgaactcacaaaaacaaccatacaaattcagtaccaagcaaaagatggaataccaccaattaaaatattcaatgatgcgagcctcttcttttacttgcaactaaagatcaaaaaaactgatttcaccacatatacattgtgcgtcaacacacaaaacaacatcacaacaactgctgcaatacctatatttgaatcaagagcaacacaagttcaacaaaatgtgggaatacttaagaacaacgtgccaataatcgaatcatacacactggaacaactagctgaagaagaaggagacactgaaacagacgaatgtgacaacaaccaattcaacatagttgactatgcaaatcttattgctgcagaaatggtagaaaaattagaatgcaactgtaaaaaaaaaaactgatccagacatcaataatgcaaagctctttaaagataaattccaccctgaagttgaaaaaagacaggcatacaaggacaaagaaacactcaagagggtcttgagctactacacaatcaaaagcttccaattcaaggcatggaagtcgtgctcttaagaataaacagtctaaagtgtgtttatgaaagttgtaataggtctctacgagcataaaaaaatgggccaacaattacattcataatcatcagattttcgaacatccacacatgcccaataaatattagatatgaagaccaaagacaagcaacaacaaatttataagagtgcatcaaacttaagtttcagaacataaagacaaaagcaacactactaaatatcaaaggagaattgaaacacaggtacggaatcatgttgaactacatgaaagcttggagaagtaaagagcacgatgtaaatgacttaagaggaaatgttaaggaatcatatagcctgataccaagtttcttgcacacggtgtaaaaaaacaatcctggatcagttctcgatttgaaaatagcagaagataacggtttattgttttcttttatggctttggatactttgataaaagggtagaaaccatgaagaccgataatagtcgccaatggtacgttcctaaaagcaacttacaaaggaacattgctgtctacatgcacacaagatgcaacatgtcacttatttctgcttgcattatgtgtccccgataccgaaaatgacaaatcttggaaatgattttttaaaaaattaaaagaagcatatggcatcagagaaaaataatgtctaatttcagacaaaattgagagcctgatcaaagcagcaagataaatatacctaaaaattacatacgcatactggggatatcacctattgaacaacattataacaaccttcaaaacacatgctgcaaagtacaacctgccattctttggagcgacaaaagcgtacatagaaagacaatttgagtaccacatagcagaactagatgacttggacaaacgcataagaccatacttgaaaaaatttgattatgagaaatggttaaggattcacagcaaaaataagaggtgttccaccatgacctcaaacatagcaaaatgactaaactcaaaaaatttagcagcaagggagcttccaattacaacacaattggaatgcttaagagcattagtgaaacaatgaacacataataataggacaaaatcacaaaatgcatttactatattagcaccacctggagatgaggtgctattgaaaaactacacatactcattgaacctggatgtgagatctagattttgtacttcaaattgttaaacataatcatattatggtttttctagcagttttgtagggttgtcccactattgttctttatgtttaataaaatgttagtttcaaattacataggttaaatcaatcactgaatatttatttgaggtaaccagatttaaagaatcatagatagtagacctcaaagagagaacatgcacgtgcaactgattccaaatcgatgaaatgtcatgtggacatattgtggttgtgttgaaggagatgaacatagacacatacaagcactgctcagattacttgtcatatcataagattagtaaatgtattagcaatcctaattaaattaattaggtataaataagtagttatattattatataattaattatgtgaaactatttgagatttatcatatttaagacttcatttatgagttaggatcatttttgtaattttggctcaagaagagtaaaatcgtaattttttttatatattgtgctagtggactatattattatatagtatattcatattgtcttattacaggtggtttttgataagttagcacggtatagtcacgatcaggtattttgactttattttgactcgaactaggttcagggtccagaaattatgagttatgtgctaagggcaataacatgaaatgtgtatataattatttggaataaatatataaatgtggatgcaaattgattaaactgtccttaattgctatttacattgattttgagctttagaggcaaaatggtcatttgattaatttttaccaaattgaattaagtcaatttggctaagtgtttaatggacgaaaacccattttcttg

SEQ ID NO: 22933 - DNA, 2953 bp, Cannabis sativa
  modified_base (2926)..(2927): a, c, t, g, unknown or other
tgggttctcattgctttggttggccagagcatcgatgttgacttgccttggattcttctttgttttttggggccttaaaaattattcacttatttatgaaaaattttatgcatttaaaagttcatatactgtagtgattatgcattttttttgttatcaatattgtattagaattttgaaatactatgatgatttatgaaatatatatttaagtaattttgttatcttaaattagatttttgacatttcaaatacaaaagaattaagtttactaaactttagagtcccatgtagaccaattgtattgtaccatgtaggccgatcggaatgggccacgtggacaaaccggtgtataccacatggactcattcttagatgtcatgtttcatttgccaatgacatgtaaaccaatcttcaaatgccaagtggctctattattgtatgtcatgtgtgccactatggtagccatgtcagctataatatgatagaacatgtcatgccacctaagatgacatgtcatcatccacatcacatgaagacttgtcgtctctttcacaatttagtgggatccacaacttattttacctacaaatattaatgtgtagatgatgactctttccccatgaatatttaactaccaagatttaccaattagttatttgtaagtaaacatcatttcctaccaataatgatggcttacctacaaatcttattggtaggtgaataacctttttttcttgaagtgaagcccttctactgatagaaagggagtctgaaaaaaatgaggtaagtaaaaggaattaaagaataagggatacaaaatattttacaaagttgataataaccagctgtaggagatcaacacttcttgtcataaggctttagaaattgcccttgttgaacagatctcactcttcttgctgaaaggttttgaaatagcaccaattttgtgtagcgtactgcgagcagggctgcgagccttcaacacctgtgaaaggtggcagggggcaagaaggctctaggaagaccatctcatgttgagaccctgagaatttgacctaatggatagacccccaaggcatatccactggaacttgcagctactagccctgaagaattggctgtaattttttttggctcgatcgaatgcttggttaaagcaagttttttaccagtagtctttttaattttctttgaaactttaaggtttgacctagaagtagcttccactgaggtggtcctcttcttacaactcttggtaggaccaggcggactgcaaggaagatttttaaagtactagtctgcgagacagaaaagaccacatcaaaacttctataaataaaaatataaaggtggtgaggctaaattacccacttaaaatatcaccataatcatcggatgaggaggagctgctataataattactaaattccctaaatctagtaatcatataaatatcaaaagaattaaggagagacatatcccaatttgattagctggccctatcaaagttagttccatactgcctagcaatcccaaagtaagaattattacaacttaattggacgtgatgttcatggtaccaactatcgaatctatgggcgattaggttaatgcagttctaaatgaagaatttatattgactatccttaaactgaactaagtttgttcgattaaccctaagaacagtaggagaccatccacattgactgaaattattacctcgggaggcctcgtctttaggttcctgagtggttatattcctaaggtaatgaatgtgagccacatagtcctgatcttcttcttcttcaggcacgagaacttgctgctaatttgaaaacttgagggttttgcaatcattagtgcactgatctctgttgagaagggcatgcttttaaattattgtcgtgcaacaagaagtttgccgctcgtaggccatagggaagattaagaagaatctcatgtctttccttgatttctggggtggggataggcctcttggtgatcattggaaaaatggcaaaaagaaagaattagttcaagtacaaaaaataataactcaaaacaatgaatttgagagaaattaatacttacatacaattttgaatcttgtggtgttgattggatataaactagtagtccaaaagaattcatccttgaactccttttctttgggcagccttacaatgatcttccaatcactagtatggatcccaagataataggagccccctgctccattcttccttgcaaaacaggctttggcagagtagaaatagagaatttctaggggtattggacactcccattttcaaatatgaaagggattttaaacaggctaaaatcctatatgaatttcgggcaagttgaaatggtgcgattccaaggtagttacagaactctttaaagtaatccttgaggggaagaacttctccaacccttatatgctttacactccaagcacctattttggaaggctcgctagcgcttcaaccttcgtctatatataggttttcaggtgggtaacaactaaattctccctaagcaattgagtggatgtgacattctttctcattccttatacaacatgatcttaaaatgtctccaacataaaggccaatgcatctaaccctggattcgatcaattctgcctcaaaagtgacagaatgattccatggagtcttggatttgcgagccttgtgagccataagttcaaattctagtcatctggtgggaaagtaacaatgattggtagcaaaaatattggcctcgctaaagggataataagtaaactaggccattctagccaagtagcttttttcaaacaacagcatttacccttaatgatttctagcaaaaatcttctatagtggttagaagcttcttcctaattagacctaatgaggttgtaaagcccgcttagttnntttggaaattagcagttatttatgtt

SEQ ID NO: 22934 - DNA, 2829 bp, Cannabis sativa
gtgttttttaataccaaattttttatgctttcatattcataggtacgatataaatcaaagccataatttttaatttctagtgctttctttggattttaagctttaggaatgagatgtatacttttgatatcttagcctaggatgtcaatgcaggtattggatcctattgatgggacacgagggtttctaaaaggaagtgaagccttgtatgtggtatgtgtttctgatttagatgctttaattttttgtaatttgtgcgaaattggctgtgcagtcttgtcaattctacctgatcatagttaatagatttcttttaattagttttacacaattaattattgatttcatgttatttttctcatttttgagaaaatgccctaattttgcaggttggattggctcttgtagttgatggtgagattgccttaggtgttatgggatgccctaactggcagaatgagcaatctaacaaattagggattataatggtttctcatgttggctgtggcacttggacaaaacaatcgccgtttgtgctggatggtacaactggtgtaccttctagttggacaagatgctttgttgatcactgttgcatagttcatgaggcacgcttttgtagtcaagatagtcagtcatgggattctttgccattatctccattattcagtgctacaacggatgttgatagtgttggggaaaatcgagttcttcttataccatcatgctgtggaaggttaattgttattctatgaataagattcagcatcctacttatgcacctcttggctatattatagttgaatactgtcataaataattgggagtttaatttgcatacatatgctccataatcaagtagaaaaccaaatcattagagcttgtgttacccatcaaattatggttattgagttcttgagatgggttttttcatgcaatggccagagtttatagacatatgtccgtcttttaattaacaaactgcccatcttttatatatggcttatatttctctttctctttcttttcttttgttactttttccttttggaagcaaagtaccttaactataacaatagacaacttacctggacgtggtctacgggcaatcataaaggctcgtggcctaggtgcaacggcctccattgcacctaggaggggtgttggcttatggtctccttaactgggagaaccaacgtcataatttgttgtagcgggggccagtgttcacacggtccctaccttaaaaaaataacaatagtcagccagatataggatttaaatatatggagaagaactgatggacatttaaatacatatcagtcctttgtttggatcttggttttaccaaggaaaatatctgagagaaaatagtagagaaaaatattttcctaaaattttatagaacacttcttttcaatgctctttttgagttgtaattttataattgttctaaatttcataaaattatattatatttatttatttattctaaaacatgatttctaacttttttgtttgaatccaaacaaaacaaagtgaaatctttttttattgttattttccctcctaaattcaagatccaaacaaacagctagagtgtttaggaaatcctgtctgtctacaaaatgcctgtttgaacattttcttagttctttcatatgatcaacaatgttgtgctactttcactttgattattgtgctattgacctgttacttttacttttggtgtgggcagcttatgcaagtatctaatggtggcatcaggcagggcttcaattttcattcttcgctcaaaagttgatagaattatcaaggtattaactctgcaatcagtcttcacaagcttctgtagcttgtattaacttaatttatcatgattcatgactacaggcttgggatcacgctgttggcatgatatgtgttcatgaagctggtggaaaggtatctcccctaattaccatttttatcttaaacttgaatttgtgtatttttgtcatttacagttatgactttcatttctatgtgagttttgtagtgagtaacctattacaaagtcaagttgaattgattaaatttagagacttagacttatgtattcctcctagttctatacagttcccaatgtttgccaaaatatttttaaggaagctaggctgttaggtttggactttacctgagaccggtggctattggaggcatataagaaaatacatgccttttttgttcttttttttttttaaaggaaagcatatgtctgcaataaaattctaattaactatggttataagactatcactaataggctaggcatgtacgtacaagtgacatcttattcaagtagataatattgtgagggataataagttgaatgtggacatatatgtcatgaaagatgtcatcactggaatctagccccttcttaagtaacacctccatttaaaaaggataatgaaaataactcagcagaagtaatagacaattaggacagtggtgatgaatgagagagaaagtaggagtgttggcattgtcacttgattaactgatggggatgttttggctttattttgaagcagtgctcatcaatcactgctctaacctctaaatccccttcccctctaataagaggatgtcatatggggataaaaactactgctcaaacgaaaagtttccacatattgctgttaatctgtgggcgaaagtaatctgaggtttcattaaattttttggattcactataatttttttagttttacatattgttttttccttccttacttgatggagtacatagatagggaagaaaagagagcagagaattgcagagtg

SEQ ID NO: 22935 - DNA, 2376 bp, Cannabis sativa
aaaaataatacccacactagattgaatctggttgctctagacatgtgtattcagtgaattgtactggtactaatcgttgattttttatctcaaagtagtacctcttgagagcactacataaacataaaataaagttaatcataaattagtgatgattaaagatggaaaaatagtgctattcatagatctttaaactactaaaatttacatttgaacacatcgttgaatttttggacaaacaagattatttaacaaatctagaaatactacactctactaccccgtttggatgaggacaaccatccaatttttgctaaacatattcaaacaaacttataagattatactaataccaattattgtttatacaaacacagaaaattataaaagcacttactcaaggtgtctgtgaaaataagaaatcaatctgcttatatgttgctcaactgctcaaaagcctagcaacacgctcattaactctcggccatcaatgaccatagttgcatgattaattaatgcatatacatctttcaatctattttttaggtcacgctgcatgacacttgcaaacaataaaaaaattaataacagaaactgtaaaatatatactaagttgattattaactatcatacctgcaccatacatattttcgagtagctttgatcttcctgaggttgtagacatccaatatgtcagtcttttataagtatattttgcgtgctaccataacaccttctcaccaatgctaactttgagggcatttttgtaatgctctatttgtttaggcgcgctaaaatattttttaaattactgtgtcactttttctaatcaaagagtttagtggaaggtttgatttatttaaatttttataaataaaataaactttgcttaaataaacatatcttttacaatttttgggatccggtattttaacttctaaatatttcaaaatacatcataagcaaaagatgtcactcaatgaatgcaaaatctgagcctaagttgtcccgaagaaccaaacactctaggcctaactatcttgatatgtacaatcaccaacaagcttcagactcattattgcttagcctttgccttgcctttacatagacatgaaaccatatctgtgagtcggcagacttagtaagaaaaatataaaacatataaatatataacctgtctcttaactcaggtgcccatacacctagctataagtttgacccgcatcctatgcgtataatgagtctcgaatgttcttaatgatagtatgacctctataccacatgcaccaagtatctttctaatgctagtgttggcaggatttgttcgtaccataagtacaactgatcgttctaccatatacactcaatattcatcaagtactagtgttggtaacgctatggcatacccccttaatagtatactacaccacatacactctatatctcaactgtactagtgtcggtagtaatgattcatatattcaaagtatataatatatacacacacatgtatatcaattatactaatcttatctcgtttctatattcaggtgtgctggtcatcctaagtggaaatatcacttgttgaacggaggccctatgtcacatttacataaaattagtaagtgttactctacacacttttggggatttaaactcaaaactaaaagtatccttataaataaatagtgtagaaataccctaaatatcaagaaaatatgaaaattaggattcccaaaaataccccaactggtgaaccggatcccaaatagtggactgttttctgggattctgcttaaggaaatagttcacattttcctagggaacggtggactgtttgtacaacaaaaatcacaaatacatccattgcaaactcaattgaaccccaaagttaatgaaaatctccaaaacacctaataacatcattataaacacatcatcaaggccctgtagtgaaatccactattattgggtcaagctttgagcttaaaaactcaaacctaactcaaccaaagctacaacaagcaaaacccaacccaactaattattagaatttttatgccctatataaaacccaattcaatataatcttatttactattaatagaagattaaaaatcatataggattacatgaagttttcataattatgattttaatatatattttctattaaagctagatgacactcgatcatttccggtgacacccatgaagttcaggatcctctcaattaatgtgagccactattgaacttccatgacgtctagacctcccaaaaaaactagaggtgcctgtatgcgaaacctttcatacaaaggttccattaggggtgaaattcggtcggttacagtcggtttttacctgctgccaaac

SEQ ID NO: 22936 - DNA, 1497 bp, Cannabis sativa
ataaataaatatattattcttctctgtgctcttttttctctttcctccattttccttcttctttgactttcactctcctataacttattggtggcaaatttgattaaccatgcacacataatttatatctccaatataaaatgtaaatattgtaataaatttggcataaaaaataaaaaaaaattatttttatagcacaatatttgttatattgctccaatacacaataatattttaagaggtaaattagtctaaaaaataaaatatcattaatgacaaacaataaattaaatatttaaaaaattactaatggtaatattgtaaatgaaatgtatgtattaaagtatttcattaatgattaatagcaaaagtataattaaaaaaaatggcatttaatgtataccgaattcggcagaatactatctcttatgctaaatttggctaaatttttagcatgtgctaaatttagcacaacttatagcataccaatagagaaattttttattaaaaagtgctaaaaaataataatacaccacctatttagcactctattaaaaatcctcgaaacaaaaattatacatttaaggaaaaataaaatttttatttacacactataaagttataagtatatcctaatattaaaaaataataacttgaattaatttttaaaaatcacttctaatatatatatatatatatttacattattcatttaataccaatagttagtttaattctctctacggactttttataattttgttctagctaccgccgtaagtttttctcctctccttctctcgctaggagtcaccgacccttttttgggattggcataaggccatggttgggaggggagagggttcattctcaccttgagtgcgggtacaatggcttttccacatgttcttcttcatttctgtgttgtactcgctgaattttgataattacaccaatagcgatatgacaccgaagagagtgctgataattatactaataacaatataataataataaaaaatattaagcactactaatatcttttaatatttctcataaattatgtggtatagtaccaccattactttttccccacataagaagaaggcatcatcgaattcaaagtctttgctagttggagaggattattattattattattattcatttttttcctatttctgaatattttcgtattatatttgaatggactataaaagagacctcattcttccatttcctacatcactcgcttaatgccaaatgagaattttacttctcttcatcactctaatcctcacaatccatttttgaaagcactttgagatattacacaaaaggacatgcaaataatatgagaatggtcaaattttccaagaaaaaaaaatcgttataattagctaacatatactatttctctcctataattaagagaaatgctaaaaagggatttgttaagacgttagataccatttatttttctattagtataatatt

SEQ ID NO: 22937 - DNA, 4049 bp, Cannabis sativa
gaataattaaaatgttaatgtcaacaataaatgtcttacaaatcaaacaatttttttcttttatttttttttttgaaagagaaaaactttattaaataacactaggcttatctgctagtaaattagcagcagcacaacttggtaaacaatcagtccaaatagcagacttttgagccaaacggctccacttagcaaggctattagccactgtattacactttctaggaacaaataaaaactctaaacactggaaggtatcacacatatgcataactctttgaatcaatttaccccaatctgaatagttggttgaattgtgatgaatagcttgtataatagtgtggctgtcagaacaaatttgtgctttgaatattgcccaacggactgctaacttcaagcccaggaggattgcagcagcttcggcctgcagaaccgtggtgcaaccaggagtgaactccgcttctgccaccactaaagagcccttcgagtctcgaataaccgcacttaaactgaaacccgactgaccaacgaccagcgaagcatcagtatttatattgcagaagtctaaaggaggagggagccatttcataacctgttttggaggaattttcgggggggaattctggtgtgaacccagttgtaactccaataaatcagcagcccatctgatccacatttgatccttcaaacctttgtgttggaagataaacatattccttctttgccaaaccagccaagagaaaccaatgaacctgataaaatcatcttttggaatgtgatccttaagccaccaaataaaatcagcagcattagtaatacgagatggaaaaatctgataaaatccgagaagtttccaaatcttaatagtttttggacacacccaaagagcatggcaaatgtcttcttcttgttgattacaaagatcacatcgagtatctagtgccattcctcgtcttgtaagctcaatctttgttgggagccaatgatggaacaacctccataaaaaattcttcattttcggagtaaggatagatccccaaacaaatttccaccaagctttaattgaggaaagattcgaacattcagctgtagcaggattaataaaccgaagcttataaccactcgcaaccgagtaagtaccattaggagttgggtgccaagtgatccaatccggattgttcaagtggggtttgatgcctaaaacccaaggaatatcatcttggtggaaccaactaatcacttcatttactttccaacttccatttgggtgaagtaatgaactaacagtaacttccttcggtatttgaacttgggtgcggaggttgaaagacggacttcttggcagccataagtcctcattaactcgtattgaacgaccgtctccaacacaccatctagatcctttcataagaagttctcttccccatataataccactccatattgaggacccataatgccccaatttagcttcaaagaagctctccgcaggaaaataaagggcttttaggattctagaaagcaaacaatcgggattagtaataaccttccaaccttgctttgctaagatagcttggttgaagtcttctagatttcgaaatcccattcctccttgctccttcaatctacaaagtttgtgccaattaccccaatgtaacttatgtttattcttggttgatccccaccaaaaccgcgctattaaactttcgatatcatgaagaatccctttggtgattctaaagcaactcataacataacaaggtagagcttgaataaccgctttaattagaatctctttcccggcttgagagaaaagactcatcttccacccttggagtttagcttcaactttgtcccttatcttcccaaagacttgttttttattcttacccacgaaggttggcatccccaaatacttggaatgttgtttaacaagggtaacacccaagttagaggctaaagcagccgctgtagactcatcaattttaacagcctacacacaagtccggttttctcaaagttgatacattgaccggataaattctcatacgtttctagcacctcttttagagtagaactttcctccatagttgcatcaaggaaaataagactatcatctgcaaagaaaaggtgagataatctttgatccaaatcaccaaaccgaagcccatgaattttccccgctctttctgcttcaaatatcaaacatgaaaggccttcagaacataaaagaaataaaaagggagacaatggatcaccttggcgaaggccacgttcggggataaaaaaacctttgatggaaccgttaattagaatggagaaggaaaccgagctaacacagttcattattttagcaatccacctatgatcataacccaaggataccatcattgcttctaagaagttccattccactctatcatatgcctttgacatatctaacttgacagccatttttttcccattgccgaaacgacctttcctcatacaatgtagactttcaaaaccaataatggcattgtcttggatgattctaccaccaataaaggcactttgatttgctgaaattactgtactcaagcttaacttcattcggtttgctagacatttcgaaattaccttatatatcacattgcataggctaatcggacgaaattctgacattgttgttggcttcgggactttcggaataagacatatcagagtttcattcaaaggcttgcaatcggcattgttgtttaaaatgtctaggcaggccgagataacttccttacccacaatatcccagcttttatggaagaaaaggcccgggagaccatctttgccaggggctttcaagggattaatttggaacattgcggttttaacttcctcacaagagaatggctctagtaacctgtcattgtcttccgtaatcagtcgattgggaacacacctacttaggattgtttggatatcaattccttcattagctttggaaaaaagctttttgaagtaattgatagctatgctctcaatatcttcattctttgttctccattgttgattgttgtcgaaaagaccctctatagtgtttttctttcttctattagaagctttataatgaaagtatttggtgtttctatccccatgttttaaccaaagggcgcggcttctttgcttccaataaatttcacgtttttcctccacacaattaaggtctttttcaagctgatttcttgttaaccaatcatccatctttgttgaatccgcaatcttttcaatcttctctttaagttctcttgatctagccatcatctcttgtttttgatttttattccatctgttcaacttatgaccacatatgtgtagcagccgagatagtgctggaaccggctgtaacacatcttgctgcccccatacatcttcaataattttgtgacattcctcattctccgcccaagcttgttcaaaatgaaatctactaccccatctttttttgaaatcatttccttttgtcccaatttgctcttggagaagaagaggtctatgatccgagttccaccaattaaggagagacaccttattcttcttgaagtttcttttccattcagcattgcatagacttcggtccagtttttcaaaaataaggttggaagctctaccattgaaccatgtataatcacctccttcagcatgaagttcacttaaaaggcatttcgaaatggctaaacggaagtttttcatcaagtagttcggtttggggcctcctccctttttttctttttgatttatgatttcgttaaaatcacctccgcatatccaagcacaagagaacattgatttgagcctatccaacaatttccaactctccattctacctcccggatcggggctgccatagaagccggtaaagcgccaacaaaagccaagatcattttcaactagagcatcaatatgagagcttgtataagatttgatatgaactaaatattctttagtccatagaagggccaaaccaccactttttcctttcgaatccaccgaaaaacaaccttcgaaaccaagtt

SEQ ID NO: 22938 - DNA, 5154 bp, Cannabis sativa
caggtcaaaaatatgaggggcaaagctggtgtgggaatgaaatggcagtttttttttttttttgttttgcaaaatgacatatttcacaattaaaaggatgagtaagattagtgtcaaaatgaaactttttattaattttgtttgtaactagtacaaatgggtgaccaaggcgagtatgccattggtgtttgtctatattaacagtacaagtaagacaatgagatacaagcttataagggatttcttgttgaatgtagtagagattgcctagccgattagctatcccaatcctcaatgtctgagaaagtttgtggatagaacaagaattagtagtgaataacatgttgtgaatgttgttgtctaataaagaactcacaaatagtaaattcaaataaaattaagggacaaacaagacatttgtaaggataagtctggaattgatgataatagttccaattctttcaatattgacagaggtaacattaagtaatgtcacagatttagaatgtttgtttgcaacaaaaaaggaaaaacatctaatgtcacaacaaacatgatgagttgtcccactatatattatctagaaattataaggaaaatgattgatattaccagagaaattggtcacaatcacataagtatcttgggatgtagaagtagttggttgtaactgttgagtcaatattgaaataatttgttgacattgtgttggtatgagctgagggggtttttttcaattgttgtgacaaaacattgtaaagtgtggggagggtttttagaggtattgtcattgtcttgtttccagctatatataggggtatcaatagtccttttgttgccataatcaggaagaaatcctataagaaagtaacatttatatttaaggtgaccaggttttaggcaatgggaacaagtagggcgcatacgtttggttcttgaagccatggctgcaagagaatcagctatgggatttggggcagtggtggtagtagtggcagtaagaggagtggtgttgcgattgctaagggtttgttgttgttcttgatgaaaaatcatagaaaaaactttgttgagaggggggcaagggtcaataagaagtacctgagcacggacgacatggtagatttcattgagacccatgagaaattataatacctgatcattattcaaatattcttgggtttttgcagcagccaaacaagtacaaggaacctttggatgcaattgattgatttcatcccaaatagcagttaatctggtgaagtaagcactcaccgagtcatctccttgatgcaagaaggtcaaggtttcattaagtttgaagatgcaagaactgttcccttggttgaatctattgtgaagttcagaccacatttcgagtgtagtatcaagatacatgatactgctccttattttgggagagacggaatgaaggatccaagattgaaccatttgattacaacggatcgaagaactcaacagaggatcttggggaggaggtttgggaagactgttgtcaaggaaaggggttttgttgtgcgcacctattaaaattttgaaatcacgcttccatggttggaaattgtgattagtaagaactagtgtggccaaggctaaacctggatgacctgcagtgctgaggtagtagggacttctaacatcctcgtacgctggtcgatcaatcagagcagagtgattttgaggagctgaagcaggagctttaggaatggtgtgagtcgatgtctgcaatggtggcggagcaatgtttgaaggagcatcgaccactggattatcatttgcatcagtggaagtaactgaggagttcactcgagtgcgcaccattgttagactcaaagaaagcttcaatcatcaatcttgtttgtttgcatctgataccatattaggataaagaaaatagagtaaagttttttatgtaatctgaagttattgaattgaaaaagtaaatacaagaagtttgtttatacatagagtaagtgatcgagtaacaaacttacatctatcctaactaaccacttgattaactaattttaataataacagaataattaattctaatactttttgttattaaaaaatgtatttttataattttaaaactttaaaaatatatttttacaaataaaaacttttgatcgtaacattataaataaaatatataaaaataaatagagcaatatcatttgtgtgagaacattgcatgttaacgcaatattacaattattacatcttatttttatatgttagtactacatcttatttctgttggtatttcttttttaggaggagaaggagattgcaaaagtgaggatggaggtagcccatgaaatgagattagcaaaagaagctgaagctgcgaaggcacgtcacattgctaaagctagccaagccattgagaaagaaattacaaagcgttcatcttacatgaccgactattagcattaatatttgactgtttgagaataaaactaaatataatagttgtaacttgtatttgatttatggtttgtaataattatgatggataatagtatgtgtaaagtatatgtataatgatggtgaaatgatagtttgaaatatatgatgggtaatagtagtagtagaataggtaatggattagttagatgggacaagtaagaaatgagttagataaagagttgagataatatggttagtagtaaattcaatttgtgatacataagctctttatatagttgtggaggttggtggtgtaagcctccttttacaatatctagagctttctagtttcatatattttactacattctctaatatattctacacttttatagttttcaattaatttacaagaacacaacttagaattatctagaataaaatattctagatgtttacaagtttcttttagaaaatcatataaaaaaaatatattttagaaatatgtatcaacttctaatactcctccttaatacatatttctttcactctgatcaagtctcataatagctcgaacttggtcctcggtagtgccttagtaaatatgtctgctaattattcttcagtcttgtagtgcttgagctctatttctttgtttgcttctgcttctctaatgaaataatacttgatgattatgcgctttgttctaccgtaaaatatgagattcttcgccatcacaatagatctttatagtctcttcttgtaagtctcccatgtcttcaagtattcttttgagccacatagcttggcttgtagtcattggtgccgcaatatactctgcttctactgataattgcaaaacagttgcttatttctttgatacccaagaaaataatcatgaataaagtgtgaaggcatatcctgacgtgctcttcatgtcgtccatggatcctgcctagtcattatttgtgtagccaataagttttgactcattcgtgacttcgtacgatattatgtagagttttgttcctcgcaagtatctaaggattttcttggctactccatagtgaacttgacttagatcatgcatgaatcttgataggagactaactacatacattatgtctgttcttgtagcagttagatagagtaagttgctgattagacttcaaaattttgattcatcagcttttggtgagccatcttctttcttgagagctttattgttgtttagtggagttgatagagtcttgcattcttccattttgaacttcttcaatagtgtctctgcatacttcttttgtgagataaagatcccatctttttttttttttttgagttattgtgatctagagaaagtagtgcattaatcccagatcgatcatctcaaaacttttcatcatgtcttctttaaacttctttatcatcttctcattatttcctgtgcagatgagatcatcaacatataaacttaaaattagtttatcattcataccttgtgtttttatgtatagtgttggctcacttttgctcctcctgaatcattgttcaatgaagtagtggtcaattctattgtaccaggctcgcggagcttgctttaagccctacaaggcctttttcaacttaagaattttatcttttggtccttgcaccacgaggccatgtataaagaatgatgtagtggaatatgtttcacagtgtctgacatgtcaacaagtaaaagtagagcatcagaggcctgtaagattgttataaccgttaaatcttctagaatgggaagatatctatggactttgtagttggactacctacgaatacatggaaatatgattctctgtgggtaatagtcgataggtatacgaagtcagctctcttcttgcttgttcgaacgaacttctccattgatcagtacgctgagtaatatgttagaaaaatagtttatcttcatggtgctttaaagtctattgtatctaacagaggttcaaagttcacattaagattttgggagagtctacatcgagcaatggatacacagttaaagtttagtaaaatatttcatctcagacagatggacagtccaaaatgtctacaaagatttagaagagatgatacgggcatgtgtattggatttcaaaggatcttaggtaaagtaccttcccttgatcgagtttccttaaaataataactaccaatcaactatcgagatgactgcttatgaaatgctttatggtagaatatatagatcacctatccattaggatgaattaggtgaaaaaaaattcttatgtcccgaaactgttcaaaaaataagtgaggcgattgacaaaattaaagcttagatgctcgctactcatactagacagaagagttatgttgatccaaagtaagagaatgttgactttcaggttaaagagatggtattctcagtatttcacctatgaaaggtgtaaaacactttggtaagagagagaaattaagcccaaggtttattagaccttttaaaattctagagagcatagggaaagtggagtacatgttggctatgctccccgcgcaagcaactgtacataatgtgtttcatctttcgatactttagaagtatgtgtcaaactcatctcataaattgagttacaaagtcttggaactttagccagacctctcctatgaggagaaatcagtagagatacttgatagaagagagaaagtcttgagaagcaa

SEQ ID NO: 22939 - DNA, 3284 bp, Cannabis sativa
  modified_base (870)..(875): a, c, t, g, unknown or other
  modified_base (1376)..(1378): a, c, t, g, unknown or other
cacaccgcttctggccgatctcttctctacattgagaatttcatcatcaataatgttcttcctttctatggtacggactcaatttacctctccccacttcaatattttataataatactagtcggcaactacgtgtgagttacgttgtttgttctttttgtgttttttttttaatttttttttttcatattaaaaaattacataggttaagttttgattataatatttaaattattacttatatataatttatactcaaagaagataatttagcaatcttttgttttgattcttcaatagagtatgaattaaagttcttgtacatttcaattttcattttaccttatcaacttaagtttgtactatccaacactttgataataatttagaaacactttcaatatatttagtattttctggagaaataaattatataagttggtagtgttgtcatttatttgacaatttattattacattaaatgaatatatcaattgtggatttattttttctatttaaaataattgatataataattaataaaaatattataagttttattgaattatatatttacataaaatattatattacatatgagtaagttttaagctctatttctttagataagatggttagcaactttatctttttttgtttcttcaatatagtatacattgaaattcttgtatttttgagtcttcatcttctcttgattagcataatttgtagtatctaacaattagtttattactataaatattaaaatttgcgacggtcctaaaaataatttttttcggggataatcgctaaaaaaattaaataactatttaaaaccgttgagaaaaatttagtattcccgacggtttnnnnnngtagtaaacaaaataagcgacgttttttaataaaatataattttttaataaacccttatgggcaacggtttaatcattgacttttacacacgtcccacacttctaaagttgactctttcctctcaatcctacttatctcatagttatatttcattaattttaaaagtttgataatattttaattaataataataataaaataattagtaatcaaatgttgtaatagtatgaaatatgggcggaagatataaattacattattagtaggttttaacaaacctattaataattttcattaaaaaaaaatacaaaacaacttatttctgttattatatttgagtaatttttttttattattattataattattatttttaaaaaataacttcatttcattattgtaggttttaacaaatctactaatatttttcattcaaaaaaacctactaattatatatgtttctgttattatattcaagtaattttattattattattatnnntattattattatttaataaaataacttccaaaaataccactaataaacaaaaaacttaaaggaaaacaacttaatagatacatattctttaacaacaaatagtttcaatcaataatttccatttttttaaaaaaaaatcaatatttaccaaaatattttgtactcttacccattcgtatttttcatatatcatattttaatatattttcgtatatgcggctcaaggcatactttcagttggagtcttggttttggacagactcagagttcttgatgacttttcaatcaagtaaaaacataattatataacttggaagaattgtcactattattcttggatatgaattacttattatatatatataactctcttcttctaacttttagtgcaacattaagttaatgatttaaggaatcttatgaggaatgaaaggatatcccgtaaaaatatatagcaaatggattatatatacatatatttgtgaagttgatgacaataaatgaaagatagtttgtgtgaataggtgtttattgtgaatagttgtacctatatgtgggaggatgcaactcttagtaatttatatttctgttaaaattaactttttattggagaatattctgttaaaaaacataacaatctgttaaatgcacaacaaaaatggttaaatagatatttatataataggtaagatattaacatgtctaataaaataatatggttgcttctataattgcacctcttaaaagtattaatgatacctttgatctgctttaacatctagaataattaatttttagtataatttttttttttcatattttaccaaattaattttgacaaataaaatttaacagttaaaattaatgttaaaaaaagtctattttgctattattctcgtataaaataaaatcctcatccatataacacattgtttaattttatttatggtgtgttataaattttttaaattttacaaaatgtcttaaataataataaaatatatgactataaaaaaattcactacaaaaaatcttatttttagtcacaataaaacttgtgactataaaagctagtgaaaaaattgtgactaattataagtcataattcctatggtgtgattaaaaggttcgaagataaaagtattagagacaaaaattataatttgttgtgactaaatgtatttttagtcatatttaatcacaaaaaaatatattgtgattaaatagttatcactaaaaatagcattttttttaataattaattaaaaaattattttagatacaagaaataaataaaagcatttttttttaaaggtaaaatgagtgcttgtaaaattttccaattatatattattttatggataaatagaattttgaatgaatagtccagagagttccatttacaataattttgaaatatatcaatataaatataatatatgtatttatatattgagctcacaattattggtgtctctaatttattatagtcaattacattttgtgcaagttggaaatataaacttatttaatgtatacaacaacatatatttaccataaatataatttcgtttattcaatatataaaatttcgttctgactggtcgtttcatatatatgattttttaattttagaaaatatatgtacttaagaaacaataaaaataaataaataagacaatgaaagtaaaataattaaatatgtgtatacactataataacgagccccataccaatggcctgcttttgattattttgttgttttttcaaaattaaaataaacgttgtttttcacattttaaacaacatattattatatgagcctaattatcattatatacttatatcttatattatatttttcttattatattatataccgtacgtgtgtagggaacacacacac

SEQ ID NO: 22940 - DNA, 4080 bp, Cannabis sativa
tgtttcctttattttgtctttgttttatttggaaagttgtctttcttttagtttcctttatttttatgaaatttgatttttttttttacttgctaatgacccggactagaactgtgactaggacctggaccttagacaagaaccgaacccaaaccataacccatacttagaccagaacctagaccaagacattgactaggtctgggacctgagacctgggacctagacctggaccaggacccggactaggacctggagctgacctggtcctaaaccctcattgggtcctgagacccgcaacccagacaaggatccaaacccttacaaggagacgaacacgaacccggaccaagactgggatcgagacatagacctgaacccgatttgagacctagagtaaaaccaagactggggacccgaacttcaacctggacccagatcaggacctaggaaccggacatggatggagacctagaccagggacctaggccgcggaacccatacctagatctaactctaagacttgaaaccgaaccaggaccttacctggacccgggaatccaaagtcggacccagaccctgacccaaaaccttccctggaccaaaaccaagataggaacctggacacgaacccatacccaagagcaaaccgaaacccgaacccgaactcagacccagacccagaatcaaacccaaacattgacctgcacccaaacccaaaatcgaacccagatcaggatcggaacccaagacttcgacccaaaactaaacacggactgagatcgagatcgaaaccttggactcagacctaaaccaggacccagacccaggaccctaacgcacacttggagcctgatccggaccaagaccaggatctgaaccaaaacccaaactcggaccaggactccaacagcaacccaaactcaaaccccgaccaaaacttgaacccaaactcgaacttggaatttcaactggaactggaagcagactaggactaggaccaagacaaggaccaagaacgagacccaaacccaaagctcgactaggacccgaacccgaacctaaaccgagacccaaaccagaccgatgtgggacctagaccttgaattgtgataggaacttgggcaacaaaactaggaccgggacccaagacccgaccctagacttgaacttgaacctaggacccagctcgtgacccaacacccgaaatggaaccagacagagacttgagattgggattcggatctagacccggggcttggactaaacccttagtcaaagccccggacccaaacccagactaggacccgaacccagacccagacccgaacttagtccaagacccaaacttggacccaaacccgtaccttgtgacccgagattagaattgaaaccagaagtagatcggaacttgggaacgggaccggaaccaggacttgtacctagaccttgaatcgtaatcagacttggacgtagacttagaaccgtaatcgaacaaagacccagactccaaccaagacctagacctgaaccttgacccggactcgtatcgcaaccaagactagtactcggtgccaaacttggacccgaactcagacccaaacatggagccagactcaagacacagaatatgggcggggaccaagaaccgcacccctgtctcggtgcagaacccaaactcagacctgggacccaggacctgaaccagaaccagacttggacacgtgacacggatccagatttgggactcagaccaggacccaaacccggaccctatcctagacccaggacctaaaactggaacttgaataagacttgccagaccaggaccctcgaacaagactaggatcgtgaccaggacccggacccacacctagaacagaactcgggcctagcccaagacccaaatcgtgaccagaataagatccaaacctagacctggacccagacccgaacgcgaacccagaccgggatcgaaacccaagacttagacacgaaactaaacctagactcaggtcgagatcaaaacttgggactaaaacgcggaactaaacctggacacaaatcatgatcagaacttgggacttagacctagaccaggacccagaccgagaacccgaacccacacccagagcttgacccagacctagactgaaatctggacccaaacctaaactcggacgaggagttgaaccccgacttaaactcaaacccaaactcaaactcagaattgcaactagaactataaccggagtagaagtaggaccaggaccaggaacaaaacttgaacccgaacccagataaaaacacagattgagacccaaactcgaactgagactaagacccaaacccgaaccaagactaggaacctcggacacatctcgtaaaatggaaccagactggagatagagaccttggcaatggaacaaggactgggacctagtacctgaccccaaaccaggacttgaacctcggacccatctcgtaaaatggaactagactgggacctgagatcaagattaagatctggacctggggcttagaccgaacccgtcgtcggtgtctcgatctgggacccagtccaagacccaaacccagactaggaccaggacccaaacccaaacccggacctgaacctagtcgcagacctaaacctggacccgaacccctaccttgtgacccaaaattggaatcgaaacaggaagtagactgggacctgggaacaggactggaacaaggacttggacctagaactgtaaccagacctagacctagacccaaaaccgtaattggacaaggacctagactccaactaaaacttagactcaaatcgggaccgagacccagatacccaccccaacctggacgcaggactcgaacccagacccgaactcagacccaaacatggaactagactcaagacacagaatcggggccgagacctagaatcgtaacaagtcttgatcctaaacccaaactcaaacgtgggacccgagacataaacaagaactagatggggacccgtgatagtgatccagatctagactcgcgatccgggaaacggggcttggaacaaacccatagttgatgtttggatctgggactcaaactaggatacaaacccaaacaaggacccgaacccagacatagacctgggccctgaaactggaacctaaacaagaatagtcagaccaggacactggaacaagacttggaccgtgaccaagacccaaacccagacctagaatcgaactctgacctatccccaaacctaaactgagattgaaactcaggcctgaacacggtcgtgtacccagatcgggaccgagacccagacccaaacccaaatttgggaaccgatcatagacacagactcggacctagatagggatccatatacaaacctagacttggacccaaacctagaccgtgatcaaaacccgagacctagatacaaaccgagatcctaacccaaactcaaacttggacccacactcgggacctgaactcagacctggacccaaacctagacgcagatcaggatccaaacctggacccaaacctgaaccaggactcagaccccgacctggatctggacccaaacctgaacctagacacagaatccgagtgtgggtttgttttaaagtccaagtccttgttcggttatagttttcggtctggtccaggtcttggtcctagtcttgttcctgggtcctgatcacctttttagtttcggttccaatttcaaatcacagggtacgggttgagtccaagcatcgagtcttatatcccaagacccgaggtgggtcctaggtctatgtttaggtctgaggtcgggtcccaaatcccgatccaagttttgaggcccaagatttggtcccggtctggggcccaattcccgggtctgggtcccgtatctatgttcgagtcctaggtcccagtctggttccaagtttgtgttccgattttggttcaagtctcaggtcccaatccgagtccaggtcccagtttgggttcgggtccgagttcgagtcccagtgcaagtctgattttgggtttaggtttgggtcctattacagt

SEQ ID NO: 22941 - DNA, 5456 bp, Cannabis sativa
aattagattttcaaagcccatataaaatatttttatttgtttaggcagttttatttgtcactgatgtcgaaaaagtcgttggagtttgctgtcggtaccagaaaagtcgttggagtagatatcaatgccaaaaagtcgcaagagtagctactagtgccagaaaattgccggagtagctctcggtgtcaaaaaagtcgttggatttgttgctgacgccaaaaaagttgttgaaattggcattgtcgctcaaaaaatcacccaaaaaataccaagaatctagtttcttgatgaagaaatcggtttcttgatgaaaaaatcactttctttgtgatttttccagcgacaacgccaatttcgacgacttttctgataccgccagcaacttcggcgacttttctgacaccgacagctactctaacgactattctggcatcgacagcaaacttaaaaaaagtcgtcgaaattggcattatcactggaaaaatcactaagaaattagtttcttcgtcaagaagaagaagccagtttcttggtgatttttccagtaatttttctggcgactatcaattccgacgacttttctggcgccaacagcaactccgacgacttttctggcaccgacagctaccccgacgccttttccggcacctgtgacaactccggcgatcaatgtagtttcatttatttattttttaaataatatgaagagaattttattattttttatggtaattcaaagtgacacatgttatatatgttaagtttttattttaaataaccatattttttctttattaaatttcctttactatatttatataaactagttttattttttttttcagtaaatatcttatttattaaaagttattttcttaagttattaaactaatagcaatataacaccaaagaggatactaagcatcaatggtgccttttagtatttctctaatctctagggttgtacataattttttgtaaaccatctaacccaaataacccgctcagactaaactaagataacctgacgaaaaatataaatcgaaaaatctgacgaaaatataacccacccaatctttatattaggcaggttgaaaataataccgacccacttaatcaacctaactaacccaattaagaggatttatatatcatataattaatatgatgatttaaaaaatatcaagttgaaactaatatgtttcttttatagtgtttgatttgaaatttgaattcaatctatatatatttatttcatttttataattaacaaaaatataataattgaatgtaaaaaaatattagtggttggtttagacaagttaacccaaccaaactaatcaattttattggacatgttactattttcttttttctcaattggacaaaattacttaaatttttgtaaactgacatttatattaggttaaataaaaatgtagcaaaaatagatcagacagatccacatacacccctactaatatctataaaagaatacctctaattaaccgtaacgcaacacgtttaaaaaatattaatacctaatagcaatactcataaaaaataaaagagtttagaattttttttttctctttttgacaaaagtattgttacaaatctttataattttacatctttatcttttacatatacatttacatatattaaatatggttatctaaaaaattgatggttgaacgatttttttttattattaaagttaacaactaaaattaacattattagagcatctccattagtgatttattgctaaataaaaattattttgtaaaaaatttactcgaatagtgcgatgggctttgcttatccgattatgattatgtttcgaccatatgtctaatttttcacaataattaagattcatgaagtcagagaagtcaaattcacaacttcgcatttttcattcctgacatagaatactcactcgaaaatgaaaagtttcgagtctctcatttcgcagaacagcaacatctccaaaaattagtatctagctttgccagagtaaataaacaggctagtgatgtcaaaatatcacttagacaccttaaagtacgtcccttggacatttttactagggttgtccagcaaaatttacaaaccgcctaaatatgagtgacaataactctaagaaaaaaggacagaagacaacgaacattatctattagatttgaaaaataagataagtctgtatgtgaagaggccaaagcagaaaaaactcgtaaagcatccgtttctacttgtgctattatttgttgttaaaaagctcaattaagactatgaaaaagtgtttttgcttctattttatcacttctaaaatagccctgaactggtttggataatgtagcaactacctcccctttgtaatttcgaaacactgctcctatacccaatactttgtctgtagtgttgacaactgcatctacattcattttaaaataattgacattcgacagcttccatggtatcccattcaatgaatttgtgttatgacctgcagtagtatatgttaaatattgttgctggttttgcagatcaggctgtgtgtaacactattgggaaagacctgcaattgacggggtgttgctggtgtagtgcagcaggagctggagcacgattcaagagtagcataggttgttgttttcctatgcaactttgcttagttgaacgatatttatctagataggttatagcttgagttgcaagagcagaagcatcacaatttgttccaccatgaagcacactatttttgtcattccatatgctccacataaggtatattaaaagctcaaaatcaggcttatccatagtcgttgctttgtgaattagataatatccattaaacataccatgagcatggacgactcttatggggtgcaagctcagctattgcacagggctccaaaaaataaagagtcccaaaaaaataaagggcttaatatatattttttttaatgctcttcaatttattttatttttaattttattaattaaaaaattaaaaaaaatataccattctaaaaactataaataaaaattattaaattattttaataatgatatttaaattaaattttaggaaattataaaaaaaaaaatctaatttttttccaaatataataataaataatataataaaatattatttgtaattatttaatattttaaacttaattactttcttttaattattttaattttagatacgtgtcgtaaattcaacctactgttcacatgattaagtaatttgtttgaaggtgccaaatgaaacggtgtcgtattgaaagtgatttctatgtgagtaaaaaaagagtattgttattaagcactagtggaatgtagtatctttacgttgtgattggttaacaatatttcttaaaaattattatattaaattatataaaaactcgataattaattgaaccacagaatattgttaggcaatactaatatcctttagcatttatcatatggaagtggaaggtggttgtgaggaggctcggcaatttacacgtgttcctttgtttatgagtataggaaaggagaggagaggaaaggacagaagagacgcttggtcgatgattacgagagacttaacacgcatacctcctcacactctgggctccacctattaccggggtaaaaatggaaattagtgtaggctagatatatcatatcattatcatgattgctatatatcttttccattttttcttttcatatgtagatatgttgggtatagatttaattcttaagttacaattaagattgcaaattgtctttcttaaaataatatcatctagtatttttgccaaaagattccagaaaaaaaaaaaaaagataacatatagaaggtatttatcatgtttctggaacaaaaaaaaatctttgtcttatctaaaaaagataataaaataaaaagaaatagtaataggaaccttcaaaaaggtgagaaaagaaagaaatcgttattgaaaaagataaaaactagggtgtttcaatgtaccaatgagtgatacacctctctatatttttggtactagttaactaaaactttcttaaaagattttagaactttgagatgtaataatattggaaataaaatttaaataatttatttaatatatatatataaaataaaaagtaaataacagcattaaaattttcaaatttgttagtaatataaacttaataattttttttagcaacatgagtactaaatatttgtaaaattataatttttttagtacaaattttgtaatggtcttaaataagacacatataatacccaaatcattggatttggatagaaaatattatttctaaaccatcttaataaattcaaacagaatttgtactgacaaaattaaaataatattacagatttataaatattaggtacttatgatactaaaaaaatcattgaatttatgctgctttcaaattcaaaactttgattatcattatattcttaaaataaaataagtacacggttaatttgaatattgtatttgatattatatattattctaattttttttaaaaaaaattaactactaatttgtttttcatatataccataagttaatcaatcacattccacttaacaaattttttttcatatataaaaaggtaactaataagtatcttaagccaccaaaaaatttatgtaattttaacaataacaagaaaacatatgttttttatatctaaaaataaatagaaacatgatatgtagggtttttccaaatattttttttttattgtttgataggttttttttttcctaaatcctaagctacctgaggttttttttttcttcggtcaggctcgtcgactctttctgggtttagacttggcttggtcgggatctgtagttttgctattgcgattagtcttgtctttttaatataattttgagtgtcttttgtttaggttattgtgattagtcttgtctctgtgacatgatttgttttattttattttgttgttggttcatctttttgttctttgatgtctcaccatcaaattagttgagaataataaattctcttcgactaaagaggtattattggtgcagttacacaccttacataatagttgaatgcttaagctaagggactaaatggaccttttgcaactttttgccacatatctatcgttgtgtattttctaacaagagagatattttaattaattattgctattaataaaattgtacgatttaaaatatgttataatatttgtatactcagtgacacaatgtatatgttattaaggtgtaaaatggtgtgagttgtaaaatggtataataaaatggaaattaaattagttaagcaaaaaaaaaaaaaaaaaaaaaaatataggaattaaatttcaaatttcaaatatttgttatttatgtaaattagagatttcttaaaattttaatgttcaca

SEQ ID NO: 22942 - DNA, 2519 bp, Cannabis sativa
tatagacatactttatatagaatagatataaacagtttattatttttattaaaaacttatttttgtaaataaaaaaatttaaagggtaaaaataaaatattttccttattcatgtgtttttgtaatttttggtcagtaaaaatttctataatataaaatccattattcaattatacggtatactatatacacataatatttcctcatattgagaattgtttatttgttcataaaagtattaattctggtagtataatttaatatcagattttacacgttttataatttagaagaaaaaaaaaagttgatctctggattaatcaataacacatcttcccaaataacataacatggtaataaggagaactgcaaagctcaaaatcaattcaattgaagtgataataacatgagtgatcatccaaatataattatgtaagattgctaatcatttataaagccccatatatcttatactcatactcatattgtatgtagtaggtgggctatataataagagttgctataggttattgtatagcaatggccaatggtgatagtaaatagttagtgatgagggcatgtgttataataaataataagtagctacttattattatttctctgaaaactgaattgaattaggtcacatggggtccgtaccatccgtccagaggctgacatgggcatctctttttctctctctcttttctatattggaaaagggcacgttaacccatgtgagctttgttcccctccaccaattatatattcttcttctttttcttcttcttataatgtattggggggttttggattgggccccatctgagaggagtactactactgcttattattaggtcaaatatgagcccctttgttttttcatttttgatcagaatcttagctccaaagggcaggcccttaatggtggtttgctgacccaatcgactataagtacttctatacatgatacacgtaattcccatatatagggtcgaatatcatacgtgtatatatataccttaattattaatttatatttatattagaatatagttagacacaacacaaacacaacacatattggagaatggagatgtttgccaattaataatactagtcccaaccaaagttaattaatagtccatagtcctgcattctgtgatttttgatgagtagaaggatgacttttgttttgtaacattattattatcatcaatatcccacttattataaatttataatatatgtgtcacttttgggttgttgaaacctggcatgtgtaaattattctgatgagccaattttcttgttgattatatatgaataatgtgtgtacaccaatgatatgatatatttgggttgagttgagttgagttggggcccttaatatatatagtatcatgtgtagtatgatataatgtggataagatggatatatatgtagcctcatatatatatatatatgaatatgaatattagcttaattagctccttatgctgcatactttacgctaaatttactaataatttaggtcatacaaaatatgacacattcattggaattattgggagtcaattttgtctcataaaaaggtgcattctcctctattcacaaatcaatatttggttgataggataatgattaatcattccaattaagtttgaatatattcaattaattaatcaaatttaattacgttaaaatctaatttatgtaattaacctaacactaacactaacactaacacgtttaacaagatacataagaacaaaacaaatgcgtctctgaatgctaggcatattatatattttatacaagtgtaaccattaccatacatatacatagttttaattttttttctttttttttcatctctgtaaaaaaagaaagaaagaatatttaggtggtattactattaataaagttaatggtgaaagtagaaggaaaattatgggaagagacatatggtttggtggtaagtaagtaatggcccaaatttttaggagttaagactttgggaagctcatctttgagaatctatacatgttacactttgacaaaagggaaatttgaaattgcatgcttataatatcttaaattttttttcctaaattcataagtaataaaattcatattattattatattttattttgacaaaaaatagctcacgacccatattattatttggtagtactatttaaaaaaaaaattcatattttaaattattatttaacaaaaatagaggaggtttaaaattttcagagggttcaaaattgtatatgcggttattaatttagttatttttttgtatataaaatttatcccccataatgaggcgaatcaattggtgtccgcccgggagtggggattgtgttgtcggtggatgcggcggttaccccggggaggggttttgtgggccttgggggggttgtgcgcggtggtgatggggaggtgtgggcggcttcagctattggtgccgtgggggattttcaggtggtggtggctgagcttct

SEQ ID NO: 22943 - DNA, 2232 bp, Cannabis sativa
agaatggttcatctcggttatgattaccgagtccaacctaattatgcattaagcgcataatctttgaatctcattacatttaacttagcatggcaattacacaaatatatcactagagtaataaccctaggctattagaccgttcctattatggtaataaccctaatcccggttactaaataatcatacttatccttttcaacataagcgccacagtgcatactctacgtgctaactactgtcttacatgttgtcccgcaatagtagagattccgaatccccgggtgctcctgatcaggtgtcggtaatcctagtcacacaaatctgggattttcacacctagggttaacccctgattccatactcataaaattcaatcatggcatttaaaattcagataatcatacagatctcggaacgagctttccaacaatataaagaactcccaaatcgaaattcggaatcaaaagttatgaattttcaaagttcgaactcaaaactgcccaaaaatcccaaggcggcccgcggcatgcccaagccatgccgcggcacctgggacaaatcccaggttccaccaaagaggggcgggccgcggcatgcttaacccatgccgcagcatctgggttgaaaacccagaaatcagcaagcccaactcgaattttcagcaaccaaactcaaccaaatcaccaccaaatccatccaaactctcaaaacaagatcacaattcatcaagctccaagatagggccttaaaatacaaataacatgcatcaaaaccaacactttaccctgaaaattcagattgtaaaaaatatctcaaaatcatgcttaaactcacaaacttcaagctctcaaacttgagcttaattccaacctacccaaataatttcagcaacaattattctcaatcaacttgaatttaaggtaaagaagaaatcctagaattccatctatagctcaatcaaacaccacatcaaagattcaagcataagcatactcaaattcaagaaaattagctacaactctttcatacatgcataaacaagattatttcacttaattcatgctttttcacaatattttcagcaagcaattcaactaaaattcagtaaggaaactaccttacttccaattcaaagccaaactcaaacaatttccaagtatcaagctccaaaatcacccaaactcccaagcacttcttcaatttccaagattgcaaatcaagagggtaagagagggagagagggtcgggtttgagagagagaaaggccagaattttctttgtttttctcttgaaattcaatcaaaattaaggtatatcattaaaagttaaaaggctaaaatgcccttaggaccaattcccacataattaaacattcaagggcaaaaatggcattcatgcatatttaaatcccaattaaatatcacattatcaaatattaaataaaataccaattaattcaatccaattacatttcaggcctgaacccagtttgacccgaaatatccagttgtgactataccgcgccaacctatcagaacacgcctaaaaagacgacacaagcatactatataaatggatctcagggtacgtaataattggtctcaggtacgttacgattttttaaccctaattacccctagattaaccccatccctcagatcaaataactcccccatctaatggttgtcgtacatcacggaatacattcagtgaaagtacatcacaggacaaaatcgtatccctatatatattattaaaattatatataaatataaaatacatatacattaacctaaaagagatctgtgtgggttttgatttggaatttggtctgatttggatgggatatgaatatggttgatttgaggatttgatatatattagaggttagtgggtttggatttagggataatgtttacaatttgagagatgatgaaaaataaatttaatctttatatatatatatcaatatatatacctgaagaaaatttttactggagctttggctggtatgggcgagcttggacagagcttggacaaaacttccacacaagtaaaaattttagatctgagaaaatgtgagaactttctttttatacatgagttgagatggggagaaagaaagagatggagtgagaagatgaaagatgaaggagagaagaataagaggacgaagtgatcagtttgaaggattcttttatacacataaaattattaccggcggagacc

SEQ ID NO: 22944 - DNA, 3154 bp, Cannabis sativa
ggggttgaatttgttttcaagaatggatttttattgtgatttagttatcgaagaaggtgattaatatgcgtgaattgaggagaatagcttcgcagggtatacctgatggtgctggaattcgttcgacggtttggaaggtgtgtatagagtttggagttttcctttttcttagctatttattgatagaaagaagagtttctttttttgggctattttctttttttgaagaaaagtaatgtgttttttgtcaatcatttcttgtgaatttcaatgaaaaatggggttttgagttgtgttatttagttcttaaaatcatacactaatgtgaaatactcaaatttgcaaaataacctcacttaatttactctatgcgactatgatagttgcatagtgtaaatctatggttgcaaaacgactatggtcgcacaatgttcattgttttcataaaggttattttgccaaagggctctttcttttttgggctattttcttttctttttgaagaaaagaaatgtgtttttttcaatcctttcttgtgaatttcaatgaaaaatggtgagttgtattttttagttcttaaaatcacactaatgtatttaataatgatgcagctcttactgaattatctaccaccggatcgtagtctttggtcgactgagttagctaaaaagaggtcacaatacaagcatttcaaagatgaccttttgatgaatcctgtaagtcatgttgatgagttttatattatataattttcactaaatgttgggtttcaaattgaagttttggatgaatgagtagtgggatagagaacataagtacaaccgacttcgaatttagaatgtattacacagttaattcatgtctcgaaatatcagttgcttgctggcttgtccatctaattcatgtatcagtaggtgaaagtctgatatcaagaaagagtggcgagttagttaatacttagaggctagagcaagtcatatagatatattttttttcatgtattttaactatttgtttcccaatgaatttgggttttcctaatttttctgtggctagtcagtcagacattacaaggaggctggagaaatcatctagtcatgacaatgacgagtcaagttatgagagccgctgtttgctttcaagatctcaaataactcatggggagcatccattgagtcttggaaagactagcatctggaatcagttttttcaggtaagtagtgcactttgcttgagactggatttagagatgtgactgaattttagctattgcatgtaatgtataaagagttggagcatggttggattgggattgctaatcagatatacttgttcttgtcccaattttaataaaatatgtatttttctgtgaggcatgctctttaaattttgaagtatctaaactgatatggtggtctcaaggttataattctattctcttttgaaaataaagcctcagaacatctgtaaatacaatgtctgagttttgagacctgtggcatctgtaaatacaatgtctgagtattgagatgttttacaagttacaaccattataacaattcttctttgaaaataagtaaaggatgaaatttgatccagatgttggcttactttgtgctttttgatgtgtattgaaattcataaaatgtgaactgtctagagttagctgcttcgggtcttgtctgttggtctgtggcaaatgtatgttggaaagattttctcttgtttgaaggcgtgttggtattgcttttgtgaaaatataacttaagctttgggattacgtaggacacagaaatcatagagcaaattgaccgcgatgtgcatcgcactcatccagacatgcacttcttctccggggacactcagtttgctaaatctaatcaagtatgtctttgataatagacgatcccttatcttcgtgggggtaaaaccaagtttgctaagtttggtgcctcttgtttcaggaggctttaaggagcatattaatggtatttgccaagttaaatccgggtataagatatgttcaagggatgaatgagcttttggcacctttatactatgtattaaaaaatgatcccgatgaggaaaatgtggtgagcatccaatccagttatctatagttttttacatcaattgctttaacccacaatttatttagcatttctttatgttcattattagatgtatccttttaaaactgtgttttcagtttccaatgttgagtaaattgtgtttcgtactgttttaattgctggtagaattatctcatagccgtctttgtagggcaactctttggttccgtatcaaataagactaagtaatggaacatggttcccaattttcatgatattcctagcacaaccaaataacccaatgttgaattgtaataataattaaatgaattaaggaaaagaaatagagttgataccagtttcaatttgctagttacgtttgattttttattttcattgtaaagttttttcggtctagaaatattctaatgtaatcgaatttccttattatctggtttagctttctttttttaatgctcattatttgctaatgctatgcaggcttgtgctgaagcagacacattcttttgttttgtcgagttattgagtggtttacgtgacaacttctgccagcaacttgataatagtgtggttggaattcgttccacaattacaaggttgtctcagcttctcaaggaacatgacgaagagctatggcgtcatcttgagatcacaaccaaagtaagacataatattttaatgatccgatcatctgagtctgcatatattttctcacgcctcgtgtatctttaacctcccgttttcagaatgacatgcttaaatttaattttgagttgggtttgtacattttattacattaatttagctcttcatttctacttagaccatatattgtttcctcaactatttcagttctatttctgagagaaaaccaatcaaaaaatgctttaagacaatggtgaggtgcaccctcgactaaaacgtagttttgttttagaatactccatcgaaaatttcctcggttgtgcacttcggtccttcaagtataaaatatttacattctaatccccttttaatgtaaaaggaggagtaaggattcacatttcgagaacacgagctgt

SEQ ID NO: 22945 - DNA, 6089 bp, Cannabis sativa
  modified_base (6044)..(6057): a, c, t, g, unknown or other
aaaggccagaaaccaacctcgtcggtaggtccttctcttggtgtgttgaacacttttccagtgcttgcagcaccgtttgtcaaatcaccaaattcattgatagaccagccatgtttaccaggtgacaagccactaaaattggcttcaatcctagccaactccatattcacttgagccaagcgaaccacgccaaatatttctgggcctttaaattcggccacagcagcagaaatcaagaaatctgccaagcaaaggaggtcgttaagtacctgagatattgtactcggttctattatcgaactatcaaaatatatcaaaataaagccttttctcatctagtgaaaccaattcatgaagagaagaaacactgcaagctgtctataaatccaacatggtatagttcactttttagaactgattgtatgctagtgccctattcaaggggcgtgtgtgtacatattataataatttagccaactcttatcattttgtagaagctccaaacaggtaaatgtaagctcattcactttaggatattcattccaaaaagctaatgatgcagtagttcttaatgcttagatcccaaaataccattagtggtttcagtgaatttagcctctatcaaattacaatcttgattttgtagtatacttaatctatgactacctcacaactagaactgagtgtgataagctacaagccctgataactcaagtattaatatgtgaacactgaattttgattgaagccaagaagttactgaaataactcttatttgaatttttattgaaatcaagaagtttgtgaaataactcagtaagttgcttaagaatcacaaaacagaaaatagagaagtttgaacaaccgaccttcagggacaccctgcccaatcagtctggcttttcgaccggtttgctctaaagcttctgtcatggttttcacaggtgttgaaccaagaattcttactacctgattactcaggtccacttcaacacttttaacccctaaaatacaaacaaatttgaactttacagtctacaacaagaaagggcaaaaaaaaaaaaggtttacaaagccactactataaacctaccattgacagtctgcaacttattcttgacagcattaacacaaccctcacacttcatatccaccatgtactctgtctgtctccatatcaaactaacaattgtaagttttcatcaaactaaagcacaaccccttaaatgaattttcaaatcaccactaaagttgttgacatatattagctttaatacaatcccacaaaaatttcctctttacacaaacagagctagttcagttaaacaaataccttaatttttagatactacaaaggataaaaatgaaacagcgtcaaagaaatagattaatcacaattctggggataacccaacaaacaaaataagataaaaagtggcgtgaaactcaaactcactaataactccggcaagacagcatcattctgcgtttcaaaattaagaaatatcaacaatcagattccaacccatcaaagaaagaagaaaaattaacagaaaacaaaaattgggttccgtgaatttgagcgaacctgagtagaggattcggaggcgggaccagccatttggagagctgcggaaggcggagcggagcttctagcgaggcacaattgatttgggaagaagggtacggtggaagagagaaaaggaaggttttggggtctggaaaatggaataaattgagaggaagaagaaagggaataagcaagaggtatggctgcagcaatggcagttgttgtggtagctagagacctcagaaatgccattctgttattctcaaagcttctctttttaagacctttgtggtgtggactatttttgtaacttggtacttggtcaacttttattctagtaccttccttgcgagagaattacactctcatttttttttattgtttgatttttatttttaaatattaaaaagttggtttcgtaatactttattttttaattttttaatcataaaataaaagtaaaaataaaaattttgttttgaaaaatgaaaatacattgtgtaattatttttgtttctcaattttaaaaatagaaaattgtattctgtaaagttcatttttatttttttattttatttaagtcgggtctaggttaggaggtcagatttgggttcgggtcagaggtcgggttcaacgccaaggtcgtgggagaatttaggtctgggtctggtcggagtctaatatattgattaaaaaaaaaactgtttaaaaaaatattgaaaatgacctctttttgttttcaaaattttaattctcaattaaaaattaaaaaagtgaaaataattttatagaatatgttttaaaaaaatatttttattcttttaatttcttaaataaaaaaatattaacgtgacctaatttttttcataatttaataaaaaatttctctccttcccccctccccctccccccaaaaaaagagaaaacctataattcaaagtatgtatcacatattaaattgccaaaataacataaaacctatgaaatattttatgtcataactaaatttcatgatctaattagacataaagtcagaattttcttttctatttattaactttttaaagggagaagaatgcaagaggaaaaaaataataatataatattggctttctaaaattcaataaaattaacattactttttactgcaaacaaatatgtaaagtatatttgatcctttttaatacaatatttagatccttattttactattactatgaataatactaacaggtattataaaatttaaagatgataaatcgttattggtgtattttagtattaggttttgtttatcgagattttcggaaactaataaatcagagcataagaaataaataaaatagcaaataataggcaaacaatttttatgtagttcagacgttaataattcgtagtccacgagtcagctgtattggccctttgggcaagtattttaataatacaagtgtttacagtatgaatcctagctctccactcctcttgtttctcttgatgaagaagaaagcttgtaagaattttcgcaaaggttcggctaatataaaattgttcatcctttgtacataaaaaataagagtatttataggcttaatgtaagcaagggctggcactacaacatgacgatctgaccattattaggtagaaaacttccccatcgtgtggtgtacgactgcagtgaaggattcatgtgaacaagggcacgtgccactcaaaggttttaccttaaaaagttactacctagacaagttgttggacaaaaaagaggactttagaggcacgtacacgctactatggtctgatgcagggaacaatatctgattcggtgtcagaggatgggtaactgtcacttcggattctggatagggtactgttgaataagctccagtgtcaaaaactcaaagccttctcggatcacactgacctactaactttctggaatacttgaagcttcgagtaactttgattctccctaattgcggatggatagtaggagtcctatctgtactcgctaacattgaggacctttgattagcttccagaatatagtctccttagtgtcattaagtggaaagcatatactgatcatggatggtctagagtggcacccttctgtgatggccacatatcaggcattcaggaatacgaataatatttaccccaagttcccggactcctgagtgatgagagcttgcagcttctttccagatgcttaatttattattataatacgccaataatatcttgaaatgtggaagcgatcttttgtgtaactttggacagcggaagagttgatataccccttgttgtgatacaactatcattttgttacattttgtgaagccgtaaggcttacgcgccaggcctaggcgcgtttcttctggacaacgagtagtggcaggaaatgaaaagacgattggttcgtgttgcaatggtcttgctaccgtgaaatgataagtaatgaatggcccattctctctcccaaggtgcattaaatgcaaattcctcgagtccccagccttttgatggagcaactcttgataggtacgatctagaccgcccatttcaaaacataccaatctgttgccacccatataaatgaaaaacttggcgaagaagttcattttcccctttcttactttaatctgcaagttttaacccacaacattttcccagaagtacactcactcttaaacacttctctgaaccagaaacctcatcttctttcccaaccttgttgccagattttggcaatgatcaaagctcatacaggcgacgagttctttgttatggtgagtcacaaccagaccctcaagtggctcataggactttggacaaccacactccactagtgattcttcctcaacccttctacaagtaagtatttcctctttttggaccgttatttcctactttgattctaaaatgtggtctcgagtttgtagaaatacactatttgcatgcgtagggtttatgtctgaatattatggttactgtgtgtaaaatgggtgcgcacaaaacttggaataatacctctggaactagggttctgtcgtggttttttccttttgattaggtcgatgcgagcgtctatgtgaataaagttttctagttctgacatttaggttaaccttttcttggtttaggttagtttccaggacaatcctctttcctctctttgtttttgaaagaaaaacctagactttttatatttgttgtattcttagattcctgattcgtcaccataatagattgctctacgagggtggcctttcatgtgacgagtctggcagggacctctccaagcagtttagggagtccttcctcaatgctttatttttcatttggatatggggtattaactacttgggttttcttttcttcctatttttcagtgtctagtaaaaatggtgactttcatttggaaatcatgagccttgaagaggtccctagagtgtcttcagcgaatgcacccctgcgtgtttgggtcctgaagacccagctctgggaaaggggccttctgaagacctctaggaaaaaagtaaagaaaaggacaagggcaaaggtaaatccaaagctacctctctatctcctttggcacttaacacctctatttgggagatgggtcaatgacccaatcagctgagtaattacggcttactgaaggcgtattccaatgatggtagcatccaaaacattctcgaactatgtggcataggatgtctgtcatcgggaaatctccatcccagagtgtggaaggttttggggcatggagttggtcgcatatttcatgcggagcccaccttccacttagaacattttttcctcaattttgcattaaggaaggaactatgccttccaacttctttttgtttcatataagctgctcttcggatggtttgtattctgcaaatcccagggccaggctgccccaaccctgaaagagatactgtatttttatgagctgaaattgctccccatgcgggtcaccctacaaaggttgggttttatcgcttcttgaagtacaagcgcactcattatccaacaagcacctcctcacactgcctagatctacgtgagtactggttcttcacgacatgtttccctttgaaacgagtccgatgtctttcactggacttaaaaattccaggtacgagactcatctttttgtaacttttttctaaaagttaaaaatgcagtcccatctctatacatgactttgatttgtttcttatagaattcgtccccatgtctacgctaacaggcgaattgaaacaacaaataaccttctatgaggcttttttagaggaggagctgaaagtggaggatttggtgaccactgggctattgcaccaacatggattgattacaaatttccaaagcatccatggcgttagccgtagaggtcaaccccagatccccaacgatcattacaaaaaactgctacttttggtgacaactttttagtcacaacatnnnnnnnnnnnnnntaaatgtaacttttagtcataataaaatatta

SEQ ID NO: 22946 - DNA, 1827 bp, Cannabis sativa
agaatgccaggaatgaagaacagaagaaattctatctttgagaaaagagaaagagtgatgcttagacctagagagacattggggcaaacctaaatacttactaataaaaggtttatcctgaagattaagattagtaaggaaaagatctttaatctgagcagaaacattgggagagaacaaaatagaagatttattaaaattgatagcttggccaggagctttagtaaaaatatcaaaatttttagttagagcagcacaagaatccctattagcagcacagaaaataaggctatcatccgcaaaaaataaatgagttaaagaaggagccctacgcgagatagaaataccctttaaactattcctgtcctgatgaagtctaagcaaagaagataaaccttcatcacacaaaataaacaaataaggagaaagagggtccccctgtcgaagacccttagtaggcttaacactaccagtaaaactaccattaatcaaaaaagaaatcttagtagtagaaatacacttcataataagagacataaaagtttgaggaaagttaaaatgagacataatactatgcaaaaaatgccattcaaccctatcaaaagccttagccatatcaagtttaagcgcaacccaccctaatttaccatgcttcctagcattaatagcatgaacaacctcttgagccagaagaatattatcaaagataactcttccagaaacaaaagccctttgggctggggaaacaaccttgcccaatataatttttaagcgattagctaagaccttagaaataactttataaagagtattacataagcttataggcctaaaatcctaaatagaatgagcatgttttttcttagggataagagtaatcaaagtatgattaatgtaagaaaagtcccgatcattattaagacagtaaagcacagtattaacaagatcttgaccaatagttgaccaatttttctgataaaagaaagcattaagaccatctaaaccaggagctttgtccccagaaagctggaaaagagctttcttcacctcttcagcccgaaaaggttcccttaaatagtcaatctcaaagttattcagagggggacctaaagcagaaagaatttgctcaacagaggctgaatcgcaaccttgagaatgaaaaagattggcaaagtaagaagagacaatattactaatgccctccaaactgtttacaatctccccatcctcattcttaagaaaacgaatagtgttagccttttttcgtttagatgcaaagcgatgaaaaaacttagtgtttttatcaccaacattaagccaactaacacgagcacgctgtctccaatacacttcctctttatacaagaaagcatccaactgagattgtaaagccttaatctcagccatattactttcttctaaagggaggttattttgaagatcaacaatacttttactaagagcaacaattttatttttaaacaaactacgagcagagacattccaagacttaagagaagatatacaagactcctgtttggcaataaagctagaaaaatcagaatcagtaagagttgaaggattcatccaacaacactgaacagtttgaaaaaactcctcattttctaaccaaatattctcaaattgaaaccttttcttagaaagaacaggaacagaaacattatccaatctaatgtcaacttttaagactctatgatcagatccaaaaaaagctaaatgattcagaatagcattaggaaacagatcagcccaagaatcagaataaacaacccaatctaatctctcataagtggatccatgtttcca

SEQ ID NO: 22947 - DNA, 2514 bp, Cannabis sativa
ttaaatgtttgaaagctagtggaaacagacattcatttaaaatcatccagcgtcgccaccctccgatgggatttcggggggcgttcacgttgggtgattgaggatgtttgtgtatggtttgattttttccaatgagtggatttagatctgggtttgggttttattgtttttcgaaaacgacgacagtagctgagaatgagggtgaggtgagggtcaggtgggtgtttggttttttctaattgaatttctttttgctttgtgaagaagatgaagaagaaaaaaaaataattttatggttttaaaataaattaaaataaattttaattttttagttttttttttaattttaaattacttttaattaaaattatgatttagactaataaaaaattgacatatggcattttattagtatttaatatatctgttaaaaacaaaaaaaactaaccgacttacaaaaattacaatgattactaatgaacaagtttatttataaggaaagagaaaggaaggttaacacccaacaaaaataataaagaaacaaaaaattagacctaaaaaaaaaaaaaacttttccattttcaattcaaaaataatacctctatgattgaaaatgtagataagtttaacaaaattttggcagatttacaaagtttagatattgaaattatgaatagttttattgttgctaaattcattactcgagagatgtgaacatttaactataactctgttatatgacaaaaatgagattaaatttataaatgtttgtaatggtttgataaataatgagtaccagaagagaagaaagatcaacatgatcacagaaactctacgcagaagcactagcactgactacaaacaaaggcaagtggatcaaataataagaggcaatcttgatcaaatactaaacgagtcgttaagaggaaatcttaacaaaagccaaggaaacaaacaagcaagactttgagataagacaatggcactattcttccaagttaaaacaaaaggtaaaaaggttgctgcagcttcttcttccgttgctgcgttgaaattttggtcaaggattaatttgaatacctgatagttaaaggacttgaacatgatgatgatggaagcagtgcgacacagggaagcttcacttcgatgaaccttaatgtgtcatgaaagaacctagtgatgctttgtagatggtgaagtgaacattggaccatcttgcttttttatccaacaacgcaagtacttattccaatatatgagaggttgataccggggttcagtaaaactactaaacactcatctaccatgcctgtatctttctcatattggagaaatttggctacaaatgtctacagaaattgacttctacacaaatttgaatggttctgtgattgttttttatgttgcctttaaaaagacaaggaaacacgtgcaatagtgcagatgtaccacaaacagcaattcaatttgggttaaacacagccatttttttaccaactcaattcaactaatttagagtattacaattaaaacataaacagtaacatgctctgtagcattttttatacgaaaaataaaattaaaaaagcaaaacttaaaattcattacacgcccaaaattggatattatgaaacatcgggtgcaatgatcacagcaaactgtagttttggcgtcaaacacgaaatcagataattttcatccaaagttgcagcaaaatccacggtccggtaagcagccttcgaaaggaaagaatgttggcatctcaataagaattataaataaaaaaagatgtagacactagaatacgataaacaagtttaagtaaaaaaaaaaaaagaattaagagcaaaacaaatttctcctcctaataattataaaagaaaagtcaagtgaaaatagagataggataccttcaaaaacacttcaacgcctatcggttttaccagatgagcgctttccagagtacaaatgctttggcttcagagtagggatcactctatctgcctctccacgtcgtgcattcttgttcctcttctttgtggatttcttagcaatcttaagagcagaacccttttgagtagaatccttaaatccatcaccaggagtgacttcagtgggtgcccttgaccttgaccttgatcttgacagtgatagagatctagaccttgcacgtagtttcttgctgggtgtgtctgcatccatatccattgcatcgccgccagtggcatcaactgacctctccctcttcctacctctcttagagagcgacctgcttcgaactcgttcaatggccagagatggatcaatccccaatttcgatagctgccttcccattctctctgatgtgaactctctttccttgtcaaatttcctaggcacgattggcctgctttctgctgtacttttcttaattctatgctgttgtatgagtaagcttttctttttcctaattgcagccaatgccttctgttcatctggggtcaattcctgtccatccatctcaaaatcatcatc

SEQ ID NO: 22948 - DNA, 4149 bp, Cannabis sativa
ttccaacatctggagggggcctccttccagcgtttaggagacccccattccctccttttattttagggtttggtttgggggttaactgctggatttctttttcagatgagtgaggttctccgcgaccttcacgaacacggtttcttcggttttgaccaagagatttcagcactttatcaatcccaagacatgtgtacccctacttcaactggagcaaaatcttcagacaaggcgtccaagaccttggccaccttggaggaagtgatgaaaggaccggtggtccatgagaaatacacctgcctgtccactggttgggaggcggatgagttacactcaaccttgacctgtgctcaccaactggagaagatagttatgattgtcgggatcaagccttctgcgactgaagtttttcactacctaccagagaggaagagacgcccaaccgtaactatgacggctttggggcctggagtcaaacccaccttatgtccggggccatgctatcgctccaagattatttcatagattttttaatttttgtaccaactaattccccaagcttatcacatgctttgaggcctgtacattttttatgttgccaggaactgggccccgcccagtccggctgagattctatatttttatgaacttttatctgtccctaagaaaggggacaaacttaaagacggattcttcacgctccaggcccattctgccaatgagggtccggtgccttacaactttcagaagaatgtgaaggagtaccacaaccgattcatcttctcctcaagcttcaaagtcgttgagcgttcggagctgctcactgagtgggttagggcccctcctatgcactgtaccgcccctactcaactcttccttcaacatgcaaaagtctttgccaattacgataaggatgggttgaacgtaggggacttggtcacgaccgctaattacaggagggctaagttgatttcggagggccagtcagtagatgacttcaacttatccaaagtcctctgccccaacatccgcaaccctgagaccgagaaggcgctctgggacgatatcattgctttcgcggaagataaatacaagaaatatctcttaaggagggaacaagagttagtctacatcaatgcccaagctgcttcaaagaggatccttcgagtagaaacagggaaggaacaggcgacctctcgacctaaattccctttcacggttcctaacgctggggctcctgatgccagtacttctggtactagtaagtctccactgattgttcatcacgttccttctgttcaggattactctgcttgtaggccgatggaatttgatgaatggttgtataaattttaaatgccccattcacgttggggtgataacgccaagagtttttatttttccaaccttagtcatttcctaggccggtcccggatgggttccggtcctcccgtacccatcttcttggatcactccgcctatctatcttccagttggttcctcccctcggacaactttctaggggacgacgacaccagccttttagtatatacctttggtagggcagaattagatcgctagggtaggattagtctcattatattattcttgcatgcatgattttttggcgatgttctgacatctttatttatttctttgagcagcgaagccaatggaggacctcctacatgtactcgcccgaacctacagtcctaaatccggcctgcccgagtcacgcgacatagtggtgactcccgggagatcttttgctggcattcccgaggactaggtcgtcctgattgatgaggaagaggaagaaggtaagatcatccctaccctagactgcaaacgtaaaggcaagatggtagagacggaagctgttaaaaaaccgaggcaagcaaatactcctgctcccagtgctaattcggggattccgtccgaagtggacgagtatactgtgcctcccggcattatcttaactcccattcatcttgatgaggaaaggacccagctccgaatttccaaacacaactacgccttgggggagtacacccaggggaatgcagaggtggaggccctgaagaaaatactaaaggacgcccaggatggatctgttcaaagtgaatacgccaggaacatatgggatttgaatttggatcccttgaccaactggttcaaactctttgtggacctagcttggctcccttcgcttcagagaaaatgggccatttttttgctagcctgacccaactcccaatgaagacatatgcggcctgtgcctctaccaaccccgtgtatcaaatccaagacataagcgcgaccctcactgcagtgagttcttatcttttagatttctcaagcctctttcctttttgatacaaggttctaatatcatatattttttgttggttgccagattgcagcagaggccggtcgtctctcaaagacattaattgatcacggatacaccatgtctgaattcgagggtatggaggaggtaatgaaaagtctctgggagtcagaggagaagaaaaaggcaatccgtgaggaagcccagaaggagtctcttatggagcagaaccaccaagaggcactgaaggccaaggatgaggtcgttgctgcgaggaggagggatcttcgagattccaaggaagaagttcaagaactgactgccaacctgaaatctttggaggagctgcactagacggatttgaagacaacaactaacttgactgttgaagtgaaggagctccgcgagttcaaagagcaggctcgtaaagaagcggctaaggcaaaaagggatgctctcccggccccagtcacctgtcaacactgtcagaagagctttgacgatgggtttttcatgtgttggatagcaaacgactacaaccttcatcttcctttttatcccaaacctgaagaggttctggtccgcttccgggagaaaaagaagaggcttgacgcagtgctggaagagcgcaggggtccctgtcttcctcctcgggctgactaagtgattagcttgtttatgtatatttctcatttttttttatcctgtccttccccttacttataagacaatgctgctttcttttaaggggagactttttatggcccgtccccaggccttttctttttaggattttcttactctttgaacaatttatgtctttgaatcaatttaacctttcagttttcttatgtttatcctgtttatatttgtcctgtttatatttgcctttataatatgccttaatacccccctaagtgacataaaaagaaacttttaggtcacttagtcttaaaaaattacataagaggttgcatacatttgttcggcacaggttcttttacagaatataaacattgtctttaaatattgatagcactttcagaggtggtcaacgttccaggccctaagcactgtggttccgtccattctttatagcttgtaggtcccggagccgatttcatcctcaatttcgtatggtccttcccaatttggcccaagtacccccacttcggattcttgagtggttgggaagattcttcttaggactagttcgccaatggtgaattttctatctttgacctcgacgttgaagtatttagccaccattttttggtaagctgccattcgtacttgagactcatcccggagctcgttgatttgatccaacgcttcttgtaataaagcttcgttcattgtcggatcatatgtcacccttctgtgggatgggaacaaggtttccaccgggaccatagcttcacacccgtatacattgagaatggtgagtgtctggttgtggttcttggggtggtctggtaggcccataatactcttggcaattcttcaggccagttgttcttgcaggccagcaacttgttctttagggtgacttttagtattttgttgacggcttctgcctgtccatttgtttgcggtcttgcaaccccggagaagcttttaacgactccgtgttggttgcagaagtttgtgaattcttcgcagtcaaactgctttccattgtctgagactattttatgaggtaggccgtattgacacacgatgtttttgataacaaagtctaatgctttcttagcagttatggtcttcataggctcggcctctgtccattttgtgaagaa

SEQ ID NO: 22949 - DNA, 1562 bp, Cannabis sativa
  modified_base (1056)..(1058): a, c, t, g, unknown or other
tttctcatatcttttatgtgtttattttcatcgttttagaaattcatattaggatgttaaaaattgttagtaaatctagatccaggtaaaatatattcaaacaaggacaatctttatatccctggccactccagctagacaagctgctgcaggtaggaaaatcattaactatcaaaagaagagtggcgcgcatctttaacattgaattgcttgtagcatctcttgtttcaatcccgttagtccacaatttgttcagctcgtctaccagtggcctcaaaaatacatccatatacttaccaggtgatttgagcccagggttaaggaaagtcaacaagaaatcgttatccttcatacacatccacggtggcaaattgtaatttgccaacactataggccacatactgtacgactggctcatgttgccaaaaggattaaatccatcaacatctaaacctaatcgaacattttgcggatctcttacaaaataaggatgtctggtatcaaagtttttccatgcagaagaatcgacaagatgacgcataacattattttctttcacgcgcccaatacgatgccaaaccatctctttggctgtacgtcttttactatataatcttttcaattgaggagtcaatggaaagtaacgcatcaccttatgcgttacttttctccccttgtgttttctttaatccttctactagtcccacacactagcctgaaatctttcaatgcatgcttattgtaaaataagcaacaattgttcttgcacacatgaattgatcgtaccctaggcctaatttactaatttcttctttgcctcatagtgtgttgtaggaattttgttatccttcagaaatgcgaattttagcaatttcaacaattcatcaaaaatataatttggtattttccccaaatttttcaagtgcattaactttgctataaagttgagggagggtatccaatcgtaaccagggtacaactctgccccgatctcctcaaacatctcatcataatattgactcctctgaattccatcatcgatggctctttcttcannntttataggagggaagaaatcttcaattacattaaccatctcatcgacatcaacattgttgttagcctcgactagttcatctgactcgccatgggaaatccacctctcataactctacagtgttcaatggctgcagtctggtattcttacatctaacacaaggatagaaaattcttccgccacaatctttgtgattagacgcaagtgccataaagacttggagaccttcccaatccttacaatttctcatggtcactgaagtcttatcgattgtcatctaccaaaaaattataataaataaattataattgaatttgtttgtgtgacacaaattttatgatttatgtacaagttgaactaatggtgcttttattttattttctgatttttttttaacttttattttaaatagtattttgataatttcaaaggaaatattgagataattaaacttataatatttatctttattttaattaaaattagatattaaataaatttaaaa

SEQ ID NO: 22950 - DNA, 3518 bp, Cannabis sativa
atatatatactaattaagctgacattttcattttattaatttgtcttcaaatgagtttatattccaaaactttgtaattggttaggaggtttttgggtatattatttatataatgagactagaaaaaatcacaaagagagaatgaatattatatacatagactagggacgacgactctttaatttttcatcttacttattttgtatataggatgagtagggtcttaatattcatccaacttattttataggattgtttaggtgataatgaatgttctactctatccatattcatactttttatcaaacatttattatgtttgctatactattaagtccccaaacaaataatagacaatattattatttacaattattaaatttaagttgaaaaaagataaccaatcttcaaactttttggataagtttaataatttgtcctatttatatatatattatgaattagtgattattaaaacgatactttgtgtttgacattgagatatttgtaagataaaattaatagtacttgaggtataaatcttagattcatgatataatcattaattatgtttaattattattttttttaaaatatatacgttttattaatgtggattagaagattaattaaaaagagtaattttgaaaaatttgatgggtcaccgcctaaaaatagatgtaccgatacacccttttatgtttttaataactattagataattttaatgttaattttttcattgacaacatatattgttattacctgatgttttaaagttaattgtagatgacttaatactttaaacaaaataaataactcaataaaattaaataaatatatagtcaacatttaattaatgattaaaataacattaactaaatatcaaaatacgttcgcttatttatttggttctcaatacatactggccattagatgattcttattgagataacaaacttaaaagagtttgaagtaaaatgaagttatgaaatctttaggttacttactgttagtacggtccattagtattatgaatacatgtgacttaaatttcaattgctagctagtgtaataagaaactttagtggagatgctatacatattagagaatatatagaattggatcaaatgtaatttgttaatacttaattaaatatcgtttcatagtattaataaaacacatcatgatgatcatatacataatagtatgtcttaatcctgagattgttatgaactcctatatatatcatacaaccttttatttcacgcattaagttttgttgatatgatcagaccaagaacaattttttttagggatacagtgtactagaggagaaaagagtatcattaatgataaaaattgtcactgaaaggtctattttttgtcgctgatgctttgtggctaaaagccactattagtgacaatctgaaaataaacatgtcatcactgatacatttctttactttttttaatacagaattacacccctatcagtgatcacattgcccttactaaaatatttgcttttttttttaaaaaaaaaaatatatatatatatttattaattagatttcaatttttcatgataaaattttttatattagacactattagaacttatttactaaaatttttagaaaatcgatataaaatataataaagctaaagaaataaaatagatatagaaatttagacgaagactttaacgtcattcgagtattaacgaactctagtccacgagttaatattatctagttaacaaagcctttatgtattacacaagtgtttgtccactgtttatgaaccttattctttgccttagcttgtaagaaaagaattttgaacccttcccataaaggattcttgttatatttataggcaaaggtttctatataaatgtagcctactgatggggtaaataaaaataatataatgaccttgggctaactttgtgaggcccaacccgtgaggctatcattatctccttatgtacaatttacttgacgataggtggaaaacatgtgtcattttcacgtgtaataaatgtaatcaaataacttcttgataattaccatatttccatatatgaaatgcttgatttttagatttaactttagaaacaaaatcctgagatgatgagattctgtatcaaatgagcatcaaaatcaaccttgacatttggaggttgatttatcatctttccagaagcatcactggcaggtatctagatgctctcttgacttgataagatgtctttttggaacttggatggctcgatttattaaatttggtccattatctttatttgggttatacattgggcctttgttaattgagtttggatcatggaagttcacgtgttcttctcccaaaaacacagataacctttacccccaagcttttagaacttgagaattgtggaagcttgcagttctagatggtatgaggtcatgtgaatgtttaaaaaggtatggaccttttcaaattccaagccaatatgtagtggatgacaattttccgctttctgaatataacttacacgtggcactgtttttttagctcgtgaagagtatttaccttgaaaaaaatacatgaagtctgattttaagaaacaaagactgatcatgctagcgtgtgtaccaaggcaaatatcatcattcaaattacctcaattttgtaagagtcattaaactttaacccttccactttttgaaccgtcaaatgcagtttctattttcttgaatgtagtatgaaccatcgatttagaagcacgcggatcgccaattttactgtacaaataaagtgaaaaatatttgtttacaacttttgcccattttaactatttgagcttgaattttcttagagagaaggaatggaaattgtttctgattaatgtccaatcctttcgacgagttcttacatcttcttcttcgaatttgctcgtgattaaaacaaggagcaccacccacaattctcataatttattcctcaaagtcgtcggaaccactggatactcaagcggatattgaagcactcgaagatcaaattcacacccttcaatctagggtggtacgtctcgatcaaccttataatgaccacatacttaagatatggaattagtagacaattcatattaattattggcatattacgattatgtgagtattttgtcatatatgacatattttcaaaaaaaaaaaaaaaaaataggcatttgattaataatttatcaatttcaaaaattttattgaattctaggtgtatcgtagatgatatacatatttttttgtttttttgtattttgtgcctgataacagtataaataggttggctggcaatttcagtcacatgaatacaaagttatatcaaatatttgacgaggcaatattacgatatattttagaatattggagtttaacgatgtaatgaatttggattattttacccctatagttaaaagcttacttaattaaaagtaaaataagaggcaaaatagtaattttgccaagaggaa

SEQ ID NO: 22951 - DNA, 3033 bp, Cannabis sativa
aaatcctaatttttaaaaatttaaggtgggtcgcgacactcttgtagtgtcgcggcccgtgacttcaaaacacgaaaatcccttcaacattttatatagcgggtcgtgacactcgcttgtagtgtcgcggtgcttgaaggctgattttggacaacaaagaattaatttctccatgcctcaacattgaatcctaatgtgaaagctcgcctattaacttactaaacatgaccttactgcaaaatttttgcctcttagcgccctaacattgaagttcaatgttgtggcactactccacactttccaaccttttaatattagaagttcaacattgaattcttttaaatttctttcttgaattgacttaatggtgctctagcgacaaaattttatttaattaattcttcttgtacatttttttctcaaatttggtctattcttctccaatattaaacctaaaaatattatcaaccaaaagcgtaaaattacacaaaatacaactaaaactaattaaaattctttagaaacctatttaaattagtactaataaagtcctaacacatatattgagttttgagtttaattagtcacagtatacacatctcccactaaaagatgcttaaagtggacacatcttcatgtgtaattaatggaagaataaaaaaaatgaattagaaaatacatctataaaaatggataaaatgagtttacaatatctacatcaagaataaagattggtgtatgtgcctcctcgcagagatttgaggttgagttttaggaatgagctatgtgaggaggtgaagccttggacattttcttagattttgatgggagacttaagtagcattgttaagccagatgagaaagttggagggagagacttttctgcagcggagggacacaacttaagagattttatttttaatataagaggggttgatttggaggccatcgcggtctggtatacctggactaatggccaagatatcaagtctttgattaaggaaaggctcgatagggttgttgggtcatagatttttctaaagcgggtgtgaagaatttgccttctcagatttgagtcattccctgttgttcttgatactgaaatggacagagaatagactaaggctcaatttttttttattgatgcttggactctagatacttcttgtaagaatgttattgaggaagcttgggctttagtggtgctttgaacatgaagctttgttcttaattgtaagctccatacaagcaaagctttaaagaaatggaatgcaaaagtgtttggattctaccagcataaaaaagtgatgttggatcgtcttctggttgaggttcaaaatcgactgatgtcccaagagaatgtcgaaacctagcatctactcgtttttaggtcaaaaataggaaactttcaaaaatagtcaagcatcgcgacattgcttggagagccgccactcttataatgtttacagaacacaattcttcaattttctgaagggccatgacttccaagggaaggtcgaggctcttgctcaattttactaaatgggtgctattctaaaatcatgttgtaaagacttatggtattttggtcataacactctttcgatatagcttagaattagatgattcataatattttgaaaagctgaaagagagatttagaacttttattcagaatgtttttcctggaaatgaacagttgtatcatagttaaaaatttgcttgaaacttcagacttcatttcaattacaaacagagtgtgttgagcatccaacatttatttttttcatccattgtatcttacaactccaaaattcatgctaaaaccataaaattcatcttactagcatgttttctctcattttaatccatataatatatcttaccattaaaatctgaaacaagaatacaataagcgtaaacttgagcaataaaacataaaaaaattaaaaataaacctaaatttggactctaaaataacctaaaaatagacccacactacaaaaaactgctatttttagtgtcaattttttagtcagacacataatttttttgatgctaaatgtgacttttagtcacaataaaatgttacttgtgactagaatatagtctttagttgcaagttgtcactaatttagttttagtcacaacaagtattgtgattaaaaatacatttagtcacaataaattataattcttgtcactaatacttttagccacggactttcagtcacaatgtaggaatgataatttataattagtcacaatttttttacttcttaaccacgagttttgttgtgactaaaaataaaattttttgtagtgctaatagcgagagctgcatatttgattaaaatgtatatatatagaagtctttgccctgaattttctactatttattggcaagtcaaagtgtggaatcgattgtctataccaaagtataaattcatcttcttgcttgtggtgttagataaattgtggttgaagtctagatttttttaaatacaatgcttgcgatgatgagtgacaaaacatttatatcgacatgcttacttgattgacattttttttgtttaaaggattgctggacaacttaaatattatcatcaattaattatattatctttggtttctagactttgcttggttttaattaacaaataatacagctatatattattatattattacctaacaaaaacgtgaaccatgcaaaatattaattattgttattagtacgttacgtggctatatagccagtatgtatggttggatctcatcaatattatatatccaataattatttgaacattaattaataaataaatgaagattattatttacatttctgaatttatcatcctataatagttaagcaagtcaagaacatagtaacaaaattaatatactaaacactattagctagttcactattatagaaaaattatgaagaattgtgaggataatagtgatcttcatgatggtgcaggggacctatagtcgttgggggaaattgaaggtttgttgtggagg

SEQ ID NO: 22952 - DNA, 4004 bp, Cannabis sativa
ttttttttttttgtgttttgattttttttttagtgtaactttatttagttataatctctcaattagaatacaatttaactggttcaaaatatatttttaaatagaggttctactgtattttgtcaaaaatactaaaataaaataatgttataaacagtctattttcactattactcgtttattatttttttgaaaaaatttatacaatatacttaaaatatagttttacagattttttattatatatttttacggactcaattttttacaggttttttatttttttttctccaaaaaaatattgttctcgagtttttttttgtgcagtaaaatgaaaataatgttattttgaaaataaaaaactgcaattttgttaaaaaaaaagaaagttaaaatccgtaaaatgtaaaaaaaaaattgtaaatttgtcaaaatataattttttttatcattaaataatctttattattgttattagaacaatacaactttagggtactaagtttgaattcgatcataattctaagaagagaaaaatagaaaagagtaaaagacatttcttttgagttatgtttcaaaatattttattcgtgaaagaaaccatgatcatgtgataagaaactgatggagtgttctagaatttggataatgaaaatagaactagtttatcgtcgtcatcgaaatcttttgacggaataaaaaaggctttaggtggtttgcattcgagtttagaaaacactccaatcgggccgccacatgtaggaaatgttactaaaatggaaactttcaaagtggctggggactgggagtaggaatgcacacgggacggagaattgacagggagtgctcccccatctccattaaagattttaattatcattctcgcctgtttaacattcagggacaagaaataatccccttccctgttctgtttccctttcaaacgagaaattctcacctcatccccgcaggcccattcccatgtcgaaaatgagcatcctaactgggagaaggcttatatgttttgaccttgtttgaatttagaataaaggacatgagatttcatctcaaaaccaattgacaatgagaaaagtagttcatgcacaatatatatagtgttatatttccacacctagcaatataggactataacatccccttcaagataatggctagttttggctcatcttttttgtatagtaattgaatttgaatcagatactcgttaaagttttgtttggctctaacaccatgttattatttaacatgaaagtgtatggggttctatctcaaaactaattgacaatgaacaagaccgaccctgatcagttgaaatagactataggaaaaaaagtaaacccctattataagaataaatgttatttttaaaaattattaaaaaaatatgtatatatttttaaaagattttttttatttaggttcttaagatgggtggaccctaaacgcgagcctagcccacattagtctaaaatccggcctgacaataaaaaaaaaaaatcacatatatcttatatatgatgttatatttctatattttaacaatataaaactaagggatattttctttgtgccacaagagtatatttttgcctaaatattgtttcttttggttggttgatgttgtactgcctatgattttgcatttatggcaagtttttcttattttttttttatgtttgttgttttgttgaagaacattcttttgtatatgctattatcttatctttatccacaggttggaatttttattaaattgagtgaagcttcttggcatgtgacaaaattttaatttaaaaataaattttttaaataaaattatattaaaatgagccctatgtaaatatagttattgttacttaagagaaacactaaaaaaaatagagaagatttatatttaaatacaactaatgtaaataggaaaattgtctctaatatgagtatgtcctatagaaagaaaaaaaaaataataaattaactcaatttcaagcatgtctatatttatgaaaagtaagtttaaatctattttattaaatgagttttttccctcttattaatatctaataattgagttgtcgaatttttttaggttgtttttaattttttttttgaactattataactaccaaattatgttcttttgtctaaaattaaggaggaaaatttgatagtgataattttatagcttgtggggtcatttgcctccttcaatttttataaattaaatttttgaatattttatattaccccgacaaaatttatattttcatttatacccttacatatttttatttttatttctataaattttatattttttatattatccaacatacttttatttttattctacataattttacttttttttttaattttattttcacataattttatttttatccccataaaaattatatttttcaactaaaaaaacttttttttgcctctactaagaagtgtggctagctccgccactagttatgggacacaactttataacgatattacttcagaggtgagaaataattatatatcagattattagcaatgacaagcattatatttattatggtgtaattataacataagaatttggtactatatacacaatttaattgtgttataagtgttttattatgtcaaatttaattaagtttttattattagtttttttagagtatctttacatgctcttaggataaacaataaatttttataaatgaaaagaaattctctactttttcacgtaaggttattatctttgttatttaacctttattagtttaccttaacaagaaaaaaaatgcattgtacatattttaatattactttattctatcaaaaaagtcatttcataaaaaaggtttgatcatgcctactactatcttatattagtttgggttgtaatcaaatattcctagtagcattattagattgaaaaaggaagaaaaattcattggtatatttttggagagaaatactattttcattatttgtagttttctattgtgatgtttgacaatagctttctttatttataatcattttgcacaataataattgtgtggtttttctttttaacaaaatagtgacattttatctaaaattctcgacatcttctcctattttcaacaagagactattttaaaaaaaaaaaaatatgacacaataatattttaaaatggtctattttcatttagaggagtgctacaacctccaaacatacatgttaaaaaatatatttttttatgacgatttttgttataattacaacattaagtttataaattatcaatcttttttaaataatttacgatatcgacaataaaaatattgatattttaacttactatgcgtgtttacaatactttaaatttattttcagtactgtaaattttaaatctattttcggcatcaattactttcttattattattattattattaattagaacaatacaactttacgtaactaatactaagtttgaatttagccataatgattctaagaaatgtttctttgttttgtgttatgttttaaaattctttattggtgaaataaaccatggtcatgtgataagtatagatctagacatttttgtcaccctagaggagacgtattcatgaaaaatacaacatttaagtcaaggaatcttatgtgattgatcaagcccacttttttaattatttatatattatattatattttttaataaataatttacaacgtaaatatttaagtttaattttcgattataaataaatagttaagttaaattttttggcaataataatactttaagttatatttttaaaattttcgtaagtacctaattactgttaagtgttaactcattatctatatgtcactttcttattggtgtattgaaattgatttttcgattattgtcacgtgactattgccttacatttaacagttatgtacctacgaatgtttcggaaatataacttaaatattatta

SEQ ID NO: 22953 - DNA, 8754 bp, Cannabis sativa
cctcagacaccgaccccaaactcggatcggaccctgacccgagccccaaaactggacccggaccacagcttaggacctagctcgagtctgggattaagcttggggtttagggtctggggtccagtgtttaggtacgatttggggtccaagtctaggtctggatccgatcggggtcacgttcggggtccgagtttgggtctagggtcagttcaggtctgggtccgggtccgagcatgggtctgggtctggatccgaggtcaggtctgagttcgagttcaaatcttgggtcggtgttgggtctaggactaggtcccaaatctgaggttagggtctaggtttggggtttgaggtctgggtctgggttcgtgttttggggtctgggttcaagtttgagtttgggtctgagtttaggatctgggtccgggtctaggtccagggtctgaatctagatccatgtctaggttcaggtttaggttcgagtctgggtttgggtttaggctggggtttggggttgatgggttcatgtcattgtatggtgtagaatattgattttttttactaaaaaaaatctaaaaaaatatttcagcaagatgtactatgaagattaacttgattaaaacatatgacacgattgattgttgttttatagaggagctcctaaagcatctttactttcctccgagattcattggctggactctactttgtttaaaggggagaagctataatctccttatgaatgggaaaaattagggtaattttaaaggggctaaaggtcttcatcaaggtgaccctatttctcctgttttatttattctgattatggagtaccttacaagattattggcccgtgaagctagtaaaaaatggtttggcttccatcctttgtgcaaacagttgaagctaactagtctttgttttgttgatgatttagtcttgttcaacaccaaatcagtgcaaatcattcaggaagcttcaagtctttttgtgattcaactggccttgctgcaaataaatcaaaatccaacatctactttagaggcgttaaagatggcattaagtctcagattcttgaaatgatgcaaatggaagagggatcctttccattaaaatacttgggggttcatcttcgtccaactcaatggaaagcgtctgactgtggggttattatagataagctgaacaagaacttgaattgttgggctagccaaaacctttctttacgggtagagcgcaacttattcattcaattttgcttggaagtaggaacttttgggtgagcattttcattcttccgtacaaggtaactgcaactattgataaaagttgtcgtgattttctttggggattgaatggaaatagaagcaaacttcatctcccttcttgggaaaaggtttgtcttccgaaaaagctaggtggtattagtttttgtgaaggtaggaagtggaatatggccttaatggcaaagtttctttaggctatttccaacaaacaagattgcctttgggtgagatggattaattccatctatctcaagggtgaaaacatttggaacctgcctataaagtaaaaaatggggtggtaattcaagaagcttttgagactaagacaagttgtcagtgaagtctccttgaagcaagctaaaaaaggaaataaacttaaagttaaacagttttaaaattctcttgttatggccaatacagttacttatgctgagacaattttgaataaactcattttgccgaagcatagatttatctactagcaagtgattaattctcaacttctaacaaaagataacttgagccagtttatgacattatcatccacacttttccctatttgtgaataaagaaaatgaagatcacagccatctatttttgaattgctttttctcgaagatggtctttaaagaaattagcaagtgactgggttttgttgactggctgaagatagtttaagagctacatcagtggtgttcttcagctatgaatgatcttaagagtcaaatttgtaatgttgttttctctgtagctttatattgtatttggaaaaatcaaaacacttgtttgtctaagtgtagcatggctatttgtattagctgggagataaagaaattgattgaaagtagagtgttgggtttgagaatccataagcttagcaaaatgaatgtgtacttgattcagtcatagagagttggtaggcattttttggttgtagttcctttgtttggggttgcttttgctccttatggggtggctgctgccactgcctgtgtttgttccttatttggtttttgaataaagttattctcttgctaaaaaaaattaaaaaatagttttaaaaaacttgagccaaacaccattaaatttttaacataataaaaaattattttttgttctcatttttgaaaatatataattctaaaaactaaaattgaaaacacagcaaaacaacctcttaatgttctaaaacacaaattcattgtgtggttagcggcttggctgcgtctgaagaccaaggataggttgactgtcatggttgccttgtggacctaatgtgtttaatttgtgggaaaggtgtagaattgcatcagcacctttttttgtgtgagttcagcaagcaattcacaaagtagatgttgcagtgggtaggtttgaacattattcaggttgattttaactccatttgaaccatataagaatatcagaaaaaaggctttattattttgtaatgaatgaaaaattaattgtgttattacaaaaaatattgactttatatagggggagagatatccaaccctagaatacacatcaaacaaaactaagaatatcccaatctctataaccacacataaaaaataatcatttaatactcaatatgccccctttagatgaagtgtgcaaatttgtggcattcatcttgccaaataaattcttgaaataggatggaaaaagtggattggtaaggagattggcaggattgtgtttggtgttgacgtgaaggagcttcagctgaccactttctacttgttcacggacaatgtggtaattaatgtctacatgtttggtccattcgtggaagactgggttctcagaaatatgaatgacaaatttgttatcataatacataaagggtggatgtgaatgattaaccccaaagtccttaagtatagcaagtagtatagcaattttcaagttgtgttggccatggcttggtatttcacttcggtagaacatcaagatacagtgttttgtttcttagacttccaagaaactaaggagtcacccaagaatatacattaacatgtaacagaacgtagggtatcgaggatgtaccccagtcagcatcagaaaaaactttaagttgtacctcattgaaagacaggttactttcagcataggccttgagttggataaaagaaatagagtggaagaacagtccttgacccagagagcccttcaaatattgaagaattcattgggcagcatgaagatgaggttgctacggagccgaaaggaattggcttaacctgttaacagcatacgaaatatcaagttttgttatagttcaataaataagttttccaatcaaacttctatagcttgtaggtttagaaagtaactcctttgtatccttgcttagttgattgttgggttccattggggtggagactggtttggcaccaatatagcctgtatcagttaaaagttgcaaagtaaagggtctttgagagaccgaaataccattagtagaccttccaacttctaggccaaggaggaacctcaagggaccaagatctttgagtttgaacttagaatcaagctgtcttttaaacagttcagcatcatcaaattcattgctagaaattaaaatatcatcaacacaaaccaaaacaacaagaaaaatgttattagaagatcatataaacaaagagtgatccgaagaggattgtttgaacccatcattaatcaagctacaacttagtttagcataccattgttgagatgcttatttaaggccatagatacttttatgtagtttacaaatggcattcggagggagttctccttgatgtttgtagcctgggggtatagcatgtaaactttcttagtgagatcaccatggaggaaagcattgttaatgtccctttgatataattgccagttattaatggcagcaagagcgagaaggacttttatagtattaaactttgctaccagagaaaaagtttctaagtattctatcccaagctattgggagtacccttttgctactaagcgagttttatatctttcaatttcacctttcgcattatattttattttatatacctatttgtaatcaataaaatgatggctagcaggaagatatacaacagtctaagttttattggctgtaagtgtaatagttttattatctattgcttttctccagacggggaattacaagcttgggaataacttgttggttcagaatccaaataagcacttaaaatagaagcacaaaaattaggagaaaatttgtcataagagatgaaatttgagatggggtatgtagtgaaaaactcacaaagatagtcttggagatgagttggacgaacaaccattcttctaaaaatttttgtgacattgggaccgctcataagggctggaacaaccgctagtggcggtggtactactgcatttgtagtggttggaatggtcattttttactgtagcaatggtgcatttgtggttgcggtaacagccacacgttcgggcagcagaaaggggctaacagtggctggaatagacactgttgtgggcattggaaaggtgctcgtgggaactgaaaccgctatttgggaaggcacctaagatttgccacaaatggagacattagtgtgagaaaaaaaaagcatcaataatgtcggcagaacatgtatttttaagagggaaaatatgttcatagaaaatgacatctcttgagtgaaatatttggtgactttaaagatcaagtaaagtataagctttaataccagtcaggtatccaatgaacacacaagcacaagatcttggagaaaatttatgccttgagttgtccaagatggaagcataagcaaggcaactaaagatacaaaggtgatcataagagggtaacctgttgtacaacaactcgaaagaagatttaaagtgaagtaaaagagatggtgtgcggttcattaaatatacataagcattaatataataactccaatatccaagcgataagagagattgaaaagcaagagaacgagcaatgttcaatatgtgttgatgttttctttcgataatagagttctgttgaggttcattaaatatacataagcactaatataataactccaatatccaagcgataagagagattgaaaagcaagagaacgagcaatgttcaatatgtgttgatgctttctttcgataatagagttctgttgaggtctttcaacacatgaatgataaggaagaatacatttaattgcgaaaaaagaagtcaagttctgttctttcgcattatcgcatcttatccctttaatggaggtagaaaactgatttagcacataagcatgaaattgagatataatagtttttacatcagatttgcatttaaacatgtaaacccaagtaaatctagtatgatcgtcaataatggtaagaaaataacgataaccttctatgcttgtggtgtgaaaaggtccccaaatatctaaatgaattaagtcaaaagtagttgaagtcatgttattagccgaattaaataacaatttcttttgtttagctaaatgacatacatgacatggtaacaaaggtgaatcagaatcatgaaattgaagaattttattcaaaagtttggtaattcgcaaagaagggtgtccaaggcgtaaatgccatttttgaacatcattacaaggcttactagaaagaacattagtacaagttttattagaatgaacagaattacatggcgaaatcttttcttgttggagaaaaaaaagttgtccaacgcgattagcaatcccaatctgtaaattccgagttgtgtcttgaataaaacaattggaatgtaagaataaaataaaatatttcggattctggataatagatgtaactaacatgatactaaattgaaatgcaagtacaaaaaacacattagttaaacaaaaattggcattaatatgaacaataccagatttgtgaactggaatttttataccagtaggtaacataatatgagaagcagtgggaatagcatcaaaagaagtaaaatatattttgtcaaagcaaacatggtgggtagccccactatcaaatattcaaagattatttgagaaagatacagagttactagtgaagtgagatgccaatgaaatattgacattagttgtagattaaccctgagtttgttggatctgctgagtaagctgagaaatcatttagtgaagtgagtttatccgagatagaaggggaagcggaagcttggctagcagcaaggcttttgacaagaggagtatgattcaaagtggaacactgttaagatttagatttttgtttatcgaagtaacctggaggaaagctatggaggatatagcatttctccttcaagtgccctagtttttggcagttggtacaaaatgaacatcctcttattgtgaggaagattcgaaggctgggatggagtggcaataatgaggtttgggaggatgtgaagtttcctttatcgctcatgttgtatgatggtagaaaaaaccttcgaaagagacaagaaaggctcagtaatcaacgtttcatcgcgaaaagcctgggaagatttattgagcctaatgagaaatcgaagaatcttttcttggttttgaaacttggcattgtcagtggatgcttgacaagtgcaaggaagacgaggtcagagctcattgatctcgtcccatatggcccaaagctttgtgaaataagcagtgatagactcgtctccttgtcgtaaatcggtaagtgattcttggagctcaaaaaggtgaggaccgttcccttgactgaagtgattagtgagcttagtccacatctcatgagttgtgtcaagaaacattatactgctcttaatatccaaagaaacacagtgaataatccaagacaataccatttggttgcaacgaatctaaaatgaaatagatgactagtaggagcaggttgtggtagagttccatcgataaatccagtcttattcttagccccaagagcaagatgaaagtcccgatgccactgctgaaagttatgttccaaaagaggcagagtcacgagaatcaagccgagatgatcgctgaagccaacaaaatagggattatctttattggttgaacggtcatgagaagagagttgtgtggaaatagggtcaacaatgtgagatccaagattggtgagatgaacatcacttatagtaacagacggtcttagcgaaacggatcttggaggagctaacggagcagtcatcggagcagagcgagggagatcagagggtacatcaactcgtttgatcgcaacgtcaatgaagggggtgacattttcttgaaagttggaagcaccatgggaccggtggtgagatctagagcaacagctccggcaatggactcaacagctccgtcaggaaacaatgaagagggagccatcatagtcatagaagaaggtctggtcggagggagaggagcactgtctgttctggccattgaattaggcaaggaagaagatgaaccgtgaaaaacgaatctgagcgtctaaagtggatctagtctcctaagagagagaatctgataccatattaggaaaaggctttattattctgtaataaatgaaaaactaattgtgttattacaataaatgttgactttatagggggagagatattcaaccctagaatacacgtcaaactaaactaagaatattctaatctctatatccaaacattaaaaatgatcatttaatacttaatatagaaggtaaagcgagctctttgagaaaagaggtttatatgttggtttctaatgcttgtgtttatcatatttggaggaaaaaatagagctttgtggttttaagagatgaaaaccctatttataaatattcatggtacaaagaaagttattgtaaataggttctataatttgactcgtataaagataggagcaaagaatatagattggtgggaaaatttgtgttagagaaagtgagggtgatatattctttaagggtgtaattttttttttgtaatgcaatttactgacttatttatatatgaaaaaaaataatattcaaataattaattacaaacatctttgattgatttgattgattttataagtgtgtagaattaacttgaattctattttttataatttaaattattttaaatttcttaaaaatgtttagaatgtattgactataaaatacaatattatatgagaaaataaataaattataactctttaaatgttaaaaatataaaaaagaatacatggagacacatacttttaagttgcaatgtaaaacactttatttgattattaaagttttttttctttaactattaaaacagttatttagctattttctgcctttatttgtagatgaaagagcatccttcaaaacctgacataatgacaacaaatcattttgagaaatacaataattattatttcacacaaaagagatgagagatattataatacaaggaattaagtaattcgaaata

SEQ ID NO: 22954 - DNA, 2230 bp, Cannabis sativa
  modified_base (43)..(65): a, c, t, g, unknown or other
aaaagaggtaaaaatgatagattttaaaaaagaaggtaaaaannnnnnnnnnnnnnnnnnnnnnngtatagagtgtaatttcctcaatcctaattattctaaacaaaaatattaattagttcaagttgggagtattgaattttcaaatactccattcagcatgtaatccaattagatatttaaaataatatcttatataatttaatcataattggatatttaatatttgacgtccgttgttattagatttgattgatttatccactcttcgggccctgagtaccatatttatgggcttaatatagggcctttacaaagtacaataatttagggattttactaggtatctctatgggcttctgctctgggccctttagtcagagtataatcttaatgggcttctggtctgggccctttagactacaatctttaaaccatctgtcatctcacttcttcactgtcttcttctaagcccatttaacaaaaagaacattcataatatcaccaaatttcgaattaaaaccaggggagaaattgaataatgaaagttttgttttgaaagtgatgttgaaagttgtaagtattaaaataaaacccagcaaaagacaaatcattaaattgaacagtcagtgtgtgtatccctatagtataaataaatataaatgaagaaagacccaatttggtaggtgactactactgagtataccaaaggtattaatgggagttttgttttgtggctgagaaattagacacatgacatgaaatttccaaaggcttataaatcttaaatagtctgacctcccatcccatactctaatcaatcttaataatcattaacacatatttttttaatctttagattaatatttagatatatatatttatatggttgttcaatgtgtttgataggctgtctttatctagtgaacaaccaaattggtagtagtatatataaccgtactaccataacataaaatattttatggttgatcagttttctttttaggattttatagttaatagtttggtagaaatattactactcataatattttaatatatatatatatatatttatatatatacaaatactacaaattagacttataacattgtacatgttattcagtttttctctctattttttacacttttgggtctattttaaatcttttatgatcatgagagtattgctgttaaaacgggtagaattttttgatgtggcatgaaagtgacactagcatgaccatgcataaaaaaaaatatgagtttgcgtataatatgacacgatgctataaattaacacgacacgacatgaaaaatatgcgactaagcacagcatagaaaatataaagtaaatatttaaattttattaattttaattagtttttatctaactgtttgtaaaatattgttgaaaaattacataaatataatttttaaagtacataaatataattaaaactagagaatatagatatactttagaaattaattcatcaattgtaaaacaaaatatataaaagtaaagcacaattggagctctaatatgaaattaggttggcctgtttaaaaaaaataggtaaacaagagcaaagcacgtcacgaatccgaacatgatatgaaaataccgaatctaaggtcggtgctaggcctactgtttaaaaataatatcacgacatgatacaacctatattttttagggcacacccaacaagacctatatttgaaaatcacgaaaaaataagggcagaaccagcaggacaagtacaaatttagagcactaatcatgagaaataaacaagaagatgagagtttagtttaattgtgatcctttttgggatttaattgagagaaactcctttattgtggatgcatgtccatggaactcatgcaactccataagcaaccccttatagtccatagtccataaagatgagtgggccaaccagtttgggccaaaaatcacatatttggtaaaaacgaaacaaaataagagggatgtaaaaattattaaaggaaagaaaaaaaaatattttgttttatgttatttttttttttgaatgattgttttatgttttttggtaaataagaaaggcgagaaaattttcttatatgaaaatataatatttatctaattattaaaattctaatatataaatattataagttacttcttgttgtacatgaggtgaggctggtctctctctctttagacaataatcttatt

SEQ ID NO: 22955 - DNA, 3948 bp, Cannabis sativa
  modified_base (2503)..(2505): a, c, t, g, unknown or other
aaaatatataaaaaaaattatattagttaatgcattcactaaacaaggatgtactaatatatttttatctgttttggtttccaaaataatttttatttaaattttttatcatagtcatgtacgttgtagttatttattaagacatcttgcaaaattttaagaaattattcagaagaatttaacatgttgaaaacatggttcaaaacagtgtgttgtacgactattttattttatatacgtgtgaaatagactgtttgaacactgctttctatattgtaaattatttcgaatttttcaaaattttataaaatatcttaaataattaactatagcatatacgaatatgaaaaaaaaaatgggctaaatttttttctagatatcgaaacaagcaaagagtgcatcatacatctcttttaagggtgcattgtagaaacactcttgtgtatctatagatagatagatagatagaattgaaagattctaacatgtactctctaaaaaaggttcactgaagcaccctctatctattttgatatcagggagaattttttcagtctaatttcttttatggtcgtttaagttgtaattatttatgatatcttattttatataatctaatttatgagagatcatatatgaccacatgtgagtataaatgatattttttgtgaatattttatattttatttttaataatatatatatttataaatttcaaatgtaaaaaggaagaggtaattttgtatgcatatttagattttttttcaagtttatgtttacttataattattatcttgcaattattttttttttaaaaaaaaaaagtaagaataaatattgtactattacatttaaaaaaaataaatattgatacaataactatttggttggctatgaattatattgaaagttttaaattatgttttcaattattaataaagctaaattgtaacaattaaatttaattatcttaatttattaaatatactaagtatacatggtttagtaatatattgaaaataaaatttaactaaaattgtcctaaaaaaatatattgaaatgtattaattatacataaaaaaaaattaatacttataatttctctaaatgctaaaaataaataaagagaggtccctatagaataaaaacaaaaatgatatttttcaacttattataaatatatttgtatatattaacataatattaattatatacataccaagtacatcaaccacagttcgaccattagtaaaccttcctgttggagtaatagcattaggaaaatcaatcccataaggtttgtaattagctttagccattgttaaaagattgttgttgtttccactatcagataaagaatcaccaaatatgaaaagaccatgtacttcatcatggggatcaccattaacaccataataattatgattatgtaacaatatgatcaataccaccatagttaatttcatcatttgggtacccataatttttatatatattattgaagaagaagaagatatgtaaacaaacactcactaataatttatataatgcatatacaatgcatattatatggtttatatactagttcaattaccctaaagagtagtgtgttaatagtaatatatcatatgttagttgttatcaaagtcaaatggtctatgagtgtatggattaattctcttttatttttatttgttgattttaagtcgagtccagattcgagtcctacgcctgggctagggtccagggttgggactgtggccaaggtcctaggccagagtctgggttcgaagtcggaccgcggttggagtctgaggtcaggtccgacatcagtccgggttcgggtcgaggtctagggtcaaggtctaaggtttgggttttggtctggggttctggaactaggttcgaggttcggcgccagtcggggctggggtccgggtcttaggtctaagttcgagttcgggtctgggtctgggtccgagtccaaggtctgagttcgggttcgggtccaggtcaagcatcgagatcgtggccaaggtctagagtcggattcgagtccaagttcaggtttgggtctggggtttgggttcgagtcagggttaggatctagggtccagtcagggttgggtctgtggtttaggtccagacccaagtctgggtctgatttgagattcgaggtcaggtgctggttcgggtccgggtatgggtccgagtctaggtctagggccagaattcgaagtcgggattcggttcaggatccaggttcgggatccaagttgaggtcaggtcagggttggagttggggttagggttcgggttccaaggtctaagttgtggtcggagtccaacatattgatttagaaaaaaaaaactatttaaaaaaaattgaaagcaacctttttttttttccaaattttgattctcaattaaaaaaaaataaaaagtaaaacagttttctagaatatagttttagaaaatattttacttttctaattttaaaaannnaaaactaattaaaaaaatattactaaatgtgcccttaattaatacatgttattcatatcaatattataactcttggatatggagcattattattatgcattagtgtccaacatcattaacttggtggagctttgtgaatagttttttataataattattaaattaaaatatttattatttattattttattttttatcgataatatataaacactattagtgctctttaatattagtcatttataaattgtaatttttataactaattatgaaacttttaatgacaaaataagtttaatatatatatatatattttagccacaactttattacttttagtcagaaatttgatgtgttaaagtaaatttcctttgtaattattactttgacaactgagaattgtgtttaacaaaaacttataacaataaaaatgacatattaactaacattaatataacattaatatgccaactaattaaatttgttgatagtgttacttgttggtgattattaactacttaataaacttaggtaatttttgtgcacgcatggggctaataatttagctataattgtgtactcaagattgattaataattatacttcaattaattctctagatctaaaaatttggtttgatttgtttttagaatatagtatatagttttcatggtttttataggcatagatagactcaagattttcattcaattaaaataatataatataaaagtgtaactttacatgtttatttagaagagatggactctcctattttattctacataattaatttttattttaattaaaaaaaaaataagcataagcaagaaattatatatgaggttgatggtatagtgaaatttggattctaattaagcttgttcgaacaagatttgaggtttgagtctcttctcagatactaattacaaaagcaattgttatatatatttcggtctaaaatatcttcgtgaatgcatttggttgatagtgatgaaatagaatataaacgaaataacttttaggataaaaatatcgatattaaccttattcaagcctttaagaattcattttctcttctgttcataaataatgctatgtattattattacaaagttttgtactctcttcttcttctcatataatcattatgtaatacttttatttgtattttgaatacatttccattttatccccctattcactcaaagtgtacttagaaaacttccaacactataaagacaagtagatgatttaataagggataatttcaaaaaaataaaaaatacaaaaacaataaaaaaaaattacaaaaatatgatttgtacgaagttttcaacattcttataatttttagattttatttatataaaatacggtgttttgaagtatttttatgttatatttttgttatttgttgtttattttttgttatttgtatat

SEQ ID NO: 22956 - DNA, 2373 bp, Cannabis sativa
aatcatgtggtcattattgtgaacccttggtcaatcaaagtcttagaaagacaaccaacctctgtacgaatctggtaacaataaataataacgggggttggtagggacattaaaaggagcaaaaaggaaaactcgaaaaatgtttaaaatgtagactcatcgaggtaagggccacgctcatgtcctagatttggtagactgggttggaagaggcgcaaactgcaaatctttttgttggaagctgagttaagtcatcagcaaaatgacttaccatctctaaggcaaaaggtgccagagaaggacccaggtagtgcttaaaccagatagtcatgggatcgaggttcaagtcctagacttcaccagtgtactcactccggaaaggaccatcgtgagcctcccttagccacttttttaaggcctctgcctctgcctctcccttcgttagctcatcgacgacgtagttgtgtttggcaatgcaaagttggacccactcttcatcaggatgggcaagggtcaaaaggatagcagggggcaggaaagtcttcaacctcggacaggatcgcagagtcagtgcttgggccaggaatcctagaaggcatgggcctcttggaaggtttggagtaagaaaccacacccttccgtttttggtcgagttggggaacctcttcctcttcctcctcgattagcgctacctcttggcttccaaccacttcctcatcttggcccttgggagtcaccaccaccaatgggggattggccacctctagtttagggctatgtgtagcagtcaacatggccaatagatcctccataggcttttctgttaaaagcaaacaagggaaaggttaaaaaaaatatgaaacacatcgagcacgaacatgaagcagtaaacgagtaaggctaatcctaccgtgatgccttaattctgccctagcaaatttttataaattaaagagctggtgtagtcatctcctaaataactatctgaggggagaaaccagcttgaggttatgtagcaagaatgatacagaagaataaggattgggaggccggaacccatttgagaccaacccaagaagccactcatgttagaaaaataataatccttttccctattaccccatcgtgcatggggaattcgaaatttatacagcttcatgtcaaaaccaactggccataagtgagaatactcttgagcaaagggagaaaaatgatggttcaaaggggacttatgagcaccagaagtattggctctaggagtccggagttgggaaccagaaaagggaatttgagtctgacaggagaaacccttttcctggtcttctcgtggctaagtctcccgtaagcactttgaaggcaggcgtaacatagttcttattcctttttgtacctatatttgttgtatttgtcttccgcagttgcgataatttctatccagagcttcttttcaatcaccggattcctagcgttgggacaggacaccttggatgagttgaaatccttgactgtttgccagtccaagattagcttagccttacggcaatcagcagtggttaccaagtttccaacattcagctgctccttcttatagccagcgaatactctatcatggtttaggaataactgggtggggctttcttgtgcagcggaggaatcttgacccagtctgtcagaagatctagacgctctaaagccttaacccccaatgaaaagaaaaacatgtgacagtattccttgacattcttttgagaattaaaatgtactggggtttcgttggctggacgggcttgcaagttagaataacagtctttgtacttgtcactcttcttggggacaaaaagaagttcataaaaatataaaaattttacagagctagggacagcccaacccctaacagcataaaaaataaaaaggcctgaaagtaggcgatatgcttatgggataagttgattagggccaagtccgacaaaatgaagaaatctatgaagtaatcttgtagtggtaacatggctcctgacatgaggtgggtctggctccacgctccaaaactgttatagttatagttatggttgggtgtctcctcatctctgggtatacggtggtagactcttgaactagatggcttgatcccgttcacaaccacaatcttctctagctaatgagcacatgttagggacgagtgcaactcatcggcttcccaactgttgaaacgacaggaacacttcttgtaaggtaccagaccttgcataacatcctcgaaagtggtgagatttttagtcgccttggccgaagaaggattggcagcaggggtagcattagacagtattttagagttcgacatcgagttttttgaatggagttctagaatttcct

SEQ ID NO: 22957 - DNA, 3047 bp, Cannabis sativa
agacctgggctggccatgggggacggaaatggaggtctcaccggaaaatgatttatttttttttagaaattatataacattttttttctaattttttaatgcaaaaataaaataaaatatatgtaaatgaaaaaaaaaattaatatcgataaaagagaagatgagttataattacaacatctttgtaagttttttttgttttgatgattaagaaatatacgattattactaactaataatttattaattttgtagtataaaataaagataattaaacttttttaaagcaaaattaaccctaaaagtaaaacgataattttattaaaaattctttaaaatgactcgaaatgaattctaagatacaaagaactcaagacaagattcattaaaatttaggagaattactccatataatattttttcaatttttttttctttcaaatttacgattttggtttttaaagtggttgcagcgctagttgcaatatggatttctacgtaaaattccgtaaaaatgtaacaaaaactattttgaagtgtaaaaataaaaaaacccttaaaatttatttatatttttttagtcttgtacactaatttacaagtccatacttcaaaaattttaaaatattaaaggtatttcacataaataataactaaattttatatattcattttaagatcacatatcattaaactaagaatgcaattgaaatttttgaaattagataaataagtaaaaagttatgcacctttttgttttaaaaaataaactttttgcctctgtaactaatttagaatttcgtttggaattcaaaattttggttgtaaccaatccaaaattcagattccttccagtatttcgaacacggcagaatacaactaaaaatcgtactaactaaaaatcgtactaacgactataaactgctatttttcattctcatactttataaacttgtttttcacgcaaaataatgtgtagctgagtatttatttcatatactaaacaaattcaagtgattttaagagctctaaagtttaaaatctaaaaaaatacttttaacaactttgaactaaaatttgtatttattttttctaagtgtgcttgctaatcactctaggttctttattgttttattacatttctagagtaagtttgtttgtaatcataaacacattttgttatctcaattttcgcacaaggtgatgtggcatccatctgaggtgacacgtgaagaaaatttcgtaacttggacggatagcacacttcacattgtactgttcaaggtgatttattactcataaacaactgatttgaagaagaaactgggatatccgaacaaggtacattacactgttcgaccaacatccattctacagtcagtttgcatgtaccgaccagaataaacaaagttagaatatcttcaaaaatattcctcaaatgttcaaacaatataagtatcgatcaagtccctcattttgtgagattaattcacaccgacaaaagaaaagagaaaaccacctaatcatcaatgtacatcacttatctactcatgtaaccaaattagagttccccatatatataatctaaatataaatgatacataatcgtgaacataaaaaacaaaatataagtctcttttaggttaaagacataccaaacgaaacaattgaacaatgctaaagcaagtcttgattaagaaacatcatgggaattaaagaagatgaaagcagtactgcacttaaaagtcctatataattagctaattaaagcacttacaaagttacaatctatataacagcagcattataaattggtctagaaatggtaacatttaacaaagcactattatctgtatgggtttctttggtaaccaattcaaagacacaagaatgtccaggctgcaaattgttctccctagcaaatctactccatccaccacataaaaccagtccacctccattactagccaaattaacatcccacaagttcttcggaatacactgcagtaaagtaattcaaatagaccataataaactaacaataatgagttgctacttcagaaaatttgtcaccccttgaagatgtttgtatcattaagttaaaacatattttaagcatgtatgacaattgattcacacacttatatataactatcatggctgcttgtgtgatctttagattcggatccaaacttcacatttccttgtgttgtgcaagaacactgctgtagcaacagtcaacacacaataacagagcaaaataaagatcaaaatgattaagaacaatgaaccaaattaaagcagtaagaaatccaattcactaagaaacttttgaactgaattatgagcatgaacaagaagaatctttattgttgaaatagctttcattacaatcaatgggagagagagagaactagagagatgaaattcagttacaatgcaaaataaactacataaaatcctcacatgagggaagccatttcatgaatggacactccctttaacatccctccataaacactctcacaatctctggtttttagtttctcaagcactctcttagctatattaaaatattaatccaagtcctgaccttacaagtcagcaagttacctatttatagtagttagttgtgacagattagagggtaaccgaattagttggttaggacagttggtaatgatgtggcaaactaactgttcacatgtgtcttaattataacaatttccaccttaattgagacacaagtgaactgaagtttgagaagtttaagattcttcaatattgagcaaggttaggcaatgcctaaacttgaacaaagtgacacacttagtaagcatgtcagcatggttgtggttgtactaattttcttgacatgaacctggttgctagtgattatgtctctgatgaaatgcagctttatgtttatgtgtttagacctctcatgatgtgtgggatttttcatgagatgaagttcactttgattgtcacagtgcattgttatgtcatcagggttgagctcgagttcactagtgaatcccttcaac

SEQ ID NO: 22958 - DNA, 3054 bp, Cannabis sativa
  modified_base (2903)..(2904): a, c, t, g, unknown or other
cgacttttccacttctgcaacaacctccttctccggttccagttcatcgcacgggtctaggaagacctccgtagcttcatcttggattgaggacagctccgggcttgcagcagctacagtgatattggttgcacgaggcttcgatgtacctttcctcttcttcaccatgggaagagaatcagagcatcacacgccttttttttttagctttcactactttgtttgtttgttttttgttttaaagaataattattgtattaagcaaatttgattttgtgtttttctaaaattctctcaaaattggagagattgattttttaaagtttggagaaaaaacatctccttccatctttctcttgctaaacaaaagatttagagcatgttttgtattgttttctattttttattattaaaattgtattttaagaaatgagaacgaaaaattacttttgaagttttctaagcacaacttgcgcttggttaatgttttctaaaaatagtttttattttcattttatttttttaaagaaacactttacaactttgagacttcgatatgaacaagactcgaccgaacccggaccccgaaattggaccctagcctcggaccccaaaccccgaacctaaacccagacccagatctgatccttggacccagactcgacccccaaacttggacttgacccccgaatcctgccccgaactcggacctagaccctatcaccgaacttagacctcggccccgaacctcgaatccgaccccaaatccggaccccgagactggtctcgaactctagccttgaccccagacctggacctagacctattccctgatctcgaatccagacccaagcctcagcgccaacctgagacctggacttagacttcagaccccaaacctgacctcaaacttggactccgaatcgaaacccaacccccaaacttgaaccccgacccggcctcatattatatgggttgagactaattacataaattgtaatataaatatatatatatatatcatttatccaattatcaaaatattatagggtttgtttcaattgctcgtgagtgatttgtaggatttattacactcatagctaccaattcttaacctcacacaataagattttagtaatttgataaatactaagtgtttgattgaaatctataaaaatagattaagtacacattattatgagtacaaaaaaatgtgtgtaatttaggtgtgtttgtgaccactataaaattctttatgtaaagaagaataaattgaccttgatatatgactgaaattcattcgaatatctgaaaatccttactctcccttattggtttaaggttgacaaatatgatgaattttgatcactcctttttagccactatgatatatgaccccattattccaaataataattatatcaacaaatatatatatatgtacacataaattatttatatatatgaaaaattcgtgttgggtaacttgggtatgttcttgtgtttgacttgatgaagtgttgctctcaccctacttgttttcaaacacataaacactgccatttctgttcattatattcgaagttgcttcaaagagaaaaaagttagagcccacaatacacacagtacaaaccatttttcatttattatatgctcattcaacaaattaaatattaatataagaaaaaaaaacccttttcttttgcattaaatttctgttgtttatttgttggtagttttggtcctcaatttttaagcaaaattatacagattccatgcaataatattaatattattgagagagctttgtaagtgatgagtatcggaacaataataatggaattagttgtttcaattttcccgctgaccaaacttggagaggaaaaaagaaagaataaattctattttatacatttgcaagagatggaataaaatgaggagttttattttatatattattttataatttttttaaaaaaaatttacagttgttttggtaatttctatgtttgttatgtagattttggttggttgcaatttaaattactcaattagttgatatgtactgggttgctatgtgtatttccgtaaaaatataaaaaaaaatattacttttgaaatgtaaaaataaaaaatctctataaaattaacatatatagactagtatttggattaaaatgataataatttgacttatttttagaaatgtttacaaaatagataaaaaaaattacaaaaatatttcaacacgattttttttttttattatttttactttttaaatttttttatttataaaaatatattttcagtaaaaataataactattttttagttggtttatagtttatttatagttaactattataagtgtcatgaggttagatttctagttgtgttataatttatttatagttgatttataattatcgtgaggttgatttaaggtcctgattgatttctagtttttttagttatattttttttatttttttttaaataaagtgtatttttgtaattttaaaattttaaaaatatttttttataaacaaaaaatttagttcgtaaaattataaaaatatttttaaaaaatttcctatgtatataattgacctatttttaattaaaaattataataataacaagaacttaaatttctctctttcaatttaattagcatccatctcacccggaattcctcatactcccttaaaaatagtttcttgagcaactcttgaagaaaagtgttaataataaacttcgggaacatatgatatttatttaccaaaagagaaatgctaaaggtcatcagtggtgcctagcaccctcttatgtgtcaatatcgttattggtctaactagttattgggtcccatataatttaatataataacttttaagaannatcgctagccaatcgcaacacaacatgtcgaaaaagtgttaggcatcattggtacctaatagcaatcctcttaccgaaacatgagatcgatactagaaaaagagacttatttattgtctcgatttaccatgttagtcaaatatgatgacc

SEQ ID NO: 22959 - DNA, 2771 bp, Cannabis sativa
aaaaccaagacctaaacttagacccgaacatggaacaggactcgggacccagaattgggatcgagaccaagaattgcatgcaagtctcggttttggacctagactgagacccagatcaagacctgggacatgaaccgaaacaagactgtaacccgtgattgggattcagatcttatcctgggatctgggaaccagggcttggacaagacccatagtcggtgtcttgatttaggactcagagaaggacccgaagctggaccaggacatagacccaaacccagacctgggacccaaaactgaaacttgaaccagatcgtgaccaggaccctgaaacaggaccggactgtgaccaggacctatacctagaccgggacccagcctcggaactcaggctcagaaccagtcccaaacctagactaggaccgagactcgaacctgaactcgaacccgaactcaggactcgatcccagacccaaaccaagcccatgacataaactgggattcagacctggacatggacacgaaccagacccggactcaaataccgacccatacccagactggcatcctaacacgggacctggacccagacgtagacacagacccaaacctaggaccaagatccaggacccaaacctggacagggactcagacctagacccagaccgagatcagaaaaacccgtacttggactcaaactaagactcggaccctgacccaactaggacccaaagctaagacaagaatcgaacccaaacaataatccaaacatagactgagacctggactaggactgggacccgagacctgggacccgaacctggaccgggaccgagatcgggacccagatcgagacctgttcctaaaccctcgtcaggacttgagactcgcaaccaagaccaggatccggaccctgacaaggacctgaacctgaacccggaccaagattgggatcgagacctggacccgaatccagaccgagacctggactaaaaccaagactcatgatccaaacccgaacttggacctagaccaggacctaagaaccagacttggataggggacctagaccagggacctaggacccgaaacccagacccaaatctatatcgaggactcgaacccaattgaggacttgacctagacctgggaatccgaagtcagaactagacctggagccgagacccaaaattggaaactaaccaagaaccgtcgcaccaggaccctggaataagacttggaccgtgacgaagacccagacccagacctagaaccaaactcaaacctagccctagacccaaaccgagattggaactcgggctcagagacggtcatgtagctagaccggactgataccaggagttggacctaaatttgggattcgatcccaaacatagactcagacctagataggcatccgaagaagaacctgaacttagacccaaaccaagaccgggattgaaacttgggaccaagatctggtccgagatcttgacccaaacccaatcctagacccacacctgggacctgaactcggacccccacatgggacccgaactcggaccttgatctgaacctagatccagactgggatcaagacctagaccaaacccagacctagactcggaccaaaactcataccccgacccagacccaaaacagatcccgaaccaagacatagaatccgattgtgggtcagtgtttcagtccgggtccgagtccctatatagttttgggtctgggtccaagtccttgtcttggtcctgttcttgggtctcgatccacttctggtttcagttctactttcaactcatggggtacgggtcgagtccaagcatctagtctcggatcccaagtcttgaggtgggtcttaggttcaggtttgggtctgggttgggtcccaaatctcaatccaagttctggtcccattttgggggcccaattccttggtctgggtcccccatctatgttcaggtcctaggtcccgattcaggtctaagtttatgttccgattcaggttcaggtctcgggtcctgattcgagtccaggactcggtttgggttcaggtttgagttcgggtcccagtactagtctgagtctgggttttgggtcccaggtccgagtttggttcttcggtcctgggtctgatctcaatttttgggtctaggtttgggtccgggtcccggtcttggtctaggttgtagtcttggtttatgtcccaggtcacaggtctcgatccaggtccaggtccaagtcctagtattgattttggtttgagtttgggtcctgttacagtcccaggtctgcgttcctatcccagtgctggttagattctgtgttcggaatcaggtctggatctcgattttggtccgggtctgggttcgggtcctagattcaaacactaactacgggtatggtcgaagcctcaagtcctgattaggatctcggtcttggatccctatcttgttccaattcgggtaccgggtcccgggccccgggccgagtcctaagtttgggtttgggttcgggtttggggttgggtcccggtagttaggtcctaggttctgggtccaagggcaggttctatgtcatgagtctgaggtcaagtttctggtctcggtcccgattctggggcctagtttcgtgtccaagtcccccatctaagtcgagatcccttgtttaggtctgggtctaagtttgggtttggggcccaagtccccccatctaggtcacggttcggttctcaagtcccaggtccgagtcttgggtcc

SEQ ID NO: 22960 - DNA, 5489 bp, Cannabis sativa
ttatgcttatttactcacttatagcaaaatttaaattttatgctgaaatagattagtaggatcataatcccacctattacttgattaacctgtaatatatataaaccctaattatttaccattaggcttatcgggatattacaagagtcttcttactcgcatggttggatgcaatactattagacagatctaaaatgccttagaaaagcatttcactcttcaagtctcttccaagatttttgagttttgaactgaactttagaatctcaggaaaggctctctgtctttaaatgactatctgctcaaggttaaacaccatgttgatctcttgtcttttgttggtgaagtttttttatatcgagatcatattgctgcattcttcaaaggattgtcgagtgaatgtggtactttcattatattatccaatactcaaataaaagcgtactttgtagcagaaattgaagctcttttcttgctttagtgttaagaatcgagaagactgataaagagattaatcctagtatcaatcttgttgtagctgaatcagaagcagattctaaaactctgtcgcgactcaaaaaaaattcttgctcacttcaacagaaatttaaaaaaattaggagcacaaaaaggttctattccaattacccaaaattttatccttctaatcctttagtttccatgctaattgaggcttgtatcttgacaatttaccacgaggtggatcttcaacttacaattctagaagaggtattaccaatggagctagaggtggaaaatgtcctctcactcagaatagaccccaatgtcaactttgccacaagattgtccatactttaatcgattgtttctattgatttgataagagcttcacaggtattttttcagcttcaaatcctccttcaatgcaggctaatctggctcaaaacactcaaggacatgatggggattggtatcctgattttggtgctacaaatcattgtacacctgacctgcaaatctcataaccagtgatgactacaatggttcaaattacatctatgttggttatgaaccaggtctgtcaatccaacacattggccaaactctcattgcatgatctaatagctctaataaacctttgatccttaataattttcttcatgtcccataaattactaagaatttgttaaatatcttaaatttaactcttaataataataataataataataataataatgtatttgttgagtttcgtgctaatctttgttatgttaaggaccaagtaaccaagaccattcttctaactgggacacactacaatggcatgtatacttttaatccatgtcagttaaaggtgttgccattctctcaatccttattcagtcaagctatcaactcctcagatctagaaacaactttcagtgtcaccaataactcaagtaattcagagtcaagttccatgtctactcattataataaatctcttattttagattttgaattatggcacaataggcttggccatccatctgaaaaggtggttcaagttgctttgagtacatgtaatatttcttgtaataaaatttatagtttgtcaagcatgttgcttaagcaaaattcataaatttctatttccaaagttttttactactatttaatctgaacatttatagtttattgtctatgatttatggggtccctctcatattcaatcctgtgatggctataaatattacatgagttttgctaatgcctttagcaagtttacatggatttatctacttaagaaaaaattagaggctcttaagactttccaaacattcaaagaagaaactaaacttcaattagaaagaaaattaaggtgttagagactgactggggtggagagtatagaactttttctgaacctcttaaacaagtagggataggtcataggcatctttatcctacaacctattaactaaatgggttatgtaatgctctaacaattaggcacgctatgattttacaataaacataacctaatcccgctaaatcgggattactagaaataagagcagagtttaaactttaaattatttaaggaatgaaaatatcacttgtaactatttaaattttacaaaccattctaaaatattgcacatgttccgagatcccgtaaaacaatttacaaaatattacaagtcattttaacatgtcgacctaagcaacaaaccgagaatacagatacataagctggtagacccaacacacgtggtatagtgtggcccgaacatgtataatccatcgccaagccctcgaactcatggttcatcacaaactgatttaccctttcgtgcacagtagagcacacgtgagccaagcccagcaagatagtataaataacaatatgccatatattcacaattcaaataatattgatgccaccgcatctagtgtctatttagcatagacctatgtgttgctctcacacgtctatttataattcaaatactattgatgccaccgcatctactgtctatttaacatagacatgtgtgttgctctcatacgtctattacaataaggccttagattaatttatctcggttttgattatcaagtctaacctaattatgccttatccgcataattctttatctcaacatatatagcatgacattgcattcaaaatcattcaaacactagagtaataaccctagaccatataaccgctcactttagggtaataatcataatctcagtttctcacttaatcatagcataataccagacatgagcaccacaacgcttaactctatgtgctaacgactgtcttacctaatatcataagtatgtggagattctaaaccttcgggtgttcctgagcaagtgccgataatcttagtcacaattctcgaaatttcacatatggggttaattccaaaattcactttcacataatcacataatttgcattccaattgcagataagcacatagagctcgaaacgagttttccaataatataaagaacgtcccaaacgaagtcccaaatcaaaaatcatgacgaaaacaaaaactcaaaaattctagaaaaaataggacctcaccgaggcgagcaactacaggttacaggtcttgtaccaattagaaagtacaattattcataccaataataataattatttatttttgaaaatcaggaataataatctttatataaataaataattaaaaaaaataatcacaagttacaggtcttttggtaatggcggagaagaaagagattattccgcctcaatacgacgttaacgcgaaatgggatgactgtttggatgtgactgttgagcgttttgggtactcttctttgggtggagccttcgtgggtcttcttctcttcaggagacctttatctcgttgggcatgtgtagcttttggtgctggaatcggcataggatctgcatacacacaatgttcccaattattcggtgcatctcccgcaaagcagccttctcccaagttttctgagtctccagattctcatcaaggtcatgactaaacagaggagtgcatatgctattcaagatcttgggtaaatatatataaacttcataatttcatgattcttttgaattgtaatgatattattttgtatgaactgatgaattcctatgaactggggaattttaattatttttttagtctgaaatttggggattgtttttgtttattatttggggatggtgatagatatttctaggttagttttagagtatacagaatgtgatggttggtagatatttttttaattctacaattccagattgttaaaatggtaaatgagaatggtgagggaagtgttcatagatatgggtttggtttgtttgtattctttgagtatgttattcatgtaacaataagtattgctaatgggtattcgtgaacacctcataaagataatatggctccaattcaatatcagttttatgaatcccatccaattaatcattttccaaaagaaagtctggtttttttaagaatatacagagcaaattttgtccattaaactattaaaacatattgatcaaaataaattaaaaaaaaaacttgcattatttaagtgggaatgataaatccatacatacataaacattgagaaaagcaattaataaagattgtatatctcatgctttataaacaaaaatatagataaaatttccaaataaatagctagttcatattagacaatgtgacttaagacctgcatactccttgttagttcatacacagacactcccaacattaccaaagaaaataaaaatcaacatcaacattcaagtttctttccataacataaatgattgatcactactcatgatgataattcatagatatcacctaatatttaaagacacgattcacttttggtgctaagaaaagggtagtcagtgtagccaacaacaggatcacttgtgtaaaaggtacttctatcgtacttattcaaaggtgcattcagcttaaatctcaatactaaatcaggatttgcgataaaaagacgaccaaaagatactaaatcagcctcatcatctgctatggcttgcattcccagctctcgagtgtagccaccactacacatgaaggttccctggtaagattttcttaatgccctgattaagtgggcatcttcatcttcactgccgggtctacctgattctgttttaccagttgcagtgaatcgtggctgagtcacgtggagataagagagctttgatccctgttccagttgaagcttgttaagtctctccaccactgctaatccaaggcctagagggtctgagtcaagggcatcaaggtgatcgattgctggtgaaattctgacaccaactctgctgacaccaatggctgatgccactgcctcaaccacttggattaagaatttgcaacggttttcaatcgatccaccgtactcgtcggctcggtcattgatcccattttttaagaattggtcaaggaggtagccatgtgcactatgaatttcaattccatcaaaacctgtacaaacaggtgtcattgtaaaaaaaatcaatttgaagcaaccttgttacagacaagagaatcaataatacaagatagaggagataaaacgaaccagcttgaatggcatttatggctgcacgacgataatcttccaccacctcaagaatttcataggtttccaaggcacgagactcaggatacgactcaaatgacccttctggtaagagaactctccacttgtttgaaatggctttgttggttgaagatattggtgaccccccattgggttgataaactacagtatcattgtatcattcatcaagttttgttaattgattaaattaattaacatgtatgtatgtatgtatgtatggaataaaatgaatcatgtgttcgaaaataaacatatgagtcctgtatgattattattttttattttaccttgatgagaagcacgaccaacatgccaaagttgacagaaaatga

SEQ ID NO: 22961 - DNA, 4260 bp, Cannabis sativa
tgagtagaaaaggtcccaggcaagatttctgttccaaaatgatctctccttagctagaaatagatatgatcaaggcatgtattgagtttgtggttgacagactcaataatttgactcttcaatccaatttgctggaaataatttgatttgtgcaattagaagattttgagttaattaagttttgagaggacgtgttagctggtcaggctaaagacttgtcagcctcggatagtggaatgttactttacaagacttgagtttgtgtttttggcaacattgagcttagaaaagagattttagatgaagctcacacaactccatactaattgcactctggtaccaccaagatgtattaggatgtgaagccttactattggtggtgcagtatgaaaaaggatgtagtggattacgtatccaagtgcttaacttgttaactgatcaaaactgaacatcagaaacctgcagggttactaaatcttttggtgcttcccaaatggaaattggaggattttacaatggattttgtagttggtttccctaggaccatgggaatgtatgattcagtttggtttatagtggatcatttcataaaattaatacattttctgccagtaaagataatatatacagtggactagtatgcaaagttttatgtgaaagagatagtacgtttccatggagctccgaagtccattgtttcaaattgtcaatcagaacacgttcgcctccttcatcagcgatctcaactgtttgagtaggataggcccttcagttgaagatgtagttgctaagattgtatccacgaacaccagggaccacctgagagcgccataacacatagttggaccagtcaagtttctcagagatcactgtgcccattgtcgactgaaaagccacttgaagatgggaggcacgagctccaacattagaggagctagttgggcctattgaagaagatgatacgtgagttgccatgagacctgagctttgattcaaagtttgaacttaaagagaaagagagatgaattgtaaagagggtttagagatgcaacctctaatcgattgattcagagagtcaatcttgaattgaatttatagaagagagtaacacacgcacaagtggtgttctaacagcttcctaaaactcagagaaatagttagaaaccattacaatacaagttggaaatagactcagctaactaacaactacaatcaactgaagcctaactaatcttgacagctaatataactatattctagaacctctaaaagcactcccaacaactcctttaaaactagtttttctttaaaatgaagaagagaagaggtgaaaaaatgtgaaaataatggtccaacaagtgatgtattttaaagaataatataaagaatgtaatagtacttttctatatgtagagaagcactattcattcttcaaaaatattttaataatatataaatagtattttattcttattttgttatgtttattaaatatatatattaaaaaattattatttaaatgatatagagaaaaaattatagagaagttgttgtatgatataatgtaaaagtttgatgtaaaataaaaaaagtaaaattttagtaatgtattttaaagaatagagtgggagtactataaggcttctctctaggtagcttcaatcgaaacacactatcatcattgaaattattgtcattaattaagaaattgaagtttataatacatcgaaccaaaaatttagatatatcatttagtaaaagagtctgaatcaattattacaattaaatgagctccaaaaactaaaaaaaaatgtatatactcatacatgaacaaaataatttagttgctttatatatgcgtaattccttatgaagtttaacatatatatataaatgggaaattttctatggctttctagtttgattctcccaatattgtttctcccaggagctcactttttcaataatattagcatttttccgaagaagtgaatatgaagacgaaggatcataggaaggagccatggtacacggggcactatccgcagaactattcaccattgattcaatcatgaagtccttatttcgtcctgtagctgtgcatgccatagactctgaacatatttcaatagctttttcaggtattgttggctcatattgtaagagcttggcatattcatttagagcatgaaacatgtaatcgtatacattgtccatttttaattccttttggataaatccacttgttctctttcccatttcttgtgcctataataattaaacacaataataagaaaaaaaatatatctcagagtagattattgattttgatcaaacacctaaaaaattcattataatagagtaaattaatttgaacttatattttaaggaaaattatgcaagaattatgagctagtatttacctctttctggtgagagttagcccaatcaacagcaaacttaatggatcgacatttatcgttatcctttatgggccaataatggtgcaatggtatcaaacctcgactgaagaaatcaaagaaacgtggcttcactattaatggaacagagtcacatgcaagaatgtatttctcactaacagaccaagcagctccttctatgtaaatcttgtacctgaaattagtacaagtacataaattatttgaatagataataaaatgaaattaatcagagcaataaaaattgagatggatgtacttatgagtgcattggtctgccaaatttgattgtctgtacccttgtctttgttctcgtttccagtcctataataatagaacttattaatatatatagtatagacatgcatgaatgaactagtaatattcaattcttcttttattgttcatgatcatcgacttaagtaactaaaattaataacaattaaaatcatgcaataaaataacaaaaaaattacaaaaatattgctcaccacctggacataaagacgagcattccagtcttgtttaggagagacattacatttaagaagatcttttcttgtggcagcaactttgggatttcctttccaataagcataaggttctttgtcttcccatttcttcttattgttaccttcttttatctgcttcaataatggtatccatggccttatgtttacctcaggcctacacaaacaaggatataagaccaaaatatctatacatatatatataattaaagaattataagaaaaaaaaaggaaaaaaaaaagtagagatatatcttaccaaccccaaaaagaccaatcagggaagataatatcaagtgtatttttatctttgcagtaattaaaaactggaggtattgacgtggcattgggcccaataaatgctcttgacataacaactggtgggtccccacaattgaacatgaggtccaagtcaggaattttacctgggtacttccgtagcaactgtaggataccccatatcgtaaaaatatctctggtctgaaatgactttctataggtctctaggtaaaccttgccttttagtatcaccaatctaaagttggccaatcccatattctttgctttctctaccatttcccttgagatacctgtctgggcccagggcctcagatcttcgtgaatccatcgaaagaattctggacacgtggcagacgatggacggtcgagatcttcttcagggttgtaagtggcgggatagtttgaagggcaagttcttattgtaagattgtaagcagagcagttgagtgggatttcaattttcggacgaggtgttttggggttcttttgagtgtatttgtgggacttaatagcatttagaagatcctgacatgatcaaaacgtaatgacacaagaaaaatcaaggtaagcctaaatataattgcatttgaaggttttgaacactgacttcgttcaaaatagtaaaatagtatatagattagagaaatggtaatcatactaatggtgattacaaaaataccaattttatttacaaaaatacaaagaccaactttgtttacaaaaatagggattacaagtttgtaagcaactttcacatgtttttaaagagcttttgcatatatgtaaacaacttttaacatgtatattaacattttttttaaaagatataatgcaaaatataatttttttcacttttaatttgcgagaggactgaagaaaaagatgtaaaaagaaatggctaattagtaattttttcccccgaactttgacatgtactaaatcatgcaccctgaacttttttggcggttaaa

SEQ ID NO: 22962 - DNA, 1641 bp, Cannabis sativa
gtaaaataaattccaacattggaaccaaaagtatgatatggtggatggtatttttatctcatttatgagttgtcttgtgcaatggaagtcaacctaaaatagaggttcaaaggcttcttttccaatttttaaagctggtgatggagcaaaattttaggctaagccgcaagagaatataatcaaggtaactattgatgccgctattttctgtgatcgagcaacatttgattatggcatagtcgcaaaagactctcaagggaaattagtgatggctaagtcgggtagttttgttggtaaagggactccagatttaggtgaagcaattggtataaaggaagcgctaagctggattaaaactcaaccatggcagaaagtggagttggagtcagattgctttgtagcagtccaagctattcaaaatttattacctatgctttcttctttttaggggatttatagaaaattttcaaaaacttcttacatcttaaaacaatattttcttatttttttattaaacgatctgctaacatggttgatcatagtctagctagagtatcttgttattttccagatcaaatgttcaaaatggacgatgttcctatagaggtacagccagggccagtcctgaaatttagtgggtcatagggaaaaaaatatttttggaccttaatttagaaaaaaaaatgtagtatttttcaaaattgataaaaaaatgtataatttttaaaggagataatttttttggggcccttgagctaggtgggccctaggcataggcctatcccgcctatgctcagggccggccctgtgtacagtcttgtctttcagctaatttgacaaattaataaaaatactatatttgcttttgaaaaaaaaaaacacatattttgattcagttgtttatccaaattatatacgtatctcttttgaatcctttgattctgataggcttaggactgaacattttggccttgtttgacccagacccgaccccgataacctatttgttttggaaaatccattctctacgagcaggtcaggtctaacctggccaactctttgggcgggttcgtgtctgattttttgttaacccacaggtttggattggacctgtacccgcccacaaatctggctaattttttttaaaaatttaatatataacataaaataaataatgtatttcttatttaagattttaataaaattctatgtttatgtgtaagaatgaaaattaaaattaaaatataaatatgattattttatattaatttttgttatatattttatctattgaagatgaaaaatttaagattatatatgtaatatgtgtatatccattattttatagaaagcttatgccttatattatatcgacattaaatttataaatacttttttcagttagacatttttaaggatatcaatatataatatgtatggactatggtggataataattagtgcgaaatatatggatgaactatgaagtgttgagtatggactttgaatttttagtcactatttattttgtatgggtgagcataaaatccggaaaaatgaaaaaaccgttcaaaccgatctaccgaacactattggaaccgaaaccgaaaaaaccgctaacagtttaaaccgccattgaac

SEQ ID NO: 22963 - DNA, 8376 bp, Cannabis sativa
  modified_base (2685)..(2688): a, c, t, g, unknown or other
gttagttcgggttgatattatttttaacctgtccaatcgggttatattttcgtcgtgtttttcggtttgtatttttcgtcgaattatctcagttttgtttggatgggttgttcgagttgggcgatttacaaaaatttatatacagccatactcaataccacgtagctattaatgtaattatgtatctggtctcgtacaactttaatttttttttttaaaaaaatatcactaatcaatcgtaacatgtcacctataaaaagtgcacaataccaatgctctaaaataaatagctatttttttcattgtttcctcatccattttcattagtccgagtctccaaaaccactgatattcttcaacaccacctttattttttctcaaattcacacaaaagaaaacccttaaaaccccaaaatttctccgtcactctctctccagtttccgacttgggttttccggccaacccacttgaccggttctccactcttcaatcatcgctttcaggtaatttagttactacttatgtttcatttctttgtatgtatttgattaatattattcacagtaatgtgaaaacccatctggggttatccttaatagtgagtttacttagcttagagtaaaccctgatgagatttttcttgaattcatactttttctcttgtgggttagatttacatgagtggtaatagacagaggacccttgggggtgggggtcaacatgtattggattacttaaagcgaatgcaagcagagaatcctgctttcttttatgctgttcaaagtgatagtgagcattctggagggaatatattgtgggctgatgcttctgctaggttgaactatactcactttggagatacagtgatttttgatactacatatagaacacaccgttataggttgccatttgcctcttttactgggtttaatcatcatgggcagccattgttgtttgggtgtgctttgattcttaatgagtctgaatcatcctatgtttggcttttccagacttggcttcatgccatgtctggacatagtcctgcctcgattacaactgatccggagaggctaatacaaagtgctgttgcccaagttcttcctggaactcgccatcgtttttgtaagtgggcgatttttagagaaactaaagagaagttgcctcaactttatcagtctcagcctacttttgaggctgagtttaagaaatgtgttaatgagagtgagacaattaatgagtttgagtctagctgggaatctctgctccaaaggtactacattatggacaatgagtggcttcgatcaatgtacagtgctcgacaacagtgggttcctgtttatatgagagatgcttttttcggcgaggtgtctgggactgagggaagtgggggtttgaatctgttctttgatgggtttgtgaatgcgtccaccaccattcagatgcttgttaaacaatatgagaaagctatagtgagttggcatgagaaggaactaaaagcagattatgacactatcaatactacaccagttttgaaaacaccatctcccatggaaaagcaagctgctaatctctatactaaaagaatattcaaaaagttccaggaggaattggttgagacccttgctaatcctgcaaccaaaatagatgactcaggtactgttgccacttatagagttgccaaatttggagaagaccacaaagcaaacgctgttagcttcaattcttttgagatgaaagctagttgcagttgtcagatgtttgaatattcaggaataatttgtaggcatgtattagccgtttttcgagcaaaaaatgtcctgacacttccttctcagtatgttcttaaacgatggactagaaatgccaagactggacctgttgttgaagaacaagcttcagaattgccagtacattttcgagattccttaactgttcgctataacaatctccgtcaggaagcaatcaagtttgttgaagaaggtgctaaatctatccatatatataatgtggctttagatgctctacaagaggctgctaagaaggttgcttctataaagaatcgaagttctggtgctacacaaggtgctactctggcaaatggaggtagccaagagttgcattcaaatgaagaaaatcaaacggcagcttatcagtctgtagtaagttctaactactttccagtatccatttagttttagattattcctttactctgttttttctctggtagcttgtataactcaatctttgtgggcagttttagcttaacagatttgcatctgcagctcttatctgtgcgtagaaacatatttatttatggctaattaagatttttgccccctaattttgacatgtaccaaatcatgttccatgaattttttttgactgttaaaaaattattctgaactattgatattgttggatttaaggatttttattcaatttcatttaattttactaattcggtgattgtccatatactaaatcatgtttcccgaattttgatatctactaaattacgtctcttgaactttgacatgtgtcaaatcatgctctctgaactttcatctatgttagatttttcttactaaaattagataaaaatctttacatttaacaatctcaatagttcaggaaaaatttgtaatggtcttcaaagtttagagaacatgatttggtacatnnnnaaattcaggggcaaaaatcctaattagcatttatttatttatctttagaagagttgtgttgacattttttctctgtagtgtttattatttctttattatatttgacaaagtgtttactatttctttgtgattgtctgtaccacatcatcctcaatgagcatgcagtttacaaaatttcatttacatagtgaaacaattttctgctgtgtattttgactgatgtacttaacgattattatcgatgaacatcggtctttgaaattttcttctttttgtcatgaattcatatggggttctgtcaccaatgaattcatgaacaaccagataaaattgacaacatatgatttaatatgcacttgtatccatcttctccctcattttgcaggatgagaaggaaaagaaaattaacgagctaactactgagatagagaacactaatcaacggtgtgaggtatatcgaacaaacctgcttgctgttttaagagacatggaagaacagaagttaaagctttcagttaaggttcaaaatgcaaagcttagtttgaaggagtaaaccagagattgcagaataggtcttattagcattttccactgtatttgtttccttctctagctgcgcagagttaccaaacgccatgttcgcctttttttttataggcttatctaagcagaggagtggaagatgtggtggactggacatatttgtattgaaatgcttgtatgtttttactggtatgaacttgaatttcattgttataaaaccccgaaggagaccccaactagaacgaaaatggtgttactctcagagagctgtatctaaaggttcctaaagacgggaccacaactagaacgaaaaaaaacgacacgtcgtttattagttaaacgactcatcaaatcggttttgttatttcaccaattataaatgttttggtacaaagttatagaaccatgtcttcttaactttgagtagtttgtaaatggacacaacaaagtctttctttgatttcttaatagaaatttagcactaagcacaagcaataccagctttttaatcttataacatcaatgattaaatctcacgcaatagtaagtaatcacacaacacaattttattatgagataaagttttccaagaataaaagttggtcttcaaaaaaataatacttaaacaaaggaataatctagtgggaaagaaaagtaagagggcatataagaatatgaaggattctttcaaatgaaaacttaaaaaaaaaaagtgaaggtaagatacaaaatagtattgtggtaggaatcagtcaaaagataaataaataagaactatgagttaaaggaaaaaagttgcactaacataccttaagaataaatcatagaatgtactactttttttacttgggtaaatacgtgcactaaaattatgccgtaaaacattatacacagtgatatgatactctttttaaacgaggtaaatatgatttgttaaaataaatagtcacatcactgtatataatattttagtgtacgtattatcacctttaaaagtgatatttgatatttttttcttctaaaatcataaccgagactcttaatattagtgaaagtgtaaatttaaaggaataaagcaaaagaaaaaaagaaacaatgttaggagaaaagtaaaagaaaaaagagaggaggaagaatttcaaagtgattcttaactagttactatgcatgcaattttagccctctatcatagtaataatgagtttaaaattttttttgagagtatgttatatctaaaataaagtgtgagtattattaggtatctttttacaaaattttacaaaaatattatttttaatgcaaaaaagtatactataaaaattttagaccctgaatttagatgagccctaactcgcttaaccaagacctatgtggaacaaaaagagtctctctcatattacaattgtatgcatttcattttaatcatcaatttcattctcttccaatattttttcaacttatttaaagtgttgataagtgactcaccaaccaaaacaggaaaattttgtgggggtagcatcaataaatagatacttaagccttgattcatcaaaacaaggtttcttacaattgttggaacttctcaattggattgtgaatattttttgttgtgtgtaactaaagtctcacattatttaaaaatagaaaaatgtcatgattatataaggatgaacaatatttttattagttgaggttttttgaaaaaaaatgtccaaaaataaatctgtaagcgtttaatctcaaaccagataatatcataccaatataaagatacatcgtgtctatcattctcacaatctcgataaaaagatggtatgtgtatatattttaacttgtattgatagaataagtaacattacatattacccttagatgggtacaatggaaacaaacctcgagagacaagattactcacattaaagttgaaaaatcaattggaggcattgtcacatcaaaaagtggtactacttataaaaaccatcttcaattcatagttctttaattttatttttattttcttttgattttaaagtacaagagcattctagaaaacccagcatgctattttcttttcttccaagtgtgttgaaactcctttatttgttaaaagagatgaagaataaaatccaaatcactagtggaatcaaatgattctttctttgttcctcttttttggattaaggaagtagaaagagtaaatatcaaaattggttaaagaagagcctaatttaaagttccgtgattctttcaatacacttgtcaatttttttattttttttttgaattactttgacccttattgattaaagagattattttacaaatataattgtacataattttaaatacttttacaattttattcacaaaaagttatatcttttaatgtatttttatattgtattcttgttatttttttgttatttgaatgttatttttttgttatttttatgtaattttttttgttatttttgtattgttttataaacatcgtaaaaatgtaaaaaaaaaacctttgaatttgagtcttgtgcaatggttttgagcccattattaactgttctcttatgttaattttagggaatcttgagcctcaataaacaaaactagcatcttttcaaggcattagattccatgttagccaaaatggctatatattcctcactcaacccaattattttgagcattataactaacaaaattgccttaataacaactaaagtaatatattcttctccttagtgaaacttaagcaaagcataatctgcctaacaataatagagctatatagtcactattgaaaaatccctttttcctattcaaaaagacaaatcaaatccatacacatacaattaagcatatatatatcaaaatttcatgtctcccacttccacattcaaaataacccaataaaaaaaaacatagcaactcatgaagatagacaaagaaatctctcaccccatccatccataccacaaactcaaacttgaatacactgaaatcccattcaattgtgatggatgtaaagaaggtggaattggcctaaagtacaagtgccaacactgcgaattggacctacacaaaacttgtgttgttgctcgtccaatcataactcatccattttacaacaagtgtgaatttcaactacactactctccaccaggggaagccaagagattatgtgatggttgtaaaaatgaagtgttgggttttgtttaccattgcaagagatgcgatttcgatctccacccatgttgtgctaacctccctcaagtcctagatgatgggaagcacagcctttacttgtgtcacaagttaccgagcgcttgccataggtgcggcggtaaggggtcagggtgggcataccggtcagagtgcaggacatataaccttcatgtgggttgtgttaaggagttggttgtggagagttgggaagccatgtatttgaatgtggacaagaacaaggttagagatttgcagactaagattccaagccttaaagggacactaaagaatcatcatcatcatggaaatgggaaggtgatgaggaaatgttgtgaaattgctggtggagctgttcgagttatagtttctgctattcttggtgatcccactgctcttattggtgctgttgttggtggttttatttctaagtagatgaaaatatgaaacaacattataagtaaataataaggtatatatggtacttgctttagtgtttgtttcatcttaattgatgtgaatgtatgttgatatgtttattatatatgttggaaaattaataattgcaagatacaaatttatttaatttagatacactattaataggtaataattggatagagatatttgattgatttatagtaatttctttaatttgataatgaaatcctattaattaagtcttctttcttagaattctaaattaagaacatctgtttttatccgattatcaaaaatatttgagataatatgtatttatagaattagaaaagagacttagttatataattaatcctagttgaattagctaaaaaaaattatacttacttcaactaaattttatacatatacacagattttaagctcgtttactattgatcacaaataatatgtacttaagaattattcaatcaattcatattttattaaaattaataaagattagtataagttgaaataaaaagtgatacattagtattaatgtttatgctaattaagaaagcatagtatatatgtgtttatttggttataattaatagaatatggtagagcactaactaataatctagcaaatttagtatttaatttatgttttgaaagagtccaatccaattgaggggaattgtttgtttctttggagttttgttatgagaaggcatgtcactcagtcaaaagtctcatgttttattacaatattctaatactacaaaatgctgccaaaacatcacatgttcttcttggtactaccttttgccttttactaaggtggagaccaagactattaattaattacatatatgatttatgctcaagatttaaattgaggaggaacattttttttttcttttgtaaaagagagtggtgtacaatataatataatatgctaaaaaaatcaattaaaaattatacaaactactattaaaaagaaacttatattttgttaataaatatatctttaattataaatacatttttattgattaataaaacttcatcttataaaaaaaaaactaaaaatacatatttatattttttttcaattttttattttaagggagcaactatccaacggtctcacttgcctctatgtgaatcgtttgtcttcaattcacactcacattataacaaacaactcattaagtagccttcggttagaaaaaatgaaaacaaaattaaaataagaatatattttaatattttaagataaaaccaaacaaaaaaatggaataaaatttattccctctctaatttctatttcattctattttattatctcaaactaaacgccaccaacttcattaattacaaaaagtttaaaaaacctttacattcattgtctaaatcccatttaactaaaacatgaacaacattgttagatgccctaaaagtacatgatggtattgttgtttttgtccccgtgaa

SEQ ID NO: 22964 - DNA, 3008 bp, Cannabis sativa
ttttcatgtggcagattttggcttgcacgaggaaaggctaaagttgcagtaaaattcaagcgatgactatgctttaaaagaccaaagggtgaaatatcactaggcacgtgatagactgcaagcaatccttatcttctgggaaggagggttgaagacgtatcatatctccagtaatctttcacgcacgaaaaaactgtgtggatgcaagagtcattttgaattttaacgtggcagacttatgcttatgcaaggaaaggcaaaagttgcataaaaattcaagcgatgacttcgctttaaaagaccaaagggtgtaacatcactagtggtgtgacagactttaagtagtccttctcttctgggagtgagggttgaagacatgtcatacccacagtgatctttcacgttcaaaatatttaagttcatgcaagagtcatgtggaatttttatgttatagactttggcttacgcgaggaaaggcaaaagtttcataaaaattcaagcgatgacttttctttaaaagacaagagggtgaaatatcacttggtgtgtgacaaactatatgcaatcctttccttccgagaaggagggttgaagacctatcatatccctagtgatctttaatgtacaaaaaaactacttgcatgtgagagtcatgttgaatttttacgtggtagacttcggtttgcgcgaggataggctaaagttacataaatattcaagcgatgacttcgctttaaaagactataggttgaaacatcacttggtgtgtgatagacttcaataagtccttctcttctgagaaggatggttgaacagtatcatacacccagtgatctttcacgctcgaaaaaactacgtgcatgcacgagtcatgttgagttattatgtggcagagttcagcttttgggaggaaaggctaaagttgcataaaacttcaagagataacttcgctttaaaagaccaaagggttaaacatcaatgggcgggtgacagacttcaagcaggccttctcttttgataaggaggttcgaaggcgtatcataccctagtgatatttcacgcacagaaatactacgtgcatgcaccatccatgcttcgtgaaggtttatgggatgcgtataaatcaatttgctctaggatcttttggtagtcattcactcatggggactccaaggaacctggtagttgtcaaggcaaagactcggacttccagcaaggcaagcattactccagtagagatttcctaattggtttataatgtcttgagttactttctttgatttaactttaggggttaaaatttcatcaaaatgataggaatccctgttagcaaccttcaccagaagtgattttcctaaagaatacgcttcttaccaatagtaccgtaatcaagcctaattagaaacatagcaaacatcagtgatatcaaaggtaaactcccaaccattttcatcacaggatcctgtaatgttagtttctaattaacttcacggctcagtgaaaaggcattggaagtagttttcatcaacggatctagtcccagcgtcagcaccggtgccagggttgaagggccacgaccggagtcatgagctggatgaggtcgttatatccaataagccttcctaagttattcatcgtaatcacaactagtcttagcttcctcacttggccataacacctcttgcaccacattgtgtctgcgtggtcataccccattggacaatgggggaatttggcttgaggataccaatggatagccatatcctcagagagttggacgccaagatatgaacttttatatacgtgcatgggtactgcaaacatttcaagaccatatgcgttcatcttctatactttctttgtctagtcaagggtgtaagcctccacttgcgatgacacctctgaccaacacacccctgatctcaggcttgaccctcgcgggcaatgaggcagccttccttcttcagatttatgacagaagacaccacacatgtttctatctttcttcaactctcaatgaaagcaccgaaatgtttaccgagatttttggcaactatatatttagagcttaggaaagaaataacagattaaatgacaaatacaagattttttttgtggttcagccattaactatcattagtccatgagtccattttattaggctcattggccggtaaatgttcatatagattggtacacaatggactgaaactctattttcctcttgttcctcttggtgaagaaaaagcttagtaggaattttttatgtagagtttttttgaagataatatagcattatttttatcttctaactatctcgccccgtatcttatggaatgttgatgtatttataggtgagcttccccccatgcactagcttgaattgatcaccttgtgacgagatctatccattggtgtggtaggtggcgttttctccatgtggcatttaagggtgttagattgcacaggctgggcatcatacatgtatcatcccagggttttactttttgagtttccctattcaatggccgttaaataatttaggcgtgtatgatagggtgtgcatgctctgtactatggcatatcctgggggacaaatcctgacgctgtaccttaaaaaacctgaccactaagtctgtagtctgacatgtatgagtagagcctccgtgaaatgggtaatagcttagctaaatgcattctaagacacctttgtgcatttggttgtgggaaacccatatcctttgcgggagtattcgacttcagccctgaaaaagtaagtggcttcaattcccaggattgggagggacttctgatctcggaagtctcccctatcgtcgccaccattcaggggagtccctcctttcatggtggcccttttcgcgagctaaggcttccatcttcatggaacaacggtccagcaaattgacaggctacttatcactgagtctttctaggttgggatccatgtgtcaagcttataaaaatttggacaacataattgattaatt

SEQ ID NO: 22965 - DNA, 1819 bp, Cannabis sativa
  modified_base (1792)..(1793): a, c, t, g, unknown or other
gattaaaattaaaaaaatatggcattagtgaaagaaaagataaattgttgaataaaatggcaaaattgtaacaagtgaggcccactatgtatggccagccactaaagctattttttggccattgttttatcttttcattccatataatttaaatccaaaaccctagttcaaatactataaaaggaataagatggctcttattcttatctaactcaaataacctagttttcattttttgtcaaacaattagaaattgagagcctctttctttgtattttgaattcccctcttcctcttgttcatcaaatttgagccattagcgatagagtacgtgcctactgatatcaagtcaaatattcaattatagtatggaagattgtaagtaaaccagccaaactgaagtagagaagatctaggttcaaatctttataatgctctgctacagacacgaatcaagggctagagatctgaatggaaggagtcattattattctgttgccatcaatgtaaggattttttaatctcttgtgtgtttattttatcgtattaggaaattcatatttagggttttagattatagttaataatcaaacatacatattagtaaatctagatcctggtaaaataacttccaacagaaagacccaatggtctccctgcaccctatcatcaagaacttgaggctcgccagcctatattaggacatggtctacaccgatcacccaaggctgaccaagcctattcaagggctgcctatcattgtcttacgagcccagagggctgttggagaaaacagtacatgtcctgtacttcctcttcttggaaggtacaacctcctccacctcgaacttattatctgggctctcagcaccatggttggccacatgtacctctgcatgaccaacctctggatctctaccgttaagaggttgtgtggcctcatccatagtaccgaccctgcccattgttggcagcctgggaatgtgagggtcaaaaggtggtgctccacggtaagactgcttagttctggccataatgtattaacatcagcccagagatcactcagaaagtggctagagaatggagtagatgctaggcaagactgaatgaatctatgacaacacaattctcacctccccagaccaatgctcaaaatcacctgcatagaagagataaggggaggtgagcaacctgaaaaagctacaaaggtacagacaaaattttagcaaatcatacccaagggtactttccagataaaataaattgtacaaggctgggtatcagggaagtacatctcaagtacacaaacttggacaaatggcgagtcttaagttgaacattcgactataatatactcaccattatgtcttatacagagtttctaaaggaacaacgtatgagattacagctgtatatgcctacaaggccttgaaaaaatccttatcgaggtcaaaagagaacaaaaacctagccgcccgcttggaacctaggccttggttggccagggttcccaagtttagagagggtcgaccaaggttccatgacccatttaagggctggctagggttccatgatccagtcaagggccaactagggaccctaagcctagtcattggcaggctaacttttggggtaccaactatgctggccaactcccatgagaagaccccatgaccgacaaagtcttgaacgagacccctatgaccgactaggcgtactacggatcaaagtgtatatttttcaagaactcaaacacgttcttcatgttcttcatgttgggttttatgccctnnataaaactctttacaatctgattagt

SEQ ID NO: 22966 - DNA, 2981 bp, Cannabis sativa
tttaccagcagattgaaagattattaattagcagtgaaatcctctacttctaataaccataaatgtcgtagtggtgtgtaattttttttgttgttttcttgttgtttatatagaacactgtaaaaatgtaaaaccaaatctttgaacgtgaaaatttaaaaattttacaaaaaaaaaaataaaataaaattttatgtaattatcacaaaatataatgggttagagttaaatgtacaaacgttatcttctatacctttgataaccaaaagaagcgagtaaagcatgtctaacaaaagatattactaattaacatagacaacgtaacaatattgtcttatatgttactaatttttattaatttatataaagtaaattttcaattaatattgacaaaatgttattattcactattacaaaattagactttagaagcagttatttcggtcctatggtgccgattttgaagcaattcgcgaccattgttgttgtagaggtcgctaaaggtgtacgatataaccaaagggataggggaccccttgtagcatcgattattattttataatatcaaacgccataaggccttctctgggcgctaaatcattcttatggtgttagttattagtaaacaattgacgctgtatactcttatagcgtcagttatttatttgataactgccgccttatgtcatttttttaaatttcatttagaataaaaatctaattttgatataaaaataatttttttcatatatatatatgcatatatatattatttttattaatatatttaaattaaatatttatgtcatataactaaaaattaaattaacaatctgagtaaatgtatatatttacattactctaagtatatatgttatacaaatatactaaaattactctaagtgcttaaaagctatctcaatatattgaaaaaaacactcttatacaagtgttctactcttcaccgtgaattaccgtaagcaattttacaaatcactcttattgtaatggtaagaattctttttttttttttgtattgtattcagctcgtcccccaaactgtaaaaagaacaagtaaaaacgtttattagtatgtatactagattgtttgttgatataataaatgagataattaatatttaaaatttacaagctctttttctcgttatgaatctgctagcatttgtagatttgatgatctgactaatgtatttcaagacatataaaaactacattttttatttttaggctattttggtcaaatttcttttaaaattatattactatttcaattaattaacatgacttagctaattaaaaaatttactatctaaaaagtaattaaattattaccttctcatcatatcatcaatttattagggagtattatggccatttatagggtctaaatgtataatcctccatggcgtaaagatatttggcatccaatgtgcactaatatatatatatatatatatatataagattatataaaaataatttcaaggaataattataaaaaaaaaaaatactactttggatcttgtattttgcaaaagttactaattggcctctctactttgttaaatgacaaaatggaccctatatattttacaaaatggtaaaaataggaccctaagctcaatttgcaagaattttattttataatataataattttaagacaatttttaatacgaacagatatataaaatataaccagttttatcataatatctctatataagattattattaagttttattttgacaaaaaatcagttcaaggtcttatttgtacaattttagaaaatacaggatctattttgtcatttaacaaaatataaggtccaattagcaacttgcaaaatacagggtcgaaaatggtataccctaaaaaaatttaaattatctcttaagtagtatacattacttgatcatattatagtgaatgaagaacatttgacatgggcttttcatcgttcgcaaccatctagccaatctggtagcctcattctaaaactgctgctctatacttttatcaccatggattgtgagaagctgcaggtcacaaaaattgaaaactagcttcatgcttggtcgggttgtgttttgctactaagactagtcttgtctctgtcacatggttttgagtgttttagtcttgtctgtgtgacatgattttgtgttgtttcgttgttggttcttctttgttcttcgatggctcgccatcacatcattattactggttgataataatagcttctctacggcttaagggcttgttagtagtccagttacgtacttacacaatagttaaggagggagatgagagagatagggtgggcgggaaaatggacagttcccgtcttggtttgacgtaagagagagggtcatctggaagcaagtttttgtctggggttgggctgttaggaaggggttcagtccgttaacgttggttgaagggttcaccccatttggagttgggtcgtcatccaggaagagggttttgtctagggtttgggtcataagcggttgagagagggtttcaatttggtggggttttagtgcgatgagatatgagaaaggcattttgcttggtttgttttgacatttatcttctctttggtctcggttgaaaactaagacttaagaggtttaataacatcgtaagcgtcgattttcaaccaacacgataaaggtgtgtttttttaattgttttaaatcccaatttatgcattagatcagttggctaactgacaccattggcattttttaaatgtcagttataaacaaacacctcaaattgtggttactctatagtgtcgatttttaaattaaatgaccctcaaagatacaacaaaattgtctttgtagtagtgaaggcatccctagattagagcaaatcagattcaaagtcaaccttgttgccaaggtcttcactcagaaagaagggacaaacttgttggaaatattttacca

SEQ ID NO: 22967 - DNA, 5834 bp, Cannabis sativa
  modified_base (185)..(187): a, c, t, g, unknown or other
gtaatgacttgatttgatgttgcaacaatgaaaaataaacatcatatatatgtatttagacaatctttcaattggagatgtaaaaattgtgctatatttagcacaaaaagtagttttgtagtaaatttacaccaaattttagctttatgctccaatgcataattacaaaattttgatgtaaaatnnnatatctaattaatattttattaaaaaaaataaaatctaaaaactttataatcaattttattatttttttttttttttgaaaagaagtgttctttattaactcgagcaatcgctcgtaagaatagacatcaactccaaagaaacactattaatagagaacatacgctcagctaaagaaatagaatgccgagcaacaaagtgagcagcacaattcgcagaacgcttaacaaaaaataccgaaacatttaacaaatttttaagaatattcttacaatcttccaccaccaaaccgaaagctgaagcaaagatttttgcactccaaatggcttcagcacagactaggttgtctgtctcaacaatagcctgtgtgtaagtgtgatttttcagccaacttaaagcctccctaatgcccatgattttagccaaatcaggggacactttgccatgtttgaccccagcaaaggcagcaaccagatctccattcgtgtttcaaacaacacactcgaagccatgtttgaagaaatgatcgaaaatggttgcatctacgttaagcttgatacctgaagtcgacttaacccactgctccgatccatctccatctttgagaggagacaacaagggaatgttaccctttccttgagctttcaaccattgatcaagactcgaattgggaaaagtaaccacatccctcacacttcgaacatgctgcttccataaaagatcatttcttgctgaccaaatggcccaacacaacatcaccactctgcccatggactcaccatctactagcctgaaggtatcgtccagccaagaccgaagagatgaagattctctactaacagcagccaaaccagcatactcccaacatgaccatgcaaagttgcaggacaccagaatatgccattccgtctcagcaaacacaccacacaaaggacaagttttttcaaccaagaccttcttgatgcacaaatttcctttagtagcaagacagttagaggctgccctccaaacaaggtctttagctttaggaggcactttgagtgaccacagcttcttccaaagctcattggttcctgaattgtctgagatatgcttcataccttgaagcaaattatatgcacttcggaccgagtaaaaaccatttttctcagcaacccaataccaggagtcacttccaccagagggatttataggtataccaagaatgattgcagcatcttcgggtaagaaaaaatctcgcacaatttcaccatcccagctactgttattagcttgaaagaggctgctgacagtgaaattttcaagaccatgaacagtaggaacaggtgtagagcgatcgataattggtagccatggatctgtggtaatttgcacagtcgtacccgcaccaattcttttcctcaaacccaatttgacagtatcccttgcagcaaaaatactgctccaaataaaacacgggttcaacccaagttcagcagagagataatcaccttgtgggtaatatctagctttaaaaactttgctaaccatggaatcatgtctcaacaaaagcctccaaccttgtttaccaagcatagctagattaaagtccctcaaactacgaaatcccatgccaccatcaaacttatgctttgtcattctatcacaattcatccaaataatgccacttccattaccattagaattattcgatttccaccaaaagcttgccaacattcgctcgatttctttacaagttccaatcggaaaaaggaagacattcatagcatacgagggaagagcttgggctacggtcttgataaggatctctttcccagcccgaaatagaaatttaccctcccaaccattaattctctttctcattttctctttaagaaaccccaaaacagcgttcttgttacgtccgacaatacttggaagtcccaaatacatgttatccaccccagcttcttgaactcgcatcaagccacaaatgcggttcctaatatccatcctagtgttggaactgaagaaagctgaagatttatggaggttgactttttgactcgaggcatcttcaaaggtctgaaggagtgatagaacatgattagcttcttctcccgatgcttggcaatagacgtagctatcatccgcaaatagcatatgggagatagtaggtgcactcctagctaccttagagccggtaagcagtctagtagcctcataatccctaatcaaggaggacaaaccttccatgcacacaataaataaatatggggataaaggacaaccttggcgaatacctctagtggggataatcgtccccaatttcttaccactgttgatgacatggtaccgaacagagttgacacaactaagtgttaatccaatccaacgttcgttgaatcccatcacccgaagtatagcttccaagaaaccccactcaacacgatcataggctttgctcatgtcgatcttgagcgccatataacccttccttccattagtcttccttttcaagtagtgcattactttgaaagccaccataacgttgtccgatatcaaccttcccgacacaaaagcgctctgattttcaaagatagcttggttcaaaacacccttcattctattagcaacaaccttcgaggctattttgtatagtacattacaaagtgaaatcggcctcaaatcactcatctgggacgggtgtttcttctttgtgataaggactatattgaatccggaagcttacccgaatcaaagaagtcacgaacaaattgaatcacatccgccccaacaatattccaatgtttctggtaaaatgctggggtcataccttcgggtcctggagacttatccggatgcatttggaagatagcattcctaacttcatcctcagaaatagtcaccaagagatcttcattttgctcacgggttatagacggtcggattccctccaaaattgctcccagatttatgctagaagttcgaaacatgtcttggaaatagcttgttatgacatttggcaaccccaactcccaattaacccaaactctgttgctatcttgaagctgaatgatactgttatttctctttctaaagcttgcaatggaatggaaatacttagtattcgtgtcactcaaattaagacaaaattgtttcaatctttgtttccaaaagatttctcgttgtgccagaacttcagacaaattatccttcccttccttatgttgttgaattgaaatcggatctctaccccatttagagttttgaatttggcttttacaatggttgattcgcttatgaaaatttcctgtaatatcccgaccccactttcccaacacttccccacacttttgaattttctcttgaatgttaataatacccgaacccatccaacacccctcaacaagctgcttacaaagaggttctcggagccaagcgttttcaaaacaaaaagagtgatgagatacagttggaatattacctttgaagaccaaaagcaacgggcaatgatcagaggttgagaattccggattgaaaagaaccggttgtgcaaataaagacagccactcattagtcaccaaagctctatcaagcctttcttcaatccaatcactgatgtttctccctttctcccaagtgtacgggtatccaaccagaggcaaatcaatcaaattacaatcacccaaggccctaataaacccttcaattaatcggtcagggtatttcctaccacctttcttctcaaagtgagaacccaaattattcatatctcccataaggcaccatggaaggttgctgtcatttttgagagagcgaaaaagatcccatgtctgacaccgaacctccctttttggctctccatagactcctgtaaaacgccaacggggagaccccagcagttgaaccgtagcatcaatgtggtaaaaggagaacccttgaattgctaccttgctcgcatccctccataacaaagctaaaccgccactgtgcccacgtgcatccaccacaaaacaaccttcaaagcccaagtgggctctaatactctccatactagtcttagtacataaagtttcacaaagaaataacaagttgggcttcttttgggacacgaggtccattaagaattgtttggcccgcgggttcccaagcccacgacaattccaacttaagcaactcatggctctgggtgggcctagaaaccagaacccaccaaagatccattttttggaagccccacaatatcttgttccatatcatctattatatcagaatattccttttcaagtggtcccacaagatcccccaaattggtgtctggccttctcctttttgagtcaaccattgtagtaatggtagaatcaaagaaatttccattactattgacatttaaagtcaaatcttcatcattgactcccaaagtcttctttatactgttgtgcctctcattcagcatataattatggttaatatcatgaccatgattcttgcaaattaatccccttgttttctccggaatcctaggaattaaaatggccccctgttcagccctgctaccgtgagtctcatgctgagatccatcacgcaccgccgcccctgaccggagccactgtgccctgaaagtcgattgcctcctttgtgtcgatgccctcaattccaggctatatggcttctcttgcagatgcaaaggcttcaagaaaattctaggacaaaacttctccgaatgtcctatgattccacatttgaaacaaaacgttggtattttttcatatttgaaattcacccaataccatgaggagttgtcaatgcttatcatcattgttcgtttgattagtttgttaacatttatccgaacttgaacacgaaggtaatccctccaaactcccacaaaattgttaggatctaattcgatgaacgtaccgatataatttccgagcgccatcacaacactaagagtcatattacccgtttgtaaatcatgaagttgaacccacatatcgagatggttgatttctacaagccgtgggttgtcaccatccttcagcctagtgaaaatgaatggctttcggtcgtaggtccacggactcccatcaatgagcctttgtaaatcgatctcatggtagaattggaaaagaaacaaatttggactgagttccttaacgtacattctcatccccggctgccataggaacgccatcatattttgaaaaacattgaaatctgaaactcggcccgttaatagcttacccaccaaacaccatctggtgtctatcgccacctcttctatattactcatcgggatgcttaacactgctgcctcttcctcctccaggctaataggttctcttctgacctccaggactctcccttcaccactacttgatgccatagcaagaccaaacacagccaaaatcaaacaaactctcaaaacaaactctcaaaatagagagacagcaaacgtatcaggggatacgactactcaaataatttagatttgtcctctaattagggatgcaaaaagtactaatcaattttattattattttaacatacaagacaataaaaaaatcatataaatgtttcataatttaatgtgatagttaaatatactaataaaataatagaaatgacataaatgtaaatgaaaaagtagtgcatttattgtg

SEQ ID NO: 22968 - DNA, 2396 bp, Cannabis sativa
  modified_base (359)..(368): a, c, t, g, unknown or other
aaatttaatataaatcaaactagggttgttcattagatcacatccaatatttttagacccatccagattcaatccaattacacattagatattagatttttccaaccgatccaatccaatatcgtaggctcaaccgaaccgatccaataaactattggatttgatcgtttctatccaatagatgatgaggcaagaaatcccttaataggagtggagacgggcgagaaatccccatcctcattgagaattttaatcctcatatccgtttattttccatcgagatagggtgagaaatcccttaataggagcttagacggaacgggaaatctcataataaaaaaataaaatttataataaannnnnnnnnntataaaaatattaaactatataaaaatttaattattaaaaattatttattattcaataacataattattattcaaaacacaatttaaatttcataaaaatgatactaatatactaaaaaaaaatataaacataaattataaaatataaaatattactagaaaaataaaataaaatactaaacggatcccgtcaaaacagggagtgtgatttcgtctccacccggtttatcatttggggacaaagtaattacagaaggcaagattaataagtaactctagcctaaaatataaaccaaaaacaaaacaaggaaaaatatatttcaagatgacatagatgaatcgaagctttaactgagccaaaaatgccacaaaaaaccgacttaacaaagcagcatcataattcctaacagaatcaggccaaaagtggcgaacacagcagttctggaggaattcatgagaaaatttccccaaaaatagagaccaagtttctggcatcaaattcagacgttttgataactttacatgttataagtttgacttcagaattcttaactcaaatggttctaaaacgactgtagcatagaaacaaaccaaatgagcccccttctacccgataatgaaccatctgacagtgctgaatttgtggagactttgaaaacttgattattaggcatttcttcaacaatagtctataaatgaaagacaaaacaaaattcaatattgagttgtctttcttctgaaattgctcagcacctaccagaaacaattacagagactcttccatcttctcctctttcttcttcatttcttgctcgtactttcttagtctctcattcatcttctccttgtagttcttctctagccggtccatgacatagaagccaagaatgccaccaaaaatagtgcccgcaatgattcgaacatagccccatttttgagatcgaactaccaccattttcgctccttttttcactgattcattaacagctagataacaccacttctcaattgaaaacacagctgtaaaagacatgaaagtaaaattatttgcagataatatatcaagtaatttatgatgtttagcactatcatacaccaatatccaatataggacaaggatttttcagaatacatctaaaacaagtcagtggtacatatcttggtaatactgtctttctggagggatttggtaatatcaatttcactcctttaggcaattttgaagcaacaaatagagcaaaggaacatactttaagcatatgtttggtagcaatgaaagaaaataggaaagaaagaaaatctacaagggatagaaaattagaaagaaagaaattaaaacatatctctttccttgttgtttttttttttaaaaaaaaagtattaatattttctttgtaaaaatatttttgtcactttgcttatactaaattgttggagagttttctctaggagaaaaactttggtgggtttcacaccaaaattctccttccatttttcattcttaacaaacaacctcattttatcttttcttttcactttcccatcatctgatttctttcctctcatttttcctccttaccaaacatagaataaagagagagcaatgctccatacacaattagacatgtttacaattcccatactctgatttgcatccctttttcttaacctcttcttttccttagtagtggtctacaatgcaccacaatatagagttgttcactcaaaaattctaagctaagctaatcaccaagattaatgtgcatttgacagcacaagtgttcttcaatgcaaatgcatattttcaaaggcatttgtaatattttcattgagcacaagatcaaaacttaactaccttcttacaaaaaaaaaaaaaatatctagaagatatgtcttgacgtccttcatgtaatcaaattcagtgtttactatcgaaatgatttatattcaacaaacagactagagcagattcaaacccaaagctcagtagagtaataccttatatggcaacgaacacaagaggagagg

SEQ ID NO: 22969 - DNA, 2916 bp, Cannabis sativa
cattttaaaaattaaaaataatatataaaatgatttctcaatataaaattaaccttaattttttgatccaaattttatagaaattttgattttgaagtaaaaaaaaaacacattatatatagatgccaacctgaacgcgcttttaataggtgtgttgtgcacaaacaaactctcttgatctaataaatatgtcctatttttataatatcatctatatccttctttcattttcatatataaataaataatttttgaaatcttaaactaattaaggttgattcataatccaattatattaattaatatattacaaagagacaaaaagtaatcaagtagtataaatatataattataataaaattaaatatttgaaccatgtgaaggctgctgctgctcctactaatttggcctggttcatgcatgtaagaggtcttcttttaattaatctttattattcatttcttgatccccaaaccaaattaaaccttatattatatgttgacatgtgtaatctattggatcaacgttgctaataaattgatttatttattattagattatagttctcataattggactttgtcttggacattatcagcacataatattctgtgtttgttcatcaaataataattagtagttttcccttttgatcaaaattattcatttgaatatgcaccacctcatatatttcattaactaaaataaatacatcttatagacttatatttcttttttctcttttgtatttgaaagaaaagtctatttttttgataaaatatactcttttttcttaattgtataaatgtcttcattagtcattactatattattatgttaagaaaaaaatgtatctacattattattgatgcacagagttcggtacatagtgtgaacatattaattaggtgggttctcttttgtaggaaaacgatggtgacatataaaagagcatagtgctgtaattaatgtaaggtaccctatttgccaaacattgaagaatgagaaatgctattggatacccatgaggccatgagtgattactaccacctaaaatattatatccatctttatgtaattaagtatctagtgtgtgttcaaaattacaaaaataaataaataaataaataacgagtcttacataattttagtctcataattatttagatatgtctttttgaacaaaaacaaattaattaaaaaattataataaaaaattaataataatattctttttattataaaatgtggttaattatttataaaaaatcacatcaataaagtaataaatattatttttttaaaacttagaaattctattaaaatggatcaagctaaaagatcgggatacaaaagatagacaaactaaacagttaaatcagcgggtaagcttggccacaacacccgagtctcatctaaatctaatgctcgttttgctaaagaatgagcaacatagttttttgaccaattacagtgcgacagagatataatactgaaagaattcctaatatgattaatatcattgagaaccataccaaactcattgcgacaagggaccttgctattgacagcaagaacaacccgctgacaatcagagaagacagtaatcaccgtataccacatctgcatgcagcaagaaatcccatagagtagagctttggcttcgaccacgtgaggttccaacaatcccgcgtaaggagccgcactcgagaataggacatgcctcgtacgattggaaatcaaagcccccatccctatttttcggtcctcaacagacaccccaacatccacaaagaaattgaactcaccaagaaccagattagtctcagttgatgccagtcgattacttgtattgctagagaccggacccatagaagctagctcaacattattagcatcttgatatttccataaataatccatggcccaggcactaaccatattatcagataggagcttgtgatcatgcagaaaggtatttctcttattccaaatacgccagccaagttataaactgctcaagttcctttcttttcaagatatccatacaccccagtaacaactcataatagcaagaagtgcccttcaaggagtcaaggccactcaacaaccatttcaaacgaatagacttaagagaagggtagagccacaaagtatgaatagtagtcttgttattccgagagtaaattggatatattgtcgaaaccttcataccatagcgagataagttggcataagccgggatgaaattcagacatgccttccacacaaaatttttaatcttagatgggagattcaacttaaaaagaattttccaccactgggaagaaccagaggagcccgaagcttggccccaccccaacctggacacagtgctccaatagccactctttaccgagaaagaacaattattagatatatgctaaataagcctatcctgactatcaaacaaggagcaggggatagacaaaatggaggtaacctcccctacgtcgaaacactcctccacaagatcaaaattctatcttccaaaatcaattttgggtcactaaccctttgtaggtgcggcccacctgaaaagagtacgtccgaagtaatagatattactaatacttaataacattaatactcgtaacaatattatatatctttcctaaaaaaatactataatgataatgtaccatattttattagtttaatttgatatagagtttcacaaatatcaatttaataattactataaaaagatactaattaaggatttaccttatgatgatactggatattattattaggagtattcattaaactgctcaaactgttcacactgtaaaaaaaaatgcagtttgaaattctttgcagtgcggtcgcagtttaaatttttcttaaaccgtgcggtgcaatttgcggttttga

SEQ ID NO: 22970 - DNA, 6729 bp, Cannabis sativa
tccaaccaaatgcaacctaagctttaagcagaggaaatcaagagaagatcaatataagttacctccatcatggccaatggttgagaatggcagtaacgcacagctttagccgaagactctcctggaggagaagttctagtcgagaatgcagaatgttgcgacaatgatgagtgacaacggtgaacactagaatctaaattcttctcttctttcccaatcccatttgattccttccatggattttcaagtaagtgactactagattgaacagccaaagtttccctcttcgatatcagaccagctttagtagcatccaatagccttttcttgggaatagtaagaggcgattttgatctttcatccttggcaggaggagaaacagtggttgcttgtccatcaaacgctttccgatataaggccagaagatattgttccaaatgtgtaacttccacttctaatacagcaatctcctttataagctctgttgcagactgaagccatagtaaacaagtgttaaaaaacagttaaaattcaaaagagaatgaagaaaagaaatgcaggcatatggtaatgccttaaaaaggttcaatttttctttgtataatgtggaaaataaggtattcttaccttaggcatttcaaaatcacttgtgtattcatgtgtggaggttctataacccaatgctttctctaaagtagagcgaacttgaaattggccttgtaatcttttttcaagttgcagaatctgtacacaaagattaataaaattgtttaaacccaacatacaactttaaagagcttaatcatcacaatactgtatcattgtattaatcataattgcttgaacagtaaagtcagtacctcttgcttcaaagagttgtgcacttcttttttaggggatagcttgttgttggtggtaacacaggccttcaagtgccccatatcctattgaaaagagaaaaatcacatcttaacaatttgaagccttgccatttcaatccattaaactagtctttttttctctgatttgatttccctttctgaatttcttcttttttgtttttggtttatttcaaggaccactttaccaatacctatctttatgacacaataataatctggatcatttaagaacaaaagagaaaaaagtgagtggttttcataccagtttgacacggtttgatgcatccatggaacaaccaaactcatcctcttcctcaacctttttcttatctggaaagctgccaatgcataaaagtgagcaaaaagaatgagattgaagaacaaaagacttcatgtctataattctctctcttcccacttcacaactaaaatctactttcttaaaaaccaagccaccaaatactctcattcactatcatatagatagaaagaagtagaaaacagatgatgaaatttcatactaattagttgagcctcaagtttcaagaaaccaatacaattcccactgaagatctgaactttgataaccgaaaagaaataaaaacacaaactttaaaacctctctctatcagcaataaatgagtagcatagaagacaaaacgtctaaacagatgtaattataaatatatatatatacatatacatatacatatatgctgtgaaaactcagacagacacccatttccccaaggaagctatttctttactagataacaaaagaattagattacttagcaacaaaaacatttaagtacaagtgtcaagctacctctttgaacgcttgtgcattggaaacactttgagtcccagcattttattatcttcactcccgtgaaaacccatcactgaaatctctcccaaacgacaataatttcagcaaaacgaaagaagagcagaataaaaaaatagataaataaagaaaacaaatacgggtaatgatcagtagtttaccactagaatccatagcaaaatgggtaataatgggaatgaaattttcagagatgaaaaccagacagacccactacagattagtacactcccacaaagaccaaaagggttattagagctctgataatctgaagcaccaaagttgtcgttttgcatagcagcaaagtcagagctttcagtaattagtaccctttaaagtgatcattttttgctgtaacagagtcagaacgtagccaaagagagctcaagttatttcttttcttttctacataaaactcacaactacggctttgaagaagaaagaagaaaaagattagcccttttgacaagtgacagtgagcttctctttcaagctaatggagaaggtgaggaggaggaggaggaggagttgctttttcttttgtatgcttttcattaaaagaagggtaagtatattcatcaaagtctttaactttagttgaagaagaagaagaaaggtggaagctttagtagtctcacgttggtaatggactaataatagtagacccctattactattactactactactactactagctccctaagaaaaatgtcaaagcgtccaaaagtggacaagggagtttgttgttcctctctccttaacaagataaatcagaaaagggacaaatgagaggaagctaaatagtgggtataacagttagatgttaaaataattgtttatataaaaaaaaaaatgaaggcaacccaaattttcacattctatttccttgttgtgaagcaagtgggagttggtgaccgccagagagagagggacctttgtctcatactcttatacataatctcctaaaccatatatgtacggctgcattatacatttacacaaaaccatgaatgtttcatatagagttcattaaaacagccttactaattagtgggaaggatgaaaaaaaaaagattaaatttttatgttacatactatcgggttcattttttagatccaaaatttgtgaattcgaaagccgatcaagctgtctgatattcagccatatagtgtgattaataaagtatctcattaataatcacttgttgttggtctatggaaagaattttgagcttatgatatttagacaaataagcactattttgtaaacgttgtggtcctttgtcactacttccttcaatattcctttctattctaattagtttctaagtgggtttcttttcattatatgataatgacttttttttatcttggaatataatgaaattttttgtcatgacctactaagaccgttacaagtaaagtcatttttaatttttttaaggtcaaaaactaagatgtgattgtggggtgtggctaaatttggctttgctaaaggaagaaaagtaaaataacctcaaaagggatgaaaggtaaccaataaaagagacattggatacttaactcttaaaaggaaatgagaatttgtgagctttcactttgtctaaatcacttttcttttcttatacccaaattgtccatgagtatccaatacactctggtttgtcatagaatcctcttattaaaaaaccttttccaaggccaaaaatacaaaagaaaaaaatagaagaaaagagtgttagtattagtagtagtattagtatagtaagatggccactaggtctttccttttgtcctgttattcacctactttgaaataattaaagcctttttttttcttttaattttacattgtaatagaaagaggaaaaataataaaataaaaaagtatatatattatagtttctttgttaaaaacttttcattgaatagttgtttaatgtttaccccttttatcttgagattgcagagattggtccaaaaaattattgtgaccacatgagtgttaataggctctagcctttttaggattataattactttgtaactatatatatatttatatatatatattatgtcaaccaattgggaaaatgaattaaaagggcatcttccacttggaggaagaaatacatatcattgacaattgatggtaaaataatagcttcttcaggtctaatatatatatgacatgataatattgaataatagaaataagctcattttagctgtgtttgtgcagtgtttatataatcttatattctgaaatgatgctaattcatttggtttcgagaaaagatagcttaattgaaattgaatatttttgttattttggacctatctgatattttaaacttaagttaagagtttggttattttttagtcactaatataaaccaaatgaatcttctgttttatcctattaactaaattttatgtacaagttagatgggtcagtttctcaatgccaaaatcatcagaatatcgataacttattatattattttattttatttttttttcaaatcaaactgacagacagacatgctccattgaacaagtaacctaaatgagttgcattaattatgttcttttttataattatggattgcaaaaaatgacatccctatttcaaggatcaaaataatacacacagagttccatgcacatatatataatataaatatgtacataattttaggtcgggagtgtagttgaaatcaagaaaatttacaatgaattaatgtatttaaaaacaaacttatatcattaaacaatgtggtagataccattagtttctgacatgtaagtgtaaccatatatacatggtatcaatattttgatttagattttgaccatatgaaaaatatttatatatttataatatatgattcaaaaaaaatggaatattggcatggttattaccataaatgtatttatatatataagtctgataatatatgtttccaagatgagaagaaaacacattttttttcaggttcgatggtaaaagaagacaaaaacaagtgttggttactgcacaaaatttaactcaaaagaagtatcataccataacaatttcgaagaaaactggtaacaaaattgtattatgtgatgatcctttgtttttttctgtagatatatatattatttattagtactatatatttccttgttttgttttatgtgaaaacattactacaatttatcacacctttgaatattaatgttgttttttctctttaaaaacaaattttgtgttcattgttttaaaagggaaaaattgtactctttgagagctaaatttaaattacatggtgactgtttattaatttatcttaaattgatgtattagggttttctaattattaaacaagatctattttatcattgatgatttttatgtaatttcaacatgtatcccttttataaaataaatgtattaaataaaaaataaaaaaaaataaaaaaaaaactacatctttttaccaatttgaagtatttttttacacgtaattacaacaaaaataattaattgaaaaatacgaacaataacgtgataattatatatgtaacaattttataatactacagttttatcataattttattgtttagattttgtggcagttttatctcatattgcttacttactttagcatggttaacaaagtatgtccttcagattagacgatgagatgtcttggttcgaagagattcttgcacggtttacgaatatatatcgtaaatttataagtaattctaattactctttcaaaaaaaaatacaggcaataatttgtgataattatatatgtaacaattttataatatatagtgataaatttgtaaatattttagttaccaaaaaaattgtattataatatcctttggtaattttctgatacaagagaaataaatttaatatgtggcttagtatttttgtaatctattcaaaattatgtacttttgggttttttttttcaaaattttggacattttttaaaaatctcctaaataattagtgtgacaagaacatgagaatccgagttaaattgaaaagtaaatatacttttcaaagtttagtataggagactattgggaagatcaaaatgaagacatacataggtttgtttctacatatgatgaagctactatagcttgtgttgtgttgtgtgttgaatcctctttcaagtcactatagtattagtagggactattgttagtgccttgggttgagaaaaaaacaaactaaatttaaaaaacaaaattatgtgtctcttatggttttgtgtataattggggcctagatgggaataggcctataaatataagggtataattcttatatgagaggggaaaatcccacaattaggacactagaaattataaaataaaaaataaaaaagtgaactttccaaagacatttggacaagcaagtcaatgccaatcataacatgcaaaaagcatctctctccttcccattttttgtccccacttacttatatccctctcttatatataaatccatctatataaaaccatacaaggaataaaggtatgtatatatatctaccactttattacaataacaaattatttctttgttaataaacctatatatgtcatatatgtatacatggctttttcaacctccccaaactttatcattattctgaaagttagttataagtgtttatcaaagtctttgaagtttttcttgttcaaccaaacaaagtcttaactacaaatgacaagtccacttcaaacaaattaagcaatacatatatatataattaatggatatgaattgggttgttttttatttacatagtcatattccctaatgttttttattaccttctccttctgtaaagaaggaagtatctttttatttgtaatgaaatatatatgtatagcgtggtcgaaagctttttcattgaaaggactgagagac

SEQ ID NO: 22971 - DNA, 2879 bp, Cannabis sativa
accaaattatatctctcaaattttgacatgtactaaattatgccccctgaactttcatctatattagacttttttttactaaaattggacaaaagtccgtaaatccaacaacctcaatagtttaagggaaatttttaacgaccttaaaagttcaggaggcgtgatttgatacatgtcaaagttcgaggtaaaaatcctaattagcctaaaattaaagtgggcagccagcctaagttagcctcaagattgatgaaatacaagagtttttcaagttatccttctcttcctagtacttcatcattgggagtatctatcataaaacgtcaattctaagaagttgatataaatagaagcttatgaaaaaaatagtaggaaatcatagggcatacttcaggttggtctgtctcttgaatcagttgttttaaagtccaatttggttgcctctcaaacagcttaaacataatctcttccatttctcctcggtccctcctcgttcttttcatttcagatcccttggttggcgttttcttcttatcctatttgattttattaacaaagtatgttaatcaaaaagttgcctaaagatgcaaatagtaaaatacaaaaatattaatgctgaggaaaagtgtaaagtataattacaggtccagaaacaataaatcccatcattcctggcataggcctcattcgagctccattgtcattctcaatcacctgaaacaagaaagcagaaaagtttagacgagtaatgtacgagattagactaagacagtacattaactcaatattaagtactggaagtggaacctgaatctttctagtctttgtcatatatttttgagtccgttcacggcacagctttcgatagctctcaaggttctcaggatggggcttcatgtcaaatttgtttagtatcttcccctccattgaaatctttcctacattgacacagtaaattcaccattcattctagggattacagtaccaaattaagacattaacatctcatagctagtatgggctgatcttcagacacatgtgaaatggaataaagatggaccaagctacttatagatgtaactacaactaacatcacaaaaacatagtcgaagtgaattaggagtctgaccaatttgctaatcgcgtgagtttttataggtatcatgcagtagtttaagggagctgtctctgattattaattttgctacattacatttggtagttttggctgcattgctttttaaaaaaaaaaattaagctgacaaacaagattaagaactgagttaagaactcaattctgataatatgtaccaagcattaaagcaacatggtaaatttttaactgattttccaattacagatttcagcctaaatagttttctgttgctcctttactacatttcagtacaagtatagtttaaacatacaataatttgtcacataaaatgaaatcctcatagctaggtttcatgttttataatgaatctggtgtcactcagaattgtaataaaacctccatttgacaatgctactaaatttctgacattgggcaagaggatttgaacttatacataataccattaggctatgcctaaaacctcaacaaaggtactaaattttgaacattattcgattatctacacaatggcataatgtgaatgtccgtgttaattattgtcgatgtaatgaaatcttttatggcataatgttaaagcagaggtaataattaccaacgggtttcgtcctaagactcattccaaatgcagaccaaaatatttacatcagagaggtgcatgctcaccttgcgaagactccgagaatactgccattggaatcaaatctttggacatttccatagagaaacgcttcggtatattgccagattctgcaccagccaattccatggtgaactgcagaatattatgaagaaagtatctcagacaaattactcatctcagttccttgctcttaaaatcaatgatcagaactcatattcatgtgcaatcactacaacattatatatataagaagcacaacgatcaactaataaacataagaaaaatgaaatgtaaaaccctagagatctgaggaggaaacattgtttgatttaaaaaggcaatgcagaagcaaagaataagcctcaaaatcacagaaagacgtttgagacataaattatattaacctgaggagaagcagagtcgtcattggaatggagcgggtcgatggagacgatgaccttggcgagggaaggagaaggatgatcctggttagaagaacgaagagagcaagaaacgaggggaggacacttcaagagccagacagctctgtcggctctggtggtctccacctgctccttcccaccctccttctgcttcttcttctcttccatttcccactctttagtcttttctttacccacacacacaaatatatataaatataaatataaataagacgttacaaatagagtagatgagaggagacacaaatttaaaacggtttttcagatcttccctctaacaaaccaatgtgacgttattgaaattttcaataacacaaattattattattattattattttattttatttttttctaataaaccatgcattttattagatagtatcatccataaaacaaacatagttaaattgtcccttaatacgtgtcatcttattaataaagaaatagaacataaactattaataatagacttagaactttttttttttttgaatgaaagcgtcttcgattaataagaaaagttagacgtcactgtcattacataaaatgttcaacgggatggtagatattggaatatcaccaaataatttgtgggtgaacgcccactttgccacattatggacgacaaaattaca

SEQ ID NO: 22972 - DNA, 1813 bp, Cannabis sativa
cttattattgttcttgcctctcctacaaatatatgaaaaagcattttgatttactaagaatttacaacaaaactcaagtgtttcattaaattaatacaataaataacttagtgactgtttcatcaaaaaaaaaaataacttaatggctaataatggatatatagtaaataggattatttataaaaatatagaaaaaaaaataattaacatatgtaacatactaagtgtgttattcttttagtcttaggtgtatttaaacgatttttagggagactaattaattaaatatattggtaaataaaaagactagttggggtttttcaatttttttatgtttttctcatttgacattgttataccattattttttttttaataaattatgcaattttattaatagcaatcatctaaaataatagtttgcaattcaattgggatatctccccgttaaagacatgatcaggattaaaattataaaaaatgagtcaaataatcagccgcctaattctcaaatcgttttgacaaaaatactaaataaaattatatgaaaaaaattacaacatcacagttaacattaagaatatctatattcagttttatccaccactcacaagatatgacagtagaaactgttgcagtaacttcattcaatctcgtagcttgaatactcaactattgtgcaagatacattactgcattacaaacaatcccttcagttgcagagaaatttctaactaacaacgatttgatggcaagtcatcggaaaacaaaaaataaccaacaactaaacaaaataaaaaaaaaacataacacatagacaagactaaaatactcaaacaatgtcacaaaaataatattaaacattcaaaactatatcacagagataagactaatcgctgtagcaaaacacaactccgaccaaaccgcaactaagcctaggaaaaatcagtgggtctaatcaaaaaaataagaatagctacaaaatttataatttgagggttgaaacaacaccgtatccttaattcctcaccaacaaaatatcttaaattttagtatttttttattagaaacaaattatattaaaaaaaccaataagaggaagagcacaagtaaagaagatggtactttttgggagctaaaatctacacaaataaacacattagtgggtaacaattcaaagtgacaagggtgagaagcataaataagtgatttgatccaatcttgttggtagcaataagctcttcctcatatatcatatgcaataattctaaaaggggatcctattgctacaattctccccttttttcctctcctattcactcacatatataatactaatagcccattacaattaccctcatacccctcttatttaatattcaaaggcctatcacaaacgtgtcctttgcattctccaattccctattaccattcatcactgccatctttaaatcctccagctcatgtacatctgaattagcctgcaccagaagaaaaaaccatttaggaatgacataaaaatattcttgttttgataaacattctattccttattgaaaacactacttacagatggacaactatccatttcgatgaacacggcttgcatttttccatagatttccgagttgctcggtttttgctctacgcattctttggcactctccaccattttccttctcatcaactgcaaatgaaaaaagatttagtcattcatctaaaacttagctcgatcataaggaatataatgtaaattaaaactatggcatctcctgttgtatattaaacctgccgtccacacacaaaccctgca

SEQ ID NO: 22973 - DNA, 1710 bp, Cannabis sativa
gatttccagtataacatctctaagagaaagttattgcagaagccaagtcgcttgttctctcgtgacaggcagaattcggggttagtgcctaccttcatgccaaaacaggatgagctgaaactagtttttgacaaattcgactccaacaaagatggaaagatatctcagcaagagtacagatcggttctgaaagcactaggtaagcaaaacacagctgcagaagtttcaaagatttttcaggtagctgatcttgatggggatggctttataagtttcaaggagtttgtggaagcacacaagaaaggaggtggggttagaacaactgacatacatagtgcttttcggacattcgatgttaatggtgatggaaagattagtccagaggaggttttaaatgtactgaggaggttgggagagcattgcagccttgatgattgccgtcgaatggtgagagcagttgatgcagatggggacggtatggtcgacatggatgagttcatgactatgatgactaacaccatgaacacggttgtactttagacatttcatgctggaaatggtttccattttttaagttttctatgtcagttgtgctctatgatttttataatttgctttactttttaaagattgtacctataataaaaggcaagcataaatgcatcatacattcgattcaatctcttaacttttacacgttgaaaagctttagctttcattttcaattacaaagtaaaagtgtttcgattttcactaatcccacattgaaagataagaggccttaacaaattttcatttcttttgtttggtgacattttaaagtattgaaatgtcattctaatgaaatactcattccactattttggtggaatgattattctattttaaaatggaagaaaagatcattctgatgtaatatgagaaaaaatttaatgatttttttatcaatttcttttatatattttaaattttactggattctcgttcttatatgttcattcctctcaactaaatgccactaagttaaaaagaaagaatatgacaaagaggaaaagtggtcgagggtgcatattgtaattaacaatttgcacttttagattatcatagtatatttttcgaccaattaaccaacaagaaaatgctttgcagaatctttttatcaccacattctgtgtagtgtaccattcatttacataaattctgcctttggtagatagaatccttttatgaggaccatgaactctttattctacttttgcttggagttctttatcttcgttttttattcaatagtacacacatggctatatatatagcaaaattttcatgtggggtagttttctatttagggcctttagaaaaattataactattttttgcatgacaatttctacattacgtctcaattttattttaatttttatattttagaaaagaataaatatgatatttacccctctaattattatgtgttttttttaatgtttcgtgtggctaaaatgatgaacgagatggtgccagggaagagcttcgacaggtaccatgaattgggtatggtcgaggttagagtcatcattgtctacatgatcacaagaggcaactcactcaaaatgttccatgacactatgaaaaccagttacttaattatgatactcactccagtctcacctacccatcttcgacggagccaaatcgtctgtccctttactc

SEQ ID NO: 22974 - DNA, 1320 bp, Cannabis sativa
gtgtgtgtgtgtgtgtgttaaccttaaaaattgacagagttgattttcgagattagtcaacaatcaaccccaacagtcgagcgacatcaattgtaagagtcggtcgaagaatgactgagtcaatgcatatggtttaaggatcgttaatctgggaaatccatgcttacaagtctccaggcatattcatgcaactcgaaggtcatccccgtaacaactcatgtgtaaagttagtaagatcaacttactaggttacaattgctagaggatttttgtagtgatatgctcagaattggatctttccataggcataagattcaaatatctctttcttatctttccaaatgatcttaaattgtccaattccaatgtatatcgaaaaagttatggccgaaatgctaagaatactgaattatgacagcttggtatgcgagctggtgactctcatgcaagccgacgggctgttgtgcagccccctagctattgtgtgaccccatggggtgttgtgagagcccatgggctgttgggtgaaccaggaggcatttgggtgggtcgtggaacccctatgcaagtggtggagcatcagttcgacctgcaagtgaaagaaggagaggctatacatgtgtggatagacgtcatgtgtggaggagtgtcagagcatgtgggcttgcatgtaaacccatgggggtgcacattatagccgtgagagagagtgtgcaagtggagggagtgtgtgtgagtgggggctcgcatgtgagccatgtgtgcatgtgaaagagtgtgtgcgagtggagggtgtgtgtgtgagtgggggactcgcatgcaagtcgtgtgtgcatgtggaggagtgtgtgtaagtggatgtagtgtgtgcgagtggggggctcgcatgtgagccgtgtgtgcatgtagagggagtgtgtgtaagtgtggggagagctgagtgtatgggaggagggcgccaagtgtaggatggcatgggtgtattttttggcgtgtgaagataaggtgagaggtgaatgctttacgataagaatgacattgggagagaaatcaaaggacgaggcatgcacgggaagagtacacaaccacgccttttgaagactgagaagaaagaggtacaagtagcggcaacaacgtacctataagacctaaagacccgaccaagggtacgctgcaaccactctctaacactctatacccggggaccacctcgcgtgaagttagggaccatgctcatgtacccgaagaccatcctcctacaatctgcaactggggaccatgtgcatgtaccacgagaatatccttctacaccctgcaact

SEQ ID NO: 22975 - DNA, 2538 bp, Cannabis sativa
ttctataacataataaataaaaacaaataacacaaaaataactcaaaccagttataattaaaatagaaccggttctgtaacagtgttataatgaatcaaaataaataacacgaaatagtcaaaccagtcattactaaaatagaacatgttatataacataatgaatacgaacaagtaacacgtaataatttaaaccgattacaattaaaaaacaaagaagaaatcaattcctaaaatactgaaatataaattaaaataaaactaattacacaacaaaatacctcataatacataatatcttattatttgtatttcttcaagccacacaattatcaattcttaaatatatataattttttaaaaaaactttcttaacttagtagtcttctctttaagattgccttctactttttgttgcattgcctatgagcaaaaagaaacctcacttttatctcttttgtcttgtttgttggtttgtttgcttaatcaactattgaggagcaattttttttaattattaaaaacaataaattttgtacttcatttttctttaatttaaagaaactgaagacattgatttaactttaatttcatataaatttattttgtttttattatatttgaacaaatttaatttttatttctttaaaattcacacaatctaaatttatttctttaaattttacacaatctattacttttttctaaaaaaaaaaaattactacgatactttctactattatcactgttgaacattatttattttaaatttacaaacgatatttttttaacatatatataactaagtatacgtgatttgacacgtaaattctatctagtaatagtaatgagaaaagaaaaagaaagtgcatcttaaaatgatagaaggaaaagcacacccttttttatttatgctcacaaatagaacaagtcgcatataacacattaataggcacacatttattattcgacatgactacatataaaccaaagccacttttagatgaagccatttgagagggttacatatatctcttctaacttcaaattcttatattctagaaaaagctcatggattcacctttggctcccatcctgcaattatatacttcttttcagccttagttttctcgaatgattcccgcgcgaatagcagctataaaaaataaaatcgcaatcaaattagcgaatcaaagtatgaacatgaagcaaaaaatttttgttagaagaaaattagaagtttgtacatgttaggaatggtactggtgatagcataactcagaaatacacacttcgagagagtgtcaatctctcaattgaaccaaagttctattctctcaatctatatctaataatagctacccaattacatattaataggcttctacatatctaatgtaaaatcttaagtattttcatagtctaacacaataaaagtccaatagctaattttagcataaaaggaatcagagtcaagagaatatggttcaatattgaataagaagccatgtcaacagtataggaccaaagcatgaactatatatatacatacacacaaagtagagcacaagggtagaactagaatatgcttttatgattcaccacacaactagctcaaatgagtatgtatgtagatacaaatgcaatggaatacacaagaaccacataccttcttgtagttgataacattagtaagctcagcagggacactccacttcttgaaatgatcaagagccacatcaagatggtacaatttaggggccaagcttaagtctacagcactgactttctcacctgcaacaaatggaccctgattccattccaatataatacagttacatattcacaagacatacacaaatatcaaatatcaatatcaaccagttatatatatatatatatatgatatctgtttagaagtaaatcttcttacatgtgccttaagatgctcttcaagtgccttgagttcagtgagcaaagcctgttctgatccatcatttgagtccttgctcttcaagaaagtcacaaacttactaaatatatttgatcccctacacaaattacaaaattcatctcatttattttcttatgtatatagaaaagggtcataacttcatagttaaaaatataaaataagtataaattttgacttacttttactgtttggataatttaattaaagtttgaatatcattaaaaaaaatgttttgtgagtaaattaagaattacgtaaattattttaattttaaaaataatttctcaaaaaacttattggagaatacaaatcttagtttcatccaaaaaggatttttcatttttcatccaaacacacttagaaggacatttttaattctgaatactaaaaaagagcttataaaaactaagccaaatggggcatagtgaaaagtctacaagcttcaaatgaaacaagagtaatttgcggtaaaacccccccaactatcaatttacttgcaaaaaaccatccaacctcatattttggtgggaaaaccatccaaagtactgttccgtttacatttt

SEQ ID NO: 22976 - DNA, 1335 bp, Cannabis sativa
aataaacacagaatatagttaattcataggctaatttttgtccctttaaattttttttactcttaaaaatttttctaaattattgaaattgttagaattaaagaattttgtctaatttcacttcattttactattttagtaattatttatatattaaaccatgatttcgaaactttgatatctatcaaattatgttcttttaacttttacatgtactaaattatgtctcttaaattttcattcatattagacttttttttactaaaattagacaaaaattcttaaatccaaaaatttcaatagttcatatagtatttttaacaacattacaaattcaagacatgatttgttacatattaaatttccaaaataaaaatcttaattagactaattaaaataataacccacacaaataaaatgacaaaaaagtacatacccgtagacaggaacggcggcgtgctgatgaggatgttgttgccgatgaaacggcgtcgcaggagggggcgatgcagctggataataccactgcacgtgattcgcaggtgcaggcgacattgacctcggtccaacgttagatcctattaatatttcatacataaagattataacccaatttttctagtgaacatatatatatatgtatatatgtataccttgttgaggtgtaggaggaggatttggaggagtgtttgcattagaggcggaccttggtcggcgggcgcctagagaagccagattgcagttggctcggcgaccattaatgatcggcgtggcttcctcgcacgctttcttggcggcttcaggttccttaaaagtcacctatatatataaaatgacaataatatctcatgatccgattaatgagagttgcaattgattattaaaatgtatgataataaacttacgaatccgtaacccttagaacgaccggtgagtttatcggagatgatgacagcttccaagatctcaccatacttttggaaatggtctctcatggcttctttcggagtttcccatgcaaggcctcccacgaacactttagtcaatgtcgtatctccgaactgcccaatgtgattgttaccattaccattaacgttagtattgttgcttagagtcatgatggattggattattatatattcttgaaaaacacaaggtgtgtttagagagatgagagctgggattgggacttgggaacgaatcagagggaaggaattaatgtatagaggaagagttccggtggaataattaaaataaataaataaaaatgggagaagagagagaaagacagattgacagagaagcagacagatagactataatggagagagagag

SEQ ID NO: 22977 - DNA, 3844 bp, Cannabis sativa
gggtgaactctgaaacaaatttcttggtgttttctctcccttactttgtttttcattttgctaaaactaattctgtgtgtgtgtgtgtgggtgtgattctaggtttttcaggcttagagaagagaacttgctctgctagggtgtgttttgggaggctaagtgttgtgtttgagtgctaggatttttagactcttctatcagagtctttaaactatgggatccaaacgacacaggttttggtgtcgtgttggttatacagtgccgttttggtctaagggttaaattagacaagtaaaggtcgattttgacctttgatactgatattatatagctttgttggtgtaggttaaattggtaaaattcctacagcttataacctttttttagaacaaaaaaaaagcctaaatatttgattggggtaaaaaaagtagagtattgctattagcttattagagcatcttcaatagtactatttttttaaaggtgttacatatctttatgttatttaaaatataatattttattttatctttttttcatatcattttttatacctttatttctaaaaacactctaatggtataacaccttttaaaaatactgtgattatgatctcacacattataatatatataacctttttatttaaattattatatatatttcacttttaattttttatttaaaaaaaatatagcatcaatgcaaatttcaagaatagtattcttttatctctaatggtatagcattttttttattcttccacctaagtttttcacctcatcaagtattctttacaatgctattcttggagatgctcttaagcatgagtagtgtctattactttctatagctggcgtcgattaaagatattacttaaaagttatgttattgagttatatgagatttgatatttaattacactaagaacaatatgagaagggtactaggcactaataatacttaacatttctcaataaaataataaaagtgaatgatagtgaattcatcattttttttataaagtttattttatcaaatatttcataaaaagaatattttgattgtcttggttgattacacaataaataatatcgttaataattaatattaaaatagaaaaaatttagtaattcactcaatttcataagagtcaaagtgtagttagaagtcctcaattatctctaattatatcatataattacataattaaataaataaatcaaattaaatagttatcaagaatcgcacttgaataaaattataaaatggctttgcaagtacaccgttagtaattacacaaaaaaaattaacattgtatagcaattaattatttacaaaataataatatttggttaataaaccttctccgaaggttagactttttggctgacaagtctctgctagctggattcaaaaatcaacatacctcgtcatgaccttttattaaatggtctttgtcctatttgcaagttaaaaaaataaattttccatcatgctctttggggatgcttttttttatatatataatttgcaagaaattatatgattttgattttggggatccatcaatccactgtgaggattttcttcaatttattcataaatacattgaccatttaccaaaagaaaaaattgattttgtgatggtgattctatggaaatttggtataagcacaacaaaaatattcataataacattgagatggcgcctgagttggttgtgaattgggcccgagatgaccttggtaactttcaaagcaagcaaaggttgttggcggttccttcttcttcaagtccttagttgagttagagctaactatcagtagttgggttcctcctttagagggctacctcaaagttaatacggatgcaactattgattcaatgggcaattatagcggtcttggcatggtagttcaagatgtgttgcgagtggtcaaggcgtctgcaagctggcaaaggcttttagctctttgcaatgccttgatttaatgcctttcttttaggtatgataatatttgttttgaattggactgccagagtattgttgtcaatatcaagaggaaagtatttttcatttcatctttgaaacttgttttaaatgacatttttagtcttaataataggttttaacatgttagttttattcattattctagatcttgtaatatggttactcatgtcttagccaacttgttctatcagctacttgtagcaaggtttgctgacgcataacccaagttgtattcagaactatttgataatagatgctattctctaatgaattctcacctccaactttttaaagtttatgttgctcttagtgttggtggttgagacttttcttcttaaaaataaataaataaataatatttcataataatataatcacaccctattttcaactggttatgagaactgaagatatctcgattatctcaaattatatagttgtttgattaaataaacacaacaaatctaatagttactccaaattccaattaaaatatggctttacaaacgcattccttataattatttataaggttttgtcatccttcctaagaatcatgttgagttataatattatggatcgcgagagacaataagaacactaacactaacggtgaaattagaaactagcgaaatctcttttttaagtaccaaactttcaataattttagaatttattcattattttagtgatgcatgtatgaatatttatcatctcagagcaactccaacacaagtaaccaaaaaagttgccaaaatggtcttatttttcatttcttaattaaggtaaccagttgctctttgttgaaaagtcagttttaagatttacttttctaacaaacaactttgaaaaattataattctgtaaattaaacaatttcttatcttaatgattctaaaataaaacaatttatatcacatttaaaatctcaaaactaaaataatctctactaccatttaggtagtgtccctcatgagatttttcttttatttatttatttatcacttgaaaatgttgatttaaagatggtacaaaattctaaaatataaatattggatcttcaaagcataaagctcccttttgagaaatatgagtgtttcataaaattatataattttcaccacatatggcatatgcacatggtatggttctatatcaaaaacatttgtgtcccaatcattaagtcaagtgtttaaaaaattattataattatggaaagtaggcatggcagcacttggaccacaaaaatgttctaatgacccttttatttaaaaactaaagtaaatttactttaaatattattactatttactaaggaaaaaaaaaatggaacatgaaaaattctcccaaattcaaacaaacagccaagtggtatttggccaaaattttcaaaaacaatttggtaaaagttgagttaaaaataaaaattaaaaaacattgaaatgttattttttattttaaaaatattttttattttatttgtctatttttttttttacattttctttcacatactccagtccaaggttcgaccaggtttgaaatccaaagttggacttgagttcgaaattagatctcgattctagggttggggatagaaaatgagttctggagcaaggctcgagatccaaggttaagacctgaccaaggttcgagtctagagtcaggcttttaggttcaaggtctaacattgaggcctgagtccaagattcagggtttgaagtcgatggccaagtcgagatgtggaattaagaatgcacacaaggcgaaaaattaatagagtgctcccccgtccccatccctattaagaattttaatccccatccc

SEQ ID NO: 22978 - DNA, 4532 bp, Cannabis sativa
accaacacaccataaaggcctcaatcacctccactttactacaagacctcaaaccttcttcaaaccaacttgaaaaaatcatagcagtcgcacctaccgcagcaacccaagaagccctctagtaattttgagcaaatggacaccttaccaagataaacaatattgtctcaggcgctcatttacaaatagggcagttagaatcaataggcacatgctttctcgtcaattggaaacatgtaggaaggttattagaataagctctccacagaaaatttagtacttttggcggtaatataagatgccacagctgcctccaaaaacttgaatttgcattgccaaaccaatttcctttcaatttctacaacataatatacatggttatgacagagaatagcccagatctttcctttgaccaaaaccacaaaccatgagaagattcactaataagaacctacgaaactagctccacatctctgtctgaaagaacatcaccatgcacctccttatcccaatccaaaccatcatctgtcataagagaccttattggtttaccaagtagattcaatataaggattggcctcataaaacagccaccaagtcatttaaaatactcacagtcaaactattaccaatacagtgcctagctcctctcttcaccacttcttgatcttcaagaacactcctctatatatagcttggattattacccaaggttgcattaagaaaacaatcgttggcataataccgagccttaaaaacatgatttgccaagcttgattcattgagaaggagtctccacccttgtttagccaaaagagcaatgttaaagtcacaaagatctctaaactccattccacccttctctttcttttttgttaacttttcatctcatccaatgaatactatctttgttagatgcttgccaccaaaaattacttattgcatgcttaacatcttggcaaatactaactggaaataaaaaattattcattgtgtatgtaaggagtgattgaacgacggatttaatgagaacttctttgcctgctttagaaaagtacttgttatcccaagtccgaaaactacacctcgagctaattgaggaactatatgggcaacacccattagagttggccttatttagagttagactatgcccaacaaataattatatgaccaatcacttttcaacctaatgagtcatgacctacttttaatataaccgtttactacaaagaatgagttgggttggccgaattgattggcttggctagggctagcaatatgggtcacaacatgacaacacaacttgaaaacaacgtagaataaatgggttagggtgacgtttaataattgtgtcgtgtttgtgtttaagtttctgacacgtttaataattgtattgtgttcgtgtttatcttaatcgtgtcatgtcataaacgtgtcgacacatttaataatcgtgttgacaatgtgttgacacgataacatgaattaatttccatatattttataaaaaaaatcaaaatttttgtatttatcatgataattgtgtcatattcgtgttatcgtgtcgtgtgacttactaattaatcatgtcatgttcgtgtttgaggcttcaacatgtttataaacgtgtcgtagtcgtgtttaccttaattgtgtcatgtcatacacgtgtcgaaacgaacacgactaagggtattcatccattcaaatttgtaatgttttgttcatagtgcatttaattcacactaagtatgaatttcattttttagatccaatctaatcagcataataattcaaatccaatccaacccaactcaatccacaaaagtaaaaattagaatggctattttaaattgattactttttaatattaaattagttaatatttattaaaaatatttttttcacgtaacaacaaaataaaataaattattgttaatttatatcttcaataaaaaattaaaataaataaaacaaaaaataacaaattcaaaacaagaaaaaaattgtatgtataaagaagtgtacaattttattttagattatacttttcttataaagaagaaatgaatatacattttatctattttaaaatatatttgtatcatatttattaaatttttaagtaactattttttacattaaaatattaattatatatatatttttaaatatatgtagattagattaaatcgaatacttttacatatttatgtgtagattagattaaatcgattacttttacattgcataagtacaaattttaaattttccaaactaattcaatcgcacaagtggagatattgacattttgcattggattagatcggatattttataaatacacctaaacgcgatagcataaattgtcagctggaccatattttgtgcacccataatcataatatagccaagccaaaatctgtaaacgaccacaaagggcttctaatgggattgcattaaagataacactttacttgcaaaaaaggaaaaaacacttaaaataattatcattctctagcaatgctgcaatgcatattaacctcgttgtaaacattcaaatagtaataactataagaagaagaaaaacattccataaagaaggtaggcagaactagaccagaaggcccatggcaccgtttccgtattacattgaagacccttaagctgcgcccacccaagatcatcctcacctcgttcaaacaaaattgtcccgaattccgccaagccggacaaattagtgtcaacaattaatgcaattgcaaacttacagaaagagaaggtgattcaataaaatatacatgcctaaagttctcataatctcaaatgacattagaaagaaagacctcaaaaacatttgggagtatgttctgatcaatgttcttgatttcttacaaacacgaaacaacagaaacccatatcataaacaaaatgtcaggttaaaggcatacttgactctgtcgtttttcataccgtgacagattcagagatattgctccctgtggaagcctcttttctttcagcctgaagtggtcaacacaatgataacaaaatatcagaactaatatcattgtaatgtttcttgataacaatcaatatctgttgaagcaaagacaatacacacataaagtcatccaagatgggctttacataataacatcatttttaatataacatacctgaacatcatcggaattgatactcccaacagaattttgttttctttctgcctgaagtgaccggcacaatgattcaagcttctctttctgatttttagttttttctaaatgtttcttcaaccgctcacgctggtcagaaaaatgaaatttcagttggaattttagtcttggagaaaaagattaaccccacttggcaaaaacaaaaaaccagcagtaatatatactcaaagcaggctggagtaaaccaaaataggaatatagtgttaaactagtgagacaggaaagagatttgtgtggcaggggggtggggggcttgcggaggtcgagttatatgatgatgttcaaaattatctcctactttttaacaccagctgatgattttttcccttttaagaaacaaacttgtattaaatgtgaagataatgcaaggattaaatgtcaagatatacaaggaaaatgtggtatgaaaaaacccgacaaaccaactgataaataagtttaatgcaataaatatcataatatatattacctcgtcaacaagctcaataagtgtaatgtctgatttctcagtcttgctcttcaagaatgaattttccttcttcagttccttaattgattttgccatctatgttttagatagacaagaagcagacagctacgtaaatataaacactgataacaaaacaatcaaaattgaatgtcttaatcagatgattcaagaatataccttctgaatctcctgtttaaaagtttcaaaaacctcattgctttttaacaatgcttcctgtaaaaagggattttttgaaaaaataaaaaattaataaacaaatgatcaaaaatatagccatacaattacaatatgagcactagtatgtggtgcactattgagcccttccacacaggtcgaaaaagattcactcgcataaggtatgctcataaaagcataagtagaaaatacaaggattggtgagttttttataaattgagaaatgctaaaaggcacccacgatgcctagcacctttatgagatgtaatatcatcattggtacaatttaatatcggattcacttattttaatttaataaagattataaagaaccgctaaccaattataagatgtcatatcataaaggtgctgagcactttggtgccccataacaatgctcttattttattcatatacactattattaataaaaccaaccattacaagcaactttgccacctttaataaaatacaaggcaacaagcttgggatttcctttaaccaatgaaggaaacaatgaacttgtgtaaacaatttttttagtttataactatatacatagtgcattttcaaaaaaaaaaaaa

SEQ ID NO: 22979 - DNA, 2823 bp, Cannabis sativa
gtttaaaggggatgaaaccaaaggggttgggatgtatcaagtcttagctatgagagaaaccaggtctctcaaatatcctagaagatattgttttagtgagcgattcaataaagtttctccccttttctctaaataaattttttgttttctatttttgttacttgatattattgagatacacttacaaaaacttatagtccttgtaataataagaaatgattggcattaagttcatgatttaagatacaagaagcattataattctctaatattttctgaagcatttgatttagtttatcttaaagacaagtaaacgctaagcaattcagattgtaaaaatcaatttgggaaacaagacatcgagtcaatttagaaaacacccacgttcagtaatcacataaataagaaaaaaaataatcagcatgaaagtataaaatataccgcccagtctgtttaagcatatcaagcatgttggtctggaatacgtgatctacagcttcaacgctaacaccagtaccactctgaggcattgcaaatacatcaacgacacgaacagtgtactcatccacgaactctccaagcatcaaacccattacttccatcggaacaccggctctccctaaaaagacacccaaattccattcaagcacgtaaaaatatttaattatgtttcaaaacacagttaaaccagttggttaaataaaagaagattgcactcatttttaggggttcgaaaccctaatctgttattagattcgaaagaggaaaagagaggtgatattgaagacaaaccctaatgggggcgtgcgctactatgtgcatacaataaaaagggggaaaaaaactgaacccaaaataggatttgaatcgaaataaagtagcagaatgcagcgaaataaagtaccgtgtttgagcatcttgagaagggcgagggatgagatgtagacctgctcagaggaatcgagggtgggagaatccggcggagggtggcccaaagctcctccggcaccggcgaacattctctgaagcctctccatatataagcacttccccttgaagaaaaaaaatatatatttaagcactttcccttgaagaaaaaaaatcaaatttgttaaaaagaaaaaggaaaaaaacgcattaacaatccctatttgtgcacaataatataacaatccccattaagttttaaacacgaaataacctatcaaagctagaggtaatccgaagtccgtgttcacctgagaaaaatcctaacacatgaactgattttataaaatcaatgagatgagatgagatgagagagagagagagagagagagagagacctttttcagaggctacctcgcacaaacccaacagcccagaaacacggcacggcagacgaacccacggaacgagcgatatagagagagaagcaagcaagtaaaaagcgggagagagaactggaacgagatctgagagagagagagagaactcaaagcaagcgaaatgaaaagggaattgagatttatgattttaggtggctttgggtacaaggtaatgtccctatgttacaaaaataccctttttttgtcacatttttttctttagtttttaaaatactctctggagtgaaacgtgcttcgtttcacacttataaggcttcagttggaggttcttcacgatcattgcttaaaagggttcgtgttggtgaaggagatggtgtctcctcttcattttatttttactctgaacaggcgggtgatgctaagcacacgtgcccagaaaaacgaccctcattagctgggatgcacggagtattgggagtaccagtgcattccgaagactctcactgctagtgaaggagcatcaacctttatttctttttttagtggaaactaggctgtcttcccaagcggttaatagggataaagacttctttaagttttgattttggttttgaggtctctaggaaatatttttttggggggaggagggggagacttatgcttttatggaagtttaatgtctatgttaatattttaactttctcgtgattagtaatataagctttaatgataatagtatgtttcattttattggttattatggatctctagtacataattaaaggcatcatacttggaacctccttcgtaaagttttctataatgcccttaatctcccttggtttatcatgggtgattttaatagttgacttttacatagtgataagtttggtagtaatttctattccaatgttgatatgaagtcctttgcttgttttttatatacatttagtctttttcccctcccttatgttggaaataaattcacttagaaatatggctttacttatgagtgtcttgattgggttgttggttctgacaattggtgtgatttattccctagtgttgtcctttatcaattacctttttatggctcagaccatagagccttgaagattatgctccatgaggacaataatacttgtcttaattttgttaataaaagatttcgttttgagaatgtctggcttgagaatcctgacttttatctcactgttaagaggtcttggtccaataatcaaccctttaatgctaataaagaggctttatctagttctttggacaagcaacagtcttgtgtttcatctctaaactaggataaatgcttcggctaacaatcttttcaaaactaaaataaatgctcttagtaaagccatagttgatctccaaaactcttatcccctggatagcaacactaatagtcaaattaaaagccttcaatctcagttggatgcttttttgtataaggaggaggtctattgatgccaacgtgcta

SEQ ID NO: 22980 - DNA, 1795 bp, Cannabis sativa
tatttttaaaaatggtataaatagaattctgaattgattttttttatcaaaataaaacttaataatgtgatctaaatatgttataataaaactgattatattttttttttatatctgttcgtattaaaaattgttttgaaattagttatataaaaaaataaaattatcaaaattgagtttaaaattcaatttttaccattttaaaaaatatagaatttattttatcattcactaaaataaaagatttctgtaacttttatcatcaaagatttcctttgaagagacttgtggatgaaaatgaggtccaaagaagttgactagctaatttattacatggaatttaagaaatgtgacgcgagagcttacaaattcaatgaaagcctaaacatttttcttctttgttgaccaatcatgcatccatataaagttacgaacctcaaaatcaatatattatatatcatccaattctatccatctcatttttcttctttgttgaccaataaagctttgaccttgacttttctcattttgacatttcaactttattctaaacggtgccgtttttgtcgtacgttttcctttccatgactactaaattaaattattggcttttgcttcaaggatatgcaaaaatatatattgttcagttcacgtgggctattatttatatatatattttttaccttatcgtacgtgatttttttcttctcttataaattttgttcattttctcaaaggaacatttatatatgtcgttgaagcaaataaatatgtatgtatttattatttaatattacttttagtactagtggtctgttagggtataaataatcaagagttttcttgaatatatgtgctccacttctatttatatgagattttctttttataaatatacccaaaaacaaaacagtgaagattagccaaaattggtcaattttgcctagtcttattaattgatctattaattaagatttaagagattggtcaaaaaaatcttttttgaataataaaaatacgacaacttttttgggatgagcacattcacacacgtacgtacactagttgcatgcatgcatggatagatcataaccttagtccaattaatgtattgaaatggttatatgtatatttatatagatcaaggtttttatatggttttcttattcagaaagaaaaaggttttaatatggttcttcttggtctacactatacataattggattagtcagtgtgaaatgttatattaatttagtctcattttaataataatgatctgaatagtaatagaatcaaattcaaaatcacacgtagtgcaaagaaaaattaggtttgataaattcaggttcagctcaggtattaaaaaataaaataaaataaaaagaataagtatggaaaaaataaccaattataagttgcatagtttcctataaaattgcaaaatccttaaaattggtttatgaagtgtggtgatatgtcgcctactccgataccacactacaaattttttttacttttagtcacaataaaatttatacaattttttgtagtgccacataccatcagctcattctcaatagttctttttagttatggactagatgacatgatgcccggactgaattattattccgctttgagatatcacatttagatacctctggttattaaaatcaaatttctcttagtgtttcatatagtcttctagaatatattgtacctctcattattaattttttcaataagttaagcttattatgtgaaaatgtttgatcaatttttactttgtgttatt

SEQ ID NO: 22981 - DNA, 1621 bp, Cannabis sativa
gtaagtttataatatattttctactgtcaatatcagtccagtctgatgtatataactaatacattttatgcaagtttactttgctaatgccctggaaaagaccattgacttattcaagtgtaagtaaaccacatctctgattatcacgtcagtgtaaatccaatgcactaataaattgttggactaaatagttagaggcatatgatcacgattattttctactatgttgacaatactataatcttcaataactatatgtttgagatttagtgaaatttatatattagtcatataatcatgaaagtaacatgtgaatcaagaaatatacaaaagtaaaaattaattctgatcttttattaattagtaaataagattatatcgaattaaaattttatttagggcataaaaccccaacatatatctgcttgacaatgtggttaacaatggtcgtggatccccattcacttaaaatttccatcttgctttgatattttttgttttgttcggctcttgcctctaacttaaaagaaatttattttcattagatttttaaattataagttataatggaaataaaatttcagatgtttgaatttgtacatgttgttttggtccttctagtaggcgatcatattttcctacacctctagcgacaccccctttggaggtctcctttgcctttgcctctctcctttcttcacaatttttcattgacaacttttttgagttcgatctacaatcgcatagcccttttaagatctggtacaaaatgtagttcacgaacttcaaattattttatgggaactcaaatttagtcttcaaaagaataaaagtaaaaataaaaaataacattgaaatcatatatatttttattagtatactaattttttatttgaagtattataaataaaattttctataactgttaatctatcctagaaatttataataatgattaaactttaattggatgtcatatcaaattgccttttgttgagttgccaaatattttaaccacgatataattgattgttgatattatttaatcataattacatttgaatgttttaggaaaaaaatgtaagtttaacaaggtcttatttttctttcttaattatgaaacaaaacgaagaagaaaaaatatattacaataataaatttcatttgatttataagaggaatattaaaagaaaaatttgataaaacttatatacattaggcaaaaaaaaataacaaaaattatcgtaccactattagacccactcttataattagaagaatattaaaaagggatattagattttttttttcttatataaatatatatatatatatatttctccaaattactactcttatatcaaaaatctcacccactctctttttcttctattctaccagaccactattagatcaatatcgaaccatatttattacgaaaaagacattgaatagaatgaaaagtcttgaattgattaagtgaaaagaatggtacaagaccaagtatttatacaaagctcactaggagctaataactgaaataactaaccagcctaaagacaaaactacctctaaacataaaattaacaattaacagaataaacaaatgtgtaacagaaat

SEQ ID NO: 22982 - DNA, 3700 bp, Cannabis sativa
agtaagattttttatagtattattctagtcgataaaaaagtaataattataaaaataataatgttgataaaatttacaagaaatttggttgacgtggtcccaatatttataaaattaaaataataatcacattggattaatgcctatataaagtggggttttttctctcttgtgagttacaaattattaagaaccaatattaattaattataatggtggatgtatggaaattggttggacaaatcggaggcaaaacaaaagacataacccaaagcgttactacttcaatcaaaaccctaatgaaccaagatccggctcatcaagaagacttacgccgagccagagctcaaggcgaagctgatggccttgctcaagcccaaaaggaaaagcaagacaaagacgaagctacaaagaaagaaagagccaaagctgtagccgacgctaaagccaaggaactagaaaaagcaaaagcagaagctcgagaaaaagtgttgagagaagagcgagctaaagttgaagctgaaaaagaaaaacaaaaaagagagaaagatagaaaacaagctaaaaaagaacgcgacgcgcaagaatttcgccgatttcatcaggcttttaaggtaaaagaagagaagaagaagaactggtacaatatattttcttagatattaattaaggggttttaatatttattatttgtgatttagtataaatattactgctaattaaattaaataaagtcaaatttgtatgattaattattttattatctgcctgatcgatgggtacaccaaatacaagaactgctattttttttttttttatctgctcttcagttgactttctagctagaaaaggctatatattatacgtttgtgaaaatagctaaattaatagtattttaaccatacatattttaatctctaattataatcgattaattttaaatattaatttaattgtttaaaaattactgtaactagatagaattaaaaatttaattttttttttttgaaagaaaaaaaatttaattgttttgtatatatatctaacaataatctttgcaagttccatctcacttacatgagataaataaatattcgataaacccattagttagattggagagtaataatattattgttatgaaaaccaaaacaacaaaacaaaaaagcagcttccaaggatacaacctagccatgcattctactgttcttgcacttaataattatcataccatgcacgagaatgattatacatagccgatcgagttggacggtgtactgttcgttaattgttattattctactactattagtactactagttaattgcctaatagtactagtagtagtacttgttcgagttccacaatcgaataattgtggaactgaaactcgtgatgatgagaaacgaccaccaattgatgaattagcgtctgagtaattagattttgtataaccaatttcgcgtgatctacgagtactgcttgaaacggcgtcgtagtacaactggttagacatggatattcgatttgaaggaactatctacagttagagctttactagaccaccatgaatctccatcatagtgggtcttcgtcgaaaaattgtctgacatgtttttaatgttattttcagctctaagctaggtgggccttaagcacaagcctagtccacctatacctaaggttaagcccgtgtgcaataattaataatacaaactcaaaaataaaaaactatataactttatttattacaaatggcaaatcaaataacaaacaattaaattctcatgagtcttttgaacaaacaaataatcaaatatctcaaaacaaatcaaaaccctttatcgaattaatctcatatatataactcaaatgacatccagaacacaattcaaactaatataggaaatttcaaaagtccacctctaaagtggtgttctggtagacattctatctgtattgtcattttaaaaaaaatagtccattttctttcataatcacacaaattttaaccatttaggacacttataaattttttaaaaaaattaaataattaatattgacgaaaataagattcaaagatttgcttactacgtgtataagaaaaaataattatatgttcaacaaaatattttaaatcttattttcggcatcataaactattcaaaatttttaaaaaatttataagtacattcttaaataattatacataaacggtcatgaaaaaaatagactaaaaattcaaatggatgatcaaacagataaaaaatctaccaaaacaatccgaaagccgaccaaatatgttgagaacctctccaataattatcgtctcccacagcccatctcaagtgtgtattcagcaatatctctctcatttatcttaaaatatatatatataagatccatgagagtgcaacgcatgtcgttttagtcattatataacaaaaacagaaaaaataaattagataatgatataactgcataattaatttataattttttaaaaaaagaaaaatttcatattaaagtgaaaaattaattctaaaaaaaattgttaaagaccattagtaacaatatcacctactttaatcaaaaataaaatatgtaagatccattatttttaatatgatcataatgttcgacaccacaataaattttcttacaatgaatgaattgtcttgatgctttctccaccgtcgaatgagtttctggtggatggattgtagacattgtctgatcagttgatgaatacctaccacacactgggattgtgtggaatggaagtaacaggctattataaatgatgatgatgatgatgatgatgatgagggcatagagtgatgagctttgttcaaacttttcaactcggattgtattgaactcttatcacattgcgaaatatggttaggttccatttgtagagtacttggtgtaatctcgtatatcttaaccaaacccttaacatcgagtttgttagaataatcaccatcattatcaagtggtctaactgatgatgatctttgaaaagtactaataggagctttggcttcacttgttgacattttttttttttgtttagatatatataacaaaacaaattgaaaatgaaaaacacacaacatatatataaacacaaaaaagtgatcaggccaatcaatgacatcaggatgagcatgctaatatttaaagtcaactgggtgatgatgtcatgtgcacactctttcgtttaaagtcaactagcataccaatattggatcaccaaaactatatataagagtgtatgacactttcttttaatagcaaaaccaactatttatacatgactttttcttttattactatacaaaaattcttctttctttttgctggcaattgataaaatataaataatgaaaattgtattgaatatgaggaaaaaaaaacaaatcctcattttattgtctatatgttgagtcatgtatttataatattaattagctatagcatgctttgatgattttttcttactatatatgggtggatgtgggtgcacgacccatatgatattttgagtataattgtaatttgagggatatatatatatatagatccatcataatgaaatattataaaataatacaaatatatatatatatatatttaggggtatgtataaatcggtcaaatctaatatttgatcgatccacttataatcaacca

SEQ ID NO: 22983 - DNA, 1639 bp, Cannabis sativa
tcaaataactccctcatctgacggttgtcgtacatcacggattacaatccgtgaaagtacaataaaattatatccctatatatatataaaatgttattataaaatgttattttaagtattttatgtaattcgtaattcatccccaaaaaaaaaaagtgtaaagacaatttattggcttaagaaattttacacttttttattacccaatgaattttttctttacacttttttttatttcaaaatgaataatttagtagtgtaaaaaatttaaagaacaaaaatactaattgttcaaacaaaaatatttcaatttgaaaaatttcctacatatagttgatttatagttgttatcaagttgatttctcattatttttagatgtttgcttactttttgctaaaaaaagtgtatttttgtaattttaaaattttaaatcgtaaaattgtaaataaaacataaaaaataatatttttaaaaaaatttattttttaataaattttaaattttattctatttcattcctattcatttttaattcttattaatattcttatgttatcattcttctcaactaaacacaatcttagagtagtgaaaataaaatttaaccaataaggtgacttagttatacatgtgtttatttttctttaataagtgtggaactagatattttgaactttttttgcaacattctaaattattagaaatttcttcaaaattagtgggatgcctaatataaaaacaatcaacacatcatatgaaaaaatgagttctaatttgtcaagctatgaaacttaaaaagattaaaataccttagttgagccatttggggtttaacatgcttgaaagctcaattcataaatggaaataattatagcttccaagaaactacacaacaacccattaacttaagagccgcccatgtttataaacatcataacattttccaataattcttgaaagttaagccttcatcattattcaagtccaaattaagcagccattgaagtttgaataatcattcctactcaacttttgaaaaagattttgccacacttatggataacaaactcaatccaataagcaataataagtcttctttttcatcacctatatatatagggaacctcttcatcactctacaatcaacaagaacaacaacaacaacaacaatctcatcaaaaacaaaatcatgggtgtcacaagctttacacaagagatgtcatgcccagttgcggcggctcgaatgtttaaggctttgattgtagattccaacaacttgataccaaagcttttgccccaattcatagcaagtgtggatgtgattcaaggaaatggagggcctggtaccattgaacaagttaacttcactgaaggtatcacaattttttttcatttaattaataaaaaagaatttataaaacactcaaccataaccccaaatcttaattgtgttactaaaactactttaatatataataaaaaaaaatctcactaaatgcgagagaatatgagagcttgtgtttcttagagatcaataccttcagtaaatgaattataatggggtatattataataagtgtatatatgtgcccgtgaaagataaatttcacaattgtttatcattatatagtaaataaa

SEQ ID NO: 22984 - DNA, 2934 bp, Cannabis sativa
attatttaataaatagaataatttatagtataaattaagtttaatttttagtgataaataaatatttaaatttattttttaacagtaataatatgtaagttatatttttaaaatttttgtaagtacttaatcatgtcaactagtcattattcatgtattattttcttattagtatatttaaattaatttttaaataaaaaatataaatttaattaatgaactgaactagttaaagattgccacgtggccattgagttgtacatacataaataagccctaataattattgtacaagaaatgttcttgtatgctagctattttaacttatatatttatgatcaaatagtgtgtatgcacaagttatgttgcataactatataatctaatatagaattattaaattataccaataattcatgtcatatatattgtacgtactattcttaaatatggtatatataattagtgctaaaccaacccaataataattttcaattggtcaaaatggtgaggtcattttctttgattttatttttataggtcaataaaaatttacaatatttacatattatatatttatatatatatatatatatattgtcctagtattgggtttttattttttggaaccctatttgaattgtaattttaattaggtcaactagattctatatattccctaaaaaaaaaaaaaaaaactagattctatatatatttgtttttatatattttcgtcaatattggtcatccatatacaaatatatggtcccaaaaagaaaactcatactctacaagtatataataattaatgctaagaaaaaacaaattcaatttataaattaataactctctagaagtacttttacaaataaaactcataaaatacttccctttaaaaaaaaataataaaaaaataaaaactcataaaatatgcatatcttgactttttaatttcttgattatataaatatattatatttatattcgttgtttgcattaaagtcctattaaagctttattaattaattataattaagctccatgcaaattaatttatatttatgttatggttagcaattacaacttcgaaagcaaagttcaacctaataattaaataaataaataataaactatatagaagggactttcttaataatgatgtgcttaatcatataattaaattaataaaactcataattcaagccaacaaattaacaaggataataggctgaaaatcattatttaatcaatttctacagctatattaattagtaatttaatttcttgaatctatatatttatatattagagttgctaaaaagtattattactgtctagcaccctcttcgtattatactctattattgtaattaaatattatgtctcataacttaaataaataatttttaaagaatatcgctaaccattagggtaccacttataaaaagtgttgagcatcattagtacctatattagcaaccctctctttgtatatatatattttttctctttctaaaaatatatatatatatataaatattcagttgtatgaaaagagcattgttattgattaccaattttataagtgacactctatgattggttatcaatattttctaaaacgatacttaattataccaataacatgtataataccgaaaagagtgctaatgatgcattttagcaattctcttattaaaaatatactaatttgaaaaaataaataaatctatgttctaattgactttgactactttcaagaaaatttcatagcgactttgatatttcctagaaaatttataagatttccaagtttaattagagatagtaatttattaataaccttcctattaatgaattatctctttatataaatacttaactatagctaatacttgataaaaaaaatatacactagtgattttgtataatctattatatatataatatccaacactaaattaaaattttgtatataaataatacgtattattagtcacgtaatattctgtgagaacttaattattttgtagagttttttttttcactattttattgtataatataattatttacttaattaaaaagaatattcaatttttgttaaatgatgtttacaataaatatattggacgtctcatttaatgaaaaatgtaaatatatatattaatgatctttacaataaattaaattcaaggtatttaaattattatttttataagactattcattgtattcaacaagaagtttctgccaaaaaaagtttgataaattattcctaagaattttaagaaattaggaataatttgtagtggctaataattaaaattaagattgaaattatttgtttcattttttctcataacgcaaattattataattttctaattagcataaggtaaaaccctaaaatattttttaaagtgtcccaataaattaatacattcaaattatgaaaaaaaaaaatatatatattaataaaaccctttatgttttcataccaaccataaatagaatagttcaatgataatgaatttataaagttgtagagtactctcaaattcaaaacttgtcactaaagtttagctagacattgacctataataaatattgaaatgtatccatctatatatatttatattacattttgttcttttacatttacaaaatatatttatagtatgataatgcaagcaatatttgcacgtaataacattttacaaaaatagtttacgtaactaatgaactcatccttataatcagctttatgacttatttcgataagtcgtaatattaaatattactggtgttcgataataatattactcgtattattgatatattaaacttgttttgtaaggttttagattgtgatgaaagtcatatttcacttttataatcaaagctaacaaaccctaaatttcttgcatatat

SEQ ID NO: 22985 - DNA, 3018 bp, Cannabis sativa
ttcacatatatatggttaaaaaaaacacagcacaagtataacactgagaaaaacaagaattataattaagaaagagatgtgtcagcacacattctagttgtcaaatattttgcccagattaattcttattattataatttatttttattatattttattttatttgtacagtctttgatttaccaatattaatattcctttatgatcagaatatataataatgcattctcaaattcatggttatcatttctgaaatatatatatacacacatcacattcataaaagcaatgaaaactctatatcacaatttatatatttaattatatataatgaaaatatagctattttccaaaaaaaaaaaatggtcccctaattgtatttttgtgaatttcacagctgtgtgtattactattatttgttcacattcaaaggattttatttcattattatgtggttcatatgtatttttggagtcaagaataaatggaagaaggaaaaaaaaaaaaaaagagtttaaactttatatataatgttgagtgtgacattttcatatatattttttttcatatgtacggaaaaaaatcatcataatgttggaaaagtttattatataaaaaaaaatattagacattagggttttttattatatatttatgcgttatgaggattttcgagcattcgaatatactcaaattagcaaaataattggaaattttagtagttcaactaataatgcttatgtttgttcgagagtattttcgtacctttcgctcaataaaaaaatgagtcaaattctacatgattaaattcatagcgcttaaaagagaaaagaaggatagaaataagttaagtaatgaaaattacaagaatttaatcattgtgataattgtttgtaattaattaaataataaattattacaacatttatgaaaaacatatttaaattaggaaaacctaaccactgaacaatactaacagtaacccttaaaacatatttaaattagacatgcatttttcacatactcataattctcataacaaaagaaattaagttatatatactacaatcaaataatcatagttgatcaattataaagtactaatcctattatatgaaatttcttacaaaatttatagtcatatatattgcaaataaattttataaatcaaggattaaaagggggtaattaatatatcaaatatttacttgtaattaaatttgtaatatataataagtgtgtttaagaaagagaatattgtattgtcaattttattactgcaataatggcagaatgcatggtgtggtgtttatctacattcttccattaattatattgatgccatttttcaccagagtcttatttctgtcatgacatcatatgaatcagagaacatatatataaatataaaatttatatttatatatataaatatcattttctttacattttctttttctatttcccatatataatctaccgacctataatttttttttaaaataaataaataaataaataagcttagttatatattagaaagatattaaacctcatggtcattatacaaaatattctccggtaaagagttgatcggaatggatccgtacatctagtgcgtaaaagcccatttaaccacattatggctgcaaagttacaagacctactcatattcgaaaaattacaacatatgaaataaggagaagacttagtacaaaaggagacatagttctctagagcccaataggacgccttcccattaagggcattgatcggtagtctcgagtcactctccacaataatatacttatactgtagctccatcgcaacagacaccgccaagcagcaggccgcagcttctccacaaagagcatcagagaaatccaaccgggacgtgtgaatactaatcacccttcccagatgattccttgcaacaacagctgtacacatactctctaagcccacacgaacatcacagttaaatttgatccaatccagaggtggtggaatccagctttccctcaacaacggcgaacgactaagcaaaagagtagtatgtagctctacaaaagaagaacaaataatgtcaatacaatgcaaaacatcaagagggctattgttgtgaaccacatcattacgcatccgccagatattgtcaacaacaatagaagcatagagaaagacatcctcagccctgacacccctgttgttaaggctccaaatgaacttcatccaatcccgaacttgaataccagactcacacaccggaaaaattccccaaggtgacgaacgccacaagtgcatcgccacatcacaagttagaaatagatgttccatggtttcctcccccacttcacataaaggacatctagtatcctcaatcagaaattctctaccaattactgctcgaaccggaagagcttgagagaggatgcaccaccagagaaccttatgacgctccataatgttactattccaaagtttattgatccaaagagttggagcgacgtcacagtaaggcactctatccaaagcttaggctagataagctgatttacaagagaatcgcccattactctccaaagtccatagccaactatccttgccactaccaggaggttttccatccttgagaatagcagaaacgtctcatggtcgaaaagacaatttagcttatcaatatcccactcaccctaggtgacaagagatcagcaacataattgttatcctttaccgacctataattttaacttatataaatattcttagaaagttaaagtaacaaaattattttaaaaaataattatccaatgagcctagtggtataaatgggtggatgaaataaagtacatgtaaatattatttttaataataataatagtgactaaaaagtttaattaataagtacttctttttataattagatttctatacaaaatacttaattttgctaaaacaatttattttctcccaaagtttttttcttctaaatttataattgggattatttcacaaata

SEQ ID NO: 22986 - DNA, 4396 bp, Cannabis sativa
  modified_base (179)..(181): a, c, t, g, unknown or other
  modified_base (1463)..(1463): a, c, t, g, unknown or other
gcaattcacaatgcacataatcactatataatctataaatctgaatatatatttaaaaataaaataaaaaaagataaaaaaaaaataaaagtagttagcccgatgatatgagaaattttacatggtatactaatttctgttatttttttactaaaatactgtcagacggtattttttannnttttactgtgtttttttataagttgcatagtactgtatactgtgttaagttttcactgatgttctactggtgttttttagttgttctactgttgttttaagttgttttactttgtgttttataaaaatatagtatgtttgaaaatttttccgtgtgacaatatttttgtaaaaattaacctaaattctagtattttatgtaagttttccatgagaaccagaggcccaggcacatatacaaatcgaagagaaaattaaactctattacctttttatattgtcctcttttatttttatcctctttttcaaagtctatcatttttacctctttttttaaatattgtaccaattttacctctgtcacttcaagatactttccatgtgactctcttatgtcagagtattttaggtataatacatataaaaagagatatgtttcaaataaatataaaattagacgtaaatttaattaattgattaataaatggggtatttttcaacttaccccaaatcgaagtgggtttcattcacttcatccttccaaagtcacttgagccccaagtcatttcttcggttctctcaccaactcaccagcgttaccaccttactagtactactgatcggacttcgaagatcggaggtcggacagtaggaattccctttccgtcattggccggatacactattagttcaatcactacaggtactgtacttacggcttgaggctactaatgaggattaaatatgaagagacgattaaaactttgtgtgcttgtttgagtttgtgaggttgtttgagttttctcaagtgattatctctcttttatagagttctacattgccattctacagtgatatgagtactattatccaattctctcttctttgttttttcttttttatattagtcaggtttgtagcattagtttataatgtttagttctaagatttagaaattgtgtttgtgtatagtattaccatttgaaacgttataatatgaatatgtgttaataatcatatgagagtttgttctaatctggatggtccgaaatttgttctcaaatcgttttccatttgacacgtaagggctagggccaaagatactttcataattttctgattttggttctaacaaaagattcatgtttctttcatgcgaatcccattgtatgttatttgttccctacatatattttgtttcagtacagtgtttaagtttgagataattctatatcttggtgttaatgaaatgtttggtgacattgagaaacttctctccaaanaaaatctaatttatggtgtttctaggcgaattgtaattattttaataactcagagtgacaaataagttacctgatgatcaaacttctgcttgcttctgttttggccctgcgcgtggccacttaggagctaattattgctgttcttcattgtgtatgtgttgatgaccagaaaaaagaaaaagaaaattgggaagacagtagtggcgtggcacttgattcgagttggaagttttcagggtttttttttaatcatcatcttcttcttttcatagagttgaaattgtatatttatagtccatgaacagagggacattgtatgattttacataaaggtatttaccaataccattgtgttttattttttaaggaaaagaaataataagttacctgaaacaatattgtgttgttgattggaagcagaagcaaaacgggcaatgcttcattgaacagttaccaattaataacctatagaagttgaaccaaaatagacaatgcttcattgaataggtaccaactaataacctgtttagagaagttgtgaacaatttgattattcatttgcatctcttcagcattgttgttagtatttgacatgtttctgtggaaactaacagaatttttaaaaattagtctgttaagccacaagaaattctgttagataggtatttattgtataggtaagaggtaagaggtaagatgtataatatatttccaataattttgtatgattatgtcttcattgctgtgaaaaagtttcaaactaatcataattattgcttttaagatcagaagagagaccccttgttgtctttaatctcagctagctagaagctttagtgtgggttatattttatctttttagctgtattagtatttccttgttcttttttcatcttgaacaattagaagttgtttaaatacagcaatattcaaattctctgctgttccagaactatgacataatattcaaaggaaatctgagtcttctaattacctgcacctgttgtaatattgctctgttacacaagtcataaaccaaccaaatctggctgtatatagactttatgtagtaatgtcttcacttacttgtataacactttatactcactattgttttctgattttgatataatattttatatatgaattctattagtcaacaactagttgtactcaaatgcaattgtctaattgaaagtgattaactttttaatctgtttctgtatctggtgaaaacaaatcatgttgtactcagtatgaatagagctgaaatatttaagccttttttttttcctgttttgttggcttatttagatgcggatactagatttttgtgctgttggcatctctaggctgagctagattttccaaaaatgtccttttattctcgtttaatttggtatatgtttgtcttctatttcaggtttgcaatgtctcgaactccagatgaagatttagaatctaagtattatagacatctaaagaatggtgcttataaggtgaaggcttctaattcaacatatagatgcccattttgtcttgaaaggaggaaaacttactacaaaccacgggaactaagattgcatgcgtatgatgttagtagaagctcacatagaagggattataaagagaaagctaagcacttggctctggaggagtatataagaaggtaccatgaggatcgagtagagccaagtcccaagttggattcttgtagcagtaagttggaatatcgtagacacgatcgatccgagtcaagtaggaagttagaatatcgtactcaagaccaaacagagccaaggagcaagttagaatgtcagacactcgacctatctgaacccagtagcaaggtaaaatttcctacactcgacggagcaaatcccagtggcaagttagaatgtcctccatattacccatcaaaactcaatccgaagttggaatggcgtaagcatgagcatgaagaactacttgtttggcctcctatgggaattttggcaaacattcaaactgaattgaaaaatgggaaacgtgttggggaaagtggttcaaaacttagagatcagttaattggaaaagggtttagcccagtgaaggttattcctttgtggaattttttaggccactcaggatttgcaatagttgaatttaacaatcaatggactggttttcagaatgcaatcgcgtttgagaagagctttgaagctgataattgtgggaaaatggctttcaggcttgaaaagaatcgaggggacagaatgtttggatgggttgctcgagcggatgacttcaattcatcaaccatcactggaattcatcttcgtaagaatggggatttaaaaagtgtgtctgaaaaggaagcggaagagaaaagaaaagattcaaggcttttcgataaactggctgagaccctagaaacacaggcttcgtctctcgaagagtggaagaccaagtatgaaaaggccagcgttaagtacaagaggatggaggagaaaaaagaaaaaatgattgaagacttcaacgaaagtatgcttacctatatatctttgtttttcttagtggacaacatatttttactgttaattgttctttcatttcacttgatcattgttataactaatttatttcacgttgtgttgtcagaattaagaataatgcaacaggagaaccatgaatacttaaaaggggttttgtcgaggcacaaaagtgttagccaaaatctgaaatcacaaatggatgagcttctgtcccgggagaagcaattgcaacaacgtgaattcaacgatgatagtgagagaatgaaaattgaggaagaaaagaaaatggtaattttatggaactcttatattagaataaggtagccgactgcaatgtcatgctctgctagaaatatatgtctgggattgcatggggcagttcttccaatcagtttgcag

SEQ ID NO: 22987 - DNA, 2254 bp, Cannabis sativa
ggaccttggggactaatcagcatcaacgtgaactttttggggacttttgccgcaaatttccctttatttatttatttttatgaaaaggaaactggaaaatgacgagtgtttttcatgtttttcgttttacaagtagataaaagaagggaaatattcgcacgttattggtacaattaagtatcggattttatataattaaggattcgtttggtacgtcttataaggatcatattgtattaaataataaaaacactatgtttggattaagcaatgtattgttttaattattacgaccaaattttttaatacaatgtatgttgtattattaaatacataataaatggtccgtattagtttgtattataatatttacaaaaaatttggggtcaacaccaatttccgacccggatccagaccccggacccagacgcagtatccggatctatagttggtgttaggatcgagtgtattaaaaatatattataactttacaaaatcaattaatacaagtcaataccaaacattttattgtattaaataatattaatacaacacaatctaatacaatacattacaatacgacgtactaaatgagcccttaatgtattatttttgtagaatattattaatcaattataaggcgtcacttttaggtgataggtagtactagtgtcttagtatcaaaaatgacaattcatttgtcttgcattcttaattttttaagtgaaaaattggtgataccaaaaaaacatatattagtattatatttgtcaaaaagtagttttaattcaatagttactataaaattaatgaaaatatattttatatttcaagcgtttagttttttttttttttttgattttttttagatgaagtgtttagttttaaaaataactaaaaaagataaaattcaaccaaaaatttatatatactaggtaatatataatacatttaatttattattttaacgtattaattagcttaattaactatatgttcccaaaaaaaaataattgattaactggtaatattttccaaatgatatctaaaaaaagtaaaacctacttttagtaatttgattttatacttctaacacaatagaatataaatattaattttataatatataagtgttctttttaaggaaaaatatctacgagaagagcaaatacaccaaatatatttaagaatgaataatatattgtcttgatttttatttttcattttttttaaaaaaattatcagtttaaagtattaatgtaaattcgaatttgatacttataattaatttttaataattatatacatataaacatacatattcaaaacaaatattatattttactaattttttaataattatataaattagtataatggcaaaactaaatacctaatataattgaatatatatatatatatatataaataagtaataatattttttttttattgtttttgtaaatgcttcctttgatttattaacaaaaataatcttatttgtatgggttaaattaataccattttagaacatatgttttgtaaaagttaccaattcgactctctattttgtaaaataataaattagaccttgtactttttaaaataatataaaatagtactctgagctcaatctttgataaatgtttttctaatataattaacttgaagtcaatttctaaaatagtataatccaaaatggtctaaattgtcatttaacaaaatagaaagtcgagtccaaaataatatttaccctatttatattctgaatttttttattggtaggagttgaaaaaggcatacaaagacaaagaaacactttagagggtcctgagctactacacaatcaaaaataattttcaattcaaggtatgtaagacatgctctcaagaatatagcctgaagtgtgtttatcaaaactgtaattggtcactaagagtatcaaaaaatgggccaacaaatacattcataatcaggagattctcaaacatccacacctgcccaagcaactacaaaattcataggagaatgcatcaaaccaaagtttttgaacataaagacaaaagtaacaccacaagaaataaaaggagaatttaaatacaggtacggtatcaagatgaactacatgaaagtttggaggactaaagagcatgatgtaaatgacttaagagaaaatgctatggaatcatatgttgggttttatgtcctaaataaaactctttacaatctgattaggctcaactcaggagtgcta

SEQ ID NO: 22988 - DNA, 7424 bp, Cannabis sativa
tttttttttttatggagcaactgccccctctcgctacaatatgggtccgcccctatgaatggttaataatcctcatttagatgttagtttaaattttattcttttaaatattaattctttaatagttctttttttttttgacagaaagaagccgcaagaagagaagaacaaggggaacaagcagagaagggagagaacaattccctctaaacttcttctctcagcctaagagcttcttttgcaagaccgtgggcgtctatgttcagttgacgaggaagaaaatgcaaagaagcttcatggaagttggagaagagccgacgaatctgagataccaaaccagaaagagcagagtgatcatgccaatcactgttaactttggagaccaaattctttaatagttgttattggtggtagttgttgtaatctttttttaccgtttgtaaatagtattatccatatagtggcaattactaatatatgagagcatatttagacagatatttgttcataatttttaagttattctaaacagtacctttacattcgtgagctggtgatgatattttcgggccaaaaaaggactctttcttttccgtacgacaagcattaattttctattctccatgttatttattgttatattaataaatatatatttttttttatgtaactttattttttatataaaacattttgaaggctctttttctgaattcacatatggtattgccaggtgtttgtgtatgaaaagaaaaatcttaagatgcctatccacgatatcgtagctggactcaacgtaaaactaataatattttgccctaatataactttcatactttatctctttctcagctcatcgcatcatactcgtgtcaaatactggtgccatttcatatctcttttttattgatcttctctaatgaatcaatcaaccacagaaaatgacactttctctcattcttctcactattaatttttatataatgtcacttttaatattgattttatgatttatatcatttttatatataatgtgcttgcaaaactagtgatgtagatctctaacaacgaatcatgaaataaattagtgtgttttactattattaaaccatattaaaagtttccataaaaaaaaaaaaccatatttgaagtgatgtagatcttttgttacaatattatggtaagattcattacttaaaagtttaagtagcattcatgttttttagacatgggcctatctaaaactggattaaaattaaatgggcctaatcttttaactcgtattacttaaaaatttgtaatttccagaattccattaatcaagttggagttttttcttaaatttcacagcaaaagaatttatgctactttagagtatagacactgtataaaatttcttctgaacaagtgttatatataattaaataccaatgacgaacatattaaatgatcttagatcgtttattttggcaagattcattaataaacactaaagaaaataaatcgtcattagattagattcttagcctcatacgcacgaacaaaataattaaaggtacacatatattatttattattataaagcaaaacataccaatctaacattatatgcaaaaattgataataataataattaaaaggacaatcaatatatcaaaacgatcactagatttcatttttcatcgtcattttcagtagacccctatagctagagagtactggaagaacaatttcaagtgtttgtagattagtggtaccatcctccatcttaattatttcattttaaaattaatgtaagtggaagattaaaagagaaaaagggagtatatcattctcttaattcgccaaaagaaaattaaaagccaacatgcaactacactatttcaattggtatccaatccaacatgttgggaccatataagaagaagaaaaaaagctgtgtatcatgttaaatgaccaataatattccttaaaaaatttagaaataggataacactgacacgtggaagcttcttcaacggcaaattctcctaattattaatttatttgtattaattatcaaatatatttgtcattgggtttttgggttatgtgagaaaatattaaagtaattaagttaataaaaaccaatacaagtttttgaatatggtatggggaatgatagctattggaggggcaaccaaataatgagccaatcagattgaagaatactgatttataaacaaatcttccgacaaagaccaccaattaggtgtcacaaccaacagaaattaatagatgaggatttcttactacataatgctgcaaaaggagttcttctttcaacaataattaatcaattaattaattaaatttctttcttattcttggcctagatccttattgagggaatccttcaattttagatggaaaaaacacagcaaataagccaaccaaagtggaatgcttttatattttattcatatatagtttaacattatcgtagtactacttacttcccccatatccacacataaaccactgtgctaatgttaagaacataaattaattaatgggtcactgtctttcccccattgagattttggatttctttccactaatagaaaagtgtccagcacaaatttgacaagttacccactaattcatgctaataagagtaagtggagggccttgttcgtacagattattcttggcccttgaaaaatgaagtctttctattatcatctctttgttagtttttagacaatctgtagctcaaaaaaaaaaaaaaaactattataatcattatctagatatatttatagctgaagtataagacggtgattaaacagtctaaaattgtttaaataatctttatctattatcttcttaattttgctcacttttctaaatttttattctattttaaattctctcattttctattttttttattctacttttaaggatatttttcgactataaattattagttttctcttatttagattgttatttcttaatattcttagtgtttttagttcattttatgtgttttttaaatttaaagagtaaattagattttatgaagaaaaatgaatggatttgatgtttatatcattaggtgatgtttagaggatcaaagcactatttaaaatgatgttttgattgagtttggtaaagtgttgaagtcccaaaagttgagagttggcactgcaacaaagatcaaagtttcgttacaacaaacgaaggagaaaaataagtaaagctgaaattctgtattttaatattattaatttattatttaattattcaattaattaaatgcgaataataaatatggtaatgaactagtttttttatagctacagaacacgactctgtaaatgcagaataaaaaaaccagcaaagaataaaagtgcagaaaataaaaaatacacaaagtttttatacatagtatcaacaatccttacagattgttactagtccatggagccaaacccaaagataagattcattagatagatctcaagaatacaaagtaattaacttgtgcataaattgactccctcttattatatgtcgcaagcttgatgtattctaccttctcaaatgaatcttgctgaaacttcaagtgcctgaactcccttcaatctgcttgaggagtgcttgctttctcccgagacaagacttgaaatactttctcccgaaagcttgaaaagccttctcccgaaggttttcactttgttcttcttttttgttaactttattacaaactcaagacaatacaaaatacataaatacagaggaagagacgaacattctctcctctacacaacaaagggatatagttaaggatttagatagaacgttcactacccttcgcaaatatcagatgaagttgaatccactgaagtgtgtatttggcgtgtcctttagaaagttcttgggattcttggtcaacgagaagggcatagaagtaatccccaaaaaataaaagcattaatagacatggagtctccaaagaacaggagggaggtgcagtgcctaaccgggagagtaaccgctctaaataggtttatttaaggtccactaacaaatgtcttccattctttgacaccctcaaaggaaataagaaatttatttaggattagaattgcgagaggaccttcacaagcttgaaggagcatctaggaaactcgcctttgttagctaaaccagaaaagggtgagaagttgtacatatatctggcagtctctgaacatgcctttagtgctgcccttgtaagaggggatggaaagcagcaatagcatgtgtactacatcagtaagagttttgttgatgatgagactcgttaccaagagatcgagaagttgacttacactctcattgtggcgtcgcaaaagttagagccatactttcatgtacacccaattgtggttttgaccaaccaccctttgaggcaagtgttgcacaaacccaaaacctcatgatgcctactcaaatggtcgatagagctaagtcaatttgacatattttacacccctagagtgttgatcaataggtagatgatggtagatttcatggcagagctcacctatcgtctagacgggggagaccaagagtgagaagtcgacgaagagttataagagaatggagaaggagagtccatttgggagttgcatgtggacggagcctcgaatgacaatggagcaggggctgaggttgtaattacattacaaccccttgaggaactaaaatgcattgcgcaataaagttcgacttcaaggcctccaacaatgaggctgagtatgaagcaatgttagctggattgagactcactaaggaagtaaaggtcacgtggctgtagattttcaacgaatcacagttggtggtttttgaagtgaggggagaataccaagcaaagggaccaaggatggtggcatacttggccaaggttaggagctacttggagcagctgcaacatttcacaattgaacaaatcccaagggagagcaacgtcagcatcgacgccctagctaagcttgtgtcaacttgggaggtcgatgtcctagagtctgtactaatggagttcttatcctaatcaactattgagtgtgatctagcgttacaagtagaagaagaagaacccttttggatgatgtcgtacattgagtacatccaagaagggaagttgcccatggataagaaggagactcaaagaatctactataaggcctctaggtatgtcttgatggatagagttctgtacaaaagaggttactccacctaggggtgttcataaaaaccgataaaccgaaaccgaccaaaccgtaaccgaatttttggttccacgtcatcaccgaatttggcggtcgatttcagttttagtttttttgacatggcggtcggtttcggtttttgaaataaaaattgttaaaccaaaaaaactgccaaactgccaaaaaccgcaattaactgcctaaaatcgccacaaaccacccaaaaccgtctaaaattgccaaatcgaaaaactgccaaaaaccgtacggtcggttttatacggttataatttctaaacattcggttataattttcgtaaaataaaaaacctaactgaccgatcggctataaaattggaaaaaccgaccataaccgcccgattttcacccctaactccaccctgctcctacattgtataaaagaaagtgaagtgcaacaagtgttatatgagatacatgaaggagaatgcagaaaccatgtagtgggttattcgatgtcaaggaatgtgttcaagcagggagactattggcctagcttggagaaagatgaggtggtgttcgtaaaaaaaatgtgataaatgccaaaggcatgctagctacagcaggcgcccttcggccaaactcacgagcatgaccagcccgcgacctttcaccatatgaggaattgacttgattggggccttatcgatgggtagagccagggcaaaatacgcggtggtggcaatagactattacaccaaatgggcagaggttgaggcattagttagcattattgctaaacaagtggtgtccttcatcaataaattcctgatatgtagatttggagttccttacaagatcatcactaacaatgggacccaatttaaaggagatttgctgaattcttatggcactgagagaggcattgaaaggagattctcgacggtggtgcacccacaggctaacgggttgaggcaccaaacaagataattaagaagaacctcaaaacaaagttggagaaacttaaaggtatgggtggatgaactgccaaatgtactctgggcatataggaatacgccttgttccaccacgggcgaaactcctttctccttgcatacgggtgtgaagttgtacttctcattgagttgaagctcaactcattttgtgtgaagaatttcaatgaggatgccaatgaaaaagtaatggcagaaaacctagatctcttggaggaaaggagggatgcagcccagatgagattaacaacgtatcaataaagggcggcatgatactataattcgagagtctgcatgcatgccttcaagaccggagacttggtgctagggaaggtcctcctaaatactagggatcaaggggcaggtgtaatatcccaataagtctaatggtaagtaattaggatttataattatattatgggttaagcaggtaataagtgggattataatcttactaatctagttcaacataaattttaaatttgatataagtgagtaaataagtgtaatttattaattacggagatttattagcatgtgtgaatgtgatatgagttatatgtagcataaaaatattttcaaatttggcgatcttggagactcgatcgggggccaaaaatgtcataacgagtttaattattagttttgatgagaatattgtcataacttgatagtgtaagtattggagtaattaggagtatgtgaatttaacttagtgccttagaagtataaattttttaatggctaaaaaataataaaataattattattaataaagttttattattattattattgtccttattttctttattttaaaagaatctgattatatatatttataaattttatgagttaataaacctaaaatgaaaagaagtaaccctttcctcttttcacctttttctctcgagcaaaactaaatcaccacacaccattcccttttaatttttcttctttccaaactcagcttctcaagctcttgatacccaaggtgtgatcatagtgggaagggagtaagctcaaggtagtgtttctagtttttctcccttagttttcatgaaaagtttaggattttggaagtggaattttggttctgtgactgcagtgagttgggtaaggttttggttgagtttctgggtgtaattagaagtgttttgaatgctctttt

SEQ ID NO: 22989 - DNA, 4817 bp, Cannabis sativa
  modified_base (1909)..(1919): a, c, t, g, unknown or other
agagagagagagttgtaaaacactagtgagaagttttgtttcaaacattactaatatcttaaagatcaattgataaaagaataatttattattcactcatatattctaataaatttattttttatgtacaaaaataatattattttagtttttgtgttttgtaaaatttattcatcaaatattttgatttggtaaatgacaaaatagactatgtattttctaaaatggtacaaaataggactctggattcgattttcaataaaaaaattttaatgttgagaatcatgaggttctatctcaaaaccaattaacaatgagtggagtagtccatgttcttatatatggctcaatactttttacatttaatccatgtgagacaatgttttccaatatttaataaaaccaacttaaaaacaattcttaacacaaataaatgcagaaaatttaactagactaatcatacacacctgcaaattaggttattattaagttttattttgacaaaatttatttcaggatactattttttactattttaaaaaatataggtttaatctatgttaattaacaaaacaaagaatccatctaataatttgtacaaaacacagagtctaaaattgtatttacccatattttttttaccttattgttacttaattttctctaccatcttcattgatcattaatttgtattgaatctcatcatttaatcctaggagacatttaatttagttcaaaaccatttaacattattattgttatagttataataattataagatataaacaaaaataatataggtaggtaagtagaggtacctgcatttgatcaccaaggctaacaataatggtattgggaatagctttgaaatgaatccattttccttgacgaaatatttgaaggccaacgacgtcgttttgggtaaggaaattcataatggttggatcagtgtgaggtgggagaccaataacttggtctggatttggacaaggtggatacttgtttccacataataattcaaacccttcattccaatttgtagccttttctaagcaatttgattccaaccctaatgtctctgatattcccctcattaacacaccacatacttctcttgttctcttacaatactcctctgcagcctcactacacataaaatgagaattatcgtcgtaaataattctaattctagtctcgacatcttattacaaatcgacttgtttattaacgataaattagattatatttatatagaatttaagtacaaatctaatccgcttatatatataagttttaaccaaattaattactaacaaatttaaatttgttatttaagtgtttaaattttacatatacaaattttatgattttttatacattttttgtatttttttttttcaaaaagattatttaatgaaataattgaagaaaagttgaaaaatatgaaaaaatcaggtaagataataggtacacttataataaccaggggagtaaccagtcacttatgctgtttttttttaacttttttataaattttttcaataaaataataactatactcaaggttgatcatgaaacttaagtaattgtgggtctttggaattaaaaataggacaattgaatttgaaccccattaaaatgattatgatattttcaaaaattgtaaaaaattgtgcatttttaaaagaaacctttttttactagtccatcacaactcaaggccaaactaacaaatataaaaaaaattaggataattacataaaatactaatatttataaattttttacttttttacatttaaagttattttttatatatatttttacggtattttataaaaatataaaaaaaaaaaattgcataaaaataacagtaaaacaatatcaaaacaatataaaaataatatnnnnnnnnnnnaaaatcaacaacaaaataacaaaattataacataaaaatacataaaagaaatcttattttatgtaaataaaatttaaaaaatcttaaaaatattgaaaattccgtatagactgtatttttgtaattttttttatatatttttttttttaaattatgccaaaaaaaatttggtctagctaatagatttccgtaattaaataaaagataggattatacatctaattattaaactacatatctatataaatatcaaaaagaatacctgaatccaagtggtttatagggagaatgaaattgaggatgaacaataagcctaatagtttccctccaaagaagaaattgttttcccatggtgttgcaattaaaattacttccacaacttataggttccaacacatctttacacccttcaaactctttcttctcctcttcactcatgttgaaaaatttctcaatggcttccaccattttcttcatcacaatatccgaaataccatggttgatcaactgatcgtaattaccatcatataagttaattaattacaaaaataagaagataagaaaatagtaaatagtaaaaaaaaaatgcccttttattaccgagaagaaaccccattcctcacaagctttgtgaagttcgtggagaattttcgagcgttgatcaagattgtcagatgttagaagcgagatatcaatagtagggattgaatattcagaatcgttagagtctactacttcttcatcggaactcggtttcacagcaaattcatatttagatgtaattgaagaaattgcatccatatttaaattaaaacttaattaataagtttatagattagtgagagaggaagaggggaagagaactctaaagagaaatgtgagcataaacttaatcatttagcaagttacaatttatataggctatataatataaattatattttttttttcttttctcaaataggataaataaattttatttggtaccatttattaatataaaaatatattagaacacattttctttttgttatattacaagtttcttaacattttatttaactaaaacgaaaattatttttaaaattgttactttaattttaaaatataaattacttcattacttcattactaagaaaagaacagcacataatgtcaatctaattggatgaatctgatgcttttccctttagtggtttttttctttttttcctttttaattgcctctcagcttatttggataatggacactttgttggtttaatatttaattacttttttaaaacacacatatatttatataggaagatcaaatataaaagtacatataaactctttagatagttatattcccacaagtctttttcataaatcataaagactaattaagtggatttcatccttgtaatcttataggccataagatgtatattatatatataaaagcatatatagtgcaaaatacttgttgggaataaactctttatataaataaagggggaatttgtggtgaaatcttttttttgttttaattttatatatataatttttttttgtttgtttttttggtggcgaaatttttttaagttttttttttttttgtaaatttaaggtgtcagttagatattaccgttaaataccagtatcgacttcgaggttttaattgtactactttttcttatataaaattctaattttcgaatattataaaaatttgcaagagacctattatgataacaataatcgtgatcataggaaaaaaaaactagaattataattgatttatgtacctaaaataaggttatacttatacttatatttaaatatataagtactcccactataatatattataatatatgcctaatatatttaatactaattaggtatagagaattattaagggataccactactactacccaacaccactttatatagaatatatattattattagtggaatttagtataaaatatcatatattttataaaagtagaatatgtaaaaagtgaaaccccaatttctttaataatatgcctattttaatgttcctcatagaacacacttaaaatgataaacctacttttaaaaacataacttaatattaggtcccacggttttgtttttaggaatcttctcaaaagtctcatactaataaaataggtggaatacttatattcaaggcaactcttgcttattcttctgttgtgggacttgggttaatacttactagagttagtctcacattgcttatgtatggaaataaattatcatatataagatgaataagttagtcttcctattacaaattagttttgagatggaaccacattcaccttatcctaaattctaacatggtatcatagccacttataatccgcctcccctttaacctccatttgggatctttcggccaatgtgttctaatttttaatgttggggtctttgacctgttttaaaatccataaatttctcgacgtgtatagccacaaatttctcgatatttggccttgtggaattcttttaaatgtcacgttcgaccttgtggtatcttaaaggtcgtttgttatacacactttttcaggctcaaacgtgaggacagtgtattagagttagtcccacattacttatgcgtggaaataaattatcatatataagatgaatgtgttactcctcccatcgccaattgattttgaagtaaaaccgcatccaccttatcccaaattctaacttgggttaataactcataatattatacttaagctatgtttgctagagtggaaggagaatataaaaatgagaaaggagagtaataatctttttatgttatttggtaaaaagaatattagaataatggaaggataaataattactaatttactaaattactatttt

SEQ ID NO: 22990 - DNA, 5069 bp, Cannabis sativa
tacccggtgtttccccttacagatcacaggactactaactgtcacaatatcttattcataccgccacatacttgatgaatagaactccctctattttacttcaaggtagcacttcatatgagacacttctaaaaaaaccccctcattatgaacacttaaggtgttttggatgcctagcttatgcttctactctacgatctactaggcacaaattttcacctcgaagtcgtgcttcaatcttcattggctacccccaaggtatgaaagcctatactctatttgatattgaaacaaagcaaatctaccaatctcgagatgtcattttttatgagactatttttcccctcactgccaacatctctcattctaacatcaatactttttttcaagatccatctctacctgcttttcaacccatctctcgggtcaacacacacccaacaccaactggtgtatatccccaaattgcaccagtaaacaacaaaaaaaaaccagaattctggtctatccaccacaccagcagcaattcagcgtgctgaaactccttctagcatcacatctgatgccaccaatctcacaacagcccctactgttgttgataacacattgagtaatatctcaaatgctcccctcattcctacatttcttactgatgacaccaactctacaacatcccattctgcttaacaaaaaacactagcagcagacattcctaattacagtcatcagaataaagaaattcctacatcaaatacccatccactaccacagtcgaaaagtggcagaactatcatcaaacctacacacctcaaagattatgtttgccatacaacatccactgcctttccaattgaaaaatttatttcctacaccaaactcagcccacaatttagggttgctgttcttgcagcatattcacatgtcgaacctcgctcttatttcgaggcttcacaatttaaacattggcttaaggctttggatgatgaaactgaggccttagaaaaaaaaatcacacatggattattaccaaattaccccatggacacaaagtcattggatgtaaatgggtttacaaagtcaaatacaatcaacaaggagaagccattcgttttaaggctcgccttgtagccaaaggattcaatcaaaaacaaggcatatattatgatcaaacttatgctcctgtagctaagtttaacacactaaaaatttttcttgcccttgctgcaatgtacaattgggatatccaccaagttgacatcaacaatgcatttctccatggtgatctccatgaagaagtgtatatgaaaataccacctagttataaagcccctcccaacagtgtgtgtaaactcaacaagagtatatacggtcttaaacaagcctctcgacaatggtacgaaaagttgagtaccactttaaagtctgaaggtttccaacaatctctttctgacaattccctattcataaaaagagcttcaactttccaaattgccattctcatatatgtggttgacatcatcatcgctagcaacaacaaggctgccatcattcaattcaaatccttcttggacaaaaatttttccctcaaagacattgggccacttcggttctttcttggtttagagatagcaagaaccaacaaaggaatatcaatatctcaaaggcccttcaccttgcaacttctaactgacacaggttacctaggagcaaagcccgcttcaactcccatggaacctaatctaaagcttagcaaggacaagggaaacctcttacccgattctaccacttataggagcctaattggcaaactaatctacctaacaactactcggcctgacatagcttatgccgtcaatcacttaagccaatttcttacatctccaagggtacctcaccttcaagccactcatggtgtgctccaatatcttaaacgcacccccggtcaaggactttttttcccttctaacacaagtccaaacatttcagcctttgctgaaacaagcttatcaccttcgaatgttcaactctccttttttgcagatgcggattggggcgcttgccaagacacacgtcgatccattttcggatattgtgtctttcttggccaagcccctgtctcttagaaatcaaaaaaacagcaagtcgtctctcgatcctcagctgaagccgagtatcgtgccatgacaaatgcaacctccaaagtaacttggatcattgctctcctcaaggattttggaatctccctcaaccgacctgcttctctctattgtgacaacacagcagccattcacattagtgaaaatctagtctatcacgaacgcatctttgggaaaaaatccagcaaggcactcacaagttacttcacgtttcatctcaacaaaatgtagctgatattttcaccaaggccttacttccctctcactttaacaacattgtatccaagatgtgtgtgtctattatttacactccatcttgacaggggctattaggattaggtggttagttatgttagttaaagagattaatttggttgttatctttgtaactaattcttgattagttagacttacagttttacccttattgctgagtatataaactcagccctttcttgtatcaaaacagaacaatacatttttctcaataacagagtttctttctcgtttttccctgcaaaacctctcaaggtttctcaaatcctcatattattggatgtcaatctcaaaatctaattaaaatccgatccaatcgaattacatttatatatgttaaaaaattatttatattatttatataataaaaaacaataaaaaaatataatatatattaattctatttttattggatttttttttattttgaatttgtaacagtttgttgttttgtgtatttattttcatgatgttttattctattttattacttcaaatattgttgttttaattatttgaaaattttagttgcattacattgtaacgatagtatgcttatggagtattaaacttaaataaaagataatatttaatttttactttttttttcttcatatttttatgttaatattaaaatttaggtgagtaatttgatatccaattaaaaaaccgatccaatccaattagtttttggattggattgtgaggtctaatcggattggattggataataatttttcaaatctaattactaatttgattgaatcggatgagaaaaaaaaaattggattggatccgatgcctacccataaatgcatacaaaaattacatattgtaacaatgttggatcattgaattacattttttttaatatggaatttcattaacaactagtataaattacaaataaataagcaattctgtatgaaaaacagaactcacaacatagagaacaatcccattccaagaagcactcactttacaatctaaaactaatttgggtaatacatggataacacagttaaccttgcacacaacgttctttattactagctagctagtttcggtttaaataaatatcattggtttaaaatactgtttttatgacattttgcacaataatattagggtgcacatatatatcattatattctgaataaatagatcaaatattttgttttcattcaaaagattaataaactccataaaaaattaataatttaatgtaagaaactcaaacaataatccatgttgggtgattccgtgacaagttatacaaagaataagcacatttaattaattgtgagaataacaatgcaagtaatgaacttattatatacataaataaaacccatgatttccatatttatatataaacaatattaattaagatttaagagttccatatttgaatagaacacgctttgttctactcttctagtcgaagcaaaagaaaagaccctattaaagtgagtcatacatttaatcatataatatatatgtatatggttttattaaaagaatactaaaacatgcagtgccccactgccatgggcacttactttaattttcgtgtatttgtaacataataattaattatgataattaaagtaaccaaaaggagatattaatatatgttattatattttcaattaacaaactatattatatatggtcccatatatcccaatactttaatttttgttttgtataataacaaaagaaaaggttgaactttgttactttagccaatcacgagaagacatgatatgcagataaatggtcagatagtccattagtactttttctctatctaaacaaattagttcaatcaaggccacccaaaaagccaccactagtatctataatactatacccctcctcgattatattaaaaaaaaataaattataatttaaatgtacttaattataaattataatccctttcaaaaaataaaaatttataatgcgaatacacatagttatgataatctgtatatatgatcatgtgatccatgtttaccattcaaatcatgcgcccaattgatcatggcctttttttaaccttataagacacgttgagcaatgcactactgcaattggtatttattacacattcacaaaattaagtcaagttaaaataattaatcaccacgcgacgcgtgagtgaattaactaattaactatacagtttggaaaaaaaattaatattcgatcactaaaagaaaaagaaaaccaaaaaatttgtggtgactgtatagttgaagtgattttattattttaattgatataaatatattaactgaagattacacaatcattaatttttggaaaatttacactaattactatttttttctattttatttcaattttactgttataatgaaaatattacatttttactgtattttttatactgtttatgtgtatagttttttatttattttttattttttacttttttacttgttacaatctacttattacattaaatatatatattatataaactgtacaaaacgtgtgggagtggtttttttttaattaaaattatattatattttaaatgacataaaagtgtgatgtgacttgtgttgtcactttagtgacatatatatttttttaattaaaatt

SEQ ID NO: 22991 - DNA, 2070 bp, Cannabis sativa
ctctctctctctctctctctgtgcgtgtgcgtgtgcgtgcgtgtgcgcgtgcgcgtgcgcgtgcgcgtgcggtgtgcgtgtgcgtgtgcgtgtgcgtgtgtgtgtgtgtgcgcagtccttcattgccataccttcaactaaaactcagattgacacactaaaaacccatcacaccaaccaagcttccaaagtttttactctcaactttcttctttcatctgatgcataattgaattgataaactagcccggtcgatttaattcattacagtgccattttggagctcaaactttgtgcccaacgacttttttgaatttttcatgtatttcgttttacgtttcgagattgattgggtttgtgttttttgacaattttgaactgtgatttttctttaaatttttttggtaccttattatctgatctattcttctctggagtggaattctattattctttttcctaatatttcaactactattactatttattttaagattagttaatattttttttttaaattaaaaagagctggactgctaatatattgatatgtatgcattttatttaactaaatcaacacttaacggaatttgtagttgcttactgagatttttggaaactgattatagaataaagatgcttaagaaagaagtaaattaaagaagaaaataccaagatttttacgtggtttgagtgttaatgaactctagtccaagagtcaatagtattgagctagaaaagcttcaaggtatttcttacaagtgtttatgccctagttgaagaaccctaattctcagttgttctcctttatattcaattttcaaccctttgcacaaagggataatgttctacttataggggagaactaggtatgggcatacccagacccggtaggatatttagggatcaactagaatctctgatggggtaaaatacaatagttattgattttgggccacttgcttgaggcccaattcatgaagtgaggcctgtccgtacaagtagaggtacatttgaagatgttataggtttcatgcacagccgagtctgtaccaagaatatcaaagaatatggcgttggataaaaaagtaatttcttttggtagcgtatgcgctctgccagtctgatgtaggggacaggttctaacacgtttctaacactatagagctctgtgtcttgagagttctgtgtaaggagacgtcctaatgcaatctagatgaatcctagttactcgctcctagatttcccttatgaaggtatctgcacttgtcttaacatactcttcgcttctgagtcgaatgcccttttctgaatcaggaagattcgacattggcagatcagcaaattgggctcatgtctggatcagagctatagcatgacttgatcatctggttggataacaaacaagatctggcccaagtatggattgactttgactagtatttgaattttagaattatacacgtcattgctccaggaacccgaataacaatagtaacagttgcaacaataacataacatatagtatttaatccgtcgaaaaaaatatatatagtatgtataagtgtatgaaattaaaaatataaactatttatgctacaaatatctttatattttataataatttttaaattaaaatatataaaatctaatgtttaattgcacaataataatatatggcatatcgtagtagtatgttgtgcacttatggtgctttcggtatttctcaataaataaaagccatatatgtaaggatatgatgtaaatttttccaaaagcacactattacaaagattagaattcgcgacagtcctaaaaatgatttttttcaaggaccgttgctaaaagtaactatttaaaactgtcagaaaaaatttagtattctcgacggtttaaaatcatagtaaacaaaataagcaatgttttttaataaaatgcgaacttttaggagagccttatacccgacggtttaagtcgtcgggtatgagggtccattaaaaaaattgtcacttacttctcgccacatttcctacgtgttcacctactctttttctatttcccacatgccca

SEQ ID NO: 22992 - DNA, 4304 bp, Cannabis sativa
  modified_base (60)..(62): a, c, t, g, unknown or other
  modified_base (1991)..(2003): a, c, t, g, unknown or other
  modified_base (4240)..(4252): a, c, t, g, unknown or other
atgaattatgttttataattattcacacctttttgactttagtcacaaattttattgtgnnnaaaagtaaaaaaatttgtagtattttaaagtaatattttggttactaatagtgttgataagaaactaattagttacctttttataaaaaactttatttttatatcatataatttgagatacattttgattatatctaaaatttatttttatacatcgtagtaattaattagttatatttaagctatattatggtagattataatttaacatacatttaagtaattttaaaaattattttctaaactaattaataagttatcattaatataacaagctatcatttctatataccaattattttatatattttgataattagttatcataaaatataatataattcaaataacaaattctaaaataaatgttaattaagatttacaaaaggtataaaacagtaactaatcattatataagtaaccaaatggtttcttttttgaaaatagcgaaaaaatatatactttccacatatattgaagagtagatcacagtagtattttttttatgcttatccaagtaacgacgtgaccaaaaattatttttaaaatttgaggtaagagaaaaataagatagagagaaagaagaaatagaaaaaagggtataaatgagggtatttaacatacccaaacaaataaaaatattattgatacttgaccaagtcatttttaaaaactagataaaaaataaggtgtcaagtgtaaaatgtcctttataaaaattgtgataaaaaaatatttcgtaagtagttaaaaataacttattaaagaatttatggagaagctacagttagaagctaaacctggtgcaattaaacttgtagaaaaattattttgattaaaaactctataataaattattttgtactaaaaatagatttaattatttattatgtattgcaaaaaattaaaaaataaataatatttaaatttcttatgtttaattttattttaaaagatattttttatttatatttatatttatattattaacaaactacatcaacctaaaatttttaataaactacaattttttttatcaagtgataaaaaattatttttatcaaatgtatataaatatataccatgggaaaaaaataattaaaatttatagaaaataaaaattttatacaacataatttttttaaaatttgtgattataatgaactagattataacattatcattgttatctcgattttttctacctcacatggcattttcacatggccaatatcaatgccaagtgagagtacagctggccaacaaggaagccaagccatctactcaacactttaaccaacgaggggtccaagtacttaggagggacaataaaatgagaaccaaccaccctaagtgggttggccggccactccttgctggccctatgccagcataggtcagccagcttctaagcactgtgtggctgccagcctgcatctggcaagtgcatggccaggaaacttttggtctggaaggtttttgctgcgtagcgttcatcgtggacaacaagttaagcaacaaattgggccttgacaacccacaaaaataaggtaaaaatatcaaaaactttcctattttcgagggataattaagtcatttaaagtttattatttaattatgtaaatacaactttatttacctatttctaaggggtattagtgacgtacgctctactatatacaaagcattagttaaaaccctaagtttgtcttaagctctcagttctaactctcaagccataagtttaaaactcaactatcttctctctcacacacacgccataggcatagtctctccatcacttgagatttgccaactcgattctcatatttgtaatcttaagacagccaattcagattgcacaacacttgtgatctgagtggtattatccctggtattaatacaactaataggggagtaggtcattannnnnnnnnnnnnggggtcgaacctctataaaatcttatgtcttatttacttttctatttttattgtgtaacacgtgacaagcatcagtaataaatatgactccactatcggttagccaaattaaagtcaaaaatttggtactttcattgagagcgagttgttaatttatatgatcaaacgtcatggttaactcaaagagaactcccgctacaacatcaacctccccgggtcttccttaagatcctatgacagttgatcctgatgttcatgttcctgttacagctagaatctccataaactcaatggatgtggccactcctgtcacctcgacaagcaccaccaacctgaccaccacaactagacagattgacacaaccaacccagttggtctcaatgattgacctttgcggcccagggaggaccctccactggcaccccataccgaaggaatggccaacgtggagcaaccctcaaggcaccacaattggatctggtattatgctggagagacgggtctaggaatcggtgagccaaccattggcgagccctatgtggacttaggagaagatctcgagctggccaaacttagagtggctttatgtcaagtcagcgaaactgaagaaccacgcgttgttagctgtgatgtattcgcacagcagagacatgaatttctgatatggatagatgactaagagtacatcctctaatctcaccaggtggagctggaccgctgtaatagagaagctagcaacctgataaggcagttcaatgagagaactattggaagagatcaggatctcattagagatcctctctaagggagactagtcgacagatcagagagggtctatcaacaaattgtctaactaggttcctctggaaccaagacaaatcttcccttactcgaaagaagacaagttggtggcgagaaaagcctgatctcgataactaatgtactggggccagccaaggatcttgagctcgatgacaccccaaccctaattggtcaacctttggtcgatcagccccttggtggtacacctctggacaactaacaaggtgaactccagtcctggggcctttaggaacgagtaattaatccaaaggtcaataataaataagtagttttaaaatttaccaagtaaattttatatcttattaatttttcctgactccactatagattcagaatttcactcctagttatatagaatgatctatacaaagtatagatatgctagtgacccaagagacagtcagggaggacagaataagtcctatacctcctcctcctcactagagcaaccttttccagcttagattctccatcaaaactgttagctcctgagtctatctctggcttagcatcaatagggggatgatcggtctcctcctccactctaactcgaccctttatggctaccctacccacatgggggtcatacagaggcaccctaggcagaatctgttttgttctgaccataagtacaaggtaaataagagacctacacgactgtcacctcccctattcaacacccagcactacctgcatggaagaaataaggggaggtgagaaacttgacaaagctacaaatatataaagtgtacaagatcgatcaacgaccaagtaccgtcttaagtacacttactaattaagggatatagtaagtcttcagttatataattgactataatagactcactacctagccttatacagagtttccaagagaaaccacgcataaggccacaactgtatatgcctccaaggttgtcacaagaccctagccgaggtcaaaagagggagaaaaactagcttcccacttggagccttggccttggctagcaagggttttaggtcttggttgcaggccaaaccccatgaaagacacctatggccagccaggcttcaaacaaagcctccttggtcggccaggatctgcatggattagaacatgtattttttaagaactcaaacatgttcttcgtgttcttcgtgacttaaagagccaagcatcacaacgaaggtcatattagttctttttcgtctagaaatcacacattatctatcgtaaggctatcatgcatatcaaaataccgaaaagacaacaatctaatgtgagaatcaaatcatgttaaaaataagaaataatgttcatgcatcaatggcaaaattaattaaatcaagtgacgatagcgggtgtaacaccctaactaattcagacatgttagcgtgatttttaacgtannnnnnnnnnnnntgctaatcaacgagattaacaaaaaacctgaataattaaattttcttattta

SEQ ID NO: 22993 - DNA, 2822 bp, Cannabis sativa
  modified_base (201)..(203): a, c, t, g, unknown or other
  modified_base (2613)..(2616): a, c, t, g, unknown or other
ttctagactcagtgccatgtgggaacacggggattagggttatgatcgggtgtatgggtgccaggttataacccgggatattactatgttttatgttacgcttttcttgttgattctgtcgactcacagtgctatttccatgtgtaggtaagggcaaggctaaagctgaggagctgtgagagcgagcaggtgaagattgtnnntgtcggggcagttaggcctggagcatacgatctttgggacatcgaggcttttgctgtatagtctcttggcaacaaacttttgtttatgtgtatagcaaacttttaaaaatgtattttgtaaacgggatcctgggattgtatatatgtaatactttaagttttcttataattaagaaaattttaattaatcacgtttttcgttaaactagttgattagcaacgagctaaacagtacgtttaaaatcacgctaacacgcctatattagttagggtgttacaattcccctccctagtcagataaaaatgatagaattttagtgcctaattgcaactctacttctattttaaaattttggaatgttttgacagcgtcagattggatttaagtagataaagccatgtaaatctagaataaacatccatgaaatgtatatagtatttatattcattgtaggaggttataaaggaaggtccccataaatttgagacaataagctgtaatggcttagtgtaacaagtgtaaaagccttaggaactagaaatttgtgtatttttcctaaacaagtttggcatacagaatttggcattttatttaaatttgagatgtcacaacttgagagaacaatcttgacaatcctcttagagggatgaccaagacgattatgccacaattcaaactcatgaatagagttgtacatttgacacaaacactagagttggtactgtgactttgggaagtggtagccatatttgtgcatggttgatgagaaagttgagaggcactacaaggtagggggaagcagacagttgtagttgattggagttaaaagtatataggccattgtggtgtttccagtcaatagaacagctttgctcacctaatccttgacataacacacattaggataaaacacaaagtacacattattatcagcagcaaattttgaaacactaaggaagttcttggtgatttcaggcacatgaagtaatttgtttagaatcaagagtttatcaaaggttttaggaatgagataagtgttactaatttgggagataggcaggccagcaccattgccaacatataactactcaaggccctcataatttgttgttgtcatgacattttctccatgtggtgtacagtgatttgttgctccaaaatcagggtaccagttatcatcctaagttgggcctgcaattgagtttgatctgcagctaggaacacacttgtgaagctcttgtcaaagcaataaaagcagtcaattacagtatggccaagcatttggcatatttgacattgacacacgattgggagttgctgagaatcgaccacctcttcctcttcccatggtggtgatctgagtgttgtgactagttccacgagatggatttcctctaaagtttcctctggaattgggaaaggaagagaaattgaatccatttgggaaatactaacctcgagggtatgcagggggtctgtaattttgattagcttgagcatagaaggcttcaacagctggatcttgctcagtcatgatcatattaatgcttggttcagcttcttgatcctccttctctattcgagattcagatgcaaggagcacgaccttgatctcaccaacagtgtagccttcaacacaagtgttggtggagataatgaatgtgtcatactcactgggtaggccttttaatatagcagcaatatcgtctcggtcagagagaatttcaccaagagatgccaacaaatctacatgttgttttaccttaagaaggtagtcattgagacttgacatgtctttctttaatttttagagcttagttctgaattcgagaatcttggatgagacctttagtgtaaagtgttgctcaagagctttccaaatctgacgagctgaattgcaacccaccatccgagttagaagaatcttagtcatggaggagagaaaccaagaaataagaagttgatcttggacctcccaatcaatgaatttatggttgaacctatgagcaacacgatcgacatcaataagaaattgagtaggcggtggaacatcctgaatgaatttttgtaatcgattgccacaaatggctgttagaatctgctgcttccacaaaaggaagttgtgatcattgagcatgatcgaaatagtgtggttgaagtaaacaggggatgtatcatcttgagttctggttagatttcttgaggcagcaaattgagttccttgtggtgtaggttggtgattcgaattgttaggatcaacagaagccatgttccccgttaatggtagaaatggctctgataccatgtgagaggtattcaacctcttggacatagttgccaaaagacaaaaacagagcaagaagaagaagaaagaagaagaaatgtagagatagagagagagagagagannnngagagagagagagagagaaatctcttattgattaatttaagctttacaagtatatatacattacgtcaaaaaatttatatatacatgattaaaaaaatgtacaattaaccacatgtaatgagaggcggacctaatgaaggaccaatgtgggcttaagcccatgctgaaaaaaaaaatccttttacttcttaactaaattttttttt

SEQ ID NO: 22994 - DNA, 3632 bp, Cannabis sativa
  modified_base (1941)..(1946): a, c, t, g, unknown or other
aaaaaaaaaaaaaaactattatatgacactcttgatatattgtatgagataaaaaatggaagactagttcaatacatttatgtttattaataaattaatttagggtgtatttataaataacgtttatttttgtaaataaaatcgatgtgtatattaataaaactaagagcaccttagtacttctaaaatactttatcaaaacaccaattaacttatctattttagtttattgagaattatacttcattttctaaaataccttatcaaaacaccatttaacttatctatttacttgtccaatcaaaaatattacaactatatatcaattttattatatatttttacaagatttaaagattctatttttaaatattaaaattaattaaagtatataataataagaaaaataatgtatataaacataaatttgatgtaggtgttttgaaataattttaataggtgttcactcaaaatagttaaaaaaatacaaatatcttctttcaattgggcaatccaacaacaactgcctttatcacagattgaatccgatgctcttatggtttgtcactgcactttgagctcctttcaattcaatctcatcttttaatgatttgattgtagatatctcatgtcttttatcctttctccttaatgtaaccatctcgcatgtcaaacggaatgctaatatggctgcctatagtttggctaagtttgcattaggggtggatgaggcttgtttctggtttgagaaaatccctccaccaatttactttgttattgtaaatgaactctttttaatttataataaagtattttcactaaaaaaaaaaaaaatagacatatggtttggctaggtttcaccatagttagtagcaaacaaaacattcctcctttaaacttatttaattatttattttcttccatcacaaatattttatcatattttaaattctttttcttagagcagtaatcatattaataaataatataatattttagtgagatatctctctccttaagtatttgagtcacaaatttgaacagtgtgagtgtgtgtgagactgagagagctttaatttatgaaatgacgattttaccccgtaatttatagtattaaaaaagaatccgaactttcttacattcataccgaaagagaagagagaaggtgaaatgactaaaatagcctttcgaggaaatgagaaatacaacaataactgccattatttgacacattgcaaaatattttctctataaattgaaactctccactgtcatttttttcatcaacttttttcttctctaaatttccaagtctgaaactttccttctaatcatcatcatcataacaaaaaaatacaagtgatttttgaaaatgggtttgaactcaaacagagtagaagatttttcaagccatgaagaaaatacagtagtgagaatccaaataccagagtcagtactaaataataatccaaacatggagattcacaaggtttgtttgcctccaaaacagacaacttttcaaaaattcaagagaagagtcactgacatctttttccctgacaaccctcttcatggtcttcgttaccaaacaagttccttcaagaaatttcttctgggtcttcaatttttcttacccattttccaatggggtcctctttacaatgttggtcttctcaagtctgatatcatttctggactcaccattgctagtctggctattcctcaggtatcaaaaaatatataaaaatcaaaactttattacttttttctggtttttctctttctctctgtcatgcaaaaacgtttcaaataaactgaagttttttcattaatggcgtttttccatttattgatagttgagtggtcacacgagtatgagttgggatgtgttcttctgcatatattccttctcgtttgaatcatttctctctctctctctcnnnnnntctctctctctctctccatttatttattcacaaacctatatctgtgtgtgaatacatatgtatcggttataaatgagtttttgttcttattaagccataattgaatataatatgtatttttctatgtatgctaatatttgctaaattattctaaatgatgtcacaagtgactgacttgtttgtcttttgcctcatgaagatcatagctaatattttgttttgaataaatattaattttttatgtttactttctgattctgctttgaattaattgcaattagtggtcaaattcgtcttaattaatcacattttttttctttttattattaatttcagggaatcagttatgccaagcttgcaaatttgcctcctattgttggactatgttagtatctaaatcatacaaactcaatttgtgttgactaacttaaaatacttagctgaagttgatttaattatgactttaaatctccatacatgcagattcaagctttgttcctcctctgatatattcacttctgggaagttcaagacaccttgcagttggaccagtttcaattgcttctttagttatgggatcaatgttaagtgaagcagtttctcccactggggatccaattctctatcttaaactggctttcacttctactttctttgctggtgtctttcaagcttcactgggtatcttaaggtactttcatttattcataaaaatgaaaaaaggaaggaactttgtgtgtgtatgtatgtatatattttgtagtatttacatattcatgtgacctttattctttaacaggttagggttcataattgattttctttcaaaggcaactctggttgggttcatggctggtgctgctgtgattgtgtctttacaacagttaaaagggttacttggcatagtccatttcactagcaagatgcaattacctgctgttatgtcttctgttttcagccacacagatgaggtaagaaaataaaaaattaaagctaatatttttatttttgttttttatataaagaaaattgatcagaataagcaacatcatggaataaatcaacttatgttggtgcttgataacatgtccaaattagtatcattgcttttaatttagtgttagattttaattttttctctccaatggatgcttttatgtttcaatcaaaaggttcctaatgtatcttataaattgggtacacttcttgattgccctttattctaaattaacaagtgccaatcccttttttctttttacattatctttggagaatctttttatttaatatataaatatatatttttttaaattttacttcacatttattgacaagaactaactatgcttgattttttatttctttgcagtggtcatggcaaactattgtaatgggctttagcttcttactgtttatgttgaccactagacatattgtaagtatctctatgttggcaaaacagtgcaataatatattagtgaaataaagatgaaatcttttttgattatttattgatctaaattaactgttgcagagcatgaaatggccaaaactcttttggttgtcggcagctgccccattaacatcagttattctttcaacacttcttgtctttctactgaaatcaaaatcaccccacatctcatttgtaagaacttattgcaacttttcatttcatttcataaa

SEQ ID NO: 22995 - DNA, 6007 bp, Cannabis sativa
  modified_base (1827)..(1833): a, c, t, g, unknown or other
  modified_base (5405)..(5407): a, c, t, g, unknown or other
tagggcacaaaacccaacaattgcctgtgcgcctagacaattgaaggagtgtgaacactggtattccattcattatattgaattagtagcagtggcttttgccttgaaagtttggcaccattacctgtttggtgaaaagtgcgaagtctatacggatcacaagagcccccaaatactttattttacttaaaagaatttgaatatgagaaagtaacaatggttggaactgggtaaagattatgactgtgagattctctaccaccttagaaaagcgaatgtggtagcagatgttctaagttggaaaaaaagtttagagcaagtctataaaatgaggagaacctcaccaaagttagcccatattacaatacattatgatttgataaaaaaaaatcaagatagcccaataaagtaatctagaactacaggagtatcaagaaaggcctgaagttgggccagtaggggaatttcagttttagcagatgaattattacgatataaggacaaggtttgtataccaacttgcaaaggtgttagatagaaggttctaaacgagtctcatattataccatatttcatacatccagaaacaaacaagatgtatcacgatgtaaagccctatattggtggtcagatatgaaaggtcgcgttgtggagtatgtgtcaaatgtccaacttgtcagcaagtcaaggcagagcgtcagaaactagaaggaatatttcaatctctaaaaatacttgagtggaaatggtcagaagtaaccatagacattgtggttggattaccaagaacagtagggttctatgattctatctgggtgattggggatagatatacaaagttagcacagtttctttatcagtatggactacgtatatggtggattaatgtgctaatctatatgtcaagactatagttcaactctgtggtgctccaaagttaattgtctcagattgagatctaaagtttacatccaaatgctgggagagtctgcaatgagtaaagggtaccaagttagatttcagtatagtttttcaccctaagactgatggtaagactgagagaattattcagatatctgaggatatgctacgggtgtgtgtaatagaatttgagggttcctgaaataagcatctccctatgattaagttttcatacaataatagttatcaaagtactattagtgtggtaccgtacaaatgctttacgaaaagaaatgtcgttcacccattcattggagaagtcggtgaataaaggaaccttggacctgatgcgatctaaggaacgagtgaggtcataggaaagattcgaattcgtatgtttgccttataaagtggatagaagagctatgttgatctaaagtgtagagacatcaaatacaaagttgggatttttatctttcttcaggtgtttccaatgaagggaacttagaaattgggaagaagggaaagttaagtcccaggtttatctgtccatttgagtttctggaaaggggaggtcaggtagcttatcagctagccatactccctgccttatttggagttcacaacttgtatttcaatgtttcagaagtataaggcagatacgatccatataccaagttacaaaagtattgaacttcaaatagacttgtcatatgaggaacagtcgatccaagtttctgaataagaaaagagaaagtgctgcagaacaaagactatatcgttagctaaagcattatggatgaacaacaaggttgaaaggcaacttgggagttaaagtcgcggttataggagcggtatcctgagttgtttagagaaattttgaggacaaaatttctataaggaggnnnnnnntgtaatatcccgaaaaatataatgatatttaattgggcatattttttttattaaatatgtgattaagtaggcattagagtaggattttaatcctaataaagctaattacgagttaattagtgaaatacgactaaaggtacaaattaagtgttatttattaattacagagattttattggactatgggggtattatggatactattttcgaaataaaatatttttgggtttggcagccgtgggaactcaacggaatggtcagaaatgtcacgacaataagagatgaattaaattgaaattagaagtatactagactagtgtagaattttaaattatcggtttaacgggattagtaagaatgaccaaaatacccctagggtagattttaagctttaaggttttatgaggggcaatttagtcttttcctagagttgggattttgtctctatgtgatttatatgggctgaaaagggataaatataacttacattatatgcctaagtatttatttttggaagaaaaaccttgaaaactaagattaagtgcataacaccatttctcttccacttttcctcttcgaatctaaggccagcagctgcaaggggggaaattcttcacaaattcttcaagccttagcagaatttaacctagtctaaggattctgtaagctttaaggtaagtcctcactccttttcctttgtttttctagggttttgggttaggtttgttgggtttttcttgaattcgggtctgtgatgattagtggagttcatagtttgattataggtgaaatttagagttgttcaggtgtgttttagatgggttaattggctgttcaatttgttttgggggaggattaagtttaagaactcaattttggctctaacatggtgaattaagtattgtgatgaattatggtgtgttaatgatttaataccttgtttttatgttcttgaattgttatggattgtttgagtaggtatgatggagttttggatcggttttggaggagaaaacccaaggttttcttccctgtagaaaccggtcaaccggttgctactggtatggccaactggttgaccggttggtctgtaggggaaaatcctggtttttttttatttaggtttttggctcaggatgtttctctgagcttggattaaaacattttagtaatgtttgagttaattttgatcctgtggaaagttagaatttgtccggtcaagaattagggtttgtttcgaggatcggataagttgttaatcgagttttgttatcgtgacataggacccgagattgtcgagcatggttccactcaaatcagcccacacacctgatattggtttgaggtaagaaaagctttatgcactgctaagagtgttggtaaaaaaacgattatcatcgttgtgactcgattatgatcgaggtaatgatgaggaacgattattatcgtttgtgactcgattatgattgaggtaatgattattttcgtttgtgactcgattatgatcgaggtaacgattattatccttagtgactcgattatgatcgagaaaaggataaagatacgatcattacaattaatgaaatgagtaattactcccttaaaaccgcatataggtttcttacttatcaggtgctttactgggcaacgatagtgacatacgtagctcgtggataatgagttgtaaggatgctttatgaagcattaaagtagaattgtcttataagacaattaattgcttatgtgattatgtattgagtgaatatttatttattatgatgatgaagtcgttgactatgagttactatgactttcttatcatgtgtaatataagtgtttgtatagacgttaaattatatgtgcatgctgaatatgtaatgaatcatgggtatgtatattatgtcatgttgtgattacttgcattttacatcgcttttgatttagtagcttttcttgctgagtctttgtgactcacgggtgcttcatggtgcaggtaaggaggataggaaagtgttcaaccatgagtcagaggtctcccagcgatgtacatatcaggcatggtggcttggcttccaggaaacaggatcaaccctttgactatgtttggaaatgaaatcttacttttgtaatagcggttttgagacttgttgtaaacgaatttatgaacaggagatccccatattatggcggtattttgtatgaaagttttattttaatttaatcaaaagcttttaattaagccacacttttcctaacataatagattagttagaaataaatttgtaaaagtacacacgtggcatccctgtgagtcagggcattacatggcaagagtaatgttaaatagcaagaaactgacaaaatgattgcgggcagaagctataaacacaacttgttatacaataaacagagtgtttattcgtctaagtacttccaaaacatcctatgaagtctggaaaggtaagcatccaaatattagtcattttcatgtcattggatgtatttgctatgtttctagagaccgtgagcatattggaaaatttgatactaaaagtgatgttggtgtacattggatattccacaaatagaagagcctatagtgtttacaacatgagaactcaaactattttggaatcaactaatgtggttgttgatgatttttccacaaaaactgagatagatagttttctagatattccactagaagcagcaaatgtagattctgatgtagcagacttgaatgctgaagaagcaactgtcaaatctactgctgcaactaaagtaggtgaaccagaacaacctatctcgattcatccagacatcattattgattctatctagaaggaaccaagaaccagagtaaaactgaatcatccaaaagatctcattcttggaaatcttgaagaaagcatggtaacaagaaaaagttatgttaatttgattagttttctttgttttgtctcacaatttgaaccgaaaaatgtgaaagaagtcatgacttatgaagaatagcttaatgcaatgcaagagcttaatcagtttgttcgcaacaaggtttggattttaattcaaagaccaaaatgtatcaatgtgattggaacaaagtggatctttaaaaataaaagtgatgaattcggtacaattgtgaggaacatggctcgattggtggcacaaggctatacacaggtagaaggtattgactttgatgaaacctttgctccagtagcaaaatttgaatctattcgtttgctattgtgtatttcttgtgtttttgatatcaaattgtatcaaatggatgtgaagtcagcctttttgaatgtaattttgagtgaggaagtttatgttgagcagccaaagggatttgaagatccttggtttccagaccatgtatataaattagaaaaagttttctatggtctgaaacagactccccgtgccttgtatgaaaggttaactcaatttttaatttctcatgattattaaagaggtagtgtagacaaaactcttttcatcaaacacataaaatttgattttatcattattcaaattatgttgatgatatagtgtttggnnntacatctaaccatgaagtgcaagtgtttgttaatcaaatgaaaaatgagtttgaaatgagcatggtatgtgaacttactttctttttggggcttcaagtcagacagatggaaggaggaacattcgcatctcaaagtaagtatgccaagaatcttgtcaaaaagtttgggcttgaatcggctaaacaggtaagtactccaatgagcaccactttgaaattgacaaaagatgaacatggagtaaaggtaaacactactctatatcgtagtatgattggtagtttattgtatttgactgctagtcatcttgatattagttatagtgtgggagtatgtgctcgatatcaaagtaatccaatggaatctcatgtttctacagtagaaaggattatttgatatgttaatagtactcttgattttggaatctggtattctaaagacactaattctagcttggcttgttttagtgatgcagattgggcaggcaatgctgatgatcgtaagagtatgagtggaggttccattccaattttatttttcgttggagttatataggcccgctcgacttctcttttcttttggcatagcaagaaacaaaattc

SEQ ID NO: 22996 - DNA, 2021 bp, Cannabis sativa
taacctgctattacaggttaaaaaaaaaatgtaaccatatagtcacaataaaaatgtaatcattgaattgaatgtaaccatacagtcatcctcagttttttatatatagaaaaattgaagcagggaaaataaatgacgttactcgttcattctgagaaattgatgggcaataatttcttatcaaaaaaatggagtagaagaaataacaattagtgcaatatagtaacttttaaaaaatttataggcactaagaaaatatgaatttctgaaaaagaatgataggtactaagcaaaatatgaatatatgttttgcattcatattcacttatttctatctctcgaaataccataaaaaatatcagttgaccgatgaggttcattagttttatttgtttttgggaaacggtgatgttgattaattaataaaagttatattttagtggattcctattacgtcgtatgctagttgtcaatatttatttatttaaagtggagccaatctcgtctcataactttctaatatttttcctttaataaattaaaaaaaacaaaactagtttcaattatctatacatctataaataagaacactcaataaaaacaagctaggacttacttagagtaagtatactcaaattatattctactagagagacaaaataaaagcaaaagtaaagagaaaacaataaaattaataaattatagtagttgattagagctcaatctattgttgcaaagattttagtttggtctatttgatttggatctctcttctatataaaaagtaagtatcctttaaaattatataatcgatcaatttcagaaccatttttacattaattgacatattaatcaaagtaaatgcctaaagaataaataaagaacaattttatctgttcttgtatttagtgaacactactacaaaacaatcctttagaagttttttcttttcacaagtttcataataaagaaagttaaaaggtgtaaaaatgctcacttattaaaaattgacttttagagacaatttttttttttctaaaaaccgtaggtatagaattgaattacaccatttagagtcggttggaaggaagacatgtctgagtgctatttgaagagcctatcctatcggttattaagaaatatttgacggcatagggtgcacgcgaaatttgacgcgtgtaccctatgtcgtcggttatttcctaataatcgacggtatagggttatacaaaaatcctattacctggtcttctccacttcttcttcctcacgatcgaaaccaaaccagcaacagaactagccaaaccctcaccacccttcgccaaccatcccttttccagcctatatctccttcatttttgcaccatttgagcctattttttttttttttaaaaaaaaaaatcttctattctttatacttaaactcatacaccaaaaaagtttcaatttttttttctctatttcagtgtcaatcgaaactattggaaaatagtggtgggtataactccggccaacgatatttgttgagaaaatgttgaatctcaacgtccattaaggtataaatatagtttttattcatttttataatgtacattgctttattttatgttttgtgtttttttttaattttttttttcatattaataacattgttgtgttgtatgtgcatgttggccgaactttttgcgaaattgatcgccggattgcgtttataaagaaaatttaaaccttaatatataatacatatgtgtatttttgtttttttgttaaatatatgtgtatatattgtgtgtgtgtatatatatatattgtatatatattatttatgtaaatataataatgtaattgtattgtatatattctatgtaatatatatgtatctatatatatttattgtgaatgaaagagataggagggatttaattggtttagaaataaagttcttaaaattatattagtgtgagatataattgattatatatgtatgtataatttggtaattagtaacttgttactatttt

SEQ ID NO: 22997 - DNA, 2634 bp, Cannabis sativa
  modified_base (1697)..(1701): a, c, t, g, unknown or other
ataatatattatatattgttgttaggaacatgtatttggaacttatatgaaagtaacatattatagatttcttttttaaaagcttgtgaaaaatgtgtactaatatatttggctaatttaaatttttaactttgagatgtattaaattatgtttttgaacattttagatcgttaaaaattttcttcgaattatattagaattgttagattttaaaaatttttgtttaattttattaaagaaagtttgacgttgatgaaaatttaaaaggtataatttggtatatattaaagttcaggagttataattttgtagatattaaagtttggagacacaacttcgtatatgggcaatcgccacattagtaaaattgaataaaattcgataaaagcccttaaatctaacaattttaatagtttaagaaaattttttaacgacttcaaaagttcaaaagatataatttaattaatacatgtcaaaaaattgagaaaataaaaattctaattagcctacgtatattatatttggttagtgatatataatatgcttacataggaaaataaagtaccgtcaataattcattttttttttatatttattgaaaatacaaatttactattaatacgaggtcgttttattttacaatgagagaacaaatttgtttgaaataaagaatttggatgactaaattagagtcactcatctctatatgtaagctcacaacaatgaactcttttttttttttttgaaagaaaatgtttataaatagaaattagacctcacgatcgttacacagaatattattcgggatagacgattcactcaacctaccaaacaggtagttcgtgaacagctcatttggccacattatgagccataaagttacaacttctacaaaaaaaaaaaaaattacaaccatcaaatagtcgagagagttcaaacatgcaatcatctaacttattacaaactgtgattaagttcaaacatatatttctaactcaaaatattatttgatccgaatttactgagaatatttaagcacatctgttaatgactcaatcacgaaaataatgttcgagtttcttataattaacatgagattgctggaattatcaaaagtacatcaaactcagtctaaagtatattcttttctacttaaattaaagttcatcaaacaaagcttttattatctcaccaaatcgaaatagttttgttataatgtgttaactagtgttaaatgttcatatgtcaaacttatgatctaaaaataatatttaagcttgacaagaaatattataaacaagtatttaacaaatgcatcattttctttcccacttttggacaatgggcaatgtttggttacaatgattataaaaatatattgattggtggtgataaagttatgaaattgcatgcatgggattggaaaattgggatatgatttttgagtattattaaaagaaatcttccaaatgagcccacaacacaagtagtggtgggcctttaccacgtgggagtacctcatttgctttgattctctattctattctatgcttgtaagtatggtctttgtggttgtggctctaaaacattcaataattaattaattaattaattattctataagtatttaaggtaattattattttggattttgtattttacaaaagttattaattagactatttgttttgttaannnnnaaaatagaccatgtatttttttaaaattatacaaataagaccctgaattgatttttttgtcaaaataaaacttaataataatatgttctagagatgttatgacaaaactggttatattttctgtatctgttcatgttaaaaattatctttaaattggttaatattcgcgtttaaaaatatatgtcggaatatttttttcatgataatgtttgttatacttataacattatctctataaatttttgaaattttttgaataatttataatgttaaaaatatatttaaaatttttttaatattcgtgaaaaactaaaatatgagaaattttgtttttgatattataaactatttaaattttttaaaaatttataagaatgataggctgagagattctaatagaaaattacaattaacaatgatactcttattcctcatgtatatagcaagaatttgaaaaagaaagtacttttaatttttgggtaacttgatttatgatcaaagaagaagatgattgatgctcccaatgtcataaaccacgtgatctgtttttttgcttcttcttcttcttaatggtctttgcttatatatactttactccatttatagtcttttccctatattttattcttaaagtggaaattcaagattcaaataataagactattaagattaacaatataatcatggtccgccttaagaatataaccaactaagctataattatttattgtttacaaaacacttaattttactttaataaaaacttaatgatttttattttttttattttaggtccccgaaaaaagtaggccctaaacacgagcctaatctgcctatacctaagaccgaccctgactataagcttccccccttccaactcacactaacactatattttttttacaaaactaagcattatcttatctttttttg

SEQ ID NO: 22998 - DNA, 1996 bp, Cannabis sativa
acgcctatgctagttagggtgttacatgttggaaatgggaaaaatttgaaagtggttgaagcttcaggctttgatccaagggttatatcctcctctaatgcagtccacaagaattgtcacgaagagatatataaggctaggcgtgcgagatcgatctccccgagcttctggaggaaacgtaatgaaggaaagaaactgcctgtgactgatgaagacattttaaaaaagtattcttcaagacctattccaacggctagagataatagggttttagccactatatgtctcgtaatgggcctacttacgaacagatgatagatttgcctcatgaacaactttgcaaatctaggcaaccccataagttcccagaacatactcattttccttggccttcttatgctgggaaaattggacttgcagaagaattaatgggctcggtctaggtggacaaatatgagcctgtcccaactctttttcatgatccgttggatgtcacggagcaggtgcacccatgtccacaggcccgaaagagaaaggcaagtctaaacttaatgccttttgttcctcgtacagaagaaaataccaaggaattctcccaagatttgcctgttatggagccgttctcacctactcattctaattcttcctttaaagtgggggtgggtcctcctatgtcatcttcgaagaatgataagaaaagaaggatgagatcaagatcccagagctcacttcagaagaagaaggtgcaaagaaaggagaattggaggagaatatagtgagaaacttagaggaaactatgaatttggtagaggtacgagtagaaagttctgaagttttctgtatgggcgaggatgcgacccttatcaagccccccacctcccaatgattgtcctttcttgaaactatcgaggattggccaaggaatcggcagttcaagctttattggccttggtggggaagtttaaggtagatagtatttttttaatggaaactaaattgggaaaggagaatatggagggagtagcccgagttctgggtttcagtagaatagtgtgccaccctgcgatcggtttggcggggggattttgtctaatgtgggagcaagatgttaacttaaacatagtaagtagtagtagaggttctttcgaagcaatggtgtgggattgtcaatcaagagatcattggatggtgtgtgcaacttatggtaccccatactcctctgaaaagagtagtttttggagtgatatgagctcgagagtaagcaattgtgatatcccttgggtggttataggggatctcagctgtattgggagtcccgaggaaaagattgggggcaggagagtcacgcacactgaactaaaatggctcacagaattcatggaagatactggtggagtggatattagatgtaaaggtggaaagttcatgtggcacagcaagaggtttaaggatgggctcattcgtgaacggttggatagagtagtaggttcaattaattagatcacgacttttccagaggctggagtactcaatcttcccatcacttgctcggatcatgcaccaattattttggatatatgtctattttccaaaaagagacatattccttttcggttttttgatgcttggacttgggatgaatcttgtcgtgaagtaattaagaaggtttagaactgtgaggggccaataacgagtaagtgtttacttcgtaatatatgcaatactcgcagtgctttggctaagtggaagaagaacttctttggtgagatggacacggtgattagaagccttgaagaaaggatctcttggactcaaaagcagcagctagagaagtccttaatcgaggaagaattggatttgaatgagaaactttccttggcttggaaatgcaaagaagataagtggcgccagaagtctagagacattttgtgacagtcagtagtcccgtgatccgtaaggggaaaaacctggtaagctgtgcaatcccacaccgcct

SEQ ID NO: 22999 - DNA, 1558 bp, Cannabis sativa
aactattagaactattatttatattgtcgctggtgacacatttttgagcaagagtactactagagcttatgaattactagaaaagatggctatattcaattatcagtggtctgatgaaagaacatctgcaaagcaaaaaaaaaatagctagtattcatgaatttgatgcgatcactgcttcaactgttcaagtagctaccttgactaaatagttgtagcagagaattatccttgttaatgctatccaagcaccaaatgattatgaaatttgtggaggtccttatactttttataagtgtacttctagtgacaataacattttgatggatcccgctcaagttcaagccatagtcaattttttaaaggtagttcaacaatcctttctccacttcattcaataatgggtggataaatcattcaaatttctcctggagaaacaattaggggcaacagcctcaattctagaattagcttcaatagaacatgcctcaacaagaagcaaattaaccaaggaatcaagatttttttaccagcagcttaatccacacactccccctgctccaaccaatgatttacaagcttctttgttgactctcaatacacaaattgagttcatgattgagacaagagcatacattcaaaatcttgagacacaaatgggatagttggtcaatattcttcataacaaaactcaaagaaattttccaagtcgtacagaggtgaatcttaaagaaaattatagtgcaatcactctaaggagtgataaaagagttagaagggcaagtgaacaagcttattcctgcaccaaaatttgaggttgaacatgagggtttagtggaagaaaaggttactgaaaatctttagaagaagcaaaaaccatccagtcatgagcaccacgtcaagattccatatcctctttgctccaaaagaagacacttgtcaaagagaaaaatactggacgattatgaggcagtggcatttattgaggagtgcagtgcaatattacaatagaaactaccgccaaagctcaaggatcctagtggtctcaacattccatgcttgatatcaagctcggttgaaacatcaactttgtgtgatttaggggtcggtgtaaatgttatgccttgatggattttttgcaagctaaattcgggagaagctcactccataattgtctccttacaaaaggtggatcactctattaagcatcctcgcagagtgattgagaatatcttagtaaggttgttaaattatcattttctctgctgattttcttatagttgatatggagaaagaaagactctcattattttaggaagatcattcttagccactgggagaaagggaaataaatttataagtctaggataagaaaataagctttaatgtatttactgcaacaaatattctaacttgttgtacagttgaggtggtgaattattgtcaaggcttaacaggtaaaaagaagaagaaatttaaagaacgattctgttctacttggtgtcatatgaaaatattttcataagcgaagttagaggagtttgatgactttggagat

SEQ ID NO: 23000 - DNA, 1666 bp, Cannabis sativa
agagcgggtaatgatagaattgaatgggtgaagtggaaaaaaatacctaactttctagacttaaaccttgaaagacctttcgaagaataagagatcaaaaatgcagttttaagtgtgacccctggaccagatgggtttacaaatggctattaccaaccaaattgggaggtagttgtgagaactcgtaatttcagaatttttggaaggcattctttagtcagttaaaccaaaacagtgaaaggattttagtagtgctattattaatttttgggaagaatttgagacgaaaggaaaaacttacccgaattcagtgctgcaagaatccgatcagatgtcatttgaggaggaacctctgtgaaaaaaaggatgaaagtttatttcagaaagagaacttcaatcacaaggagcaaagaagaagttttgtggaattttgatagagaagaaatcgttaaaggagggagagggctctgtgagtgaagaaataattgactttagttcagaaagtgataattcagctgaagaagagactacttcgatgatgaggaagaagtagaagctgaagaaatactgagggatataaaagtgctatggcaggaatcttgtcataatcaaatgtcttcagaagagagcaatcaacctgaaaggtcagcaatatcgatgggaatggtggaggatggattagtattaaaagatgactccgacctagaggaatctctggctataatgggtatgaagttgataatagatgagaagacagcagaatcaaaggagagacatgaattgggatgaaggaagtacaagagagaactcaaaaatctagctttcaacataaactatgagaaaagttagaaaaaaggagggggcccccacagagtttattatgaagatcttaacttggaatgtaagaggaaatggagacaagaagaagagaaaatcaattaaggcaactactagtaaggtgaatccggatttggcaattttaaagagatgaatatagcaacgattgataggagttttattggtagtatttggagatctcaattcaaagcatggattctaatacaagccaacggtagttcaggagggacgctgcttgtgtgggatactagaaaagtatcaaggtgcccatggtgggaaaattctctatctcggttttaatagaggatgaaggtcgtagacggtggtagttttcaagggtgtatggtccatgctcttataaattaaggtcagaattttgggatgaactggcagggttaagttcaatctgtggagattcatggtgcttaggaggagattttaatgtttttaatgtggtgattcatagtaattcttggaccaagagcatgaagatgtttgaccaatttttttttttttttttgaatcaaagatgtttgaccaattagttcgagagttgaaattattagacccaaaactgaacaatggcagcttcacatgatcgaattatagagaaaagcctatttgctgtagactggacagatttctttttaccaacaattggtgtgaggtattcccgtctatgagacaagaaatgttagtaagaattgtttcaaatcatagtcatgtggttcttgactctaacctgccgaaatggggacccagcccatttcgttttgataatctttggttggaacacaagatgtttttt

SEQ ID NO: 23001 - DNA, 2697 bp, Cannabis sativa
aatatttattaaagtaaaacaagtcaagtgaaactcaatattgagttacaccaacagtgatattacacctcataatagtgctatagatactataggtgtcctttaacatttttcaagaaattatatcatcttcctcaactcacattgtcttcttaaaagttttaaaaattaaataaaacgaaaaaaaatattctacaaaacttaaaacaaacccttccaacttaggaaataatatcatcttcctcaactcacaccgccttccatattccacccttagaaattaaaaaactatgttccaaaagaacatatgtggtgtccctaggggttagggcattacaaaaggtgtacatgaatactgacacaagttgctacactagatggacatcagtttgagggagagcctgaaccagttcaagtaaaacaaactaaaaagttgcaagacttaccaaaagaagaagatacacgagaagatcaagttcagggagaaaagtatgatgagtaacaactgaccagggacataggtagaaggaaaatcaaaccacttggaaaatttggctttactgatataatccactttgcacttattatagaagaaaatgagagagatgaacctctaaccgatgaagaagccatgtgttcaacagataaggataaatggaatcaaccatggatcagaaaatagactctcttagaagaaacaaaacttggattttggtgatcaaacaaccatgacagagagaaataagtgtagaaggattttcaagcacaaagaggaattccaggggtagagaagacaagacttgtagctaggagatttactcagagaggagtggattacaatgagattttctcttcagtggttaagcatatacttcaattagaattcttttgagtttggtagctatagaataccttgaactagaacagcttgatgtcaagacaacctttctacatggggacttggaagaagaaatcctcatgaagtagccatagggttttgacaaaaagggaaaagaagatcaagtatgtttactgaaaaaggtctctttatggcttaaagtagtcaccaaggcagtggtataagtaatttgatgagtttgttaccaaagtagggtttaaaagaagtgcatatgacaggtatatctatgttagaaactcaaaggttatggtatgcttgttgttgcatgtggattacatgctcataacttacaagaaccttggtgaaattgagaaagtaaagatgcctatgaataggagtttgagatgaaggactttggatctgcaaagaagatactgggggttgaaatcattagagacatacagagaagaagattgaagttgtctaaagagggctacattagcaaagtcttagacagatttggtttctttgaagtcagaccagtatgcactccaatagatcagcaattaagattgtcaaatactcaagctctttttacaaaacaaggaaaagaattcatgatgaagattccttatactagtatagttggaagcataatgtacattatggtctgcactagactagatttgtaccatgcagcaagtatagtgagtcgattcatgagaaatcctagaatagagcattcgtgtgatatcaaatggatcgtgaaatacctaaagggaacatctaatgttggcctaatctatggtggaagttcaagtgaaggtggtgttactagatttgtgacctctgattatgtagggaacataaattcaaggagatcacacaggttttgttttcaagttaaatgtttgtaccatccgttggaaagctaacctacaatttgtgtagcactctcaaccactaaagttgagtatatggcatgcacaaaagctatcaaaaaagctctttggctcgaagtagtcacaagagaactcgacttataccataaaataatccaattaattatgtgtgacaatcaaagtgctcttcacttaagaaagaaccaaaaaatatatcatgagaggactaaacatatagatgtgagactatatttcattaaagatatcattgtagaaggcaaagtcaagctacaaaaaagtttctactaaagagaattcagctaacatgctcaccaaagccctcacaactgcaaagttcaagttcaaccactgcttggagctgttgcaggttaaccaaaattgaaggttgtgcctattgttctaatcctaggtctattaattaccaaggtggagaatgttattctatgtctaggtggcaagtaatacagttaggccttagttaatcttctaggcagtgaagttagttatagtccttataactaacctttgtacatagtttgtttttgaaccggtctatacttctataatagaatgtgttcacctattatttttaagccttgtattcaatagcaataaagggagaaactcagagaatttccataaatgttcttgtgtgtgttgaaatcttggaagtgttgtgatcattaatatgtgaattagttctttttagatgagttgtaaactctacactatggcatgtttacaaggggaatgggaatcaattgtataggattgattcccattcatttgtttactatattttaaaatgggagaaattagtggggcccacacaaattaaggagaaaacaaaaggaaaagttctcctcccattttcataaggaatacctttcattttccttaacttactttatatta

SEQ ID NO: 23002 - DNA, 3655 bp, Cannabis sativa
acctatcacggtcggttcgagataggacctatcacggtcggtccgagatatggagtctgaggtatgacctatgacgactggtaagagatatggagtccgaggtatgacctatcacggtcagtccgagatatggagtccaagatatgacctatcacggtcggtccgagatatggagtccaaggtatgacctatcacggtcggtccgagatatggagtccgaggtatgacctatgacggtcggtccgagatatggagtccgaggtatgacctatcacggtcgttccgagatatggagtccgaggtatgacctgtcacggtcattccgagatatgacctacctcgatcagttcaaacttacttatcttgggcaggacaaatcacatatctcagatgggatgactcacatatcacaaacaagataagtcgcttatcttggatgggatgactcaatatctcagttatgactcacattttatacaagacacttgtcaagatatccaatggcacctcataagtaataatagacacatgtcaaatgataccttaagaaattgacacctaaggataaaagaggagtataaatagaagtgagggggctggatcggagggggcgggggagaagattaggaatgaacagggagtaaagggttccctaaaactaaaaattattgactggtttttgatcaataatgaactattttttatcaccatttttggtcaaaacagtttggcgccgtctgtgggaacttctttatcactaccctaaaatttcttaattttctctgagcaaatctccacggccaaacacacttcaggccgctacgagaaatttttaaccatctattttttggttgcaaaaatgattagagatcagacgaggagagcttgacggagacgtagccattgttggatgaactccaagaacaatttcgaataggctttcatttggtgattggcagttactttctgtgaagctcaaacacatgctgtaactttacgtcatattattaaaaaaaatgttaatcactttaaaataagtaagatgagaacaaattaaaaaaaaaaaaagtgatcaaaatcttatatatttgacttattcaccaatatcacatttaacccaaagtaagacgataagaaagaccttcttaaaggcataacgagacgagtcgcctccatagcggattaaaccgacatatcaaaagaccttcttaaaggcataacgaaaggagtcgcctccatagtgaatgaagccgacatatcaaaagaccttcttaaaggcataacgaaacgagtcacctccatagcagattaagccgacatatcaaaaggccttcttaaaggaataacgaaacgagtcgtagtcgtctccatagcggagtaagagtaagccgacatatcaaaagaccttcttaaaggcaaaataaagtaagtcacctccataacaaatttagtcgaaataccgacgacctaaaatacaaaagaatcgcatcaataaaagattaagctgacacattagaacaccttaaaaacatatgaatcgcatccataatagcatattaaaatgctatatcaagtcctcctcaaaggcacaccactcacacacaaagtggattaaaaagatatacaaaaatacataaagtcgcatccagaatttaaacaataagtaaaataaaaagtaatattttatccaaaaattcataataaatagctaaagatactatatgtgaaatgatagggcagtcaaaccagatgttacatatctcaggtcgttcaaactaagatagtacatatctcggtatggccgagtaaagtcaaaaggagaaaactgaaaaagggtagttgttaaatcctaaatacctataaaacaaggaaaaccctttgagtcaggaaaagttgtcagactcagacattatgcagcctacattggttaaaccatttgaaataggtcaagtaaggtataacaatatcctcatcacttgagtacaccatcaccattttcgggcaataaactattcttaaaggagtttcttataaaatacttttataagaaactggaggagtagtgtttgggggaaattttagtgggtgaacaagaggcccatcatgttagaaacataagaaaggcccgattaatgaatacatgtaaagcccacgaaaaactggaaaagatgtaaattttaaattaggagccgagatacgagaataaaactaagagggtaacctcattggacgagtcgaagtaatacctaaagtcgaattgatctaagataattcccatctcagatcgtgctgagaaacacattatcccggatcggaaggttcctatctcggtttagtcttggactcctcttatctcgaatcaattcaaaatatgttttatctcagaccagtctgagaaatgatctatcacggtcggtccgagatatggagtccgagatatgacctatcacggtaggtccgagatatggagtctgagatatgacctaccacggtcggtctgagatatggagttcgagatatgacctatcacggtcggttcgagatatggagtctgaggtatgacctatcaccactactacaaaatggacttttcccaacggttaataagagggtcaattataaaaaccgttggaaaaggtaagcggaggtttttcccaacggtttagaactgaagcaaaaaaactgttgaaaaaaactaatgccaacggtggagaaccgtgggcaataacatatagaattttttaaaagaaaacaatgaatgccaacaatttacaacagttgggaatactatacaattataaacagttggaaatactatgtattccccgcagttgtaaactgttggaatgttattttattttattttatattagattttatttatttaatttaattttaaataaataaataataaaataattaattgaaaatcaaattaaaatatataaaatagagtgtaacctttaaaaaatataatttttaatggaatttactaatattactgtaaataaattataattttttacatactaaaataaaaataaaatgtctaaattttattaatgtaatattctatcattattattatgactaagttttatgcctcctgcttatttcctctgatggttcttgcaacaactccggtttggacccctctgccggaggactggatcaaaattaactgcgatgtcaaagttggtggagactccatgcgcatggcggccctagcgagagatcacactgggacggtggttcgggccgttatttccagactcaacttcagagacccgttgattggtgaggcggcggcgtgtcatcttgctcttgattcagctcgcattagaaagcataactatgtcttggtggagagtgactcagaaactgttatcaaagcgctgaaaaggtctcgctattttttgaatattgataattatgtctccatctgtaatcaactctctaagtgttttttatcttgtaatttttcttttatttctagaggttgtaatttcgctgcccataatgtggctaaatgggccttgtcccaaaatatttcaggtttcgtagaggtatcctcgataccaaagactatcatttgtaatgatcgtgaggtctaattttccgatctatctaacgctttatttttcaaaaaaaaaaa

SEQ ID NO: 23003 - DNA, 2494 bp, Cannabis sativa
aaccgcaccttagtcctaacattatctaaggcatcctaaaatgttatgataaattaaatataatttacaatacataaaatagaaaatagggtttaaaacctcatataaactaaatgtattttgaaccttatttttggctgaatgtctcacaaatttgcaagatattgtaagtaaacagagtgtatattgtaatggattaaaactacccaatgacatatggtaagtaatgcagaatagtttgtttctcacatgaataaaatcagagagaaagaaagagggcaataatcccaaaagcagaggcctaaaaaaggtgaaacccatcaatttcttaagcatctgtggagtttggggaaccaaaatcttagtggcctcctccaaatcagaaactctaaagaaattcccttcactcaaatctttctcctccatgctaaccccacccccacatatcaccactttctcaacaaaatccccatattgggccgccaagctgtagcccacgaaccctccgtagcttaggcccaccaagctcagcttcctcaccgattgggcctccatgacacgaaacacgcactcagcctggaacgactcagtccggtcgggtcgggtcgtatgggagtcgccgaagaagacgaggtctgggatgtagaggttgaaatgaggagtcaagtgagggactaggtgaccccactgccacattgcgttggccccaaggccatggatgaggagaagattgggtttggagtggttcgggtgcttggggacccagcaatgcatgtgggtcccgtcttggaggtccgttacagtggattggagccccgacctagcgaaagcggagcggtaacaccaattctttgactcagtgaagctgaaacacctacacattcgtaaatcgtaagagaagaactttgatttgaaagaaaccaggcaaaagtagaagaaacaaagagagacttcacgaagcttttttggattgggttggtttgggagtaatgtcttagaaatgttatgtgttatatctctcgcaaacgacaatatcaacattaaaacgacattattcattataaatgtaataaacatgggagaagataaatatttgaaaaaaaaactaagaaaaattgggtgtttacaccaaatttttatttattttttattttttaatttgggatggattttttttttttcaaaaatactgtgtactatgttaagttttctcggttgttccacggttgttttttagttgttccattgttgttttaattgttatattttgttgttttacggttattttataaaaagacagtatttttgtaaaaaaatctgcccaaattaaaattgtaaacttttacttaaaatctattattttatttttttgtaaaatttcaaaaaaaaaaaaaaatagaatcttttattgagtaatcaaaagagtgacccctccctccaactagaagcttatgtattaagtttattattttatttttattctcaatttattttttaggttaccattataattgggaatagcttcttaaaggcttattgtctatattaagggtatgctaaactaatttatggcccgcaatattagctttgcgacttacataagaaagagatgtcgctaaacaataaaactttaatataagaaaagaaatttctttgaaatatttctgtcccaccaacatatctgcaaaagaaaagatagatgaatatcaagttaagtaaataataaaatatgaattttttttattataatgtgataattataatttatctgtaaagtctctattgctgagagtataaccattatatctgattacttttcagacaaataaaatccatcttaatctggtacattgtggatgactctaaagccatcacaaagggcaacgaccctgagaagatcctcgtgataggtagtctaacatcttgggcccgtcttaatcatatccttctccttggaaaactacataccaataaagcctgtaacacaatttacccattagaaaatagtcatcagtcatgaatcctttcaataaagtttatgatatagtaattttaagaagatgaattgtaatgaaaaacttatttcattatgaacaccccacccttgaagtgcttctcacagttcttgcaagtaaccgaagctagcaaagcctccctcgcagccctggcggcctccttttgagtctgctcctggaactcgcgcagctccttcagctgaacagtcatattggcggtggtctccaagtcagtttgatgtaactcttcaagagacttgagcttcacagagagttcctggatttcctcccgagcatcctggagatccttcatgcctgaggcgattatatcatcttttgccttaagcgcctcttgatggtcccgctccatgagagccttctctgccagagcatcgttgcgaagagcctccacccgatcctccgactccctgagttttttcataaccccacccatgccacccaactttaacacggtgaat

SEQ ID NO: 23004 - DNA, 1753 bp, Cannabis sativa
aaatatgacccgaaacttagactaattttagcctaacaccaagatgggcttatatggccggccaaggtttaggcataagctggccggccaatggtgacttccagactaaggaggggcctattcgactaaggtaatttgacctctgcaagtaaaagttgtacaaaggctggccaccaccgatgaaggttggccaacacttgcaaaagttggcaggaacatgacctgtcagaccctagtaggaacatggccgaccagaccctaacctacagatattatgtggtcagctagtctgcacctagcaggtgcatgcttttacttggtaggcctttggtatgcagccttcatccgtggacagtaagttaagcactaaatgggccttgacatcccacaaaaataggtagaaaatatcaacaacttctctattttcaagggataatttggtcatttaaggtttattaattaatcatgtaaatctagctttattgacccctatttttaagggatattggcggttaatctacatgtaagctctactatataaagagcattagcctaaccctaactctctaagtcttaaatttccaagcctcactaagctctcaagctctaagtctgaaaccctaactctctcttctcctctcttctatacgctccatggctctctctcacttgagatttgcctacttgatttgtatattgttatcttaagagagctactgtagattccacaatacttgtgatctatgtagtattatttttggcattaatacaaccaaaatggaagtaggtcattacccgctaactaaaggggtcgaacttctataaaatctcatgtcttacttacttttttattttgattgtgtaacacatggcaagcatcagtaataaatacgactccactgtcggttggccaaatttgaggtcaacaatcattatctactaaaataaaatattagccacaaaaaaaaaatagaaaatagaatgagaatattcaccgaagttcttatcgtaattggaagatcatcaaaaaaagtcatcagagttgccttcattactgaaaaggcaccggagttagacatttgaattgtcaatggtgttagacgttggaatttgacacacacaaaccagttacaataatcaactagtttaaactataactgagaaactaattatttaaattaaccgaattaaaaactataatgttagagccagctacgtaaaataacaaaaataataactaaatacagaaacaagttaccaatacaacctaaaacaatcaatagataaattgaaacgtaaaaactagtttcttataaaaatacacgaaccagttacattagataactaattgaacaaaactaaaaactaatatagaaataaaaatataagaagcctaaaataataaaatgatatatttaaacacaaaatagttaatttaatttaaaaacgtatagcatactacaagagaattcttaacatacaaataaatttaaattagtgaaaccagttatgttaaacaaccattaaaaagtgacacagaaaaattagttatgtaaagtaagtaaattacgtagatttgacacagtaaaaccagttttctaaaataacaaaagaaaaaataaaacttaaacctcaattatgtaaaataacgtacaaccaattaaacacagaaaccacttatctagttgtaatacccggtaaaaatatacatatattttaaattttatttgttatacaatttgtgtgagaataa

SEQ ID NO: 23005 - DNA, 3953 bp, Cannabis sativa
agctcgctatcaacttgagcattacaactaaactggaaacgcataaattagacagaatttgatatataaacatttttcacaatactattaaatagaactaatattctcaccgtgatattagtgaaatatcaagcccttgcctacttgtctgaatgtccccttttagctttacgacgtgaatggtgggcattaccatttctaactggtttctttgtctttttgctgcagagaagacacatttaataaacaataagaagcataaagacacccagtccatgtttaatggttactaaagacgacaaaaaaaaattactgctaaaaactaacccaaaaatggatgtgaaaattctgaacagaatgatgataggcagcgccaataaagctgaggcctgaacattgcattaccagtgaacgaacagaaaacagacattggagaatgaataattgagtagaaaatagctaaaacacgcgacttgtatttttaaaatcaacatatacataccgcaaaccactccagctccttagtagcaagagcttttgtcagttcatgttttttcagtgtctctttgacagtgtcttgaaccttgatgagagaatggaaaaaactattaacttgattgaacaaattaaatagcttaagcattacatatacatttttaatatagatcagtaggcacagacaatagttccaaacaaacaggaagtacagtcagaatagcaaagaagctacagttttcccagaaaatatactttccatgacactctacttggaagactacacgtgccatgctcataataggaaatatataataagaattagaaagtacacattaattagaaataggatatgaatatatttgtgaaacacttctcaatatttctaaaataggtaactttaggaccaatctaattgtattcttattaagagattttaacaaaatagaagcattacttaaaagaaaagaagtaatgatatgtgcgcacataaatcacacacaaatgtgacacacacctatgtgtcactgtcaagtcacttcaaccaattatttctcacttatcaaaagtgacttgccacataagtgtgtgtcacatttgtgtgtgttttatgccctaactatagttgcctgctatataaatatatatatatcatctatcctaacacaattcttgagttaccaacattaagggcatctacaataatcgtgtttaatagttacactttttcatcaacaaagcaataattatcatattcaagttttttctgatgcaatgaagaattgactaacttgatcagaattcagagtataaaaaagatatcatagacttaacacatgaaaaataaattaacatcattcaggaccattttggcatagctgcactgtggaaaaaaaaacaaatgtagttgtgctgtgagaaaaatctgcactgaaactatgctgtgaggaaaagttgctataactatgttgtgaggaaaaaaatcaactgatgatgtaaaagaggatattcaacaggtacaaacaactggcgtcaggcagtggcaagagagaagagaagaaaattaccaaacgactttttatctatagcttattaaaaaagtgcttttagcttacgtagaagctgtgccaaactggcactcaatgaggtaagtgtaatgataaagatagaagcagcgccaaactggcactgtcaaccagagatgtgtaaaacagaatacaataatcaagtttagataggttaacttctacaaaaacttttcaatacctggtggtggtatgtcgttgcagattgtagaaacttgccataagcaagaactgcttttttcgtatagggtttcaaaacctcgtgtgctttttcaacgtgaggctttgccacagtagcaacctgatcaatatatggtttgctgtgctttttagcttcctgtcaccaaaatgccagtcaatatacacttgttatttgttagaagcataaataaagtataaacaagagtgtgaatgaagtgaagaacaacctgaaagtatggatcaacaaattcttgtgctttcaagacatgtggagctaatgtacttttcgaaatctcataaacttcaatagtttttgaactgagcaattgcagatgtggttcagcagatgaccttatcaccaaccactgttcctttatcgaagggataactttctgtaaagagaaattcatgtctattagtatggaagtcaagacatcgtctgttacaaacataaaggccacctatcaacagcaaccttttccccaacccatacaacagtgggaggggggagacgaatacagaatggatgaagcctaacaaatatttagtcatatgtgtttttcagtatgaggctttatagtacatatgcctagcttacatgctatttaatcatacatgtgtgtgtgcatgtactgtcgaacaatacaagttaaattataactccacgagtaaaataactacaagtattccaaggctagcaagattcgtatgcatattatataaaatgctttactactttttgactgtataagatgtccaaataaaatatggattttatggaaatgacatgatttagtgcagaaaaacataacatcatgttgcaaaaacactagcatggaaaagacattgattgtccaatgtatatattatgtgtgtgaaaagaactagcttgttcttaattagagcctggaaggattgcaaccaagcgttataattgcaatccagagaaagaggatgtataaaaaagatcttacagtttttactttctccaaatgcggttcagcccacttttccgcttgagattttttctctagagcctagagaaagcaggaaacatgaatatcaccattcaatatatcaaggggataatagaatctataactagcattaaaatagtacatgctgcatccaattatattaccttctggagcacaagttccagggttggttttccatgcagcttccagtgagtctccacaactgactgcaagattatattactttaacaatatgcatgaagaggtgttgctcgctcactcattttaataattataaattaaatagttagtgtcccggtgtgtgacagtataccttctggtatggtttagtagtcccagtgtgtgacgttggtgtttgtttgttgttttgggtagtttaatggtcctagtgttgacgtcgctgtttggtttttctgggttatcatggcgtcgagttcagaagtacgtgagttggtggacagtctagtggctattcatcttgaagaagaagaacaaggggctgtcacttatgatgaggaggaagagttcgatgctcggtggtgtttagtcgtgcagttgttatccaatattccggtggatttcgatgcgtttcaacatcgtatagcggcattatggaaacctagtcatgggatgtatgtcaagcagttgcagccaaacaagtttgtgttccaatttaatcatgaacgggatattacccatgctattgaaggaagtccatggacttacaatcgagtacaagtgataattgagaggttgatgcctgcgatggatctgagggctttacgtttgaatactcttgatatttgggttcaagtgtatggattaatgtagtgttcgtgacgaaagatgttggtaagtatataggatgtttaattaattctgatccaaacaactttattggaggttggtgtgagtagtttcgagtgcaggaaactgaatatcaatgttcctttgaagaggaagatgaagttgggaaggaaaggaggggagatgttctgggttagttttaagtacgagtgagtgcccactttctgttttatttgtggtgtcattggtcacttggagcgcttctgtgatagtaattttgacgcgctttcgaagaatatagtcaagccgcatggtgcaatgtttaaaattgcagatttaagccaacccgtttttttttttttttttt

SEQ ID NO: 23006 - DNA, 4291 bp, Cannabis sativa
ttcttatgtaagttaggctattaattattttgctatatttattatattgtatgtcgttttgcattctgccaatagtagtattttgttgatttaaaatatataatatgatatgttgttaaattagaagtgagattcaatttattcaagatgaattaatttgcacttttactatatacatcttccagttttaattaatggtgtagaattgtaactgtgttttgaattaatatcggtattagaataggacttgcgtaactactctaccttaccaagctctttatttgatcatcccctttcactcaccattttattaattttcattcattcatatttctatttttttaactaatctttagtggtaatttactaccgcgaccgcagtgtaattaattgggtgacatcaaatataaacttagatttcctattgaaaatgaaaattacaataattaccatacatgaactcaacaaataacaaaccaaaaactttgtcactataattaataaatttggacttaaaaattgattgcagaacaactgatatggagattaaaaaatggcttgcacaaactatgaggaaaccagagtgaaggataaaaagctaaaatattttcttattatttgttcgtattattcaattacaatgtacaaggtacatttatatatagaccaagacagggagttgagttagttgtgtgattaactaactccggctgaatgtagtaactaactcgagtaacaaacttaactgattctaataggtccccttaagatgaagtatatatattagagacattcatcttagatacaatgttgttaaatggagatgggagaagagcttttgtaaatatatcaactatgttatgttgggaggagacatgaagtagtttaatgtctccttgttgcactttctttctgatgaagtggcaatcgatttcgacatattttatgcgttcatgatagactggattttcactaacataaattgcagccgtgttgtcacagtatagatatgcaagtttattgtgagtgatgtcgaagtcagtgaggagagtaaggatccaggttacttttgaagtagcatttgccatgactctatactcgacttcagcaaaggattgagaaataacttattgtttctttgacttcaggatatgagagattggccaaggaagacacgatatccaaatatagatcgtcttgtgtcccggcaacctccctagtcagcatcagcaaaaaaagataattgaacattggctgtagacaaattggtttctgcataggttgaaagtgttggggaggagttggcaaggaagaacagtccttgacttggagttcttttgagatattggaggatacaaaatgcaacctattaatgtggtacccctgtattggtgagaaattgactaaggtgattaactgcataagacatgtcaagtcgtatgatagtcaattaaatgagctttccaattaagcttctatattatgtgggatcttagacgagggcctctttgtctttgcttaattttagatttgacttcataggtgtagaggctggtttggctgctatgtagccagtgtcttggagcagttggagtgtaaagggtctttgagagatagagatgccctattttttttggctatttcaagaacaagaaagaatcgaaagaaaccagtgtctttgagtttgaatttgttgtttaagaattgtttgaagtgaattattgctgagtcattactgctggtgacaatgatgtcatcaacatatatgaaaatagctacaaaaaagtgggagttcatttaatgaacaatgagtggtctgatgaggatttgttaaaatcttcactaaggaggttggtgctcagttcggcatacgactctcgtgaggcttgtttcaagccatagatgttttttttctagcttgcaaacagatttgggtggtggtttatagcatggggggattttcatataaacttcttcatgtaggttcccatgaagaaaaaattattattgatgtcgagttggtggacatgccaattattcattgcagtaagtgcaagtaggatttttaaagtattgagcttagctataggagcataagtttgtaggtaatcaataccatgctgttgattgtaacctttagttactagtcgggctttaaatctttctacttcccctttttggctgtatttaaccttgtacacctatttacagccaatggctttatgccctgggggtaatttggtgatgatccaagtattatttttctctagggcctctgtttcattgtccatggctttcaaccaatgtctaaattgggaagctttatcataggattgaggttccaaatgagaaaatgaagcaagaacaactgctcgaaattgaggactgagattggagtaggatatgaattgttgtataggatgtatggtggaggctgtataacaaacatagttgtctaagtgggaaggtttgtgagatatgtgaccagttttagttctggtgacagcactatcattagttttgttgcttgatgcagcaatgttatcatttgtagtgctggtttcagaattatgattagctgtagtgctggtaacaatagtgttatcagctttagagctgtttatagtaaggtcatctgttttggtgctagttgtagaaatgccatttggtgtgagaggagtgtgactattattggagatgttggtgtattctggtaaaatagttggttaaaagaactagtctatctcagtggtggatgtataagataagaagggaaacatattttcattaaacactacatctcgagattggtagatttgttttgtctcaatgtcgagtagtgtataggccttcatgccatgtggatatccaatgaagatagaagcacgacttcgaggtgaaaatttgtgtcttttagagggaagtgtggcagcataagctaagcatccaaaacatcgtaggtgatcatagttaagaggtttcttatggagaatttcataagatgtgatacctttgaataaggcagatggagttctattcataagataagtgtccgtctgaactagatagggccaatacacaagtggtaggtgagatgggaaggataaagctcttgccaattgagaatgtgttggtgttttcgttccacaacaaattttcgttgtgtgaattctatacaagagtgatagtatgtgatgccttttaagacataaaaggattaaaagttaaactccttggcattgtctaattagacagccttaatggaggttaaatattgtgtgcacaccaggtgatagaaagctggtatgatggtttggaattcagatgttattttaagcaagtaagtccaagtgaatctagatttatcatcaacaatggtgagaaaatacttataaccttctgtgctaatgatatgaaaagggccccagatatccatatgaataaaaaaacattttttgcaaaattgttgttttagataaaggctaatcttctttgtttagcaagatgacaagttttatagtgttgttcttgggacacttaaaacctaggatctaattttttattaaaagtatttgaaatatacattgaagggtgaccaaggcgcttgtgccaatggtctacattattgtaagaaaaattaaagctggattggctgaggaagagggctcttgctgcagaatgtagagctttccttgcattttagctgtcccaatcaccacactcagagaatgagcctgaatgatacaagaatcatgttgaaaagaaacactattagttgtatgatcaatgtagtctgtgatagaaaaaagattgatgttaaatgttggaacaaagaggacattatgtagaataatggactggtttatgtgaacagtaccaatgttctgaacttgtactttgatgccatttggtagaataaaatgtgtttggatgtgaaatgttagagaaagaagagaaacaagaaatattcgaacacatgtaatgtgttgctccactgtcaactatccaagatgcagaagtgttaaaagggattttaccagccatgttggatgctgtaggtgcaggaacttgatcaggtcttggggcagcttgactgagctgttggctgagtaaggaaattagttgctaacactgagctgagagatcatcattagttgaattgacattggcgtcaccagaagtgtgagtagaaaagacttggttgttagtggcctttcttttgtctactttcttcttgtctccatgtccagggggaaagctgtaacgccctaatgctaaggcacgctacagt

SEQ ID NO: 23007 - DNA, 2923 bp, Cannabis sativa
aaaagaggtatgtttcaattaaatataaaattagaggtagttttggttaattgataaatcacaaaggtatttctcaatatagccctataaagtacgtcaattgtaatttaaggggtaaatgcaaaactattgaagataaataatttaggttttttatacttgttgcataaaaaatttatgatacaaaatatgataattttagtaaaaagaaaagtttaaaatatggtaactatacattataaaaataaatgactataaaatataatcaaaatttctaaaatactattttttttatgttttatttttaattttatggcttaaaatttttaattacaaaaatacacttataaagttttaaaattacaaaatacgctttactaagcaaaaagtaaaaaaaaaaagcaaaaaataaaaaaaaaaaaaaaactaaaatacaacgagtaaaagtaatcaaggacaactataaataaactataaaataacaaaaaataaccagaagaacaacttcatgacaactataatataattataaaacaaccaaaaagttggtttattatttttactaaagaggtatttttataaataaaaaagttcatagagtaaaaaataattttttttttttcgtattgatgtatttttataatttttttttcaaatatttggtctattatctaaatttttcaaataactctctaagacacttcgttatttctgaaagcaatgacaacctctcaatggcacccttctcatgttatttgaaaaacattatttttgaaaatgtcaatatataattttactaaattttagtaaaacacaaatataacagtctccagcaacaaattgtaattctgtcacagcagaacacagatttacagaatcaaaccaaactagaaataataaataaataaatgcagaatttaaaataacttgacataaaagaattatacttggtataagttttctttcaaacactcttagtccacgggaccacgtctagagaatgaaattaattagtaaagtctcaaataattacaaatacaattgacttaaagaagtttgaactccctctaaatctttgccgcaatcctttgcaattcacttcacgaatctgatttcgaaacaccaccaaacagtgaactcccttcgtctttgatgagtgagtgcatactttctcccgaagtaaggcttcaactagtcttctccttaagacatttctcttgttcaatcaagttcttcaaccgatcctaagagcagtataagaacaataacataaacactaaaacctagctgaacaactaggttctcacaaaaagaactctcttcttacaaataaaaaataaaaataaaaataaaactagattaggtaaatcgtttagcggctctctaggttctatttatagaacatagcaaccctagagacagctacaaaaacaatttcccaactgtacaaaactttcttaaaaaaaattctgatttacagcattagaatcggactctacagcaacagattaggatcagaaagaaaactttccaaattgtaccaagatcacaaatttggacttcaaacctgccaaatacaatttatatgatcttctctaaacaagggaaaaccgaaatcataaataagaaaaaggaaaagtcaagtttcccaaaagtcaatacacaataacaaatgaatagattctaatcttgctactgaagtaaaagtttcatcaaagtcaataccttctacctatgtatagccttgtgccaccaatcgagctttgttcctcacaattgtaccaaattcatcacttttatttttaaagatccattttgttccaatgacattcataccttttggtcttcgaaccaaaatccaaaccttgttgcgaacaaactgattaaattcttcttgcattacattgagccattcttcataagtaatggtttccttcaattgagaaactcaaaattcttaaaaaattcaaaacctaggaaaaattatcgatgaaccgtagataaaatatcgatatactatcaacaaactcaaaacttaaaaaaaaatcaaaacctaagtaaaattatcgataaaccatagataaaatatcgatatcctatcgataaactcaaaattcttaaaaacatcaaaatctaatcaaaatcatcaataaaccataaataaaatattgatatcctatcgacaaattaaaatttcttaaaaacatcataacctagccaaaattatcgataaaccatagattaaatgtcgatatcctatcgacaaactcaaaattcttaaaaaacaaaacgtaagaaaaaattattgataaaccatagataaaatgttgatatccgacaacaaactcaagacatttaaaaattaattaacaaccacaatctcaaacaaatccatcgacaaatcacagataatatgttaatttcctatcgacaaacattacaaaaaataaaaaattagttaagctaaaactatcaactacccaagtgatttttaatcaatatcatatcgataatactgtaaaaaaaatacacatactacataaacaggtttaaaagttcaaattttcaccagaatgttcacaaattttagaacaatgaaaactctatttctttttataaaaaaatagtaccttttcattcagtttagtggttgttgtgttggcagtttgactgagaacgacttgaggagcggtggtagcgcgcatatgtgtcaaatgggtttcatgggtttcgtggtggtaggtttcgattgggttttggatggaaattggtggtggggtgattttagcccattgggcttctcagactcagagttaggtgggaaagtgagagaaagcgagattgaggaagattgagagagagatagtggcactacgaaaattttacttttagtcacaataaaatttgtgattaaaagtgaaaa

SEQ ID NO: 23008 - DNA, 2616 bp, Cannabis sativa
  modified_base (759)..(761): a, c, t, g, unknown or other
  modified_base (2070)..(2075): a, c, t, g, unknown or other
ggataagaatcttccttcccagctttgtattctcttttgcattttctcttttagaaaccccaatattgcgttcttgtttctgcccatggtacaaggaagaccaaggtaagttgagttctcaggagctatctccatttgaagtagagaacagatgcgatctttaactgtttcattggtgttcagactaaagaaaatagagcttttaccaaagttaacttgctgtccagaagctgactcaaagagttgtaacaatctcatgatattagaggcttctatctcagttgctctacaataaatgtaactatcatctgcaaacaataagtgagataggataggagccccattagccactttacaacctcttagatgaccgagtctttcaaaattggtaatcagtgatgacaagccttcagcacagatcaaaaacaaatattgatattaatttaatattactttgaaaatatttttcattattatttatgcattaaacttattaaaagtaaaaaaaattaccaaaaaaaaaaaaattacttaaataaaattaaaacaaccacacaatacacaatattattttgaatcaaactaattcactcttacgtagaattagtttaaacatttaattagtctcgtttgattttgattttttaaaaaaaaaataaaaaaaaaacataatattaatttggtttgaaaaaattaaaaatttagaccaacaaaaatcatcttactttttgagagtgatgtttattattattattattnnnattattattattattattataagagattaaaatgtttattaaaattagggtactagtaaatttacctgattccaatagactataaatgagtctataaagatagaaaaaaaatacagatgacatcatatatcagttaaggaacaactagttactaaaggttatcatcaacaagtaggttttgacttgaatgaaatttttagtcatgtcataaaacatgttacaattaggtatgttctaactattgcaatatcaaaaggctgacctatatgataactcaaaatatatgataactcaaaataacacattcttaaattggagacctacaatagaaaatatatataatacaaccccttggttttataaatcaatcatgccccaccaagtttgcaagcttaacaaagcttcgtatgacctaaacaagttcctagagcttagttcaagaatcttgactttctttcaggtcaaaatgatcactctttgcttgtcaagactgcatcctacactctctctatgtactagtatatgtagatgatatacttcaatctctaattttttctcaacttcgagtaaagctttaactttgaataatcttggtatctaacatgactttctcatcattcaagctattctacatgccaaagaaatcctgctttcacagtaaaaatacatccaagaccttctatgtaaggctcaaatgcaaggcgtcaagatttaaaattttccaatgaacttgctcgtatactctctcattatggcaatgaccctaccctttacagattcatagtttgggttctttaatatgcttgtatcacttaatttggcattgcttcagtatcaataaagtatgttagttcatgcaaaatttccttcaatcatagtggatagcagtaaaatgaatattaagatacttagtagttactttaaattatggtctacaagtcaacaatgtgtcttctctacatcttcaagcatattgtgatgttgattggacagtgcccagtgaaccctgatgatcgaaggtatactacctactattgtgtttttcttggtgaaaacttagtagcctaacaatcaacgaaacaaaacattatatctcgattatttactgaaactgaatctagaagtatggcatcagtggtaactaacttggattcaatcattacttacagagctcaacatcaaatccacactcactctcgctgtttggtgtgacaatttaaggtggtgtttggtcggaaggaataaagatatagaaataggaatgagaatgaaaataagaataggaattgaatgaaataaaatttaaaannnnnnaaaaaattgataaaaaaatcattaaattttttctaatgttacattagaatggtctttccttccaattctaaaatgcaaccaaataaaagaattaaatgaaaattatttgctttgcgttccattccattttattacctccaaccaaacgtcatttaaattctgtaatgttggctgctaatccagttttacatacttgtacaaagcatattaaaattgatttgtattttgttagtgacaaggtgatcaacaaagaaatacaaatctctcatgttcctgctatacatcaagttgttgattgtctcactaaactaatctctaacaatcaatttgctaaacttggcgacaaactaagtgtcatgtgttcaagttcacttagtttgagggagaatgttaaagaaaatgaaacttagttgtacagagtctgttatgttagttatcaagtactgttaagatctgttagttacgattgtctagctcattgtctctaagagattgtcctacacttgtatagatattcactctgtattcttgaatcaattaa

SEQ ID NO: 23009 - DNA, 2181 bp, Cannabis sativa
ctgcgccttttgattagtaatcccatttaggggattagggtttcgtaaataacttgggtaacgtgcctaattatttagggcgttacaacacacttgcccgtcctatttgagttcattaagataaatattacaggaaattttagtacttcttttgatggatgggcctccgaaaatcattgcgacacgatcgtccacctggggttgagcagcacttggagggtagtggttccctggtccaggagtttggacatttcctagtgccttgacatttatgaccccctgaggggcttggattcccagagcttgtaggtaaatcgctccccgagaagggtttatggctttatgctgtctaggaatgaccaattttccttaggctaccctttgtcatgaataaatgattgggattctaacccactcgtggagatgaccattctttatgagattcttgatctcattcttcaagtaattccactcattcgtaatgtgcccgaaatcaccatgttactcgcacctcttactaggatctctattatgcctacctcccttttacatcagagggggctttttttaatgaactatgttgcatgtttccttgtagacattctctcgagtgtcgatcaaattagtatactcaatattgggcctcatatcatttttttcagagcttcacttctactttgagtttttctgtttctcttgttttgggactggcttacacctaattctggaacttccacttgttggttcatctgaagctgctcgggagcgacactgtattcagtttgtgttactctaaaaccatagaaacttttctattggggtgcatacccagaggtagcaggtttatagacggttggtgttgtgtactgggttctgtgaggcagaatagacggaatcaagaactacagtgtagaactactgacgttcattgaaggtgctagagccactccaaattgttgagtgtaagcctcttcaagactaataaaaccttgggccgttgtcaaaaagtctgacaaagtgttagacctttgtctttgcatttcattccaaaatagggatcctgctaaaattcctgactgcaggaccactagcttcatgtcatcattgactttcatccttgttgttgcttccataatttgctaggtataagctttgaggctctccctaaattgttgcttgatgtttgtcagcaaactgacctccatgtcaaagtccttggtggctacaaactgcttttgaaacatagattgtagatccttccagttttggatagagttggactgtaaccttttccactagtatttgtacgatttggacaaggtcaatgagaagcataaacatttcccatcttcattgacttgcgccgcttgcattaacctattgtacatggataagtgggccctagggtccattttgcctttgtaaagctccatttgcggtatttaaaaattctttggcagttgtgctttgatgattctctttactcatggctccggatcctcatctttcgagttggatacagaaccactttgtttccgagccaaatggttcatgacttttgttaatgtgactatttgatcatctagctacctggtatgatcattcgagagctcacgtccacggattccatcgttgatattgtttctcaaatcgcttatgtgttccgctctttgcttttttttttctcgcattcagacagtccttaaggcccgttgttgacatgttatctttcgggtctagatcttccacatggatgctctggttaatagaatttctagggcagtttttccatccccgaatggttggcccttgtacctgagtactcgacctgtcattctgcacgactctgcctcgcggattgattagttagcctagccctggggattgagcatccctttctttctgctgggattggtcagctgcttttctattgttttgtggagcattgctcatgggtcttcacggaggggcacccattacacccttccctttatcatttgttggggtagagggcccaactccaggatggttaagtttcttagcaggagggttttcctcggggaggttagcttgagcttgtagctatgtaagaatttcttgcatccaacatgagtcttcttcctgctccgctaacctcctttcggtatctgcaagctcttgctggaatcatactacttcagg

SEQ ID NO: 23010 - DNA, 3183 bp, Cannabis sativa
aaaactttagatacttatgccgctatttatactgattttttttttttttggttttattttaaaattggaatgtgattctaataaaatagtttttccattaatagattgactattccatcttgaaatagaaggaaaatatatttcaatgcaaaaaaatttaatacttcttttgtcaatttttttcatacattttaaattttatatcccattttattctttttcttttattcttgttctcatttatatttcctatgtttttattgtttccaactaaacgtcacttaatgtccattatatgagggaacaaaaatttgtagaactttccctaagtaaaattgaaagagttcttattatacttgagagcaagcgtgaatgttgagaagtagggtatatgtgaggttgtttgttaatagggaagtaaacggggcggcgtggggccagagattgctcccccacctcacacccacatcctaaattcacctcatactcgctcccataaccatttaaataaaagaattattacatagcaaatataaattgatactttatttacaaaaatagttctataaagtgtggacaacatttatactttttatataattttaattaccaaaataccacttacactatcacttacacaatcaaacaatggttacagggtggttgctgcgtggttgcgtggtagttgcacagacgaaggattcaatcagatgatggttgctgggtggttggccgaaggttacatcagacgaaggtttcaatcagacggaagtttctgggtggttgctgggtggttgcccggaaattgtatcagacaaaggtttcaatcaaacgaaataatcgttagcaaaatgtttatgcaactgtaatgcaactgttgtgaaacattaaaaatctgaacaatgtttccatgtacgtaactctgtctttatgatttaatatgaacaaatttagtattaaaaatttggaaaataatgaaaatacaccaggataaatattttactatagtattgatgtaatttttttttttggattatacttgaattggattgtttgggaactccagttcaactttttgagatctgcctttcatggatttaaaaattgaagtcaggacattagttttatgaaaattaaactggatttctggttgaattttagtttcgtagtagtttttctacactttttttatgaattcaaaacagcccctgttttgattgattctggttgtcttttcaggtgaagttgccggaattaatggtggttctctttatggttgaatttttatttcagttgtgttaggttgcgttgttgcgcgatagttgcccagaaagcatggatcctaggttgaaggtgtgtaagtggtatttgtgtaatttattttatttgagctgtatatttgttcatttggccagtttaaaatatttttataatattgttactttttttgttgttaaaattgaaaaaaacaatcctagaaaaaaccacataaaatttgatttttttaaaaaaaaattaataaattaacaagttgactgagtgaacctgttgactcgaccaactcgaacccgtagacccgcaaacctgaaccatttcacgggtcaggtccgggtacaattttttgaacccgcaaacccgaaggccacgaagccaaaccaatcaacccgcctgatgttcacccgtaggacctttgtattaagtttgcttagttggataaagaaatatggtttttatttggtcaatttttgttgtcgtgtttcattattcatggttgccaaataaatgaatgaaattaatagtcaaaagtgttgtaataaggaacgtgttgcaggagtacattgaatctataattttaacgaaaatctatagattctcaaacatatttagacttaagagggaaatttcctataattactatgtctttgattttttttttttttctttccttttcattcattcaagttgaatcataactatatgaacacttcaaaaagaaaaatgtaaatcttttctcttctatgtacaacaatgggccgcatctaaatgacaatttggagacagtatagatttaccacgtcttgccttctctgtttttgaaggatttaatctcaggataaaacttccagtgaaaagatgattcaacaactagtatcaagaatgagtaaatatcctatactcaactagatttccgcttaatgcaagtagagttcttgtccaggtgtccagtgagctctattcaacaagcttcccttcttgattctacttttcttcttcagccaaacaaagttctcaatttggaacaagaaatttcctggactccggtttcatgttccaacgaatgggaattttgacaaattttttcctgccctaagcttttcgaagagatacctgaagaccatattaatggaatttttcactgacaccaagagagttgaaaaccttccagcaaattagctgaatcatcacacgagtccccggatttgataaactccagttgcgagtagtgcagcatgttatcaatttaccctttaagacattagaatattttcaaaattttccaagcctttcagaatctccatttgatgcgaagatgctgtctcacatgatgctgagcctcttctcctgttaaaaaatttcagaaggattctgccaggccaaggaaaaaaaggttaagtcaaagttaacctgatgttatgcaaacattataaaagggtcaccaagttaattcaatacaggaaagcaatccaaggttaaccaaagttgctttgatattatgcattttaacagttttgcgaataagaagtgagagcagagtaaaacattgtagatgtcaacctggtgttccagatttagcttttactctctgtcatttcagatgtaaccccaaatttcaaattacttgtgtagcatatcatgaattcacccatccaattccctaagaaagtccattataagcatctgaagctacacctgagttcctggctaatgagaagcttaacggtacgccaaaatgtatatgtttttgcaaataaaaaactttggttttcttgaataatgttacccttgaagaattgtgtaatagaagtaattctaagataccggcactggttagagtgacaaggaactgaccttgatggtattaagaaacaaaattcgataatacaaaaccagtcactaacacaa

SEQ ID NO: 23011 - DNA, 3507 bp, Cannabis sativa
  modified_base (2358)..(2359): a, c, t, g, unknown or other
aaaaaaaaaaaaaaaaacttgtgccatgaaatcagagcatgcaagaactttctcaatctaaacatatacaaatacaagaattatatgataaaacgctttaaagaatattaactaaattctaattaatataagagaactataacctttataataatatatatagattctttttaaagaacatccatggactgcaatttcagctgtagaaaaatataataatacatattaatatgattattcataaaactaccatgcatgtgaaataaacatattcaaaaactagtacatagtctttagcttgttattaaaatcatcaatataagaagactcaaaacctttcctattaatcttttgacgcaacttggcaaggttggccctaatccctttaccaatttcattgtcttcttccatgacagtagtaatcgctttgcagacactctctctagtaaacaacccttcttcttcacttttctccacttcaacaccaaccttcaatgtgtttcccattagcctcgcactatgaaaatgatcaaatcttttgggcaacaacacaagctcacacttattaaccaatgcctccattagtgaagcccacccacaatgagtaacgaagcacccaatagatgggtgcctcaagatttgtggttgctgaatccaacccccatgaaccacccctctcccttcaattctctcttgaaaaccatacggtaaagcctcttgaatggagtcaatttctaaaggggctctcattgcaaccaaaaatggcaacccagaaagctccaaacctagcaacaactcttgaaattcatctttggttaatattacctcacttccaaaaccacagtatattacagagttgggcttgaaatgacttaaaaatccaacccattttttatctaaaggatcgcttggtgggtcaggtataagtggacctgaaagtaaaagagtcttcttaaactctttttcaaggtaatcgctaaacgggccttctatctccctacaggacctgaaccccaaaacatcacattccattaggcttttaaacaatcgatcgcaaaagagaatgttgccatcaggcttaacattactcacgaaaagagagtcccgtgcctcatgaaagtggaggtaaatcgatgaatcagggtaccccggtggaggtttcatcaagtcagactcagtaacttgttttcccttgagcttgttgtaagtagtaggggataaaccgtaaccaatttgggcagcacccaccactgaataatacattgatttgatgcccaggcggcgacccaacttgggaatccaataagaaaaatcgaaaaggatgaagtggggcttgagttttcgtagaagaagttcgatgtcgttttctgttctatccatggcggtcatgaggagatgtactgaagaaaaagggacgtcgttagtggtctctgccccagaaggaagaccgtccacgcgcggaatggtgattggataaatggttatgagatctgggtatcgattcaactgcgcctctactttgattttggtttttggtgggattatgagagagattgtgtggcctttttgagctagtttgttcgagaggtatatgtatggggtaatgtgtccgaaagcaaaccaagggtacattgctatgtgcatagaggaaactgacttactttccatttttgaaatttgatatatattttctcctatgaaatgaacaacattaatcagcaaaactcagtactgaatcaagttgtaatttgaagtaactagagagaaccaaagtaataatccaacatgattttcaatggtacaattatttagcagctgaaagcaccgacaaagaattctaaacaatatttacctttatgggagctaattctgatctaacgaaagagcaagcttttgttggaaattggagaaatgtaaccgccggtgttttacggtgtctttactgttttaatggagaaactgtttggaaaatcaccggcggtgtggtttgaagttatgtaaattattggtagacgtgtttgtgtatttttaatatatatatattgtatcaacatttgtgttgttactaggatgcacacgtaggggaaatggacagagagtgctcctctcattcccatccattaagaattttaattttcctcccgtctattagagatcgaaatccctaataaaaaataaaatttataataaaaatttaaatgtataaaaatattaaattgaataaaaattaaaatattacacattaattattattcaataaattaattattatctaaaacaatactttaaattcacaaaaagaatactaatatactaaaaaagtacaaacatacattataaattataaaatattattannaatataaaataaaatactaaacggtcccgtcaggacaagaagtgatccacatccccaccccgtttaacattcgggaacaaaaaataatccccgtccccttcctgttccccatttagatggggaatccctttcctattttaggcgggtcctcgcgggccccatccccataaaggaaatgtgcatccctaattatcaaataagcaaattacatgcacaatcacttaactttatttgtttcaatttttatcactgtttttatattctttaaggtatactcacttttataaatgaaattttattataccccttaagttaatgtaaattatatgctagactcaagtagagagcgagagtatattagatagcccactcaaaaaatgaatatattttaataaaatataatataaatgtattttgattaataaatataaaaaagagatatttttcaacttattcctaaaaagtaaagagcgttttaaactcaaagtcccaaattattataattaaaaagttattactgtaatttaatataaattatgtatattttaatttaataaataattttaaaattattaactattctgtgtcacatgaatatggtatggtattaaatattttaagaacactcttaataactctaagagcaaataattcttctaataaataatgtatattatatttccattttgaattatttttattttctttaaatgcttcattatatgtaaaaaaaaagtattattttttctttaatactattttaatatattttattttatttttattaatatatattataaatatgaagatattaaaaaaaaaataaaaaaaaaagggtgtgctataaaaatttggtgtcaaataacaaaaaaaaaagtattttggtgatatgttttaagagacacagtggatatctaaggtgtctaatattaaagagaaatgttaaagggtataagtggtgcctagcactttcctatgtgttaatatcactattggtcctactaagtattgggtcacatatagtttaatataatagcttttagagagtatcgctaaccaatcgcaacacgacatgtcgagaaagtgttaggcaccactggtaatagcaatacccaatattaaatatcaattgactaggtggttcttat

SEQ ID NO: 23012 - DNA, 1802 bp, Cannabis sativa
aacgccttattttcaaaaaaaaaaaaaaaaatcgaaatgacaaattaataataggattcaccttttaatcgaacgaaatcaaaataagctttttttacttgacttgcatgaatcggaatcacaatttatagtaattttattgatatatttacattattttagaatcttttaagttacaaaaatattattaaattaaatgtgcatatgtatatagaacttgtataagataattatatttagataatattataataaatacatttttaaattaataatcatataattttgtagaacctgggatattttttattcaaattttaaaatataaaatttatattaaagtatgtacatttaaaatttaaaatatatactatttataaatatagtaaacatcaatatttagtatattatctattttctacataaaatatattataaattaaattgatcaattaaatgaaaaaaataaattttttaattaatatatatacatatttttttttgttcattaaatatctttgatttaataaataatgcatttatatttataaaagaatattaataatgcattattttaaaatatatattttgatttttctttaaatttatatatgtaaaaaattaataattaaatactagtaaaaaataaaaatgactactgtaaccaggaatgaaagtgacaaatctctcaatattaggagattgtcaatttcattttttaatttcgagctagtgtgagatcagggccgttcctgaaatttaatgagctataagaaaaaaaatatttttagacccttatttagagtaaaatatggtatttttcaaaatcaataaaaaaatatataattttaaaagaataatttttttttgaacccttaagctaagtaggccataagcacaagcctagcacgcctatacaaaaggccgggcctgcatgagatctacgtatttctttctcattttttaacaaaattaaaggaaaaaaaaaaaaaaaaactaaagtaatgcaactcattaattccttattctcattctctaatcagtcaaataaactcaccattatagaaaggctgaaaaaattaacatatctccacgtgagatgttgttaacttgtattaatgcacgtgagtgtgacattattaatttctttttttttttttttctaacaagaaaaagttgcacaataagcatcgctaattgctatcacttattaataatcaatcaattaagtagaaaaatcaattgatttcttccctaacaaaaggaccaaattaatggcatgttctttccaaacagataaaacggttccattaatgccttattgaatcaaacatgtgcatacagccaagcaaattctttggaaccctcttaatatatgtattcattaattaactataatagtcaaacattttaattttatattaatcaatatcaaaatcccaataaaaactactctttgttcagaatctgatactctctctttttctctttctatgatacataagaattattagccgcctaattggttccctttcatcattcaatgcatgtacatatgatcaagtacttaattattatgtaattaaattacatccattgagtgtaataatagctgctcaatttattttaccatgatatagagaaagtgaattgctaaaaaacggtgcttaggaccctaattagtattatagtgttattggtgtaattaaatatcgagtctcatatcactataaaaagtattgggcactactggtgccaaataacaattctctacagagaaatactaaaaggcaccactgaca

SEQ ID NO: 23013 - DNA, 3265 bp, Cannabis sativa
tgtctaactttagcgccataaaactttcttttcctcgcctttttctctttaaatagtgaagcacctcgaaagacaccataatgttatcagtaatgagcctccccggtataaaagcactttgatgctgagacacgatcctatccataatcggttttaaccgattagacattacttttgtgatggtcttgtataacacgttacacaacgcaataggtcttaagtctgccatacgctcaggatttcttttcttcggaataagcacaacattagccttattgatatcattctcaaacttgccacttgtgaaaaaccgctgcaccaacttgacaacatccatgccaacaactgcccaatttttttggtaaaaagccggagtcaaaccatcaggaccggggctcttatcaggatgcatcccaaagatagcagtacgcacttcatcctccgtaaccgtgagcaaaaaagtctcattcatctcaggtttgaccattctatccacacaatccacaaccggttgagttatcgaagaggaagaactaaaaagctgtgtaaagtaatccgtaatgaccatctccaaacccgaattccatgggacatcaacaccctgctcatttttcagctgatggatagagtttgttctgcgtcttgtgttagcagccgcatgaaaatattttgtattttgatctccctccttgagccagaattgctttgctctttgcttccaatacgtctccttttgatcaataactttaagcagctgctttttgacttccttatacctttcaaccgaaacaccatctctcctatgcttcaacaaatcaagttccctcttgcatgcattaatccttcgcttgaaattaccagtaatcgttttaccccattcaccaagcttgtccacacaaagttgttgcttagcccaaatgtcttcaccattagtttcctcccaacaaccttgaataatctgaaagcacattggttctttgagccatgcattctcgaacttaaaacttcgagtccctcccatttggaccggtatctcgggttcaagaaagatagggctatgatccgaagttgagtgatgcaaattgtataacttggcattcgagaacttttgaaaccaacttgagctaatcaaagctctatccaatcgcacctccacccaattttcccccctctatttttctcccaagtgtacggatgaccaatgatctccatatcgattagctcacaatcactcaagacttgcagaaagccttcaatgagtccccttggatatttatttccaccccgtttgtcttcttggcacactatattattcatgtcgccaataatacaccaaggttgagtcgagcgagtcttaagatcacgaaggagattccatgtttgccatcgtaaatgtcttctcggttcaccatacaaacccgtgattctccaatgatctcggctcccacttgtaacaacaaaatcaatatggttttgagaaaagccattaatataaccatcattttgatttttccaaaagaaagctaagcccccaccacgtccttgggcctcaacacaaaaaacaccctcaaagcccaaacaccttccaacccaatccaccctactttaagcacacttagtttcacacaaaaaaataaaatcgggcctcttttgagaaataatctcttttaagaattgaacggtccatgggttcccaggcccacggcaattccagctgaaaagagtcataatccttggcgggcctgtgcaacagagcccgccccacttaagtttttttgaaatgatggtccatttgagttgttagacacgtgatcatccaaaaaggcagcatgtatatcctcttccataaataaatcttcttggacagattccccattaatacctatcgtgaccctccttcttttttgctccaaaatgatttttccatcatcctcctcacttccattctctgtaacaattgactttccttttttattaccattaattccttccccttccacactatcctgatttcccataatcacatcactcccaccatctactccttgatttactcccataataatctcttccgatggtacagttttagtgattaccgccgatctgtctatcgccggagtagcagaagattctcccgacgtcttcaccgccatttcagttcttaaccatcgtgcgcccatagaatgagttcttcgcctcggaggtgccttcatgtcgagattgtaaggcttcgtaagaagatgtggaggagtatcaaaagctttttcgcagaatctctcggagtgacccagcaatccatagacgaagcagaaggttgataaatcctcatatttgaaaatagtgtggcattccattctgttcttcatctgtagcttccttcctttcttcaaaggtttatcaatccgaattcgcacccttactcgtaaatagtctctccacccactaagaaagttgtttagatccatcttcacatatgatcccatgtaattgccaagatccttcagaactctttctgactgaaaaccaacctttaatccatgtatttgcacccagaaaatcagttccaagggaatgatactacgtggattctcaccagattttagtctttcaaatatgagaggaattctatcaaatgtccaaggacttccttccataacccgatctatatccatatcatgataaaattgaaataagaaaaaatttggctcaagttctttaacaaacaaacctcttactgggcgccatagcgatgccattttgtgttgcattgcttcaaagtctatcgtacgatctgtcagaaagcgcccaagaagacaccatctgtcatcaaagtctatcgtgtccaccgtatcattgtcgtacattagaaagccatcatcatcatctcccaaactcattgcagcatattgttgatccatatcagaaacaaacacagtcaccaataatcgattttactcgatcaaataaaacaacaaaagacaataatcaaacaaagactcataagaacatcaaacacatgtcaaaagacaagaccaaatttttattttcatgtttctctttatatcttgaataattgtttttagaaacgagatagatggtgatttccccttcacagctcattaatttcaattttgatttggtttcagttaggaaataatttttacgtttcttcctccccttcaccgctcaataaaatgaataatttacatgttagtatatttctccttattttattttgtattttcacattaaaataatatatttt

SEQ ID NO: 23014 - DNA, 6579 bp, Cannabis sativa
gttattataattaaatggaaaaaaacgtgtccagatataattttccctatttaatatattaaaaccagtcaccaaatattagtgtaatgatgattataaattaaaatatatttatggtcagttagataattacatttcagtactgaatgttatatactgaaaccaaattcatcatatcaatttcctaagataacaaagcacaagtctctttcatttacaattagaaaatgtttaacaatagtattctgatacacatttgtgcacaattagttcttgaaagaaatgtagtttattggtaagagcaagaacaattacaaaaatcgcaagttatttgagaaacttggtaaactccccaaagaataatgatcctaactagccaaccaaattagaagacacaaacttaaaaacactgaacacagccactaaagacttaaggcctaacatattcatattcacaagatatgtagtacataatacaatagagtttcatcacaagaatttggaactaccattgcattagaaacttacttacttagcctatctcttctttccttttaatttcttcttatttttcttggatttgttacctccctgttttttgctttccacattttgactgctacttggtgctgctgcagcaccagcagcaatacttgcttgccaagccgatgatagctcctcatccttagaaaccaactgatcctcagaactagcttccacagcaactccaactgagctctttgaggccttaactttatctggaaacaatgttcttaatatttcatccatggatgtatttgaactcatacttacatacacagcatttggacatgactcgaacggacaacatccccataagttcacaatcaccataggattgttgatcttctcaagagcttcagcaatcaaattcacatttatattttgactgttgtttctctttactccctcgagggtaatacgaaaagagtgtggtagtttttcagttatatggctcttcttcaacacatcgataagtgaatcagtatccctactgatgttgacacaaaccaagcataacagcacaaccagcctagtaactgctctgggagattcccttatccagtcattataaagaagttctaggataattttgcacgagaatggatgtgctagatttggtacatcatccaatccgtggaagctggccaacttttcatggaacataagccattcaacaaatgtggatttggtagatacaaaataaccatatatggaagatgccccaataacaaggtgctccaaaagatacaaaaagcaactaggagatatggagtccttacctgtcttccaattgttgatgtaagtactttctaaagcacttctgagcgaaataagaagaaacatttctgcaacgaattcggtagaaaaaataagacctaatcccctaatgtcgtgtagaaagccaaagaatgacttccatgcatcccacatttcattatggttaatttttgatataatcttctcacagagttctttattcaccttcccagatccaagaataatcatggcaattctttcaatttttcccttcattgagctattccttagactgactgatttggctatgacttggttcaacatactcttggtagtgttggttcctctaagtaaaaacatgtttttattcaatggtatctgcccatctgggaatatgtaattaactatcttttcggtagaagattgaatgtacttcaacagattctcagactcatgacgcctcagcttcagattttttgcatccagaagaaatgttgcaacctcatagatcagagtaagagtcctgcttttgaagaaaatttcatcacagttcttgggtggaaacttataaagagagtcaagtctgttcaaaaccttgacaccaacagaaagcatctcagaacaccaatatgtctgagcagcagaaacaaactggtgtaaatcaatggatactaactttccactaactgatgttgtagcgacatttcttgcccagtccgcctcggggtttagaagaaaaaatattggattcaaactgttgaactccctccaaacacctaaaaaattcaaacagaactctccataatatctgaactcgttaatttcttgggtctcaagacatttaagatattcaagaacgccaacaatctggcccttccaaaaattccaaaagtagaccagtgactctattgatacctggtttttagaaatcatgtcttctgaatgcttcataacatcagtaaccagttcctcttcgcaatagtacttggttcttaaggaaatgtgcatgtccagaatttttctagccgatagaatctcgccagtaacactcctgtacctctgagaagcaatcacctgattcaggactgtaatcaattcactatgttcatttgcaatgatgtcagcttcagtgcaaacaatctcataaaactcgactgtatcattcctggcaaatgttttcgcttttattaagagatcacccttttctttgaactgctttaagggccagcccttcttaccttttgaccaaagggagttggaaagcacataaaaaagaataagattagctgagtctttaaattttccggcttttcccagcagatccaccctgcgtaatgtatcgccaattagcttagcaatatttgcagcttccatgaaattccccttttcttcttccaacaacaaaagttcatcaaagcagcacaacgaattcaagaagttccgaattgaatccatggaattaaactctttaacaaattccatcatggacctcttatctttgatctcaaaataatgagaagcacagctcttcaaaaacatctgttcaattctgtctatttcaatgcctctctctgcagtacagcaaccatttgttggaatttgtttccaacatttaatgtatttcaaacccttctcaaataactttccttttgaacaagctgtaagacattcggagaagaaattccctttagcataaacatcagcagcaagctcatgacaccctgccagagagaaacattccccagcttttcgaagctcagattcaccaaacttttctaaataaatatgacctgtcgaataaaaaaaccaaatattaagaaactattaaaattgcaagattaaagtccactgatttgaagttttattgttacctgctttttcatactctcccaaagcagaaaaacacctggcagcagaatcagctttcccaatagcttcaaaaatttcagcagcttctctgaggatggaattagcttcttcaggatttgaaacgcgcatatgatcagccatagccttgagtccagcagctttagacaatctctcccaatatatatcaccagctctttcaaagcacaatgtagccatttcatagttgtgttcatgaaagagctgttaagaaaaaaaaaaaaggactaaagatacaaacaacaagtattttcaagcataaatattgctactcattgtttaatatatataattaaaaaaaaaaaaaaatcaaaaccttaatgccccttgatctccactcttcaggactgctagtgacttgcatggcctgtgcaagtgaatcatcaagtagtttagattgcacaagacacttcttcttccaatagtcaaatataggttcagcaacgtttgagctttcacaaatccacaacctttgcctcgtgcgtgtgacagcaacgtataattgcttgagttcagaacataaaatattatgtttggagtcggaaaattttgggaagctaggtatggtggtgtcaaaaaagtcttgctctttcatgtattcatatatgaccctccaatgattctttagaagagaggaaccaaaaaaattgtacagtaatacatcctacagaagcacaagaattaacattatgttggaataattatgttgaaaaataaaaaataaaaaattgttaaattgtgtgattacctgaaactcaagtcccttacactccaaaattgtaagtagaagagcttgcttcccaacataaccagagaatttcctttcgggcattgtcatctctcactaaaataacctgctctgcaccaaagccaacaatacctccaccggtctttccattgttgccaaaaattttaatgattgcattttcatcatccccacattgaagcagcaatggaggttccccatatatcaaactggtttctggttttgaaggatcaatagagtgtggaaagaaatgatatataagttcaattatgctttgagccaatttcagaataccagcatgagtacgaaagttttgagacaaatggatagtttcagatatcaatcctttctcttttctgtctacattttcactattgggttccaataaaaacttcttgtagaatagatggcgtatgtcttcgaatctaaaatcaactcccctggcaatggtctgtgcagtgtcaccagaaaatacaaacccctctttaacatttccacatatatgcttgaacaaagtgatttgactcattgtaagatcttgaacctcatcaatataaacaaaattcatttcatccccattatatctttcatgcttgagtctagagtgaagatcattaacgaaatcagcaagatcaaattcatcattttccattttctttttttcataaatctgatatatatcgtatattctctctctcttttcccgacttaaattggaggaacgtccctctgacattttaatataatcctcacggcttagcttaccatcacttgcttcaatggacagcaaaccacttttgatatgagaaattatctcagtgaagactcgagaaggatcaagcttcttccttaacttggaattaaaatgaggccaatataaagcactaaatttctcgtagttgacttctttgttccttatcaatgtctgaagcaacactgatcttgaaattccaccttgatcattaaaaggatcttccacattaaggaatctttcaaaataagattcactcaatgttccatctagcatcattatgaacttatggaatgttatgaccaaagggtagcaatcagcaggaatctcataaaaagagtcaggaatgttcttgaactgtgtttcttcgtcatctatatcagcaatatcaatcaaactaccttcatcttgattgttgccaccattaaatctgtcaaaataaccgaaacatcataaaattagatttaacttataattgtaatgtatcaaagaatcagcttataaccaccatggtgaagcacaattacataccttttcaagtcaaaaacatgttgcttgatggcattacatagcttaggactaactgtaacaaaaagttgacgtaagaatttattcctctccatactattttcacagtacccgtccatagcagaaagatgtgacttttctctttggaatagtttcatcgtcaacacagtactctttccagtccctgaccgtccaagtataaagctactttcattaatcaggatggcgtccatttgttcatctgttagtacatattgaagaccaattttcctaccatcgcaatcagatagcaagtagcttactacatcatgacacaataagtagaatttcatctgcagcaaactctcgctgaccttcgaattctccacataacttcttccattagaagaggaacctaactcactctcagatttgttgttggagagattcttaaaccgaacaaaatccaaagagggtggccaattctttggaatttccaagttgctagaaacagaataacaacacattaagaatacaatatgattgcagtatccaacattcaattagcaatgtgagcaagtacctacccttcgaaagacttattgttgcagcagaggttgatgacaaaatcatctgtatacttgccaaaaattttgtcaagacgattgatcagttttgatgcatcatctggaggcaagacatcccatatcttcaatacttgcacatagttcaagttctttgtgatgtccacagtactaataacaatctggctatcatccttaaagctcattatctccatacaacttttacttcccgaatctacatacggtttctcgggcctccacccactggatagctgaagaataaggtgaaaaattgattttttcctcaggattgtcaattttttaaatgacttcaaaaagttgccacttaaaagaacctaaaatttgcagaggaaatgtcaacaaaatatgtatatgtataacatttgtgaagagtaattgaaaactaaaacccagaccttccacttcgcccattttgcccacttctcgtatcttgaaatcatacgatcagcatcaagaagatcacagaaatggccagcctctttcttgatatctaaaatggcctcagcattcatctggaaaagaaacaaagaaaatttattagttaagtaatgaagctagcttataacttctataaagaacaatgaagcacaaaatagagcacattgaaacaaaatcagaatagaaaattttgaaatgaaccaaaaatacacttccataaactaataaaccttaattatgattcctatagtgtaaaatctcaagtaacaaatgaaccaaaaatacac

SEQ ID NO: 23015 - DNA, 5319 bp, Cannabis sativa
ctaaaaaaaaaatgtcatataaatatgtcatatttaagtaaacaactattaatatctcgtaatgagtaatttcgtctataaataatatatatttttttaattatttttaaaaatactattgatatttatagtaaggatttaaatttttttttttacctatcgaggaggttggcttacaactaggtggcatccatcgagtaggttggcttacaagttacaactaggtttgcaaggcgctgctagtacctgctcttattacttagttttgagattgaactttaaccacgcttccaaattctaacattgggtaaaaataataataaaaagtggtaagtaaaacagttactttcgcatgaaccaaacactttcccatgctgacacatatgatgacatacaattaacaaatatatactttgtcgatcaaaaaaagatcccaccaatcatattcaatctttttcacaaaaacattaaaataaggcatgtgggtcgtgtatatgtgtataccaatatttttatatatacagtctatgccgttaccatcgaaacccccaaagataaccaaacttatttatctaatgtaagccatttgaatattcctccactcttcttctttttctccttctctctttctttctggttttttgaaaagaacaaaagcaaaaaggaaaatagagaaaaacgatgtcttcaatactgggctcacaaggagtggtgttggccacagccatggcggtctccggcactgtgattctcctcgctcttcgtctccagaaagctgtgcccacagcccaattctcagtcggtcaaactcaaattctacgatcatgtatttcttctggtatgttatcccaaacacccccaaaaagataaaaataaagttgaaatctttggtcttataatgtgaaaaaggggcaatttcgtaaacgaattcttatatattcttggtgggttttgcagaagagaacaagaaaaggagaaatcataataagcaaaaaagggtccactttgcagaggacgtgattgatcctaggagtgatggtgacgagtttagaagacagcacagtgtgattaacaattctctcaattcaaaaacaacttcttcttcttcttcttcttcttcttcttcttctacttctctaaagttgaagaaaatgaatggtgaaaagtataaaggaatgcctgctaacagagcagctttgtacaatggaattcttagagatcgagtggttcatcgtgtagcttactccttttgattgattttcttttctttttcatctgtaaaaaacaagaacaaaaatcttttctttttcttttcttctcatgtacatttgttttctcttaggaaagtaccataggagattattgggcccatggttttctttagttcttgtacacattaatatgttcttggagattgttaattcttctaacccccttaagaatgaaaaggtaaagattagtattgtcattagttcaatgtgaatcttcattggtattagttttgagagtgagtcttgtttgttctcttcttcatatataaatatatattgggtaaaagcctgaaagtatatttatttaaacattaatgttcttcatcttgtttaaattttattaatcccatttatatgacatgtgaaaatgtctgatcatacttgcagataaaaaaaaatgatgaaagcaaattctggccaaactttgttacatcaaataattgatcaggtctttttccatattccccaaacttaaaacaggtcatctcattaccttttttatctttttctaggagaacaattatcttttctgttttttactcattatttctcctgtttgcttttttacattgtttcaccaaagtgaaaaagtttagcttttagaaatttctaatgtaaaaaactattgaagtttggaaattgaagaaagatgagatgatcgatcctttcagtctctttcaagtcttctcattatttttatttgtttattttgaggcacttcttttctttttccatctttgattctgtgtcatacactttttaaataatggatagatatctctacaaccttctagtttttccatcacactactttggattcatacaaaagatctcttaagtgaaaataacatgtttcataggttataaatttctatgttgtggaacatattaacaaaataattattataagtaatgtatatatatgtatatgtatatgctcttcatgatatggggtactatttgagtgtttcttttgacaaataaaagcttgtcacatgtaaatgtatgctagacttcatacaaagtgtgaacacaggcatgttcttggatgcttcctttgtcagccattcaaccatagcatctactttaaggccacacatagtcacatttattgggataaaataataaaaaaaaaattagaggggggactacaaataaaacaggacatatataataaaattatgtacagaagacacaccaattatgatctatatatatagaaaataaaatactcatattattgactcaacttaattagtataaacaaagcttggtcaagctgagcctggaccaaatggaggcaaggaaactatgaagtattgaccaagacatacttaactataaacttttcttatatcttgctatacatgaaagatatcaaagagataatgccattataagggaccctaaattaatttgttatatgactaagcttaaatatttagcatatatatggtgatcgattatgacaaaatcaagaatattcacatttttatataataagtactaaaacattattgcaatacatgtctatgtttgttttctttatccatcatccactaagtactagaaataaaaatacttttgtgaaaagacaaatagagagaaatagtatttgtagagtaaacaaagtaaggcctctagaaagaatcatatgggcaactgaaatttttgttgggttgtttatttcctttggaacagaatcatttacatcagtttctttgtcctcttttctatcttaaaaatttaataagggaatcaagtgtggatgttgcttgtgggggtcttttaagtcccacatgttcttttttttttcatatttgttttcatattttattatccattcatgccatattccttaaaattcattctatataattctactatgacattcattcattcattaattcattattacatgttctcaatttttaaaagttggttagccaacctccactccacattgagtgtttgaccaatcatcaaataccaaactaaatgagaagacaaaattgagttagtgagaatattatacagttaattattattgaattttgttttctttctagacctcaaattttttgttttagtttaatgattttttttctaattttttaatttgaaaataaaaaaattatctcgaattcatttattcttcttattattatttttgtggagtccaaagttgaaaaatgatcttgaagtagtataagtacaattgcgtgttcaattgactatattgaaagagccaaattcatctaatagccatgtaatattacgattgaatatacatccttctcacacaaaagttgaaattctttaacttggtttggtagatcattcaatcttaggatgcgttttgaaagtcatatatgaattaaatttggatataagtggaggtaattatatagtttggcgtgtttgtttggacgcgtaactacaccataactgtgttattgaaaaaaattgggagacctcaattattctcaccaattctcatactttacgagaattcgatgtaattaaattgtgtaattacataccaaacataatttcaattatttagttaatataataattatttaatgtgatttaattttttatttttattttcttttcttatatacataattttaatttttgtcctgtatatatgatgttatttttataatattttttattgtgatttttattttattgttagtaaataaacaaaaaaaaaaaaaaacaagaagaagaagaaggaaaagaaaaaacctaatatgagaatatatgacatatgatttttttaacatcaattttttagctttcttttaaattagatatctaataaatttattcataatttagcataattttgattgatgaaatgcttacatttaatctatagcttaatatatatagaacgcaagaataattaaatagtcttaacaaataaaaattattttaaatatttattacgaaattactatggaatttgagtttattttatgaagagatttttatttattttatttattttaaatattattaataaataagaattattttatatatttattacaaaatgataataattattatattaaatattacataatattagtttattgtgtaattgctaactgttttgccaaacatgacaatagaaattcacatgtaattaaatctgatattgaactgaataagtgctaaatggtaatattataaatattttctaacctcaaattgtcatgagcttatttctttgcattgttcaaatgctcatatcttattctccagtctaagtatgggcatggtactatggtgatgcttagacttgtgtcatattttggataattgcatttttcgtcaaatttttatatatttttccaaccaagatcctgcaatgtcagaaggcgcggttgacagttttgccatcaatcctcggatgcttaagtcagtattaagatcttaaattaaaattcaattgattgaaacttttttacctaacagtcatgtacaaaggtcttgtgatgtttgtatttagatcttgaaatgtcagggggtgcggttgacggcaaagacgtcgaccctctgatgcttaagtcagtaaggtgaaaggagtatgatagaaattaacacttaaaattgaaaatatcatgtcctttgatagaaattaacacttaaatttgatagtttagaaatgatactgtcttagatgaacaatgttccaactgttgcttatatcatgtccatctgatattttgactttgtaggctccttgtccaactatccttaaaatcttgtaagttccttcccacatcagacctaattttccactcttacttctctcatattttggaaaagtttccttagaatccaatgtccaatgttgaaccgaagaactcagatgctattgttaaaaggttgtgccagtttatgttgatacgctgcaatccttgtcaatgcttgttctctttgtttgtctaatgtatcaagcatgtgagccatattttgccagttttcatcattcgtcgtgtgttcaaatcttgtggttaggagccct

SEQ ID NO: 23016 - DNA, 3426 bp, Cannabis sativa
agtagataataatttgggcctttggagggcattatggaaactcaaaattcctcctaaagttaaagacttacattggagggcatattaagggtgtttaccaacactgacccaattaaaaggtcgtcgtgttgatgaatcaatcctccatattttgttttggcagcgggttgatgggactatttgtaacctttcagctatagatttttccagatggttttatcaactggtcataggatttccaaagactttggtttgtcatgttgtgatgatttattagtctttttggaaagcaagaaatgggctcgtttggcaaagtaaaatttttgctacaaatggggtggtggctgctgcattgtcttactttaatcaatggaagattgctcacaaaaattttgcaaacacaatggattctagcccttgtgttcgagtggagcattgattggttcccagtattggtatatttaaagtcaatgtagatgcctctgtcactgctggggctttttattttaggattggagggttgggtcgttatcatcatggagttgtcctttatcattggttcaaacaattgcctggccatgtctctcttcttttggtgaaggcaattgtgttgaaggaggctttaagatggatcaaagaacgaggcctaaattaaattattattgagtcaaattgtaaaagcatcattgatgctctatatagtttggctcctttattgtctcattttggtttagttatttttgattgtcgtactttaatgtctgatcttaacaatatttcttatgtttttgttaaacgatctgcaaacaaggtagccaattattttgcgatcgctgcttgttcttccccaggtcatggctatggtggggggcttgtccctactacttttcaagctattttggtggatgattcgtctggtcatgagtaagacgcatttctttttgtcaaaaaaaattaaagtaaaataataataataataatactaatagtaataataataaataataagacaagataatttttatacgtggttttgtagttaaatctacatagtctactagtccatattatttttcaattgtaaatctttacaaaatataaaatattcaatattaaatgtaagaaatactgggtttctacacttattctctcagagcaattccatacaaaattggtcatcccttatattgtaggttctgtccatatttataggatttttaggaatgacacttattcccttttaccgtacgtagataacagtaatatcttgaaaatctaattatgtataattcagtatattttattaaatatgagattatatgaatatttacggtatactgaataagattataatcttattaaacaaattatattataattagggattttagtaaaaaaaaaatgattataataatttattaattacggagatttggtttgaatatataggtattatgtgtaccatatttgaaataaaatatttttaggtctggcaaccatggagacccgacagatggccattaatgtcacaacagtattaattgtggtattatgaaatcgagaagttaagttgagtttgaatttttgggttgttacagggtaattggttatgaccaaattacctctaggttagaaaatatttaagtagcaaattaaggataatgtagtcttttctaagttttaattaacctttgtctttaagctaagttggaaatagaaaattagtggctttcttatttatgtattttaattaattaggtaagtgttgatgagttgatagacttaaaacaaatcaaaccatattcttatcctctttctttctttctttctttgctcgggtaggagaaagccaaggaaaataaaacctaaacactaaaactcagaccctaattctccctttgttcatctaagaatttaattagaagaaggattctattaaaagatttagaaggtaaccatcatctctttcttgctctttgatttttggtagaaaaaggtttggttctagttgggtttttacagtttagctattgtatggttaggtttgtgttaaaatatgttttaagcttgatttgttgtagctagtgagttgttttagagtaatttgtagctagttttgttgctgagcaagtagagttcttagaactcaaagcttggtatttaatggcaagttttgatctatgctttgtttttcatttcggttagttgggttatgttctattgatagtatataaatgttccgtgaaatttgagttcatttggatagatttagaagtagttagctttggaaaacccaagctagttgtttttgatattttcaagaggatcgaaattcgtattttggcaataacttttcactcgagtgtccattttagatgttctataaaccatttcaaagcttatgacgagctctacaatgtggtatatattttaaagtcatagtataaggtttattttggagtgtttatactataagattttgtttaaaatcctagatcattttatgtgagtattagattgtattttggaatagacacttatcgatttaccgttgttatgacataggaccgagatcgtcaagcatttctccactcgggttgaccagcatggaagagtttggattaaaggtaagaaaagtacaattgtactacatagcatgttaagatatgatatgattattatcatttattaatcgattaatatcgaatataagatacggtaatcatcaatttgaaagaaagagtcattactttgtttttgaaactattgttaggtttcttacttgtcagttacttcattaggtaatgacagtgacttggatgactggttaggcttattaaagttactttaaggcaataatggaaaatggttaccttataaggtaatgataatagcttatcttataaggaaagtacatatatagtactggatatttgtatacttatgattatttgtgttggttatctgctattagctgagtttgtatgaatgaatggtatttgattaaagtttcaagattatgtaaattcttaaatgtatgttattttacttttacttttcttgttgagtctttgtgactcattggtgctatgtggtgcatgtaaagattagaaaacgtttgggaaaccatgagtcagagatcttctctagcaaatgtacacattagtcgattcgacaagtggatccgagcggtcgaaattcaaattttatgatgctctgaactttaaagtgtaatttattgaaataatgtaatgacatcttttgtaatatttttttaaaggggatccctaatcaagagttatgccaagaattttatgtatcaaaattaattagcaagacttttattaaattacaattttacttaaactattagtttattattaaaattaatttataaatattagaatatttctaattaaggaaata

SEQ ID NO: 23017 - DNA, 4148 bp, Cannabis sativa
agaggtatgtttcaaataaatataaaattaaaggtaaatttgattaattgattaataaaaaagacatttttcaacttatccttttttagtaccaagttttcaaaaatattgtgctacagtttcaaaatcacgaaaacattgtctcaataaaataataaaacaacttaaaaacgattaacacagctaaaagataattctagaacaacttaataaataacatgaaaacaactataaaacaacaaaaacataactataaagcaacagaaaaataacaaaaaattgacctaatagcaatatgcaaaataatatcaatatcatttttttataataaatgtaatttgtattatgatttttttacttagttttgacaatttaatttatctttttgtactgctacattattattttatggaatttgttgttacaacttcatacttttatatttttttacttcataatttattttttaaaagttaaataaaaaattacattaataataaaaataataaaatcttatgattttaaaacagagtatataatataataggtaatatataattaatatgtcaatatttactattacacatattatgtcaattaaaaaatggaaaaatttaaccattgtattttaataaaatgtgtcaataaaaataaactaaatatatgtatctaaactgcaaaacaacacacatacaacgaagaaaaaaaaaaccaggaattgaaactaatatacaccataaaaaatatacacgaccaaaatataattgttaaaaatattatgaaaaacacttaaaaataattaaaaaaaatacacatatatatatatatatacaacaaattaattgtgtggaatgaactaaaaatatataataaaaaatacaagagagaaagatataagaggagtgcttttaattttttatttatttatttttttgtacgagagagaaagattgttgaaaaatatgagaaaaaaggtcaaagtaaaagaattatattttagtaaaagtaaaaagaaattaattaagaattttttataaaatatgattaattaaaaaaacaagttagatatataacaattcttaacaaaaatatctaaaaatacgagcatacatacagaataaccataaaaaaaaaaaacattaaaaaagagtttttcaaacaataagctaaaccaaatcatatagttttgttttttcattaataaaccaaatcatattagttatgtaagcaaatcttctttttcctggttttgagttgcatgcaaaatattatatagaaaagatcgacttactatatcagtgtaattaagtagtcacaataataattatatcatgtcatcatacacatattaaattttaaattcaaaaacgtttagtttattttatgactttttcttttgttaaaaaaatttattttataatatgttgttgctccttctaatatttctataatttggattgtggccaaacttgaatatataggaagaaaatattaatattgaacaataattaatcataaaaaatgaatgagctaattatttaccaactttaacttagaaagaaaataagttggatatataccaatgggcaattctttttatatttatactatattgaaataggttaaaattatttatttttcttttaagttataccataaatttatttagcaattcttacatcagttttttttcttgttgggattcgaatttaaaatctcatttttatgtatagaagtgtgaaactacttgattatatttataatcatgcgctagaacaacttaaaaatattaaatatcacaaattaagaaaattatttagattattggatttagatataaatttataataaaactatattataaatattattctatatatataaatattgatattatgctataatccatccttaattggtgtccctagggagaattaaatgtacattaaataatgttacacgtgagatgattggcaagttttattatttacaaagcttgttgggtatactaactacatacatacatattaattataattagcttgaatgtcgagattcatgccattaggtacaaatttatcatatattccacaccaaaacaaaccaaataaaataataataacaacaaaataatgtaacgatttaacaaaaacgatctatgttatcattttcaacgacattcaaacaattttggatggatgacttcaaaagttggagcaatcttatagcatttaaaatataatataaaggaaaagattaaataaatcaaattgaaatgaattagtaaagtatttgatacaaataataaatatataaaagtttcacatttgacttttttttaagtaaaaaagataatttcatttgactttaaatgatcaaaagaaatgtaagatattgtattaattaggttctgaattaaataaattttagcaaattcatcactaaattagttcctaaatataaataattttaaagttatatataaaaattattaatttttgactatatatattttgacgaagtgattagaatcactcatgaatttacgaagtagacatttgccaccgacgctggaacctaaattctcagagcgagtcacatgggacaaaactgcctctgaaaatttaaacaataaaactataacaccttcaaactacgctcctagctcatttaaatacattttcattgactaaatattaattatgtaattatatatatattttagaatgtgctttctggccatgtgttcaaaattgtttttacattttacatgagtaatttgagagatatatcaagatgtgtaatatattcttataaagtgttatgttattgtaatttaatatcaaagaatttaataattagccttaaatatcaagatgtgtgatatacatattaccacctcatagtagtgctaagcacatgtgcatgtctctggcattttaactacagaattgtccgagctgtatagtttttggttttattaaataaaaagtttctttgtacaaaaacccacctttctattgaatgtagttgagaaacgaatttgagagaaaataagcttgagtgaaaactgttactcagctctaagagatgattgtatttatatatgaaaaggagtacaatacaatcaataacagaaaatacagttagaaacagaaaatacagttaggaaaactaattatccagttatgaagagtaacaaactcttatcctatacgcacagctagaataactaactataactaaaagtgttcaccaataaatgtgtgttttatattatttatacaaacttaaaatttgaaaaacaaattgttcaaggctgaacaactttatgattaggttggactcttgtgttaaagagtctcatattttttttcttttgtaaagtaaattaaaaatcccacattattaatatatgaaagtatttaatagttatttcttttataagataatgacttaattactctaatggttagtttattttaagataatgataaaacaacatagattattaaataaatatattagaaaacttttaagggacaatatttttcaaatgtcagttcacccatgatatcatcaatctaattttaatggtatatctttttttaacaataataataataaacgtttgtaacttaattaaatggaataatgctcaaaactctgtcattgacacatcatactctgatgatcagattcatgatagtgcagagtattggtctgctcctcttgctaatagcattaaagttaatgtagacgcagaatgatgggcggtcttttggttcgggtttggtagcacgagatgatagcagttggttgattgagggccgaaccatcttagtgttgaacaaggtggaaccgatccttgccgaggctatctttgtcaaggaagctcttacttggatcaaattgaagcagtggcatcatgtgactgtggagagtgattgtcttggggttgtgcaagcattacgcagttctatttgtatgatttttttgtttggtcaagtcattcaaagttgtaaaaatttgcttgcggatttgaataccgttgaagttatttttgttaaacgatctgctaatttagtggctcatagctttgttagagtttctaagttgtatcctgatcgtaccttcagtatggagtc

SEQ ID NO: 23018 - DNA, 3325 bp, Cannabis sativa
  modified_base (2503)..(2509): a, c, t, g, unknown or other
cttgttccctatgagcctcatatgaatctcataggtaacaaataggttcacaaagtcaaacttaatggtaatggtgctttggacagattgaaagcaatacgtgtagctaaagggtatcttcaaaaatcaggaattaattttgaagatactttcagccctgtagtgatgctagtgacagtgagattggttttaactttagttttctcttctcaatgggaaattcgacagttagatgtggaaaatgcctttcttaatggggctctacaaagtttatatgcctcaaccaccttgctttgaggacccttccaaacctcaccatatgtgtaaacttcacaagaccttatatgttctgaaacaggcccctagagcatggaatgacaagctcaaatcaactcttttcaactgaggttttattgcatcaaaggctgacacttccttattcattaatggaactagttccaacacttgatcatcctcctggtttatatggatgacattcttgtcacaggccctaatccacaactaatccagaggttaatcattgatctgaacactgcattttctctaaaagacttgggaccactgcattactttttaggtgttgagattcacagaagtcatgaaggtctttacttctctcaaaccaagtatattacagatttgctcaccaaagttcatctagagggtgccaagagtactgtgccagtcctacttccatagctcacaagctgtctcttcatgaaggctctccctttgaagatatcactctctatcgaagcaccttaagagctcttcaacatttgactctcactcgacctgatgtggcctacattatcaacaagctttttcagtttattcctgctctaacacatgttcactgggaagcctgcaaaagacttcttagatatttgaagggcactatttttgatggtattttactaaaaccatacctcgaatgtctctagaagcttactcgaatgcagactgggcttgctgcattgatgatcgcagatctactggtggatatgctgtgttccttggcttcaatctcatttcatggtctgctaaaagtagcaagttattgccaagtctttaactgaatctgtgtttcgtgcattggctaatactactgctgagattaagtggcttcggtctctacttactgaaatgcaagttcatttagctgatgttcttattatttaggtagataatcaaggtgttgcttctttaaatgctaatcctatattccatgctcgatgcaaatacatagagatcgatcaacattttgttcgtgaccagctactaaataaagaacttgatgtgcgatatgtgcccacattgacaaagttgctaacatttttacaaaaagtcttcctaaggatcggtttcattatctcaaatccaaactcaaagtggtgtctatcccttttcatttgagggggatgataaccaagttagttagttagttggttggttttttgtctcattatttggaatagttagttagtttctagtttttgcactaacaaattatggttttatgacagaattcttgttctgtatttgtacaactcttttgtattataaataaaggatcagacctcattattgaggcaaaattaatatgtaataaatgtatttttataattttaataagctaatttattatatttggtgatcttactaaattttttaaaaatagacatttacaaatttagttttcaaatttaggatcattttgcatctcagcccttaaaatttgtgctaaatttggcacaaaaaataagtttgtgctatatttggcgcactatttatgattgagcttcaatgcacaagatgtaaaaatggcaaaaaaaaaaataattgattatatcagtgattatttaatattttattgagaatatttggcgcactatttataattgagcttcaatgcacaagatgtaaaaatggaaaaaaaaaaaattgattatatcaatgattatttaatattttattgagaatatagaaatattattattttttattcttttattatttaaataatgacaatatgataaataaagaatgtaaagtttagtaaaagtcaataaatcataataattagtggcattatagtaaataaaaaagtaacatttattgtgggctaaatttgacacaatgtccaatctgttaagtttcgtttcttttaccgttaaaaattagcattttaacctatacaaaatttttccattttttattaaaaaaattaattttaaaatacataatattctattgattctgaaaatataaattattaaaaaaccttatacaaatattaaattaattaaaacatatattaattttacttaaaaaaactaaattatttctaaaaaaaaaatatttcaatttttattttatttataaacacgtatctgaagaaatcaaactaaaattattgagaatccaataaataatttaaacaaacgaaaattttttgaaaaaaaaaatcaaacttatttannnnnnnaaactcatatcttaacaaataaaataaaaaattaaaaattcaataaaaatataaaatattttgaaaaaaaaattaaaaattaaactaaaaatgttatgtttacttaaacaaatatatgtttttggagaaaaacaaaatagactccagtttgttcccgtaaaatttagtttttacaaaaatagaatttttaatatctaaatgagttttttaataaaagatatataatttcttaaatcacttaattagttttaaaattttaatttttttttttttaagatctaaagtaaatttttaagatttattaaaaaaatattaaatctttctcactttgattttgaggggtacaatttgatagttgtcaaagtttagaggacaaaattactaattttcaaagacatgtcagtatataaatggaataatggaacgaaacttaacagaatgattaaatttctgtaaatataaaagttcaggggattctcaacaaactgtatattttagggagtaaaattaatattgtcaaaagttcagggaacaaaattattagaaaaaatataagcttttaggaatttaatattgttaattaattataagacgctatctatgttaagaataagtggtgctcaataactggatgaaaatagatgcaaatcaaattaaaatatggtacgtttgacttttgactttgagccaaatccaacagtgtgcactgtagaagctaatcaagcatgagttggtaaaaaccagtagcaggtataaccaagagagtaaaactcataacagaacaaaacagagaaatgcaagaaaagcttaactcat

SEQ ID NO: 23019 - DNA, 4087 bp, Cannabis sativa
cgctcttccgatctatattaggatgttaatgaaacatacttgttagtaaatcaattgtatactaatgttagattgatttagtgttattagaatatgagttatgcatgaattttgattaagtttttgttggattttggttaattttgaaggcatgaaaagttaggttttgtgttgaagtaggggctgttgacacgaccacaatttggctcgccgcggcgagctccactaggttgtggctgctgtggtgagggcattggtcgtcgcagctagggccctattctcccgatttgtgtgttttcttatttttgccataacttttaattttgaaatatgtgttggacattcttgatatcgttggaaagctcgtttcgggctttatatgttgatatataatgggagttcaaattatgtatatgtgtgaaaatgaatttgggattaaccctatttgtgaaatatcgagaatgtgtgattagaattaccggcacttgctcaagaacacctgagaattcagaatctccacatacttagattactaggtaagatagtaaactagtacatagagattggcgttgtggctcccatgtatgttcttttgtatatgctatgcgggaaaccgagattagggttattaccctaaacttagcgattatgtgatctagggttattactctaaaatttaaatgattatgaatgcaatattatattgtatatgttgatataaagaattatgtggttaaggcataattaggttagactcgataattaaaattgagataaaccattctaaggccttattgtaaaaagacgtgtgatcgtaacacgtaggtctatttcaaataaacaatagatgtagatgcatcaatacttaagtggttttgattaatattcatattgtcatttataatatcttgctgggccttggctcacgggtgctctaatgtgcaagaaaaggtaagtcagttgctggtcagccatgagatcaagggctttggtagtgcattgtacatgttcagcctaagctagaccacgagggttgggtctaccaagggaaaaaagttataatcttcacttttgccgcttaggtcagcgtgtaataatgacttgcaatactttgaaaagtttttacgggatcctaaaataaaatgtgaacttttgaacgtttgttaaagtttattgattagatgttgttattttgaatccgtatttttttaaagttgaatttctgcacttggctctaatatattctgatttagcgagattagtgtatgattattcgttgttcgtggtgttgttattggtagggcgttacaatttggtatcaaagcaccaacgtttttaaacttcctgtagaccagctgaacatgtatgatcatcatcaaagccaagctccactcgtggtgcactaagtattgagagtaaatgcttaactgcttttgtgattaaatgtttaccacttttcattataggcaacatgtgatcatctagaagatataatgttataagaaaatcataattagtaattatattgataaatgattattttataagaaaagtagtatctgtgagttagggttaaggcaataagtgtgtaagtgtggatttggtgtctgactcaccggggttattgattttaaggttatttgagagaaaatggaccctaatcaatcaactagaccacatggcaagcttgtagagcctggtaatgacaaaaccaatccattggcacccctgtgcctttgcaaaatttgggggataacgcgtgggttaacaatgctaatccacctaccgattggcagcatatgttcctcgaaacgcaaagcattatacttcgttaggaagatgagttgcatcgatttaggcaaccgtcccaggcagctcctattgaaccagtgttaccaccagctcctgttccagtggtgggtaaccctggatttgtattgccacaccaagaatttatttttgagcattttgtcaagctacaacctctgacgttcttgggaggtactaatatcattaaggcaggatattggatgagcactattagccgtattctagatgacatgggagtaacgaaaactgaacgagttaattgtgttgcatttatgttccaagaacatgccagtgtctggtgggatattgtgggacaaactaaaaatgttagtgctatgtctgtttgagaaaaaaatttataatattgccatcagattttcacacatggaagattttgttaaattgactcaagggaagaggacagtggccgagtgtacactagaatttgatcatttatctaagttttctagcaatctagtaccaatggacttcactcagaaacagatgtatgtaagggggctgaatgccactataagtgaggatttaaaaattaccaccgatcatgatacattatacgagaaagtggtcaagttagcattgattgctgaagtgacagaataacatgtgatcaaagaacaggctgctaaggatgccgtcatggcatcgaaccctagtgttggtggtagtgtaagtaaggggactgatgatagcaacccaaaccacaagcagaaggttgaagcttctaggacatcgagaaataataagaagttttgtaggaatggagggggccgtcaaggtcgtagttcttcatttaaaacttacacggagtgtcccaaatgtaaaatgcaccatcagggtgagtgcagagccaaaacgtgtttctagtgtggtatggtggccattttatcaaattgtccacaagccaagaaagaagaaccaaagaagatcatcaattagaatccaaggcgtttgttcactatgactcaggctgacgatgatgctagtccatcagtggtgacatgtcagttttctattagcggttgttcttatttagtactatttgatttgggagctactcattcttacttatcaagtagagtaatagaaagtttttataacctgtttgatgtgtatgcttcggggtttgggaccctgttagcctctggagacctaattgtatctacttgatggattaggcctttgtctttttggattgatggttatgaatttactgccaacctaattgagttacaattatctaattttcatataattttggcaatggatttcttgtctaagtacggggcaatgattgatttcaagtggaagatggtagtgttcgaacctgatagtgcaaagccatcggtgtttgtgggtaaggtacaaggatcacgcatacccagaattataatcccaaaagctagacacctaatgcgcagaggttgcataggattcctagttacaatagtggatactagctagcttatttcgcctaaacctgaaaatacgagattggtgtgtgaatttttagatgtatttccaagggatctacctggactaccaccttctcgagagattgaatttgttatagaattagtcgtaggagcagaaccggtatcaaaagcaccttatcgaatggcttcagcggagttaagggaatcaaaggttcaacttcaagaattaattaacttgggatttaccagaccgagttttttacttagggtgctccagtgttatttgtgaaaaagaaagatgggtcgcttcacatgtgtatcgattaccgggaattgaataagctcactatcaagaacaaatatcctcatcccaagattgatgacctatttgaccagttgaagggtaagacagtgatttctaagattgaccttcattttggttaccatcagttaagaattcgagaagaggatatcccgatgactgcattttgtactaagtatggacattacaagtttctagtgatgtcttttggattaactagtgccctacctgcattcatggatctaatgaaccgagtattaaaggattttctagagaagtatgtgatagttttcattgatgatattttagtatattcagaatcagaagaacatgaattacatctcaaattagtacttcatcaacggcgagatcacaagctctatgctaagtgtaggaagtgtgagtctggttgtaagctctatgctgggttccatttgtatacttggtggaatctcgcatatcttaaccaaaccctttgtat

SEQ ID NO: 23020 - DNA, 2529 bp, Cannabis sativa
  modified_base (2294)..(2294): a, c, t, g, unknown or other
tctgaatttcttaaaattttgcaagatgtcttaaataactataatttacatgaccatgagaaaaaatttgattaaaaaattattacgaatactaaaacagagagatatatatcagtgtatcccttttaatggagtgcattatagaattttcctaaaagttatattaattttaactagtaaattattagtgaagtgttgtaattaatttaaaagttaaataaaaaattaataaataacttgtaatttgatatatttttttaatatattttattttttttataaaatattaattaagattaattttgcttttaaattaaattcaactataactactaattagattttgttgaatatgttaattaaaatattaatttattttaagtatatgggtaggtaacaatttaatatagcatgttatagaaaatatagaagatttaaaatttatgttaaatttagcataaaaataaatttgtgctatatttagcttgctatttataattgtactacaatacacaagatgtaaaataaaaaaaaataattaattatagggtaaatgccattttagatcttgtattttgtaaaagttatcaattagactttgttaaacaacaaaatgaatcctgtattttctaaaatggtacaaataaaactctgaactgatttttttgtccgaataaaacttaataataatctgatttaaagatattatgacaaaactgattacattttctgtatatgttcgtattagaaattgtcttcaagttagttatattgaaaaaattgtcgaaagtaaagcttaagattttattattactattttgaaaaatataatgttcattttatcatttaacaaaataaattatccaatcaataatttgatacaatttttagcatcattaaaatagtaatatttcttaaatctactaaaatataacaatacataactttcggcattttattaaaaatgctctaaccattgtaattatattttcatttaaacaatcataaattatttagtagaattgactcaaattattaaatgatataaaaatgaatatgttttttttttttttttggatcaatataaaaatgaatatgttgaatcttgaagaatggtaactcttttttcctacctaagaaaagaagaataagcctttatttatattctttttgttactttaaatttatacaaagaaaagaagttcatcagaaaaggacccactctttttttaatttttggtcataattatccatagtattaatttacagaatactaataataataactttatggaataaatatgaatatttggtcattcttttcaatatcttaaatcattgtctttcataaagtatttaactgcctttatggaaaagcaaaagatactaaacgccgtcgtttactcaaaacttgaatttaattaattaaataattgttaaaaagtattattgatgcttactatttttattagtgtcatgtagttattagtataattaaatatcgagataggagggtgcgtgtgtattggaggtcttgagttcgagtttcaaattatgtattgtaatatataaacacttaattcaaaaaaatatcgagtcttatataatttaaaaaaataatttttaaaaaatattactatataattatagaccactgtatataaaaattattaaatattattcctaacaacaaataataatgctcaattaattaatagcattaatcaaaaatgacaatttacttgttatatttatataaaatttttgaaaaatgaataagaaaggcttttccctatttatttatttactataaatttgttaccaaccattctacaaaacaaaacaaaataaataaatgaaactatgtaccaaataacacatgagtgcagtgtacaacacgcgtctctgtgcgagtgagatagaacaatggacaaagaacaaacatgaaagtttgtttttgtaggtgaaaagcttgataataatgccaaataatgactcattaaatgattttgtgtctatttagttacattatatgtttatgagatctttaaatgttttaaacacaaagttataatattataagtgacactttttaataattattatattaaattagatgtgaattaatatttaattacactaataatattattaagagtaaatactattttggatgttttgcaaaaattataaattagactttctattttgttaaataacaaaatgaaccatatatttttcaaaatagtaaaaataagatactgagcttaattttcgacaattttttttaatanaaccaacttaaagacaattcctaacacgaacagatatagaaaatgtaaacagttttgtcataacacatttagatcagattattattaaaatttattttgataaaaaatcatttcagaatcctatcctatttgtactattttgaaaaatttacaaataaattcaagcctattagtatattgtacacaaacctaaaataaaaagatagtttggaaaatataaattattttttttata

SEQ ID NO: 23021 - DNA, 3279 bp, Cannabis sativa
aatcttgctggccagctgcttagaatctttaaaaatagtagaaagtgggattcttacactgcagcaccagcttaagcccgatctaagagccatagcttcagccatggcaggtgtgaccttagctaacaaaggcacagaaactccagctatcacctgaccattccaatccttaaccactgctccaagcccaatcttactgttcttgtcattaatggctgcatctgtgtacaattggtaagatccttccttggcttgagataccgctgaggaggtgcacaagtggcaagctggttcagcatcaattttcctagcctgtgcatccctgtattgaagcaaatagttactggtccattgcactaattctgctgcacttggatgaatattcctgataagttttttatttttaagttcccaaatagaccatagagtacacagcagtaaagaaaagtcatcagtatttagatcagtatatgcagataacataaagtctcttatatctgtatttctatgcaaaaggtaaaaacggtataaaggggaaagtttccaaacctgtctcgccctggaacagtctagtagtgcatgagttacagtttctaaagaacaattacaagaagagcaagaaggagagggaacaattttctttctatatagattataggctgtaggtaaaatgtgataaaaagttctccaaccaaagtttttacttttaggaggaatactttggttccaaagaaaaatttccaccaactattatagaaactagtattagaggaggaaggaggtaaagaagaagtatttacaaggtgataggcagattggacagtgaggagaccagaaggatctcctttccaaataagacaatcagctttatcatgacctccaatagggacttgagaatattagcaacaatgtcatgttcaaagtaatttgataacttatttatatcccaagcaccattagaattcatgaaaaaactaactttatcagaaggaggagaacaattttccttatacctaaggatcctaagattaggaacccaagaatcctggagggtatgaatagactaaccattctcaactttccaaataagtccaatcttgagaagatccctgccccagagcaaactagtccaagaaaaagaaggggagtgacctttacttgcttctaaaaaagaagaatgtcgaaaatacctagctttaagaatttgagaagcaagggaatcaggtgtggtaaaaattctccaagcttgtttggccaacaaagcctggttatgatgaattaaggatcaaaaacccaaccccccaaaaaattttgagttgcaaagcgtagaccaggatttccaatgagtcttagagtttttcccaaaagaaccccaccaaaactgagccataagtttctcaattttttgacaaatagaagtaggaagtttatagcaagacatgacataggagggtatagcctgaataatagcctttaaaaggacttctttccctgctttggaagaaaaatttatggctccaaacctttaaattagaactgacacgatcaagaataaaggtaaaactgcttttcttagacctaccaaaacattgaggaaccccaagatgcttagacataaaaggtctattagcaagcccaagggtattgtaaaaatgatccgagacatgagagggggtatttagggaaaacaagatggatgatttattaaagttaacacactgtccagtggcctggttgtaaagttgaagagcagcttgaagagcattgcaagatgaataagtagctttagcaaaaagaagagtatcatcagcaaagagcaaatgcgaaattgcaggggcagatttggctatagaaataccattaaaactcccaagttgctcctgaatgcgaagagcagcagcatgtccttcagagcacaaaagaaatagatagggagaaaggggatctccttacctcaaaccacgagagggaaagatttcattagaaatgttcccatggacactaaaccgagtagaaataaaagaaagacattggtgaataaggttaacaattttattgggaaagttgagatgtttaagaatagctaagagaaaactccactccacacggtcaaaggctttctccatgtccaatttaaggcccacccacccaattttacctgatttcctatggttaatggcatgaatcatttcctgagcaataaggatgttatcaaaaatgagacggtcagataaaaatgcactatgagtaggagaaataatatcctccataatgggcttaatcctattagcaatagccttcgtaacaattttatacaaagttgtgcaaaggctaataggtctgaagtctttaagagaggaagcgttggattttttggggataagcacaatgagagtcttattaatagaagccatactgtcattattattaagaatatcaagaattgttgtgcacaaatcctctcctaaagtgttccagtatttttttggtaaaactaggcattaagttcatcagaaccaggtgctttatccccagaaagctgaaataaagccgacttgacttcctcagcagtgaaaggagcatcaagcagggtgaattgttgaacagttagccgggaattaacagcagataaaagcaaattagtagcatccctgctactgccttgagaatggaaaagggttgagaaaaaacgacagatttcagctcaatggcagcatgattagaaatagtgctaccatcatcaagagtgagctttctaatgaaattggttctttttcgagatgaggctttatgatggaaaaatttggtatttttgtcaccagcccgaagccagtggactttagatctttgcttccaaaagatctcttgtttataaagaaggctatcaagctgtgactgaagattagaagcctcaaacaagctctcattagaagcaggaagggaggaaaaggtgtcattaagctgcctatcaattttattaatcctattagataaactattaaaagattgattccaagctcggatagcatgaatacaactgctcagcttactaagaaaatttgacaaaggattattattagagccagagttagaggaagtccaggaattactaacagtagtaaaaaaggtgggttcagtaagccaatgattttaaaaaagaaacctcttattttttactttatgcatactatcatcacaaatgactaactttaacaccctatcatccgagccataaaaactgaggtgatgaagaagggcctggggataatgatgaaacca

SEQ ID NO: 23022 - DNA, 2637 bp, Cannabis sativa
aaaattccgtgaaaccgtatttttataatttttttgttgtttttatgtttttgtgaaataatcccttataaaaactagaacaataattgaaaggcatcataagaccaagaaaggttccatggggtagtgttgtgatgtgtattgcatatccataaagaactaataaaagaaagtcccatttcatacaattagaagtacaacaatcaattttccttttggttcaatattttattgcttctttatgtgaaaattttgtttgtgagaaattccttagttaataattatggttggctcgttaactaatgttttcttttaaagtttacaaatgatttatcttgtcttccaatatagaatatattttggtttctatttatatcttttaataccatcacgaagaaattacttcaaaaattctagagcatttgaagattgaaaatattttgttcttaatttagattttaaaaattgtttatttctgagaaatcaaatagttttttagtttttctagaaatttgggtcatgagtatctcatgtcgtttggtgtttgggaaatgttcacacttctaatgtgttgtcccaatttttgtcttgatgacgtggaatacttacatggataaaattagtgccacgtggcagtacaactcaccaataagaaggccaagtcagcacctaagcaaacggagactctggcacccaaacgggcatcaagtgacagaccagctccctcacaggagctgactaaccctatagactgccagccttgagaatgaaccatggccgggcagcctgcctccactagggcctggccgacaaagaggtgctctgcaaggtttcctatgcacttctacatgtggacagtaactcatgggctgcaaattgggacataaaagctaaacagaataatatctagattcaatggcaatttagtcatttgtaattatctaacaaactatgcaaatatctagggtttcaaactgtaatctaaggtttaggctcctatataaaggtcataaccctagcctagaaacctaagtaaaatctaagcatgaatcttgcgtccaagctctaagcctaagtctgacaatctctctcttcctcacttcctctctcacacccctacactagcatcatctcaacatttaaattttgccattattggttcatactttgtactcctaagggtgctatagtagatcccacctatagtgatctggatagtattaacccttggtactactacaactaaaaggggagtagattgttacccgctatcacaagggggccaaatctctataacaaatctgttgtttattattttttattcttatttgtgcaaacacgtggcaagaatcagatctatacgaccccattgtcggttgatcactttttgaggtcaacagtttggtgctttcatttagagcgtggatatcgtatctgatcaaacgccatggtgaacacaagaagaactcctatcgcactatctgcatctttaggtttcccttaggacccacaaattgcagatccagttactcaggttccagtcacaactagaatctccatgaacactacagatgtggtgaatcctgtcaccacaacaggcgccactagtctggccactatagtaggtgaaattgatacaggcatcccagtggatccaagtggcaggcccctgcctccacgagaagacccaccattggcgcctcctactgaaggaaggagccaagggcaacaacccttgggacaacaattggatctcgactccgattctacgttggagagacaggccaaggagtttgtgagcctgtgattggcgagcctcatctagacttaggaaaagaccttgagttggccagactcagggaagctgtaggtcgtgcaggcctaattgaagaatcacacgccactgtttgtgatgttttcgctcagcaaagacgtaaattcctgagatggatggatgaccaggagtacatccttcgatctcaccaagcagagttagatcgccacaattgagaggctagcgatctgataagatggttcaaacagagaaccgatagaagaggccaagatgtccttaaagatttgctcaaggaagacttctaccaagttcctcaggaactatgaccgatcttcccttgccagagggaggacagaccttgcctcaaaggtcgaacgaagaaaataactagatcctaacaaccagtggcacaggggaatggtcacagatctctggctcagcaacacccccattatacagccattggttggctagccatcagcaagagtaccctttggccagccagagtacaccacttcctccccaaggggagcgaggtgtccagaggtcaatcttcaactgatgaggactgggagtaggtggaaacacccaaaacggttattcgaggagtgaaactgatcacttcaaacatctagatccaccaaactctagcaattggtgtgatctaccccctgtcaacacacaactagcattagttgcccgtggagtcacgtgcagctagaccctaccccttgcaggtttggccggccatggaagcatcacgagcggccagaccctgccctttgcaggtctggcaagccatggaggagtactgggttgccagaccctgcccaatgcaggtc

SEQ ID NO: 23023 - DNA, 1646 bp, Cannabis sativa
tttcttttcaatgtataaaattgttattggaagagaattagggagaatactgataatgcacatgcatgtgcaaaatcttatttatgagagagctacactgtttgcactgttattaccgttctactcactgtgtcattgttttgtttataggatccgaaagagaaggctaaagcagaaacaagggattggttaaacaatgtggtatttacttagaccttttgttttaacttctattccttcatcttttctggcttattgggcagacaagtgatgttgtatatcttgttcgggaatgtattaattttatgtgataaaattgttggcttctatccttaaaaagtattttagaaggaaggttttgttgtctgtatctaaatttgagtttataaattttacggaaaatgtgatttgcttctcatattttttaaactctatttatgtattctaattttttttttttggcttgttatgtgtttttgtgattgagtaggtttctgagttagaatcacagattgacaactttgaagctgagattgaaggactcactgttaagaaaggaaaagcaagaccacctagattggttagatacacatattaagaacttttttgtttgttgatgtggttattgataatttaatttctttgtttttccttggttatgtcaggtccatttagaggaatctattactcgacacaaggctcatattatgaagttagaactgatattgagactgttggataacgatgaattgagtccagagcaggtcaatgatgttaaagacttcttggatgactatgtggagcgtaaccaggcatgtgttgattttatatatagctttaactcttaatcatctttgctgtggattgaatatataactcctatagtgacctttttatcttttcttctaaaataacattgcaggaagactttgatgagttctgtgacgttgatgagctttatatttcattaccattggacaaggtggaggcactcgaagaacttgtcacaattgcaccttctagtcttgttaaggtaaatgctgttttcatggtttcgtagtgttttattttattttatttttattgagagtggaggaaaaaccttggtaacatgaaaacttgggaaggacttactacaacaatcacaactttagtacttattgttacttatatgaggattatatttggtaacagaatcttgtccattgtgactaaattttgtacttatttgtacttatccacttcattgtttcataattaagtgactttttttttatgaataaattaagtggcttgtggagatgcctttgatggtgatgatctctcaagcagaagtttaagtataatatttgctaatatataggcatgctagttataccagtatgcacacagaaaatccctaagtgaagaatccttttgatttttgttatttcggcaggctgcaccaatccttggattgaagtctttaacagtaccagcaactcaaattcctgtatgttttacttatttttctatgatattattatataattaccttcttgcaaatttatgattttgagctgttgagtctttagtgatattatatggaattattttgacaatattaaaccagaaattgttctgttgttgatgtttgattgggcctt

SEQ ID NO: 23024 - DNA, 4048 bp, Cannabis sativa
  modified_base (2605)..(2610): a, c, t, g, unknown or other
tttatgtttatatactttgatctctcatagaatatgaggtttttcatcaaataaattgcacttttgttagaatgtactgtgatgttgtctgaattgtatcccatttattttgtcaaatctttgatccataaagcttctttaatggcttcagttgcagctatgtattccgcctcaattaatgagagtgctacaatattttgtaaattagatttccaacttatacaacctcttaaggttgtaaacacatgaccagttaatgactattctgtgtctagatttgcagcatagtcagagtctacaaatccagtcacctcttcttttttttgatctattcgcctccatataccaaacttgtactcattgtccctttggcatatctcagtatccacttgagtgttgaccaataattatctcttggttttgtaatgtatatgcttactacactcatacagtgagaaaggtctaatcttgtgcaaaccatgacatacatgagactaccaatacaactagcataggaaaccttctccattttcaccatttctgcctctattttgggatattgttcttgtgacaaattgaaatgaggtgctaaaggtgtagaaacaggtttggcatccttcatgccaaacttttcaatcactttcttgagataaccttcctgagttagagtgcactattacaaaaagcacaagtattgacgatttaaaattcacaatttttaaaaactatcgcaattaaaaatatatgattatttaaaaccgtaagttataattggatatttccaatgattttagaaagtcataaagaatccccgatggtttaatatagtcacttaaaagtttgtcaaaatttttattgggtatccctaacaattttaaactgtaaaagaaaaataaaaaatcccgcccaatttttcataaaacccccccaattagatatctatctcaattttcatttcaaagtatctctctctctcttgctagtccgctctctctcgtccctctccttcgacggagcacaatagcaaaagtctgatggagccaccaccactctcaccagttggtctatctcggcatcctttccaacctcattacctcggtagtcgacaccaccttctagtcgcaccatgtcggcagttggcaccaccaccagtcgcactatcatctcggtgttgcctccaaacattagcgcaattatcattcgtcaatatcattctcgagtaatctctcttgtcttttatttgtatttatctattgtgttttgctttgatttgagatgtttacgagttattattgtgactattttttatttgagatgtgtagagtttctaattttgcatatggttcatagatatggtagacgtttcgagaggcgatataatttgtttttttaatgtgataaatgcaaaaccgtcgataaaattttttgctgattgttttaaactatcacctattctacccagttttacgacagtcgggatggttataaaggctgacggtaatacattagccaactgtttaaaatggtcaagaaatctagttttttagcagtggtgattgtgtgtggcctgaatttgataaactcaatgcttagaattcttttggctgcacctaggtcattcatctcaaactcactattaagttgttactttaactagtttatagcagatttatccttacaatatacaataaaagacaaatctaattaaggtattaaacacatggatcatgtttactcttgataaaaaccaattttcctcatgaactcatcaaatttcaaattccattgcctaggtgctttctttaagccatataatgacttgttcaagagacaaacctggttgagaactcgattgtcatatccctctagttatttcatgtagattttcatttccaaatcaccatgcagaaaagtagttctaacatccatttgcaccaactcaaggtcaaatgttacagacaataacatataagcttgattgatgtttgcttgacaatagatgagaatatgtcattaaaatatatcccttctagttgtgagaaccccttggcaattaatctagctttgaatgttgttcattctattcttggaatgctatattttttgcctgaaaatccatttgcaacctatcaccctatagtttgcaggcctaggaaccaatatccaagtcttgttcttcttgagggaaatatttcttcatttgtagcttttaaccaagctttaccattcttctctgtgatggcttcttcacagttggtaggttcatcactctcaatttcttctgcaatagctagtgcatatgttataaactcagcatagccatacttgtcagctgctttaatgtctcttcttactctatctcgagccaactaataggtacttaatccaccttgagttgcatctatgtgtgtgtcagtttcaattttttttgcatcatctggtggaacttctataatttggcctcattggatggccaaatccacctcaaacttcaagttatcaccttgtgactgtgatgtacttgttataacttcctcctttgacttcatggccatttcatcatctctatataccttacaacaaaacatatatacctacaataaannnnnnaataaaataaaataatattattaaaaaaatatgtatataccatattaacaaaattatatacaaccactactacaaaacaagtctttagagacacttttttcagcataataattaataactgacgccatagggttgaaattttttggaagggaatttgacgccacttttggagtcagttatttgaaaataactgacgccatgacagacctggcaggcacatgacctgccagatcttggcaagagcatggctggccagacctcaacctgcacacatagcatggtcggccatgcctcatcctgtagatgtagggcctgccaacttcttcctgacaggatattgatgtgcaaccttcatccatggacagcaagccaagctacaagttgggccttgacagcccacgaagatgctatgaaaatatctactttcaaggggcaatttggtcatttgtatttattaatttaatatataaatatctcttattttatttataaattagggtttaagttctcctatataatgagtcgtaactcaaccctagaaaggctaagtctcatttaagcctctaagtcattagttctttactctaagtctaaaaccctaatcttctcctctctctctcttctacacgcccaaaggggctttctctcttcctctctctcacatgcctcaaaggccatatctttctctcattagagatctgcctattgattcatactttgtaaccttaaagagagttatattagatcccacctacacctatagtgatttgaatagtataatctctcggtatcaatacaactaaactgggagtaggtcattacccgctaactaagggagccaaacctctataaatatttttgtgtttttttactttataattttaattgtgtaacacgtggcaaacatcagtgttaatatgacttcacaatcggttggtcactttttgaggttaacaaagcgcacctttgctactaagaaaacttttatatatacgttattaaaaaaaaacatttattgtatataaatggatgaaaaaaaaatggagacttttaatataggggtccttgtgcaatgaccaagctgcccaatacttaggtcggtcctgtctctatctctcctctccttccatcccttcttttttcttgagaaaattacattgtatacccattatgtacattaggaactataattttgataagttatgtgaagttatatttggcagtggcactttaattataaaacaaagtgtttatcaattcaaattattttgaagttatatttagtgaatgaaataaaaagaggtagttttgagtttatctcctccttctttcctctctaccaaacatagtattaggataatgaaagggttaactagttacctccttagagtaattagttaccttatactatttttcttattttttaactgcttttttt

SEQ ID NO: 23025 - DNA, 2552 bp, Cannabis sativa
ttacccggaggagcttatttttttaactctcttgaggtgaattttgatgacaatagcttcagaattacgcatggagtgtgagacatgacttgatagagggcttaaatagcttcaaaacgcaagttaaatcgtgtcaatcagataacaattaagtgagttatggtcgttttactgaaggcagttcaagtcgcaacacccagattaacatccagcgccgaagttgacattccagagcccaagttgacatatgatgtcaacatggacgttgcataagtgtaaaatcgtccaagggaagtcttttgaaatgcttaagtgatggtttgacacaccttagtccttttatatgttttggtgaagttggtcacacattctcgaatatgttatcttgcagaaacagaagactcaaaacttctggctttcgaatgagctaaaattgaagttctgaatttggttgatctaacttcatggatcattacacttgtgaaaaatttgacgaacggtcgaaacgacatcagattcgaataagcagaacccaacgaataaatcatttgttgacatgggtgttagggcccttcaaccgagcattcaggattctatttttgatacttccaaagcttttgaactgaaggtagtgtcccaggttaattgtcaacctgggcactgggccctgtttcaagggacgcaggtttgtggttttctttctaagtttacttgaatcttcgttatttcttatgatggttatgccaaagcactttttgctgaactaacttggaaacagcctaggttgacatgcgtatggcccagtcccaagtgtcaacctgggtgttgggtccctcttctgccccttctgaagttgtgtttggtccccggaaatagttgattctcaatattttccaaagacaaatatgatgcttgaaagaattccaggacattctttattatctgtggctcaggttgacaaattgtcaacttgggcgtaggacgaaccctctgttttgataaagacaaattcaatgcaaaagtctgatcttcgatcggacacttggaaagtggccaaattgacgaattatcaacttgagcgctgggtgctcggggccccgaggcctcagtaactcgttttgtgtgcatggatgaggactcacacaccgaaccatcacacacgcgcacgcaccaccaccgccgtcagttcgaccaaccgtgccgagctggtggacgggtgtggtgtcactttatctttttagagaaactttatttattacattattattttttatttaaaataattttaaacgtgtttaattaattagtaagatgatttatcactttgtatttttagtaacgttcacatgataaaaaaaaatagctttcttctcgtcacttcattatgcgtgttcttatataatgcaccagaaccaacgagagaaagatatcattttctcacaaaaaaatatacgatatatatacaattataatacaatacatatgtaatccgagcagtagtacgattattaagtgtggtatttcgatggttctctatcgtgcaatagaactctgatacagtattttcgactgggctgttttatcgtgggaacaataaatctggtagtctgcttgcacatttctaagcagtggcgcaaacgtcttaaaatgaacgacttagtccgcgacttaatccaaattttaattcagtaaattcatttttttttttatttttcgcaacaactattttcaacataatttttaaaattatggtcaaagtttatatatatactaatattgtgttggctcaacaccaaaaaattaatttatcaattagagttgccctgaaatttttttcaaaacaaagtttaaagtagaagtttggatagtccaagagtaaattattcctagccctgtgtttattttttacgacgacaattgatattaatcttgtaagagacatgttagaaacattataatattttgattagtctcatatttgtttaagattcatagaaaaaaatagagttttttatatgagttataagagcatttccaataataatattttgaaacatgcttgatgagttagaaaatttaggtgccacaatacgaggatactataccattagaaataaaagaatactattattgaaatttgcattgatgccacaaaaatactatattttttttttcaataaaagattaaaggtgccatatatataaatatatattagttgaataaaaaaaaattatatatataataatgtgtgagatcataattatagtatttttatactattaaagtgttttaaaaaaataagagtgcgaaaaataacacgaaagaaatatctttaaataatgtgaaaatatataacatatttaaaaaatgtttctattggagatggtctaaccttattgtctgtattgttgttaagtcacctcattcattccataaataaaagggttacttctcattttgggtatgtagataacaagagttttatggctcgtttggaatgccgtattagttcgtattgtattgtattatattgaattgtattttatgcaat

SEQ ID NO: 23026 - DNA, 5535 bp, Cannabis sativa
aggaaggaatgtttgtattttctcaacaaattacattaattttatttgttttaatttttaccttaatttttatattttttttagatatatccacctttatagacgatgtttccattagacctcttagattatatatgtcagatttaagtagagagtaaagatatattaggcaatccactcaaaaaagtgaatatattttaataaaaaaatatataaggtattaatggaaaaaaaaaaaaagtattttttcagcttattcccttttaatatttatctaagcataaaattattaatagcaaaaaaaaaaaacttcttttatatttattatgtttttttatatatatcttgaataaattataaataaactacaaatttggacttaaccatgagacaacttaggcaattacttaagaacttgtagacttattttttgacattggacgagggaaatttgaatttaggacatcctccttataatgagaaatgtagaaccactgaaatatacctatgatcataaatttctcggattttttttttttttttgaaaaaggaatcattcattaaacaataacattacaccagattaggataatcaagatgtctcttaacttgattaacacaaaggggtgtaaccccaatccccatagtactagctttggtatttaaaacataattagctaaattgtgagccacaacattggcttcacaatatataaagttcaacccacctactctatcattacctatcaattatctaatatgttggagtaatccattttcctcatgacatgcaaattctttttgttgaattaatttgatggcttctttacaatttgattctacattgaagcttggtaatgttctttgactttcaatctctagacttgctcaggcatacaattcagcattaattagcttaaaaacctgctgcagcaaagtagcagctgcataactcaaacttttattgccatcccaaactactactctaaagtcagactgcccccaccactaattacacctacatcaacaagaaagtcgtataaagtcttgtggtataatggtgttaacaaggaatacttcacgtccacaagctcctgacccaaaaggtcgagaagaagaataggcaacttttagggtggatgttgaaggagaaggagacaccaatgatcctgaaaattcagaccaagaggaatacgaagaatatgatgaagacgactatacagaactagttgagtcaaggcaaaaaaattgttgaccatgaggatgagttggcagaacaaaaagaacaaaataagagaatgcaaaaaatattaattgccataaaaaaaggcaatgggaaatgcaggcattcatgtagatccaactgtagtctcgtctgtgcaaaatgcttatatttccaattgacaaacccgagtgatcacctttttaggttcaatagagtcatgtgggtcagtcggggtgccaaatgcttatatttcccattgacattgggaggatctgcagaagaatggttcaagaagttagagcccagatttatgaattgttggaataaattgcagactaattttagaagacaattcattgcagccagaaagataaaccttgaagttagcactctgaccaacattaaataattacccttagaaaccttgaagaacttaatcaagaggttcaaagaagaggcttccaagacaaaaaaaaaatagatgacgaataacagttagctttattacaagctaatatccagatgggaactcccttttggaatgaactacaataggaaggtgtggccaaccttcaagattttcaaacaagagcctagaagtacattaatctggaagaagcccagataatgacttttcgagggtattgccctataagaggccttgggcatgcttctggaatgcaattactaggaatcacacatcctgccactccctaaatgagtggcatgtcaagtgtgtaatttcaagcaacacatggatactcaccaaatctcactgtggcaccaactcgttctgactacgagtttccaggaaatggccccactcccaaagcatgcacacatcatctcgctcaatctgtttcacttgcgggaagtgcaactatagctctcgaagcttcccagagcaaaaggtcatctaaaaggagcacccagagtgagaacaaaaagccgaaaaggtttgaatataatccttagtatactcagtatactgattttgtggacatacaagaacgtgtgtatttggctacaagataaaatgttcattaccgaaggccaccttctttattccaagacagttcataaagggtgccgaacaaaatatgttaataacacaatgacattggacatacaaccaataaatgtaagaatttaaaagacaagattgagagcctgatacgactaggccactttgtatgagtggataaggaatcgtggataagctagagctcaagtaccatccaaaggtgtggtacaagccccaaatgtacaggctcctctgggagcacttccaccaaatcaatgggctttatttggacagtcgcccagaccgaacgagagagtggttatgatctccggaggcccccatataaggggttcaacccataacgagttcaaatgttatgccagagccctagatcatgatgatgaaatatgggaagtgggccagctgctagcttagagaccttgtctcatggaccaaccaataatgtttactgaagaagatgccccaaaggtacattttcctcaccatgacccattggtgattaaaactcccatatccaacaagttagttgatcgaatcttagtggacaatggaagtttggtaaacatcctattcaaagaagccttccttgccatcagcctcatggactaggacctgtccccgagtggttcctaactcataagatttgatgggaattctcttgttcctataggaaaattagactccttgatgacactgtgccctgacactccttaaggcacattcaagtattgtacctttgttgtggtagattgcttgccagcctacaacgcataatggggcaaccgactttggtaaattttggagccataacttcgattagacacttgtgccttaaattccctacacactctagcagtttgagtgaaccagggagaagcaataaaatgttatagcgtggccaccaagcaagctatctttgtggtccagcacaccaaagaaggaaatccagtgggggtacatgatgagctagatcctcgagtgaggcaaaaactaaacttgaacttatggaggaagtggaaaaaatccatatttgtgtgcaggattcgacaaaagtgattcgctttgggaaaggcattggtcccaacaaaagaagtaaaatagtggaaaccttcaaggagtcggcatatatctttgcatggactcacgaagatatgaatggtatcactccaagcatcattactcatgttctaaacattgacaagaatatgccaattgtgcagcaaaaaaggcatccctttgacccaattaaatctgaagccttaaagcaagaactagacaagatgttgtcgaatatcttcatccgagatgtttattacatggagtggttagctaatccggtactagtaccaaaacctaacgcgacatggcaagtgtgcattgatttcacagatttgaacaaagtgtgtcctaaagattgcttcccactttttcgaattgactagctagtagatgccactttcgactatgagaagctatctttcatggatgcttacttcggttacaaacatatcaagatgcatgtggctggccaagaatacactagcttccggacagacaaaggggtatattgttaccttttcatgccctttgggctcaaaaatgtaggagcaacttatcaacggttagtcaatcagatgttcaagaatctgttgggaaggaacatggaggtttacttggatgaaattttggtcaagtccaagaccactaagaaccattctaacgacctaaagaagtgctttggggtagtaagagagtacgagatgaagctcaatcataaaaaatgtactttcagagtaaaatccaaaaaatctatgggagtcatagtgagccggcgaggaataaaagctaacccccaaaaaatacaagtcttactagatctgccttcccccatgagacaagaatgtgcaagcactgacgggaaaaataacaaccttgagccattttatctctaaatccattgacaatgtatcccattctttaatatattaaagaaaagtcaaaaatttgagcggaccgatgagtgcgaagaaacgttcaaaaagttaaaggagcacatggataagccttcgatttcatccaaactagtatcgcgagaagacctttacctttatttgggcatctctgagaatgcagttagcgcaacctcggtccaggaagaagaggaagtacaacatcatgtctattatgtcagcaagagaatgataggtgcagaagtttggtaccctttgatagagaaactggccttctatctgctgataacttcccaaaagttgcgaccctatttccaaggacattcaatcaaggtctttaccaaccatccgctttgacaactcttacaaaaaccagaagcctttggagaatgctaaaatgggccatgaagctcagttagtttgacatttagcatgtctcgagcatctcaataaaaaggcaaagccttggaaaatttcatcgtggaatgcaacaaaaccgaggtaactgctcatgcacctgaagtgatcacccccacctagaaatgatatgtagattgggcctcaaacgaaaatggatcagtagcgagaatagttatggtatctcctgaagggttaaggcttcaaactgcctgcgatttaaacttccagtctctattaacgaagccgaatatgaggccttactagtagggctgagatttttgaaagttgtgggagcccgcagggtaaaaaaatttagtgactctcaattggttgttaatcaagtacttggagaataccaaactcgtagagaaaggatggcctcttacgtcacaaccgcaagggaatcactttagggattcaagggttacaaaattgagcaaatcccaggagaaaagaatgcccacgcggatcgcctgacaaagctagcttcaaacaaagaggttgagaaagtgggggtagttcccattgagtatctcccggagcccagtgcaatcaccaatcaagtgcttagttggatggaccctattgtgaattacttaactaagggagagctaccccaagatagggtcgcctctaggaaagttcaatactaggcccctcgatacctcatgaattatgtcattttatatcgaagaagtttgagtatgctctatctgaggtgtgtttttggtcccgaagctaaacaaatagtggagaaactcgtatatagttttgcttatgtgttgttctagttaatattaaaaatcaaggagacgttgggttggaaggaatgaaaatataggaataggaatgggaatgagaataggaataggaat

SEQ ID NO: 23027 - DNA, 3043 bp, Cannabis sativa
  modified_base (154)..(164): a, c, t, g, unknown or other
atatatattttttaaaaattaaaatttaaatactaaattaatttacaattaaaaataaattattttaaaaaaaaaaattaaaaggaaaacaattttttatattctatactctttttttttctagttctgtacacttgtcaaaaataccataagnnnnnnnnnnnaatatgaaaaaaaaaattaagtttcaataatacaataattagtgggctttggactggatattcacatattggacctaaatacatataaaaattggtatttttataatgtgtcgtgcggtgcggtttgaactacatattaacaatttaaaattgcaaaccgcaccgcaccgtgcaatttatgaaaaattcaaaccgcgaccgcactgcaaagaatttcaaactaaattttttttggcggtgcggctgatttgagcggtttgatgaacactcctatccatataaaggtacctggacattaagtgttaagtcattattcacatgtcattttctataagtatattaaattaattttttaaaaaattaaatggcatagaccaatcaaaaattgctacatgatcattcatttgaaacttagcaagcaaatacttacagaaattttaagaatataacttaaatattattatccttaaaaattaaatttaaatatttatatggagagaataaaacttaaaataacttaaaacttgaaaaagaattttttttttttgtataactaataattgaccaaaagcaaaaaaaaaataaaaatatgaaaatatttgtacagcttagaatatttcttaccaaatagtgtaattaatatttatttgtagtttctatatacattaatttcattttctattgaaaatatcaaaatcaaagtcaacattacaaatatacaaatacagctaagactatttcttacagaatagtgtaattaatatttatttataatttctatataaattaattaatttcattctttagtgataatattaaattcagtcaaacattacaaatattgaaactctctcacaacataccattttatgtattttcaaactttgtaacgtatattagtattaaatattttttgagaaaaaaattaaatatttattaatttttatttcaattacatatataattaattagcttgtatataaacccaattctctaattcaaatattgaaactctcatatatatcatattaatctattgctggtatattatatacatctataaatatttgcatgattcttatgaactgaattaaaatatactgaaattcatatcatttattttttgttggtagatttagttttattctttagctaatttgaatgtatatttgtattgcagataaaatctttccacatagatcgatataggtatgaggggatttttcatagtttctattgtgttgtatacagtacttttatgttattgcaagtccgatcaacaacgagtagagttatcaagagatgaacttctggaaatagagaatcaacttgtgcgactaaacaaatcatcaatcaaggctattaaagtatttttattcaattattattattatcatcttcatcttttgcttatcttatattggacttatatgtaaattgtgacttgtgtactgtgtcatgtacagacacaacatggagatatttatgattgtgttggtttttacgaacaaccagcatttgatcatccattactaaagaaccacaagtatgattttggggtaggttttttacaaatatttttttttctcttataacttataattttttattttccctaaccatagtgaatttgtattataatatattatctatataagtaggataagtatttgtggtatttatgatgtagatgagaccttcttctcatccttacaaaatggttaggagatacaagcctccaaagaatgtggaacaagtatcgataaataatgggttaaagggtgaaaaatgtccaattggatttgttccaataagaagaactactaaagaagatcttatcagagccaaactatttacgaagtcttatacttcaagtattaattctcctcctacttttcatgtaagcatatcatttacattttcaagttttttttaacaaattaaataatatattccatcattgaaaaataacttcaatttgaatttgaatacaatagcatgcgcttgtttacacatctgatccaactaagaaatacaatggagctggaacaactgcaagctattacacactatataatgtcactggctcacaatatacttttggtcgaatgaagttacaaaatgaacatgatatcattcaagctggttggggagtaagttttttttttattttttttttattttcacttaaattttattttctactagattcttttttgtaaaaaataattccactaaagctttttagataaattataatttttaagaatatttcttcacttattaattggttatacgatcatttattaggtaaatcctagtctatatggagatgatcaaactcgaatcttgatatattttcaggttatctaaactttatgtttattatctaatatttttttcatatttattgtgtagttatgtgtaacttgtgtatcaatatttttgtaggctggtcaaatatcttgtttcaatacattgtgtccaggatttgttttagtttatcctcaacctatgatcgaaatgactttcaacgaaacccttcctggcaaattacctacatgggaatttgatttaaatatttatcgggtaaataaattaaatatttaatataatcattttctatttttttttcttttaagtttatcttgaatactttgtttaaataaaaaaatgtgtttagatttaaaattttgggtttgtattgttttgtacttgtttgatatgatataataataggataacattaccggaaattggtggcttcaatttgggacggatcttgctcatgttggatattggccatcaagcatatttagtggtggattgaaagacttggctacatatattgattggggaggagaaacttacagtccact

SEQ ID NO: 23028 - DNA, 5604 bp, Cannabis sativa
  modified_base (3966)..(3972): a, c, t, g, unknown or other
ataatattcttgttagttattttttaaaatatttgatttatttattagaattacaataaattattttatccgtttgattgcattaagagtaattttttaaaaattgttcactaaacataatctttgctccttactaaaaatatttataacataatatttttttttaaataatatttttttaagaaaaaaaaccccaacagtttactataaatttatttctaaacattatattatatatatatttttagttaatgcattgaatatatcttaaaatattatattcttatcaaataaataaataaacaggaggtaggaatcgaactcggcacccacacctcaacaaaacccctctattaccaactgtgctataagccattttatgtaattattgaaccaaaatttatatatacatatattatatttttatttttttatatatataatattaattttaattttttcggggccttcgaaattgtggggcctgagtaagacagaaatataatcggttgttcatatagtataaaaagagagcaggagaaagataacacagaaatctgaaaactataaacattttattttgtttggaaaatgtaaattttttattaaatgatcatgatacttcccaaaaaataaatgaggggaatggaagtgaaagaagtatatcttatggttaataattgaacctcttaccatgaggaaacaaaccccaagctcgactaccaaccgtccccattagctaatcaattaacactacttatgcaattgtatattatggaaatagcattaaataattgggaaaaattcttgttaactatttccaaagggctttttctattagtgtacaataaaatcaattttattacaaaaaatgtatgaaaaaagttaatttaaaaaatgtacatatttgaaaacatatttacataaaatcatacaaattgttaatttaattatattagatttattaatgagtcaaattaccataattaaatttttgtaacacaataatttatttaaaatatttattattaattttttagttgaataataatgttgttattgtttattatatattattatgatttatgtttgaaatgatatcaataatgttttatatttattataacagtagtttagaaatatttaataatataaaatatttataaaaatataaaataaacaatagaaatagaagtggaatttaaatatataaatattaaacagttttatttttaagaaacaaaaagtatataattaattattaaaaaatatatatttattattcattttattttgattaattgtaatttaattattttttattgaaatataatatcaaaataatacatattaatgtatataaattttgaaagtatgtttatttaaagttataaaaaacaataaaatgtgtattatatattattgtgattcatgttttacatgataataataatgctttatgtttattgtgacaatgatttaaaaattcttaataataattttttttttataaaaatataaaataaacaattttgtgaaatttttaaaagtacatattaaacagttttaatgtttataaataaaaaaaaaattattatgaaataaatgtttcttattcattttattttgaataattatattttaattaattttatgttgaaatataatatttaaattataaaatatataaattttaaaagtgtgtttatatataatttttaaaaataataaaatgtgtattatatattattgtgattcgtgcgtgacatcataataataatgcttcatgtttattttaacaatgattttgaagtttttaataattaaaatgtttataaaaacacaaaataaataaatttgtaaaattaaataaataaattttaaacagttctagcatttataaacaaactaattttttaataagaaaaaaatatttattattcattttatttagaataaatataatttaattaattttctatagatatataatatcaaaactataaacattaatgtatttaaattatagaagtgcgtttatttatagttttgaaagcataaaaaaactaataaaattcagatgtatgccctattttatatacatttatgtaaaatgccatattttatattatatatttttcgaaattctcttatattaaaatgccctgttttatagaaattcttttattattatatgtttattattcattttattttgaataattatattttaattaattttatgttgaaatataatattaaaattataaatattaacgtatataaattttaaaagtgtgtttatatataattttaaaaaataataaaatgtgtattatatattattgttattcttgcgtgacatcataataataatacttcaagtttattttaacaatgattttgaagtttttaataattaaaaatatttaaaaaaacacaaaataaacaaatttataaaattaaataaataaatattaaactattctaatatttataaacaaaataatttttcaataggaaaaaaatatttattattcattttatttagaataaatataatttaattgattttctatagaaatataatatcagaactataaacattaatgtatttaaattatagaagtgtatttatttatagttttaaaagcatcaaaaaactaataaaattcagatgtatgccctattttatatacatttatgtaaaatgccctagtttatattatatatttttgaaattctcttatattaaaatgctctattttatagaaattctcttatattatatattttcgaaattctcttatattaaaatgccttattttatattaaaataatgtatacatttatgtaaaatgccctattttatattatatattttcaaaattctcttagaattcttcttggaattttgtgctccttattattgagtaattgcccactcatatcaaagcaatattcaagatagtgtggaagattgtgtagtttttcatatcccgaaggagaatctaagttcagttcttgatcatactctgtaacaaaaagaatcaagggttagagaactgaacaaaatgagtcaataatttctgttgcaatcaatgtacggttttttaatcccttatgtgtttattttgttattttggaaaatccatgttaggttgttagattagtcttaacttaacatacttgaatagtaaataagatcctagttaaacaagtttctaacaaataactatatgcatgatataatgtcgattatgcaattaggaccataacatgatggtcagttttattaactgcatttgaggcacatggtagcaccctaatgactatatgttgacccattaaactatagtccaccacttcttgtattatgagcccaatatatatagagacatttacataaatatagtaataagaaacctagtttacataaatataataagtaaacttaataggaaaaaatatggtatttaaaataaaaaatttaacatatataggatatgtcatttatattactattaaaaatattaaaattccattcatatatttttcttttttaaaaaaataagacaaatgaaactacagtgatcgctagagttgtcactggtgtcagaaaaattaccggagtagcttccggtgttagaaaagtctccagagttgctggcggtgccaaaaaaaatgtcgaaaattggcattgtcaccgaaaaatcattggaaaaatcaccaagaaaccaattttgattatatctaagtaaaatttataattaaaaaacctataaatacagttttgaagcaaccccattacagtaaaacagaagtgctcgaaaagaatacaacaatcaaactactctctccagccacacaagatttttttctctctcctgcgcttcaaattgcttagtttctcatgcgatgaaaatcaatcaccaaagatccttcatcaagaaattggtttcttcnnnnnnnaactggtttcttggtgatttttcaagcaacaatgccaattctaatgacttttccaacgccgacagcaattctggcaacttttccgataccgacaacaaatttcgatgacttttccagcactagtgacaaataaaactgcttaaaaatattaaatatgagctttgaaaacctaatttacatatatatgacatatcaaatactataaaaatatctaaaaataagaaagtaccatataaattggtcagatttaaaagtaccatagttaagtaaataatttttaaaatcctataatgagtgtaattgccacatatatatgcccacaccccttagggtatttaggcatataatgagaggtttaggtgtgttaagttagagagtggtaaggtggtaagattttggtttaggaatgctctccataagctctcacactctcatgctttgatactagaattcgtggtgattcaagataactcacaatcaagcaatgctcaatattaatgtatatttttgtataatttaatgctttaaataaaattggatcttggttgtgataaatgcaattctataaacttatgtactttcgggagcctgaatttgagggggagtactagaaggaaattcaaactctcaactatgatgaaaatgataaccaagatgttgtcaacttggattcaagtggtatcatattggatcaaagtggtgatgacacaaacggatcaaaatcaggaaatgtgtgattttttaatttttaaaaaataataattatatatatcataaatattatttaatttcgtatattattattttttttaaaaaaaaagaatcatatagtttatttattttcaaatatctagttttattgaatattatttaacattattttctatttaaaaaattgaaaaattataaatttattaaagaatatgttataatccatttattgttgttttcataatgtacatgaattttcaaaatattatatatatatatatatattttaatattattttatttaaattttataaatatttattttatttgtgaatataagtattatttactatttgttgactcaaaatttgatcaattagtagcggagctgtatttatgatagacaatcaccacgtgtcaataagaacaataaatgataaaagagaaataaaaatttatagaggttcaactcctttgtttagtgggaaatggcctactctcccttttagttgtattgatatgatagataataccactccgatcacaagtgttgtaggttctaggatggctctctttgaattacaatagtgagaatgatgctagacacatcaagaactcatcacatcaagaactgaagagttcttatggaggacttatgagaagatgtgacttagtgttttgtatgatgcaagtggcgtgtgggagagagaagtagagagtgcaagtgttctagggtttccagagttagaacttagaactcatgaattagaacttagccctttaggtttagcctagtgctctttatatatgagagtatataggagagaggttacagaagatctaagccaaagtaggttgatatcccttaaaatgaggagatatcacctatttgttgcgtattaaatatataagaaaataacc

SEQ ID NO: 23029 - DNA, 5665 bp, Cannabis sativa
  modified_base (27)..(31): a, c, t, g, unknown or other
  modified_base (228)..(229): a, c, t, g, unknown or other
tagtcacaacataattttttgtgactnnnnntgatttttagtcacaacaaaatgttacttgtgactaaaacatgctatgtagttacaaattgtcacaatttagttttagtcacaacaagtattatgactaaaaatatatttagtcataacaaattgtaatttttgtgactaatgcttttagtcacagactttttagtcacaacataagaatcatgatttataattagnnacaatttttttacttttagtcataaatgttgttgtgactaaaaataaaaaattttgtagcatatattttgacaattttatggttgaccgttatatatactttgtttcaagatgttattgttttttttcacaagattctgagtttaaatagttagaaataaacacatgggtgagagagaaataaagaaagatgcagaattttcttatttcacactaatattccattgatgttataattagatatgtgtggttgtctagtttcttccttccaaaaaaaaaacattaacgtgtgtagttttattacacattatttgtcaatatacattgccctttcttgtttacaaagttattaaatgtgcttaatttacaaatcttggcaatgttgtcctttataagggattggaattaccttgagaggaacagctttcctaagcgttatgcccattctctcactcatatccatttcgcctggtttaatcccatcagccaaaacccaatcaaacgacaacaaaagtgagcctaaagccaaagggagtaccctagaggcaagaggaaccgccggacacatccgacgaccggaaccgaaaggtatgaaatcaaaatggtgacccttatagtcctttaccatatttggctctaagaatctctcaggcttgaactttaaagggtcttcccaagtcttggggtctctccctattgcccaaacattgacgagaatctgagtgtgtttggggatgtaatagccgagcatttggcaagtgtccatggccatgtgtgggactaagaatggaagaggagggtggagccttagcgtttctttgatgactgcttttaggtatgggagattctctacgtctctctcgtcaagcttcttcccatttgagattgttcttctcagctcggactgaacttttttaagtgttttagggttatgaagaagctcagccattgcccattctaatgtgcttgttgttgtgtctgtccctgcagtgaacatctcctgaaatattttgtgcacatgtacttactcattaaattagtcaatacatatattgcaaagagtttcatgccttcgaaagttgctttcgttaaggtatatgatcttctacataaaactctttgaaaataagttttttttaaaaaaaaaattattttacttgttttaatttttacctattttttattctttaagatataccaacttttatagttcctattagaccagggttaatgtaaattatataatagacttagtgagtgaagatatattagataactcacctaaaaaaaatgagtatatttaataaaatataatataagagtatttttgattaatggataaaaaagatattttttaacttatcttttgtaatgaagtttcatatttttttattcatttattcattattattattatttgtcaattatttttttattttaattactaaaaatatatatatttttgtctaatatataaaatatatatgtatttttgtcaaatatatattgttttagatattgaattatttttttttataatgttctttaaattttaatatccaaataataactaaattaaacttcttacttttattgtttctgtctaaaagtaaaagcatgtgaacaaacctacccaaaataaaatttctatctcatccaatatatcaattcatctaaatctcatccaatatagtattttattttattaattttatttttgaaaccaatccaatatactcatttaaaatataaatcatagctatcaaaatattcatgtgcaaacaaacacatcctcaaataatgcttgcggagcccactcaataattggaaagaaatataaaaaagagagcaagacaataattacactctaaatatagaaattattttatattaaagaaatcctgctatttcacttttttgtctaaaccaattttccaacagatttaaaaatatatatatttttttacaagttttaaatgttaatttagaagggaatatacctattttagttaattatgtgtttcatcgaaaaaaataaatttgatatcatatattttcaataatatccaaaattcaaatttaggatatcctatatatattgaataacaatagttgtactctacatttataagtgtacacatttagtattctaattcaaatttagtcaattaaattttataaattcaattaaactattttcaattatatgtaatttaataattaaatttaaatttaaaatttatgcagttgaagacagagtactaaataagctcttatacgatttcaaaatagtacgttgaatactaaataattattatttggaaacacaaagtagtaaatttgtatttcaacatcaaatgtataaacaccctattagaatatatatgcatggagaagaattaaaaaaaaaaaattatctcatatatttttttcaagtaaataaagagaaaagaatcactaaaaaagttaccttatatactaacaatttttagtcataatataaatatcgtgggactcttttagtataacaaaaaatacttgttataaaagaaattaatattttaaatataaattattaatttttaatttaattttaatcgtaacataaaatttcaaaaaaaaaataataaaagaatttttattcttttaaattagaatcatttctactgttcctaattccctcatatatgattttttttttattatatattattgatgtacagccattttttttaaaaaaaatcatttaaaacaatattacctaatacttattataggataagtctatagtatattttttaagagtgttttggtaaactctttatttgtttcgcctggcatatattagtattttttactctattttttttattatacgttatacttatttaggaccacctataaattttgaaaaaattacgagtagtttacaatattgaaaaataagatttacatattttgttgcacaaacgactacttttcttatatgcttggtaagtaagtgtttaaattttattttcagtattcaaatttttttaaaattttacaagtaatcttaaatagctacaacttaattatgtgattatgaaaaagaaattgactaaaaatctcttttaaagataaaacatagataaaaaaaaaatctacccaaacgatccttctactacctaaatttccatagttatatatatatataaaaaaaaattacacatcaaaagtttacttatcttatgttttctatttttttttttttttttgctaaaatatcttatgtcttcttactcgaatgtatttgttaaattatatatatagtattacttctgaaaatatatatatagtactatggaatggccggtgggtactggcaaacactagaatgattttgttttaaaaaactagaattgatggaatgaaaatggacattaagtcaacaataatatataatattgagtgcatttaatgcatgtatgcatgtccttacaaagacgatgacgttaatggtcctggaacaaaactttgagggctcctccatcccattccctcgaaactccaaaagcacatctaagaagtcccttctcttctcatcatcactctccatcctttctccgataaaccctcccgcaatctcaaaagctttctccacatgaaactgtgtatttctcctgatcccttgaggatccacacgcctaaaaattggaataaaatcagcaacattaggtttaccagcaaactccataactttacctgtatggtaaaaaaactcagccccactcttcgatttcgggtccaataaatccttcgaaaacattagatttccaatcaaattaaacgccatcaagaaaaaaaaccgtcccacatcgactggatcactcccacacgccccggcttcctctataaatttcaccatgcgctctatgcaattctcgcgaacggctctagatgcgtcgagtcggctcgttacgaaaaattctgtcatcgaaagccgtctcagcattcgccagtgtgggccgtattgggccgtgatgagagagccctcgttgctgtgttttcctttcatggactcgtagatctttcggcccgctaagacaacgtcgtggtttttgaacatctcacgggctgtttcttgggatgagattacgatggtgctcatggagcctagccatatgatcatgatgggcccgtggatttgggccagcttggtaaaggacacgtggggagcccagcccagttggaaaatgtttcctactattggccaccaccttgggcccggcggaagccgacctagcttttcaagctgacgatgacgacgtcgttttatcattattactgcccatgaaacccatgataacaaagttattagtgcaaagagtaaccccagcttttcgttatccatattttgtgttaggtttttcaactaaagattatgcagtatttatagttgttttttcaactatttgtgtatcaataaaagccaaactattcttttttttttttgataaatgtcctgtattcattttcttttgtctcttttattcattttttatttttatttttttgaagggaaatttattaatttaaaaaaattattatgaatatattatcaatacatactatatattatatatgtaactgtgtattaaatgcgtgtatagtttatgtatggagatattattattatatgagatgagtttttttttttttttttttacattgaacaatttttattcaaaaaattagtgatgagtacattataaagaagatatggaaaaatctctattcaaactagcccaacatatattttaagtgtgtgcacaactaattcatttgtagtcatataggcagagtgatttaaatgaataagagaagtcttaaaaaaattactaaattaaaaaaaaacatcttaaagagagcctaaattacaaaaagaaaatctcttaaaaaataccgagatcaaagctaaataattaggctcataagaattcagagaaagtctaaatccaaaaaccaatccaaagctacaacttccttaaataactgtgagatttcttgatcaaatcttaatccaactaaaaaagtaataacgactgctaaaaaagttaatacctagaataaaaactccaaacaaataaatttagtaactttataaaaatacataaaaattaataattttaaaattgtcatataaatgaatgatatagtaaaattttaagaaagttaataaaaggtatccaattttgaggtccttctagcttagaatgaccaagtgagtaaaataaataccacactcatatttataaaatttaggtgatatttcgtaatacttttattttttaattacaaaattgaaagtaaaatttgtgtttttaaaaataaaaatgtgttctataaccacttttgttttttaattttaaaaacagaaaacaaaagtgtgttctat

SEQ ID NO: 23030 - DNA, 2697 bp, Cannabis sativa
atacatattatatctatctagtcatgctttattaggtctcactttacacttgcgaatataatgcaaaggaagtgacattatgtaccctatgtcctattcctcttgtatatcattatctttgctttgaatttattaatacacaatactgagtattccatcatcaattcagagatcacatctacaaacactaaataaaattcatgtaaatgtgtttcaaaaagaagagaaccaaaaaagttgtggcagcaatacaacgaaatcatattacacattgaacttttaagtctgcatacaaatttagggtaactctcaatgtgggctaatccagtcaacttaagttcatatgttcattttcacacgtggcatacatacaacaataagatttcaagagaatgaaaggctttaaggtttaataaagttaatgtattattgatgattaataaagatggaaaagttaagagcaagaaagtgtttagagagaattgcttttgttgagagacaaatgtcatgtatgtgagaggttcggagatattgcatcatgcagatatgcttctgctgtgggtaaagattctgaagaacttgattggcaagtcatggtgtgtgaacgttaaactgactgagattgtagcactatccttggaatctttggtgtatgaggcttttttttttttttttttgaggaataaactgccatattgttacttatcattcaaagaacaaacaaacaatctgtagtgaatgaattaccctcaaaaactcgatcaagcaatcattacagcaattaaaataacaacaatataactaaacagtttgatcacaaactgatatgatgacaattgacaaccaatatcaattaactaaaacagagtgaaatgtaactaaaagaattaataacaagagaccttttattgatgttgataatgagtacatgagagacttgaaacaatggagaattgttgagcaaaaattaccatgaaaatcacattgggggaaccaagatcaaatacacttagaccccttttacaaccctcctttcagtctttctgagttttctgatctcacaacattaattcaagtgaatggtacaaggtctatttatagtagagattagtttaaaggtgttaattatttaacccgggtactaactgttaaaacagttagtgacacatcatcatagataaacataaatggatgaactaaacaccacaaatccaccttagtttagacatgttaagtttagaaaagatatgatgtgtaacagaaatgaattgagtgacaggcatcagcacttgcagatgttcaatagattcaaacaatgcttgagcttggttaagtttacactctttgtcaacatgtcagctgggttttcatctgtgctgattttcttggcttaaacttctcttttagctacaatttctctgaaaaagtgaaactttatgtctatatgtttagacctttcatgcagcataggatttttaatcaaatggaatgcactttgattatcatagtatatggttatgttgtttgagtttaaaccaagttctgttgtcaaaccttttagccaaagagcttttttgaaggcttcaacattgtcatgtattctgcttcagttgtggaaagagaaactaccttttgtaggtttgattttcagctgaatggtccaccaaaaactataaacactcgtccaattagtgatcttctggtatctatgtttgcagcataaccattgtctacatagcctacaacttcttcaactgcttctgatttgttgttgtagattagtcccaagtttagagtaccttaaaggtatttgagtatccatttgacagttgtccaatgagcatttcttggattagccatgaatctgctcactacacttagagcatgagctaggtttggtctagtgcagaccatgccatacatcaaactccccacaacattggtctaagggacttgctccatgagcttcttttctgcattagtttggggattctgagattgggaaagcttgaagtgaggagctaggggtgtggatacagcttttgagttgtccataccaaacttttcaagtactttcttcaagtagttagcctgtgatattttgatcattcctttatggttttgatcaatttctattcccaagatcttcttagccttgccaagatctttaatctcaaattcctcactgagcttatccttaatcttcttgatctcactctttttctttccaataatcagtatgtcatcaacatatataagaaaatacaaatgttgattcatgtatacatacatcatactgacttttagtgaaaccaatactagtaataaagttgtcaaacctgatatttcattgccttagtgcctgcttcaatccatatagagaccttttgagcaagcatacttggcttagattgccattttcatatccttgaggttgttccatgtaaattttttcatccattctccatgaagaaatgttgtttttacatccatttggttcacctcaaggttgtctttggctactttggctaacatgactctgatagaggtttgtttgataacgggggaaaagatttcattgaagtcaatcccttccttttgagtaaattctcttgcaacaagcatggccttgtatcctgttggtgttagataaattaacaattaacccaagatctatttgtatataacatagaacac

SEQ ID NO: 23031 - DNA, 2399 bp, Cannabis sativa
gaagggggcaaaaatgtaaattttgaaggatcaaaatacaaaaactaaaaattttaggggaaataaagaaaaagaaccaaaaaaaaaatgagaggattagaagtgtttttataataattattaaattaaattacgtgagattcgatagttatttacactaataataatataactttattgagatttatgaaatagttagtatttttctatgataattattaaattaaactaaatgagattttatatttatttatattaataataatacaatatttaattggaatctgtttaagacttttagtatttaattaatttatttttaatctgtattacttatgaattagttgtgtatatttttctttttttaaatgaacaacttgtttggataattaatttttaataatttttaacatatttatggcttgtatgaagttattatatttttaataaatttattcattgctttataataataataataataatactaataattataataataataataatgacattttatagtagtcttctaatttttcttagatcaatccaactgtatttttattttctctgtcggtttgtagaccccccttaccttggccttggcctacttcacaaataaataaaattcttcaaaatcattttcttttcaattttccccacctttccttcaaacaattttttttggtcagtatatcctactagttttatacattttctcacaaagagggaggtcttaagtttaaaaagtattactatttaatatcttaaagtatctaataccatactgatgtagtgtcttataattggttagtaattttttatataaattattaaattaaaatatataagacctaatattaaaatacatcaataacattatgtcacgtcttacctagcacgagctcgaggtgcactttgtatttttcaaaattgaattacccctcccccaaaccccaatatcaaaacttttgttttcttttttttcctttttgtctgagaaaaagatatacttgggtacaaacttttgactcttttgttccctaaatgcgtttacagtcacattcttaactattaaataaaggaataataatagtaattaaaatagagtgaatacgtggtttactttaccatgataataaatagatcatattaataattaaggcgtaaataaaggcaacaaacatgcatgttactcaaaatcaaatcaaatagtctcccattcacattgtattatatatttatttatttctttataataatcccaaacacaagtccattgtctgtgactgtgataccaaatctcataattttttaatgtttcacatgcagtccattgatggcatattcttgctctttgttttgttatactgctaaattaattaataatcatttatatggccttaattaaacaaagtatcccaattttgtatctaattaagaatatcaattgataattattacatgtatatatattgatatgccactagctataatagtagtgtatctattcactactacaaatatgggattcagtgacccattttgaaagactctaaaactatatagtgacacttcaacgcgtgtcactaatgtgggtgtcaggaaaagtaataattagtgaccctctagcgcatgtcactaaaaaattttagactccctcattgcatgtcactatagactttcagcgtgtcactatttgtatttttcttatttttttttattattttctggataacaaccacaatcaaagagtgtcactatatcatatttttttaaaaaaaaaaaattaaaattaatattcaatgtatcatgattttattttttttaataaaaaattaaattaatatacattatatacaatatttattttcttttaattttcattaataaaacataaaccgtgtatgtatgcatttatattttttttttttttttttttgaaacaggtatgcatttatattcaataactaaaaattaatttacagaaaaagaaaaaataaacaaatattgtatattgaacaaaaaagattcgtttaaatcaatattaaatgtatacatacaacacagaatagttcaatagttcaatacaaaatacatacaaactcaaaaatacattgaggattggaaacaaaatagacctaaaaaaatatcaatacaagttgtaacctattcttcaccgcaaactaagaagccaacggagttaaacgccgagatcaatccgcgaagagcttcagcgctgacaacctgcaacacaagagagagaaagagaaagagagagataaaaagttgaagagatgtcgacctgggatttttggggttggaatctcagatctgtgatcggcgtggctgagtgaggcggagaggctttgtgatttttggggtttcaaggtctc

SEQ ID NO: 23032 - DNA, 2299 bp, Cannabis sativa
  modified_base (1815)..(1826): a, c, t, g, unknown or other
tatcataagaattttaaaatcctatagtaagtgtagtttcctcttgtttttatttattaaactcataacccacctataaaatagacgggtcagacccgacctgtgagtatcttcataaatttacgggtacatgaggatggtacaaattcgggtatcaataagaattttcttactacgaaatttcatcttagtagggaaacaatgtaaaattgttagccaaattaaaatttcaattttagagaactttgagttgtgataatttcttcaaaaaaaaaaaaaacccatatatatatctactaaaactaatacatatgaaaatagatttttaataaaaataaactttaaaaatataaatattttttaaaaattaattcaaaaagagattttgtaggtgaaaataaaactactcataaataaatttgattcaaattaattatcatattttattatttaattagttgtcatttgttttgtaaaccctaaaaaatatcaagcacaaatctcctaagttcttcgcctatgtataatattttagaggttatgttataattttaaaaaatagctaggcccttaataaaaaaaattataatttgtaaataatatttttaaatattatcatattacgaaaaatatattttacataattaagcacccaaaaacttaattaaacaattttattaaaattgttgttatttctaatatacaacttcaagctaatatcaaatattatggaaaaaaaaaattaaaagacatcaaataaggaaaagaaattaaagaaaaaccttttttttttttttatttggaataacacattagtgaaagattgagttaaaaaaaatcctaaaaaatcatattgggctttttaatttgtgggccctgtccattagcacttcttgtacgggtaaatggccggccctatatatatgtatatataggattttcaagttgattacattcctaacaaagaaaaaaggaatttgaataaaaaaatattgggcaatacttcttgtaagcatactattgaagttgctaatgtagctactaggcattagtgatgtctagcgccttataaacgtgttgttttgcgattgactaacgatattttctaaaaattattatattaaactatatgagacttgatatcctagttagaccaatagcaatattgacacgtaggaggatgttagacaacactgataccttttaaatttttcagcccattaaaaatagtcattgaactacttacaatgtggtaaaatggtcattcttttaaattttgtcatagcaaacataatgatgacgtagatatttatatcattgacacattaatatcatgtgtgtaatttaaaattaaaacaaataaaaatatgtatttttaataaaaattagtaagaaaaaaatcaattaatgattttttttttttaaaaaaaaacaaataagcaaaactaaattaaaaatttaaactatttttttcaaattaattacacatgtggcactggcatgacagtagtttaaactgctatatcaacattctttttcgtacatgtaagaaaacttgatagaagtaccactttacgacactatgaatagtttggataggagtatcatcagataacacgactcaaaatctgtacaaaataaataaatttgaatttgccttaaatgagtttgggtcatttttgaattgatacggctaacgcttttattaaatgggtcatagaagaaagaagaagaataaacataacgagaaaaagaagaaaaagaaagaagacattacaagtgccctttaatatttctataataataataataatnnnnnnnnnnnnaataataataatagtaatagtgtattacgtttttgttatttatttattattaataatttaataatattagctactgatattgatttcctttccataattaattcatgtaattctatgtatatatagcattaaataacaacaatcattcttattattttgagttgtattaattaatctctatttaataatgtatattatagtgtacggtatatttatattttggaaaaattattactcaatactcactattagacagtcactacacttgtctgggtcttccgggacatgggagaaagaattaattaatggctcattatataaatatatattgtagttaggggtatttgtgtcattttccgagagaaaagattgttagctagctgcatggtggtcaattaatttagatatgaggtcaaccatatacagcaatagcaatattaatctcccaagtaaaaataattaaactaagattt

SEQ ID NO: 23033 - DNA, 2086 bp, Cannabis sativa
ctctctctctctctctaaaaattccaatcaactctcgaaagatgagtcaaagtggtatatataggatcaagatcctaaaattagtgattgcaaaaacgaggttgttaagttagttaggaacaactaacttaaccaactcctcttttagtggaaattccatgtcagcgtaagaaccagggcctctgggaacataaacaagcttccggacacgaaccttattgaagacgcttgcgaacatgataaaactctaatgaagttgactatccgaactatcaatccaagaggaataactagtcagatggaattcctttccaaaaaaaaaactatttatcctgaagactggacttggagtgaacatgaaagtcatccgagaattcatttcggatccgactttcattctccaagactccttccgggaccgcgagaaaactaacaaatgcatagaccttttcatttagagaaactataccacaaatattaagatcgaaaactttgatgtgcttcatcatctcttctatcgcctcaatcttaggtggagtggaagaaacaattgttatgcttttgagctagacctacgagtaagtcctgtcgtatggccaagacattgatcgacccaacaaaagcgatgtcatcatctccaatgactctgatggtttcttttgacgcactacaaataacttgttaaaattttataaatagttaatgataaattattttcaaaataaaggaaatatacttatttggcttctatgttcgatgtgaataaaagattgacttatatattttgttaaatgataattcagactttgtattttgcaacgaattgataactaaatcttttattcaattaaacaaatttttaactaattgatatcacgattgctcaatttttcaacaatcataactaattataaattaggcggatcacacattcacgctaaaaaaacaaattacgtattttttttttagaaaaataataattacatattttcctgatgaaatgctggcacgaagactatgaaattatgaatgatgtgtaggctcttatgtttcttagagatatatatattaagaaaagattaaataaattaattaaattgttttgaaattgctgtattttcattttgtaaagggttgcattcatctaacagctttgagaaaatttaatagtgttacacacatacaaataatgaaattatatggatcattaccatatattttattgtaacaaccacataatgacactatattatgatagcaatccttatggtatctaagtaattataaaagacactacttcaaacaaaaaacacaattaacaatgttaattatttattaactctaaataaaaattcaatgtaattaccaacttccattttgtaatgctattgctatatatataaacaaatttaattatttgttgctaactaatattgttagatgacattgacagtctcatattgtccccatttttagttaaattgttccattttaattttattaccaaactattttattattattttttttcttaacaattttctttttgtctgactagctgtaaaaagtaacaaaaaaaaaataaaaatacaatataggataagtcaataaaacttattgtcaactaaaaattatgtatgttaaactaatttacgagaaaatataaaattataagtaacataagaaacgaatagataatatatctttaaaaactctaaataatcaaaaacttagaaacaaatttagttacttgcacaatttcatcattcttaaaaaagagcaagctcgtacaaccgaggcaatgcacaagtaagacattgcctcgtctataatataacacacggtgatgtgttagtattttataatatagtgtgttttgatttaaataaacatgattattaaaaaaaaattatcatgttattactataatattgtaaaatacatattttagatacatataatattatttcttatttttttttaaataattaatggatattaattgtaacaactatattaattaaatggtcattttcaattataaatataggtgaatttgattctaagaaatagttaatatagaaaa

SEQ ID NO: 23034 - DNA, 2921 bp, Cannabis sativa
ggtgcaagattgcctcctatcgatgaacagattgtcagcatgaaactggtcactcctgctaaggggacaatagaattatcaaaagaaaaagatccagagctcttttatcttgctcgttgtggtctcgggggccttggagttgttgctgaggtgactattcaatgtgttgagagactggagcttgtggaacacacttttatctcaacaatggaagatatcaagaaaaatcacaagtaattactctttctgaaccattatcaagtaatcatgtcttggcccccttaatcaatttgcacaacacaactaaaattcctctcttttttacaggaaattgttgtctgagaataaacacgtaaagtacctatatattccatatacagatgcggttgtggttgtgacatgcaatcctgtgtcaaaatggaaaggtgccccgaaatttaaccccaaatatacttcggatgaggccttacagcatgttcgggatctctacaaggagagtctgaggaagtacaggtatggtttgtttgtcgtcttgttttaacaatatatttaaccgatactataacagcttttactcatgtgcaatgcagagcgagagacattacggctccatctgaaggaaacgttgaacaagatataaacgatctttcatttacagagttgagagataaactgctcgctttagatcctctgaacaaagaccatgttatacaagttaatcaagctgaggctgagttctggagaaagtcagagggatacagagtaggatggagtgatgaaattctcgggtttgattgtggtggccaacagtgggtttctgagacttgttttcctgttggtaccttaagtaaaccgaacatgaaagaccttcaatacattgaagatcttaagaagttgatagagaaggaaaaagtacctgcgccttctccaatagagcaacggtggtcagcttgcagcaagagccccatgagtccagcttcaagctcatctgatgatgaaatattttcctgggtaactgtttctcctttgaactcctggttcttttcggtggctagtaaaatatgttggttcgagacatctttttagcgcgaagtataactactttgaacttaaactctagacaaaaatcaaaagatggatcaatgttaagagtttagagtcttgatctgaatataagtatctctttctgatcagtgtagcatgaaaacgaaatacagaaaagctcgagatattaaattcacatgctaaagttctaatctgaattgttgccttatctctttcaggttggcataatcatgtatcttcctaccatggatgctcgccagagaaaggaaatcacagaagagtttttccactacagacatctgactcaatcgaaattgtggggtcgatattctgcttatgaacactgggcaaagattgaggtatcttacgaatcgaaatttgtgtgatccatactctatttcatatggactgcactattatgtttggttaacaatttttacaaccaaaagtacttaattggtgtacttaaattattagccgacgataattgtacttatgttttagtgttcgtctcatttaattcattcacccttttatactttccccaggttccaaaagacaaggacgagctagcagctctacaggaaaggcttagaaagagatttcccgtcgatgcatacaataaagcacgaaaagaattggacccgaacaagatcctctccaacaacaagatcgataagcttttcccaatgtctgataccgtttaagaaacagccttgcaaagggttagtatttcatttgttataaattattaccttccatttttttgtctgtcagacccgatactagcgattttttagcttgcccaattttgtcacacctgaaacaagcatttcggttcaataatttggttgtacattacaagatctttcgtttggatattaagtgcattatgcatatggtgtgttgttacacttataaatgttgataaaaataaggaaaattggggaaattagatcttttcaattatagtatgttttaacttttaactacattctttataccttagtcctcaatctctataccttttgtgttttgtatgcacttgatcggttaaatgtttcggtttcttttccattacttcatagggttgacacaaaccaaaggttcgatgagattggatgtaggtcctaatcaggagactcgtgatttcgagttccttgtaggcacctacataccaattgttatagctttctggtccccaaacattgtagggttaggcgggatcttagttttataaaaagaaaaactcaggagactcgtgtcatgcttctcaattaccgcgtttcttgcatttgattgagtttgagtttaacttgttggagattttgatcagagaaaaattgctaacataggatacaaagtactgaaaatgattaatgtaagtaactaccatgacagattacatgttattacaatacatattcataaactgtaaattaaaactatgaagaaaaccatacccatcactgaagggtaagcaagaaaaggtagaagaaatatggcgatcgacttaatggagttagaaacattcttcgcagagccaacagcagcagagcgcgaaaagactgcacgagcaaaaagtaaaaatcagaacaagaaactcctggtaatctcaagtttgtttcggttaaattgcaggtcgtttcgaagttgagtgagaatttcgaaaactcaccatccctcgatgaagcctcgatctcctttcttcttagtagaccaagacttcttcccagtttgggggttgttgttctcacttgggtatcctttcaatcaaacataaaagaaatcataagcccctttttcactaaacaaaatcactatacattttatctatacacacacatatatatata

SEQ ID NO: 23035 - DNA, 4486 bp, Cannabis sativa
cagataagctttgccggcgcacaactgcgccggcaaagctttaccggcgcattcagtgtacttttgccggcgcaacaatgcgccggcaaaaagcctttttcttgtagtgattgtggcattcgaaagggctaggtggtctgaaataacacagggattaacttcatctggcagctaaggagagcttaggattgggatgctatgacccgtcccaatacatcaacgaactcctttctgcactaattcttaagattcccatatacttctccatacaaagctcggattcgagccaagcgaagctgaaaaaaatcaccttgaggaaagtacctggccttaaaaacccgagttaccaaagcattaggtcttgtgagaagcctctacccttgtttacctagcatagccatgttgaaattatgcaaatttcgaaagcccatgccacccccttcttatgtttgcaaggtttatcccatgacaaccaatgtatcccttttccactatccttgtttgactgccaccagtaactcgccatcatgctttcaatgcgacgactaatttccttaggaagcaaaaagacgctcatggcataacttggaagcgcttgagccatagtcttcaccaaagcctccttgccagcccttgaaaggaacttaccttcccagctttgaagccttttccgaaatctttctttaagataatcgaggactgtagtttttttacgagacatggtacttgggagacctagataaaagttgtcttcagttgcaatgttcatttgaagctgctggctaattacatttctgactgcaacagaggtattagtactaaaaaatatagatgactttgataaattcacctcttatcttgaagccatttcgaatttcctcaacaattcttgaactcgtcgagcctcaacttcagaagcatgacaatataagtaacagtcgtcagcgaaaatcatatgagaaacttgcagtgcaccattagccaccttgcaaccatggatccacccatgtcgttcatacttcctcaacaaagtagataggccttcatcacagagaataaacaaataaggggacagaggattaccttgtcggatgcccctagttcgaacaataggtcccatcttgtggcaaccatggataatcttgtaataagtagttgaaacacattgcataataagtcgcacctagccttcaacaaatctcagtttcctaagaatcacttccaaaaaattccactcaatacgatcgtacgccttactcatatccaattttaaggccatacaactaatctttccttatctttttcgttttagataatggagtacctcaaaggataccataatgttatcggatataggccatcccgggataaaagcactttgagagtctgcaacaatagagtccataaatggtttcattcggttagtcataacctttgtgataatcttgtatagcacattacaaagagctattggatgcaagtctttcattgtctcaggccctttcttctttggaatgaaaaccacatttgcatcactacaagcttcatcaaagacacccgtatcaaagatctctgaaccacatccaccacatcttttatcacaatattccaacacctttggtagaaggccgggggtcataccatctggccccgggctcttatcaagatgcatttaaaaaacgacagtcctcacttcgtcctcagtgacagactttgtgaattccaagttagccaactcgggaactacttggtcaatacaatcaatcacctctctacattccgtatcaaaagctgagaataaattcgtaaaatactacacaacaacatcagctaacccattctcccaatccataaaaaccccttgagaatttttaagttttaaaatatgattgttgcaccgtctattacttgctgccttatggaaatatttgctattttggtcaccctctttcaaccaaaattgtttagctctctgcttctaaaatatctctctttgattaagaattgcaagaaattactttctaacctcaatatatcgagcaacagaaatgtcatcccttttattcttcaaatgcttcaactcagcattacaatcactaattcctcttcgaaagttacccgttatttccttgccccactaggctaaagaatcaacacatttattaaatttattcaaaattccccccacaccatctctattacaacaatctttaacaatttagaagcacatgggttcttttaaccatgcattttcaaatcgaaaacggtgtctctttggtgtttgatcaacaattattggttcaggaaatactggagagtgatgagtaggagaagtttcaagattaaatggctttgcaccttgaaataattgagacaaagcttcggttacaagagctctgtccaggcggatttcgacccataacatcaagcctctactcttttcctaagtgaatgggtgtcctgtgaggtccaagtccagcaaatgacagtcgacaatggctttttggaagccctccagcagccacacgaggtatggttggcctccttttcttgtcttcttggctaagcacatcattaatatccccaattacacaccacaagagagattaagaagaagagagagtgcgaagaaggttccatgattgagctctgcaatttctgtttggttcaccatagaaaccggtgagcctccaactgagataaccaactttgtccaccctaacatcaatgtgattgttggagaagcccaacaagacaccatattctttctctttccaatacaacactaaacctcctcccagaccttgggcctcgacacaaaaggaaccctcaaagcccaattgttgacccacccactcagccctttttttttattacacttggtttcacataagaaaacaaagttgggtttcttctgggcaacaagttctttaaggaattgaattgttcattggttcccaagcccacgacaatttcagctcaagacattcataatgcttggcgggcctggaaactagaacccgccccaaataaatttttttggctatcatccccatggttatccatgaccacatcaacatcccttatttcactatgaatattaacatttgtatatttctgtaaattgtttgaactaggtccatccaatttgtttaactctggtccatttgtagcatatgtatctaatccatcaaatgttcttcttcttttagaatccaacacaagcagtgagtcagttcctccatttacacctggcattccattctccacatgggccgtagacttaccatttaaaacatcaccaacaacatccataatcatagtgtccacctccttagtcaaatccagaacccttgaaggttgtaatccccctaaatttggggagttaatagtcgaatattgaggaggcatctgtgcattaaccccatgatttcctacattcaatgtcacctgagaattacccagcatcccagaaacggtagttttcatggctacccctaatcggagtcattgggctcccatggtatgttgtttacgtcgtggagccaccttcaaagacaggtcataagccttgatgatttgtttcggcggagtatcaaacagattctcacaaaatcattctgagtggccaaagctacaggtcaaacgattaaccttgaaaaatcccccatcatgttctcccccaataccaaccctgtagcaaaaataacttcaagaactcccttcgtttatgtaatgaggggtttgttgccaactaccttggggtcccaaattgcgtttgcgaaatgaccagtgataaattccattacttagtccaaaaggttccctctaaaatgaatgtttagaatgtaatttttttttttctaaaactggcaaggaaaccctcataaaagcggttgttcaagctatttcatcttttgctatgtcttcttttaagctccccaaagcgacttgccactccttacagagtcttatacctaaattttggtggggatcttgtaacaatgacaggaaaatccactggaagaactggtcgagtatttacacttcaaagttctatgggggtcttggtttcagatccctcatccaccataaccaagcccttatagccaagcaagcctacagaatttggactaatccttcttcccttcttcactcccttgtcaaagtaagatatttcaaaaacaataattttcttgatgctcctaaaggtcacaatccttctcacacttggaaaagtctcctttggggtagagagcttctcaaaaagggtctcctctagaaggtgggtgatggtaaaacgatttctttaactcaccataattggatcccgaaccttcactctctatctttcctaaatgatttcgattccactaatcagattgtttccaggtttctagatcatgatggagattgggatgttttaaccttgcaacactacttaccctcttatcaaattttagaaatactcaaaattcctattgac

SEQ ID NO: 23036 - DNA, 2607 bp, Cannabis sativa
atattcataatatatgtcctctatgtcatcaatgtactggggatccattaatttcaaattgcgtaaaaaaaagtaacaaattcaaatttgctataaataaatataaaattttatattagataaaaaattacttaatttgtaaattaacaattaattattaactaatattctatgcttttatttttacctcatgcaaccagcctgtgtgccaccttcatcaagctccacaacggttatatgattctttagatttttaaattttgttgcctttgaaattgagtatagaccattaacacaaaatttgagaagacaacatagcttggaataattcatattgttgcaaagagatgccctcccgaagtgttagatgcataatcactatatccaatcatcatcaaagttaccaaactaacataaacactgtcctcgaatgaattaccctccaagaagaacgccactaattttgaaatctgtaaagcctgcaaagctacataattgataaagaatttccagacaagaatgagaggtgtccattacgaatcaaacaggatcatgaataggcatagtagaaaataacttaaccatatatttaattttagtcatatatttgaaacatataactaaaatttgttctaatttttttgttttaaaagttatgttttcccaattattcttattacttttatgttaacttcattaattatcttactaaaaattatataagaatttttttgcctttctttttacttcttaatatattataactcataattatgtttcttaagaaaatacaacaaaacacaatacatatatatcaatatactctccaacagtggcagacttagaatttaaaatgaggagtgtataatattttttgtaaggcatgggaggcgaaagtaaacttaattaaaaagaaaaaaaaacaatattctttatgggaagtgaaccattggcctctaccctatatgtaatctagtttaaccattacactaaagctaatattatatctataaatattaatttttttttacaaatttatgtcgtgactaactaaattgcatatacatttttcccaattttttttctcagggagggcgactgtcccgcctcgcctacatgtgggtccacccctactctgattactactacaaaagatccaatttgcgtcggtcaacgcatctgccgaaaatggttgaccgacacaaaaaattggcggagattttatgtttcagaggataaccgaagctaaaagaaaccaattagcgtcagctgttactctgacgctgaaagagaaacctaggaaaaaagtgaaaattttaaaaattgttttatattttgcttcagtgaaaaaaagacgctaatttttttagcttcggttggaaacagacgttaaaacatttgcgactcttatccaccgaagctaacaaatttaatttttgtatatatataataaccccatattttctctatacgttgaaactcatttctttcccatttcgaaattaacttgtgaaatcctagcacaatctaacctatttcttccccatttcgaaaaaccacaccacccaccgcccaaccctccctctttctttctctcgccatctctatgtttgtgtgtgtgtgtgtgttcaagctccaccctcatcgtcgactccgtgtgccccagctccgttcgaacagagcttactccacccactccataaccatgacaccatcttcctcctccctccattgtcgcgtaaagataagcatctcatattttttttttctctctctctctcttttgaaatcattccctctccctctttctctcaatcatgacaccatcctcctcctccttccaacttcttttttgtaactcaaaaaccctctggtcaactacaaaaaaaatgaggttttagagacgataatattagaggcgaatttcaggtattcttgtcgccgctaaaaatctcttttattgaagtgttctttcctatctcaatctcactctctcccttcacactagactagaccacaatgagaatgtcggcgcagtacattgccaaccctcctagcccagccagctctagtgtcacatccatgacattcttctaccactaatatgatgcttccaaactcctccagcatagatgccacatctaatcacacttgtaccgtcactcctcccattatatttctaactctcattctcgtctctcttaatctttttgtgtatttatatataattacatatttatgtacgtaactatacaaatataagcatattggtataatttatatattagaaaaagggtaaaattgttacgtactgtttagaacagatgaatatactatatttacatttatatatatacatacaatatatataattatatgtgtatacataccatacacatttaataaaatataaaatacgtatacgtacatgtctactatatattaaagtttaaatttttaccttattatcgaaatccaaccattaataccgaccaaaatctagctaccatgcacaactacaaaaacacaatcttaacaatatgggaaaattctaaaaaaaattagaaaataaaaaataaagcaatttaaattaataaaattattaga

SEQ ID NO: 23037 - DNA, 3305 bp, Cannabis sativa
ttccttttcgttatttaattttgtttgtcaatattttgttcactttgaaccactttctaaatgtactattcatgtttgtttgcagaggtgagaatccatcaagttttgatcttggtgaagttcttgttcttcagcctcccaggtaaaactttatatctctcattttcttctactactctcttgatttggacttatttttatactttattatttggaaatagttgatacttgatgtgtctattttttgtttccttttgttctttagagtggaatttattaagtaataatagcagtgaaactagacttaatttgtggctctgaaagcatcattccaatagttaagataagaaaatctgtaaaaaagtatatttatattttaaactttgaaataacacagaaataactgacatttcataacagaggaggttagcttagctgttataaaattgatagtaacttatgtaattaatagattccttcaaaactttcgtaatctcatgtataaagaatttcacatttcagtgaggagtagattgggaatttacatagtctggtcatactttgtttgatctgcacagtcaacgagcacaaacaagaaagaaagcaagagcactaaaactaacaaccaacaaagaacttaaaatgcagaaaataagaatatatataagaatagcaagtatttaatccaactgactttgaagtgtagcttacttggagaatcaaaccacagtatgctttgttcactagatttttgtttaatcaagtattcatggttcaatactactttttatagtttttgtttgttttttgaaaaagaaatctgtgtactgattatgatctatgttttacaatatctattttttttcttcatttgtcctttccttttctaatgcttattattgcatatcatataaataatttttttaacttttacaagttaccatgttgctttcttcaatttaacccacttcaatttttagttggtaaacagattgaaaaagaacaatttatcttgaagacagacttgaaccatgactagtttttgctttttcaagattctgactgaccattcactgacacaaatggtaagcatattcctctttagtttttacttatagacttttgatgatttatgttaattacattacttatagcttatgtattagaacatgtgaatatcgaatttgtactaaattacatacttccacagctttactagctcatttaatttccaagatttgataaagaacaactgatttttttcattactattatctggtaatctgttgtaatattaaaaaaatgaaactgtactgattggaatttatacacgttatgtgtgcaaactctctcttatggacatgttgtgattaatgtagcgacttccacaaaagtttgtgaggctgcacagagagacattggcaagttctgtctctgttgtacttccatgtagtcatacatggaagttaggtttggttgttgaagatgacaagttatacctaaaagaaggttggccggaattggtgaagcattatcagcttgcatatggacatttgctcgatttcacctatgtaggcaactcgaattttaatattgctatatatgacaagaccacttgtgaaattgattactctcctttctcttcaccaaatttcacaaatgaggagtctgattcagaaaatgaaggtagttcaaaactttaaatatcttattggtaattaagaaatatggttagaaaatagattatttgtgcttgtgttgtttgtagacatgcccaagaagtgtgaagctgaagatcagttatggatgaaagggaataggaggaggaatcaaggaccatataacacttacagacatagcaaagctgtcatagaagctcgccgtttttattcagagtatccccatttctacagagttataaggaccgacaaacacaaccgttataagcaggtaaggaatagtagttgaagatcgaattaatttcattacacagttattcattcaatctttatgcctgtttttttgcagcaacttcctaaaaaattcattgagagtcatgttggagtaaaaagtgaggcagtaacacttaaagtgggaagcaaagaatggagtgtgaatattgtaagttgcaattgtatatgctgtttcagtggaggatggttcaactttctggctgccaactccttatgctcaggggatgtttgtgtttttgaggttataaccaagaagccaccactacttcaagtctcaattataagaaatgatgattgaatttgatgtttacttattagtcatgcttattctttattttctattatgaacatgacattgctaatttgctattaactacttccaattaactaaaaatctctagaacaggactttcaattttaatattgtttagaactagcatataccaattacaacacaggttctgttatgttctgttttccaaaaaataatacgaaaacaacataaaatcaacaaaaaaattacataaaagtaaaatgaaaataacatcaaaataacaacaaaaaataacatatagataacaaaaaattaacaacaaattaacaagattactacataaaaaaaccgtattttctgtaaataaaaccaaaaaaatcgtaaaaatgtttaacattccgtgaaactgtatttttgtaatttttttgttgtttatattgaaataatctcttatttttttattcttatatattaaaataataataataatttattttgggatttttttttttttaatttaacactttaaagcaattttttttaatatttacagaattcacatagaaacctctatagcaaccaacagagcaacctaaatcacaatcaaaatccacatagcaatccatatagaaaccaccgtagaaattattagagaaacccaaaccgtaaatttgaagaaaaaaaaaggttaaaaaatattatatgggataattttccttttatttttttaatagaaatattaattagatattcaattttacatcaaagttttacaattatgcaatggagcactatactaaaatttgatgtaaatctacataaggttattttttgtgtcaaatataacataatttttacatctccaaggagatggtctttagggatgtaaacggggcagggcgagtgggtggattgctcccccacccccatacccgcttcctaaattcacccccatacccgcgtcaatacctgtttaaattaaagcaggggtggggcaaggattactcgatgggggaaggattcccatcggatatccattacatatatatttttgaaaa

SEQ ID NO: 23038 - DNA, 2017 bp, Cannabis sativa
actgtagcgtgccttagcattagggcgttacattagggattaattgttttttaaacctgagattataattaggattaccgatacttgctcagaattacttgtggattggaattctatactcactttggaattccgctaagaaagagaaccttgcacacaaaatatagtgcggtggtgcacttggatgttatgtaaattgcttagttagaaatgtaagttagggttattaccctaaagtttctttatttatgcatgtaattcttgaattaattgagtatgtgaaaagggttatgcgactaaggcataactaatgaattatatgttaatgcgagtaaggcataattaatgaattatatcttaagggttatgcgatcaaggcgtaactaggttagacttagtgatcaaaattgaaaaaaaaaaccttgataagaccttatgtgataaatagacgtgtaagtgtaacatgtagtgtctatacaatgtaaacttaggatgtggtggcatcatcaaaagtgtagtggtgtgttatattagtgcggtggcatcatcaaaagtgtagtggtgtgttatattagtgcggtggcacaattatctacgcaatgacgtattatactaatgtggtggcacgattatctacacaatgacgcattaagtgagatatctatgctatatgttatatttggtttgattatgctttcttgctgggccttggttcacgggtgctcaattgtccaggcaagagtaaagcagtgtcagcccaaccatgagttcgaagattttgatggtgaattgtacatgtttcgactaagctagaccacgaggtttggatcttatatgagagattgtatgaaaatctaattttctccacttaggtcggcctatatgtaacaacttgtaatatttttttaaaaaaatttacgggatcccgaatatgtaattacattattttattttaaattaaaggttattattattattacaagtttttttgttatttaagttaattatttttaattacttgacttattagatctcgattaatgggattaacacaatataattacaacacgtgtcgttcctttaattagagcgttacaacgcgacatgcctaacatgttttagggcaagtggaattttttgttttggtatatgcatctttaaaacgtattttggtaaaatatttattgaatatttaatagcagaaaatttctctatttatttaattaagtatatatatttatatgagattgtatacgtaattaaatttaattgaatataacaataatagttatttataatcattaataataatgatacatgtattgaactgtaattaaaattaaaataaattaaacaagaaataaagaataaaatatgaaagaatcttgaacttgtattatattgtttactaaaaaaaccttggagagtaatcaaaatgattttataaattttagttgtttaactttatatttttgttttgtgatgaagcctatatttttctgcatcatattgtgctagacttaaaaatacataactatatatcggatgatgtacttttctgttgttttctcattgtctcgatctttgtaaattttttgagaatgttgttacctggcttattcatcgttcagagaattgtttggcgaattctttagctcaatgggctagagaatcgagggttaaaaacccttgtttagtaagggatgtaactcctttgtggttactatgttgttctaattttctttttcataaaattcctacttataaaaaaaatgtatatatatattgtatggtatttgtgtttcttggacttgtgtggtgccaagaagtgaggttaaattggttttttctttttttttttcttcaattctttctctttttggttgttgaataataatgttttatcatccttgtttttgtttttgaggagtttagctcttttctaaatttagttttttttttttatgtctttccttttagatgatggttcaagctgttgaactgtaaaaacaagaac

SEQ ID NO: 23039 - DNA, 2478 bp, Cannabis sativa
tcggaaatgcccaaccacctctaccgagagatgataggcaatgaagcatacaataggcacatctgggagcttggaaaagggatacgatcttatttgccctgaaagtggacatacactctttcttccggtgaggccaacattccagtaggggttcctagtggcctgtctggggagctgcccctggccaacactgctataaccaccgcaaaactgcccgccatgttacgcgctatggctcgcaccaaaaagaagagtcaggctggctcttccaacagtcttcatatggtggaggtcatcaccaagcggatggtatctgacgatcttgagattggttctgacgatgaagtcatggaggaaatagtcagagagtttgaaaagtaggtggaagaggaagctaagcataccctccacaaagccgtccctgagaaggaaccagctgagggttcaaaaccaaccactctcaaagtcaaagagtttgctctgagagtgcttaaggaggttcgcactgttcattgcaaaaccacccaggtcccctttatggcccctcctagtggtcttagtgagactcaattccaaaaacgtggaagatctgactgtgaacggtaaggatttctagttgatactccgttccccagatcagttagcacatgatcctgtgagggctgtgtgcatggtcccgtcgccatattacttatggggagcactcccccttcataattttttcagagatatggttgattattttggcatttgtctgggacagttctcccctgtggccatgcgagtccttaccgacatctttgttttatacaagttgatgagatggaagtggctgacgggccatgaggtacactatctcttcgatctgagacagtacaacatcgagcatcgatcaggatattatgggtttcaacatgaacacaggaatattaaattccttcatggcgtagataaggtgatgaaagaacatgacttcaaaagtatctattttttgatgaaggacattgggactaaacacaccaaattccaacaagtgggcaagttcggttggccttcccccacccttgccatgtacgagagggctcgcgcgttagccgaactacctaacttcaagaagcatataaacatcctaacttcttccaaggcattagacgattttgggttcaactttgttgttaccccttcaagctgagtactagaaatcccgcgacccttgggatctccgaggccagcaatgatagcaaaagcaaaaagtactatgccagagtcttcaaagaaaaggccaattagggagtgtgactctcttggtgataatcgctatttgtctttcttattccatttcttcaattttttgcatgttattatattttactaatcatttttgtgtgtttttttgtagatatgggcagcctgttgcgacaaacgacctacgaggaacaggagggttccccctctaatgcctctcccatggctcctcctggtaaggttaggaggactagctcttgcccgaccgtcgatattcacacccctagtgttggatcgcctgtctcatcccgatcccctcctcctaactctgcatctggggctgccaatgatactatcctcattggctcgatgcccatgggtacaaacacttcactagaggagacaaactgcccaggagaacctagggcctaagcatgcacctccttgagcttcttggggctcaagagacgtatgcgcactgctctcaatgagtgaaagatcattgggtgtgtcacatgtcttcaaccctttttcccagaaggggaggactgcttgaagtctgctttactcccaatgactctttaacccattgatctcttcaagcgaagtctacggttgaatttttatgcaacttcagccttccttcctggaaggcaaagcttacttcctaaaaattcaacatgactctcagatccacgttgtttttcgtgcaagaaagatcacgtggggggtacgatacgtcttcaacactccttcctagaatggaaggactgcttgaagtctatcctactccctgtgatggttttagtttgatcttttaaagcgaagtctaaacttgaatttttatgcaacttcagccttccttcccacaagcagaagcttgcttcctaaaacttcaatatgaatctcgcatgcacattgtttttcatgctataatgatcactaggggtacgatatgtctttcaaccctccttcctagaagaatggaatgactgcttcaagactgtcttactccccgtgatgctttccctttgaccttttcaagtgatgtctaagcatgaatttttatgcaactttagccttccttcatgatagccgaagctttcttcctaaaaattcaacatgacacttgcatgcacagtgtttttcctgcaaggaagatcactgggggtacaatacgtctttaaccctccttccaatagtggaagaaccgcttgaagtctttcttactcc

SEQ ID NO: 23040 - DNA, 3888 bp, Cannabis sativa
  modified_base (3822)..(3823): a, c, t, g, unknown or other
  modified_base (3863)..(3863): a, c, t, g, unknown or other
tctcagtcgtatattcctgcaagatgaatcatgctaggttgactctaggaaaaaaaatatcattgacatatcattattttcctttaagggacaggtaaacatgtctacatttcatgagactggactgatgtttctaggtgaaaattttttactagaacaaatgcccctagttttgtgatgacaccttgtcggtcaacgaaactaccagaaagagacaggtgagttgcaccatcacattgtgatgacctttggctatcttgttgagagcttcaaaaggacagttatatttattgctctttacttatctaaggtgccatgtcactgggcctttcagggttcgtacaggcgtgacttagggtaatcgttggattaaatgacctttggtctctaaatgccatgtgttgtaaatccaacggaagagtctgactcttatacaagcctttctaatattaaatgaaatctaatttttcctctaaattctcaagttctctcaaactttttcctctcaaaaaatttgaaaaaccttcattgataaaggaacttttctgaaggattctcacttaaatttgtttgagggatcacgtttagaaatctttctaagcattcagattcaaaggttatatttttagagaatctttcaactaatttgatatatatttttgaataatcgtgcaatttttggattttttggggctagaacattcatgaaagtgataggcttgatcatgggtaatgaatttctagaaaagaatagactgaaaaagagagttttctagaattttttttacgtaaaagtcaaatactcgcatcttttccatcacgaacttcaaatattttcctcttttacatagaacaccttgaatgtctgcacatgcctatcctataggttttcacttacaacatgaagatcagtatggatactcgtgattttcttaatatcactttttgatgtgattattattcgtgtgaggtcactcctccataaatttcacacacaacaagctgaaaagatcttttatcttttagatgagcgatcttttggacagtaaggtcttcgagtttgatggaggagcatttgttgatgaacctcaaaaaagtgatagctttattccaacatccctatcagatgacgaggttccaacaaaagtagactcacaagcttcatggtctttgggcgagatagctcgcatggttaaagaactagaagaactgatggctattaagtgtgagaaagtaaatccactgtgtccgctcaagggagttttattcgtccaagggatgttcatgatggagaagtcaaagaaatggggcaagactttgaattgcatactcattgggatgatgaggaagatgatgaagaagctgcaattttctgttgaggaagcacccccagatgaacactttttttgcaaggattttgtctcgtgagtaaggaagccttgtttgatgatgttccaaagtttgaaattggtgagcactagttatacaaaactagtgacgataaaaattttgcacctttattttactaacccagcgattatcttgactaacgtcccggtggtttcagttcccattctttgttgtggagtgacgttcccatttcattcctttgtccaagccattctgatgtattattaaatttctcccttccaaatcacccctaacaactactaaatcttttgtggattctatgtgatatatatggtgtacacgcaaagaaaacctacaatcaaggacttttgctacttctacaacatcaagaatgttggccaccacaatggcttttgctgctttggtaagtgggctaactcagaggtcaacagagttaaaggtgcagtttctaatatgggagattatcaatcaaaatagttttatgtgtttttgctgcttagaattagaatagactttaattgccgccctcgtctatcgcagatgtttataattttcattatttttatttcaattgaaagggggttgaatttttctttatgtttgtagggaggccagctcaatctaagctttgtggggatcgtagttgtattaagcagtcttctaatagagatcgagattggcgtattctttgcaagtctacaaaagctcaagaacacagactaatccgagctgaccctagactccagtgagaacctgtatataggaagccttctgagaagcaaaaagtaaagattaaaaagcacttttccaagccaaccccaaagcagcccgcaattaatatgctcttagtattcttgtttgaaaataaacttattatgcaattactaacacttggtattatcttgcagatatgacacttctgaagaatgccctagttcttaatcgcaagtcaaaaacaaataaggagctcacaactccttcttgtgtgaaccctcttttgaagaggaagattgatgctatcgagactccaatcatcaacttgtcaaagaagcagcatatggttgctcatgaaaggggaagaaactttgacttaagcttgatctagcttttcttcaaacaagtctagactttgacattgcccgagcttgttatcatcgatgtttaagacattgtgacgaagggatcctgcacccacctcaactgggatcatgtcattccatcaataagatagtgagaaaggagtctcaccaatcgttgattgcaaggtcgtattgtacgaacataacacttcgagtaaatcttctggagaaacaccatttctttcctcgagcttcccattaatgatatgtttgataattatattgactgccttagtttgcccattgctctagcgataagcaactgtagaaaatgcattatgtattcctaatttgttgcatagggatctcatttccttacaatcaaactatttactattattagaaaccagcctgtaaggaataccaaacttacatattttagattgaaacacaaactcgtggagtttgacaacaattatggtagcgagtgtttctacttcaacccattttgtacaataaccaactgcaacaatgacatattaaacccccccccccccttccctttgggaaattctctaattaaatcaatgcactagatcgcgaaaggccatgcgttggtgatagagttcaagtcatttggcaaacgatggaaatacattgggatacgcagacatctatcgaatttcttgagaaagttgaccatgtctgtatgaagtgttgaccaataatacccttgtcacacaattttcaaagccatggaatttctagcagtgtgactaccgcatatgcctctgtgtacctctcagaggatatagtcgcattcactcccataaatgcaatttaggagtggttgattggaactttagcggtagagtttttcatcatagataatgtatcaagcttctcgttaccgtaatttttttgcttcattcttatcctcaaagaccttccccatttttaaaactggaactactagggttatccatgtcacctgactgtcattgtatgtctacataacatctttgtaacaccctaactattttaggaattttagcgtgattttcaacttactgtgcaactagttactaatgaacaaggttatcgaaaatcgtgattaattaaaattttgtttatttaattaaaaacataaaacaacataaatattaaattttgggatcctgtttacaaaaatatttacaaaagtttaactatacttatacaaaagtgtgtcgcttagcgactatacaccaaatccctgatctcccaaagatcgtacgctccaggcctaaccgcctggacatgtacactctccatatgctcttctcacggctgctcaaccttagccttgccnntacctacacatggaaatagcaactgtgagtcaacagactnagtaagaaaagcataaacaataaca

SEQ ID NO: 23041 - DNA, 3911 bp, Cannabis sativa
actgatgctaatttctattcttaaactaaaattttcttaaaatcaaaataaagaaaaattaatgtagatataacttttagatttctattttagcatttagtttaaattttgcatttcaagattaaaaataatattattatcttgtttaatttttaggtttactagttaattttaaaatgattaatatttaaaatatattttaataaatttttataattattgaattaaaaatatttggcagctaatataatattgtgacatgtatcgtcatagtaaaatttaatactgacttaacaaaaagaagttaaccaccaagaaaattctcaagttgcttgcttttctttttggttttttattttaatattcaaagcaaagtttgaaaaattgaaattgatagtagaggtcaagggaacagaaatgtatgtaaaaaaagggccaaggcaaaagcagcaactgtctctgaacagtgtcttaatgttataaagtaaattggtcaaagccacttgtggaagagacttccatttctattgattcaccaatttggttgttagcattataatgttaagttctaggagtgaagctcttaagaagtaacaaccttcttggtttttatttattttttatttttttatttttatttattatcatcaaaatataaaagtaataatgctaataaacaaaaactaatatgataaacatagaaaagactggcaaaaagcttcaggctcaccatcagtttttatttcaaatatttcacatttgtttctcaacttcataggtttctcttctctctgtccctgtcttggaatatctattcactgatcaacgaaaacgcgtaactgctttccatttggattatctgatattataaatatttatatatatatatatttatatccctttcctttttgacttgaatttggagctatttccttttgagttttattttctgagtgtttaatgaaatatatatatgaactctgttttatagtggtttttaacccaatagtggaaagtgaattacttggtgtttaggacaagaaatattgggtttattctgacagagcttgtttgtttttgctttttttgggataatactcatctagttttttaagttgagtaccttgacttatctgggtttcagaattttgaggtagtgttaacacaattttgtgatttttctttcatttactatcccatccctgtacgtgtaagccaaaggggaaagaaaaaaaaatggggggtttgtaaggttttggttgatatttccatttttcattttattctttctggattttctttttcatgcttaaaagtctagtctctttgttaaaggtttgaattggtagagttggaccaatttttctaaattagctagtcttgtcgaaaagctcatgcttaaccaattgggattcacattcttctaggcaaagtgatcctcagagcctgttaagtacctctatatcagttttactcagaaaaaataaataaatacaaatatcctcttgaccttctatgcctactctttctgaaatggaaaactgtaaacctgcaactccaaccctagaaggagagcagcatgtgatggctgcagctttgcacctcacaaaagctttagtgggaattgattatctgaatgatgatttgaagaaaatcctcagtgatctagactcccacttgtctgccatggttgtaatcacagaaagcaaagaaggggagtttttggaattggaacagcggcttaagcaagccaagaaaaaggtcaatagctgggggttgaataatctgatggtatgtgactattcccttattgaagcttctcagaacattgaagtcattgatcaaatccacgacctgatggaaagcctcagaagcttagcagtggatgagtatgggaaaccaataaagcttcttcaaagagctgagagtcttcttcagacagcgatgtcaaagcttgaagaagaggtggattacattcttcatcagcaaaaacaatactttaagcctaaggacatgtcattccgatcttgtggatcagatgtggtgtatgacgaatcctttgtttcagttgaggaagagccacaagaagaatcattgcgaagaaacagcaatggctgtgaatcagaagattatcttgttgatctggtgcgtccccatgtattgcctcatctgaagtccattgctaacataatgtttgcttcaaattatgcagaagaattttgccaagctttcatcaaggcaaggaaagaagccttagacacatactgggttagtttaggcatggagacattcagcattgaggatgtgctcaaaatggaatggaaaagcttaaaccacgagatcaagagatggtcttggatcatgaaaatcatcatccaagtttatcttccaagcgaaaaaaggctctgtgatcagattttaggggagtttggatctcactgtttcatggatatctcaaaagctttattgatgtacttattgaattttggtgaagctgtggtaattggagattatcagcctgaaaagttgtttcgattgctggacatgtatgaggttctacgaaatgttctcttcgacatagataatttgttgtctgaagagttgggatctgatatctgaattgggtttcacaatcttctagagaaactagaagatttctcaagagcaacattttctaagttcagaaatgccattgcttccagcacatcaaccactccttacacaggaggtggtattcatcctctaacaaagtatgtcatgaactacatcaaggcccttgttgaatttgatgatacactcaatgtttttctcaaggatcaaagttcaagttttcctgaaaatcctgactcagtttttgagcttgacaatattcaaaaggacggttcgagtttgactacttcttgtcccacagcgaacaatcttcgatcaatcacatcaactctagaatctaacctcgacaacaaatccaaattgtacaaaaatggtgctctgcaaaatgtgttcttaatgaataatatcaactacattgtccagaaggtgaagacctctaagctcagactcttttttggagatgtttggatcagggagcatatggccaaagtacaacagcaggcaacaggttatgagagaacctcttggagttctgttgtttctttgatcagatcacatgacggtcacgcccttccaaaggcagttttcaaagaaaagtgtaggagtttcagtgttggctttgaagaggtttatagaaaccagacagcatggtatatcccgaattcacaacttagggaagatcttcaaatttcgatttcacaactggtaatccaagcatataggagttttactgggcgaaactccaatgacgagaggcatatcaagtacactgctgatgacctagaaagctttctactggatctctttgaagggtcaccaagatcattgcccagttcccgcaggagataaggattcagtaatggtttttgaagttgtagcattcttttttttttagtggcagtggggggaacaattttctctcggcattatgtaataattgtaatcaatctatgtaaatttttattgtatttcacgtagcctactgtcaaaagattttcatgagtaaaattatgatgttcatatattgttgcttcatcaacatgtctattctccatgagagtatacataaaattatcagttggttttgttaacactcaaaaatgtttaaagattagattagataaatggctcaaccactctagtaaatggctaagattcactcttggtgtaaagagaagggacagtaaatgagcagctcaatgttcaaactccctcaaagttctttttgtcttcttttattgggcccacagatgtacatcaagcacaataatgccctaaacctctttcatgagaaaagtaaa

SEQ ID NO: 23042 - DNA, 2757 bp, Cannabis sativa
tttttaaaaattttcgaataattttcaataccaaaaatatatttgaagttttttgagcacgtgtggtaaactggaatattaggaactttgtttttagtattgtaaactattcgaatattttcaaaaatttataagaataatactataattatatcagatacctatgaaaaaaaaattgaaaaaaatattcaagcatgtgattttagacataaagattgactaaaaagttgtaataggaaattgtaattaacagaaaaaaaaaatagaaaaatgttttcgcaacacttaagaattattaaagatttttgttgtcgagttcaagataatggtagatcaatacaaaactcgtcttaacaatattgagatttattgcacaatactagtgcctaattaatttgaaacaggtaaagctataatactagtgcctaattaatttaacgaccatccacttcaaggcttgtagttatcaaaggttcaccagaactaagtgagtgtgtaggtatttggtacacagcaacaggcatctttgatggaagattgggcaaagcagcctccaatttcagaacttgaagtgcttgccttatagttggcctaaagtttcgatctgggtgagcacaccacaacccaacaatcatcaaagtctccacttgttcttggtcagaacctatatgaagcctctcttccattgccaaagcaagctcacctttcccataaagatcccaaacccactccaccaatcccatttctgtaaccgtttcaattggactgcttgctctcttcccagtagcgatttctaaggctaccactccaaagctatagacatcagactctttactagctttccctgtactaacatactcgggagccaagtagcctaatgttccaaccaaccctgttgtttgaggaccgagctcgtggtccataagccgagctaacccgaaatcaccaagtttgacattaaagcttgaatctagcattacattgcttgatttgatatctcggtgaaccacacattgttcccactcttcatgaagatagagcaaagcagaggctattccaagagaaatcttgtatcttacagcccaagttagaggacttcttcgaccaaagaggtgagaatcaaggctcccatttggcatgaactcatagaccagtataaactcacttttatcatgacaccatccaatgagttgcaccaaatttcggtgtctcaaactgctaatgactttaacctctgtcaagtactctttcttcccctgttttgagcctcgtgaaattttcttaacggccaccaccatatctatatctcttaaataacctctataaacggctcccaaatcctccttctcctaacttcctctcattcgagaagttgttcgttgctgaagctaaatcttcgtatgaaaaccttcttggtactcctgctcctctttcgagatcatagttaatcgatgtcaagttttgagcctctgcttctcttctgttctttttccgctttttcaatactaaaaatactataataagtcccactcctgctattgaaatagctcctgaaactgttaagccaataatccacctacccttttgagtgaatcggctacttctctccttcactaccaaacttgagctaaactcccatgagtgaagaacatgtcgttctacgaaatggcttgttgcagctgagaaaccaacagtgactcgttcgggaagaatcttcatcaagtctattcggtaagaaaggcttgtgttctctgccttagtagaagtggttctgtaagaccaaacgacactcaaattcttagtattggcattataagtaatcaaagcatcagcaatgtcactactgtggtagctagcgttccaaggagtgaaagtagcagaagctatggagttgttgttgatccccacatgtccaacagaaggatcccattctgggttcgggaaggaatcgaattcaaccgtaacaatctgattgttggaggaatcactagtggtggtgttgaaaaggccaagaaagccaccagcagaatttggagggatttggtacccgactggggcgaggaagaaggcaaggccggccgcgtagatgggccggccccgggtgtctacggtgaatgaaaaacgagaagtgaagttggtgaggcgtttggtgtgggcgtcccaaaggcgtagaggctctgccgagatgactcggccggtacgacataggtaatttacgtcgttaaattcaacggctcctactgatggtgctgcgtctccttcgtaaacaactcttgggtcgtttgggacaaaccgagttattttaaagttaattgaatgagatgtgattggaagacagaacaagatgagaaagggaaagagggtagctgctgctgctgccattgataacgtgattgagatagtatgatataatctgcactctctatatactcataataatttagaccaaaaaaaatatgaaaaatgacaaaaaagaaagacttgacttttagtatggcgatttttatgatgaataataacattcactgtagcataattcttaaaataaaaaataataaggagaaattattatttatttatttatttggtaacaataatttttagaaatgttttagttgcctctaagttaaaaaagaaaattaaaacttagttattttcaattatcccaaaacagggaatatgtttttggccaaactaactttttttttctttttttatcacaaaaatactctctgatcttctttttttttttttttt

SEQ ID NO: 23043 - DNA, 2295 bp, Cannabis sativa
atgcttcatttggcatgttgtcacgcttccatgagcggcccgtctttggaatgaaagatgctaaaatatatgaaattttatctcaaaaccaataatgagagtgatatcccattcctcttatatatgaaattttatttccaaacaataataataagactaatatatatatattgtagattatattatgtatgaaaaatgttaatattactagtgatacaattaagaatgagatcatatataaattaatgtaataatatttaaagactattgctaataactaattataataaggtaacatatatccaaaaaaatattaaataccactaatacttaataataatacacaatatatataacattaaacacatacatacagtgttatgccatctcttcacaccaagtatcttttataatttctcttacaacactaacattagttactttactctgttttttaatcttactattttttttttattttactttaaattttagtacattaaatcatatatattagttttttcatttgttctatacattcattcaaatatttttttagtatatataaaatacacaataataatgtaaaataataaaatataattcaaatattaattagatattatataaaaaaatatagagaaatagtgtagcattctttaaagctgattttttttttatcattttttgacttttttctttactattatcatatatacattttggagttctctcattatatattctcagtcaaactttgatccatctttgacttttaagatgtaatactaatctccgtatatcaatcacaaccgtcatcttaagcagaatgatgcctatacaatatggaatacattaagcatcacatttcatcttctatgaataaattattgtgaacatgtatatataatattttgatagcagtaaaattatacaaaatataactatgacattgagcatacgtaaaaaatttcatgactttgccactaaaattatttatacatgttacttttgattactaatatgtaatgcataaacaattggagcagttttgtgagggaagtacgtacctacatcctatctttagactaggaaatgtgaaagtgttacgttttcaccgaggtataattaatttgtagcagttgtattaaagccaattttagtgtaaatatggaaggtatactagcagctcacatttcttttcaaaaattctacttgttctgaaaaaaaatgtataaaatcaacctgccaattatgtttctctacaaagtgcatgattattaataatgcattcttcaataattaattaaccttactgggacatttaagcaatgtttttaaattaatgaatttcatcacgtggtcttatttttatgttgtacaacatttcgtttccgcatttccactagttgatattatatattaatggaacgaaacgccatactactcactactactttaacacttaaaaatagaaattcatcaaaaatgataattaggttgtttcaatgtgcatgaacaggatattatgaaatccgaataaaggtggaactaaagcagcaaaaccaaacactaccagtgaatagggaaaaaaaaaaggaatatcttggcctagctacggtgtactttatgagttggaaaacgattagttaaacctataactcccatctctcttctaatatataattattaaataattatatatgaatattataaaagttaattttattatttattggattatattagtgtagttatggcgtttatttgaatccatgtatgtcgtcatcttttaagctgcatcattcatgtaacatataaatagggttttttcttttaaaacccacataaatagggtactgttataccaataaattaatgtaacatattttgaacagtaaacttataattcccttctctcttctaatatataattataaaatattatacatttctactactgaatattacaaaatttgatttagttagttattggattatattattgtagtgatggcatttatttgaacccatgatactatcattctcagactccaactcatatcatgtcaattaccctcataatgatcctttagttgttgaggtgcaaatagccaacataatggtatcaagggtgatgattgatgacggagcatccttgaacatctgatttaagcaaaccataataccgatgggtttttcactcaaagacttaaaatcatgggaacaactaatatatggctttagtggagcaggcatagctccatgtagtaagaacaaactacaattcacatt

SEQ ID NO: 23044 - DNA, 2723 bp, Cannabis sativa
cagtgcctacgaagtcaagttggatttcaaaagaaaagaacaatcaaaatactctcagatacgagctacttcgagaggtatggatggaaagcgagtaactactaaatatataccatgttaatatagatatttttgcctattctttttctttgggagagttgtacatctaatagttgtagatcctgtattttcttaccaaaatcaaaagaagatatgcattcaagaaagactcaaatgcttgttaagagtttgtgtgtgcaataatatgagaaaaataaaattttcatggcaacgaatgtcattgatctctagaataaataaagattgttacaagcgtgtcacgttggtttgcttttggcttttatcatgtgttttcacaccaaaaacaagtcgataccatggaaaaatataaggcaaaatagtataatattgatacaagagcaattgtttaataggtcaaaatagtatttcttttcatctggtcactctcgtggtgactacaattacaaactcagacgctcatgacggcacgtctcattacactacaacatataacacgcgtaaaagaataataataaaaaaaaaaggtcaaaatttgaaaaaataggttggaatcttcaaacatagaaaaccccaacaaactctcgattctcacatcttacagcatatttactataaagccggacgcaaaaatttatgaagacccatgtgaaccaccaattcaggcagtgagcttctgtgaagaactgacagcatttatatgctggagatgtaaggcagccaataaaccttgccaagtttctccaggtgcatcacttacttgaatatcaacaagtttcctctgtgttttgtagtattcttccaatgacttgctctacagaaaagaaaacagcaaataagacaatcaattctatagtggtcccaaaattcatataaaagtaatttgtttgtatgtatatgtatatttatatacctgttttgcatagttaatgaacttctctttccagagtatttcagaatcagtagaagtggagacttgttgtccattctgagggtacaaatttagatttttataactagcattgttgctctttcccatgtatttttgacattttcctatattattctctaagtgctcttctgtgctcttgaaattcaccactaaatcaatatccgcaatttgatcaagaatctcctgtgggaaatgaaaaggaattcaatttgcaaatcagtgtttgcagcaaaaattaacagaggcaaacaattaaacattatatacaaacaaaataattttaaagccccatttttcttggaacttacagcttggattcttgttcgaggaattccatcaagaatgaacccagattcacctctgcagtagccttcttcaagtctcttagacaatagagcaaatattatttcttcaggcacaagctttccctcgttcactgcattagcaatctaaatttcccaaaagaattaattaataataaaattagtcaagaataatcattcaaataatagaaagcaaaacactgtttaatctttccaaaccttcttaattcaacacggggattgtataaaagcttgaaatttaactataccatgttaaatgtctgcacttttgggctacaaatactaaattatcaaactttgagaatacatttattcactttcaaaaatctcaaatgatcaaaatggtaatcaattattgaatgtttaaccctgtttttatggacaaaataaattctcccaataacaatggagaagaaaaacaaacaaaaattcaagttaaataaggaaaagaaaaatcaaagaaaaaaaaaagtaatgacctgcttgtagagagaagagcgaggattgagctcctgacgaacaagagttcccatagaaatgtggggaacttccagaagcttcgagagcctttcggcgtacacgtgtttgtttgcggttctgtcaccgatcaccacccattgaacccctcttccagggacgaaattctccgagtccaccagtgatttcacctggcgccgatcctcgtgtccccactcttcttcgtcatcataatagtcgtactgtacctgagccgcagaagccgatccgtaggctcttcgggagccgagcccgagaaggcggcgagcgaaagatggagcgaccacgctcagacggttgagtccagccatggcggcgagcgagagcttaaagggaagggttttagggaaaaaaacttaagagagagaaaataaaaagtatggcaagaaaatgggaagtagtatagagagagaaagaaagagagtagagatatttaggagaaatacataaatgcccttggaaagatgttttaatttacacttatgccactctcttaggtttggcattttttgtgtggtgggagcgccacgtgtccttgtcatgcgcgcgaaccaggggttctaaatgttccgcgttgagtgggttggaatcagctaccgcaggcatcacgctaatttttttttcttttttcattaatacgtgtttttataaaagttactaattaaattttttattttataatttatacaatgataaattaattttttatatataattaattttataataatttctaacaaaaaaaaaatagtaaaaaatacattaatttttcataacaactctaaattagattaatattagtttttatttaaaaataaaatcaattcatggtgaaattcaaggaaaagtta

SEQ ID NO: 23045 - DNA, 2224 bp, Cannabis sativa
  modified_base (1331)..(1340): a, c, t, g, unknown or other
acgagagagttattattatttatttatttaagaacggccattctttcaagatagtgaaggaaatttcttcaaaaaaatattgtgaaggaaactattctatgctgaatactaattgaaggaatcagaaaaatataattttttctatggggaataaatatctaacggttaattttaaactgcttaaacacataagagagggaaaaaaaactgcataaataaatagattaatttaataattatattcctatttgaaatataaaattaagaaaaaatatactacaataacaaaatttaaaattaaatatgtttcaaaataaatattaaaattaaacatttaacccatacaaaaaaaatgcaaattgacataataaaaagaaatgatcattaatgataatcaataaattaattaaatatgctttttaaaaaagaatgacaatgttgttattaaaaaagtgtattgaagtaagtcattaatgctaaatggtaataatgtaaataaaaggtgtatttattgtatataaaatttgacaaaatactatatttttttttaaattttctaacttttagaccatatttaatggaagacataaaatgtgttaaatttagcacaaaaaaataagtttgtattatatttgatcaactgtttataattgttctccaatacacaagatgtaaaataagaaaaaaaaaattaattatattaatgatcttttaatattttataaagaatatacaaaaattatttctattcttttattatttaaataataataatatggtaagataaaaatataaagtttagtaaaagttaataaatcacaataatgagtgatattatagtaaataaaaaagtaacatttattgtgggttaaatttgacacaatactatattttgtgtccaatttgacacaacttttaacatgtgtcaaatttagcacactttttagaataccaaagtagtagtttttcttaagtgtgctaaatatagcaatacaccacttttttggtactccattaaagataagatacgcatatgtcaaatttgacacaagttttaacacactgttggaatgtttttttttacaaaaatatcaaaatataatattacattgtttatttggtaaggaaatgctcttttacgaccaaaagaaagtcttgtgagcagagtcggctctaggcataggcaggtaggcccgtgcatagggcctacactttttgggggcccaaaacagagccagccctaggctaaggctggctaagcatgcgcgtagggtcaaatcattttaggggcccaaataaaaaaatatcttttaaaaatatacatatttttnnnnnnnnnnttaaaaataccatttatctttataataaagactcaattttttttttacttataacccaattcaactcagggccgatcctggcccaaaataaaaaataaaaggcctcattacgataggatttttactaaaactaagtccattgttaacaacaactattcacatattggttggttgaagtgtatgatactgtgggttgagtttgagtccatgacactcttttaaatattatttttatacatttctgaaagtacacatattgaagcatccattatgacctaactcaattatatgctgaaaaattttatttaaattaatttttctttcaaattcttttcttttttggaaatgtttctctttttatatttaaaactctattttttaacaacttttttttttcttcccgttataaaataagctctcttttggtccattttttttctaaagtctacaaccacacatatttaacattatgagaaaaaaagattattaatcaaatcatcaaatatgttcaagaataatgtattttattttctgtaaatatgatttgattcaaaaactttagttaaaatcttaaaaataatcttgattgtatgtttaattttttttatataggtaaagatgaatttttcgtgaagactccaaaatttaaatagtgccttaaattcatgtattctcaaggccaactccaggaaagatttccgttaaactaaataaaagaataaaaccacttaaaaataagagcattgctattaggtattaatggtgtttagtaccttcttgacatgtcacgttgcgtattggctaaattatatggactcaatatttagttggatcaatagctatattgatacataggagggtgctagcaccactagtgtccttta

SEQ ID NO: 23046 - DNA, 2274 bp, Cannabis sativa
aaaaagaacaaacatacaagtaaacatctcaaacctgagaacctggaatcataaactgagctaccttaatattctccaaattaggatgagtcgaagcaataaaaagattctcctcacttggtaaccaatgttgatttaaaacatcaaccgaagcaccattgacaatactccaatgatattattcctttaacaagtttcgagattccataatagaatgccaaacaaaacttagattatgacccactatagccgagaggaaagtttcacaagtagggatgtacattttttttatggagatgggtcccgcggggattccccgctaaatggggaacgggatgggaatagggattattttttgtcctcgaatattaaacgggacgggaatgacactccccgccccaagaagaccgatttagtattttattttatattgttaataatattttataatttacaagtgaaatggggtacactgggttgggtactgttgaattggagccacaccattaagaagttttgtatagatgatttaagaaatttcaccttattgtgagctttgtactttataattcttatttataaacaaaatgatcattcttaaaaaatatgttttatctatgagcatgtgagaccttgaaatccattacaagactttttatgtgtagagaaagcaagtacaaaatggtatctatgaaaaaaaaaaaaatacatcaataccaacatttcttttggcataaacatgaacgacattctcttgcaagcatattttgtatcaaaattgtaaaatgttcgtttgaaaaggatcacgaccgaacgatgaaaaagatgatgaataaaaaatccaaacggtatttttccccagatagccacgttgttctttctattcttggccaatgaatgagctttgaatctcgtacttaaatgatgtcttgatcaggctatccacactgttcgaccaaatttattcataattacaatttgctttcttttattaccataactctgttcaatttgtccatggttggttcaatacttcaaatgctccttttccaataatagaaatttattacacttggattatgtacaacaaaaatgaaatagtagatacatctcataaaaaaactaaatcattattgaaagatttaaagttcgagtcagaatggcggtcagtaatttgatattatatttattgtgactgaaattaatatttagaaccttttgaaagacaagaaagagaggccattttcaccttgaggtcttttgtgaaaattttcttcatgtctcgggaaagtggaaagaggaataaggagaaatgggaatgaatcatcttaactattaataatcagcaaaagaacaattcaaattctttgttacaggaaaaaaaaaactgatatatatatttatatatatattcttctcctttctatattatgtcagttattgtcttaataaaagattaagactttaatgtcaaaaacaaaacaaaaagaatagccactacagtggaaacaaatattaagcatgtctaccgaaattaatcagttaacccataccatattatcctctcgcggagcttgtgctgctacatcttccagtctcttccatgtcaattctcgccgctcttccaaatctctagccttggtttccttctccaagtactccctctcacactcctcaaacaactcgctatccatatctcggaacatcctttgcacatttcccgtcagcccatttacagcctggttccagtgacctcgaatatttttctccagtgcttcaaaaatcagcggaagtatcacatttcggttctgtgcaatcaagcttactatatgttcattgttccagaagtaaagggctctttctgcaacctgtcagatgtatttgcattagaaaaggctttccaatgaatgagtcaattaaatatgtataaagtcgggaaactgctcagacatgacagagattacagatcaaaacctctgaaaattaagacaatcacgaattcaatcatacatattgtttccacagatatcttttatcaaactaccatgacatacacaaaactcagacattctaagactaacaaaggactaacacgaacaaataatgaacacattttaaagtaatagcatgaaacaatgacacgagtatggcagctcagaagtaggtagagaatactccccatcctataataatgattcagtgctctgtttttactctaattgttaaacatacaacaacctaatagaaaaaagccttttatgattcagatgagca

SEQ ID NO: 23047 - DNA, 2770 bp, Cannabis sativa
ataatttgtatgcataagatttttgaaaaataggagttcagggaaagtgcaagtgcctaaaccaaaaagggatgaattgagaaatatttttttttttgtatttattatacttttatgggtgggttgacctaatatattctttgttctttgcacatgatttacattaatttaagagtataatagggacatcatttataaaagtaggtatatcttaaagaatatagaattagaagtaaaaattaaaacaaaaaaaagtaggtataattttcttcaaccaaaaatatacgatctttttaacatggcctaatatttagtagcacctattgtacacattcaaaaagttttttttttttaatcataagtgccctttttgttgtttggcaatttggtctctcagaattttgtaacatacaattctaaatattgaataattcaatgaaatttattcaaaaaccaaaaatgttgatatacaattctactgtttataaaattcaaggactaataggaactgaacttggaaaaactcatgaggcatttaagctaaaatgtttattcaaaactgtgacgacgcttttaaattactcataaaatagtgtctccctacctcaataaatttgatttatttaaaatatcttgtcattttgagcctacgtctatctgtatactggggctgagcaaaatgggcgagggcccaagttattaaaaatgttttaaacttcgtctatatgttggggcttttacaaaactattagattttgggtaaaattttattcacacgtaattttttataaaaatattatctttttatgaaataactgtaaaacaacaaaataaaacaattaaaatatctaaaataaccgtgaaataactgtgaaaatttaacacagtacactataaaatttacatagtattgttgaaaaaaatacaatatttttttaaaaaattttgcctcacaataaaaatgtaaaaaagttataaatttcaataggtagtataaaaaccccaaatatgtttgagcacatttctatcccaaattgcatggtgtttgcaataacaccaaatatgttattgttattattttttttaaacacaaaatcaaaaatttcaccaaccaaaaagtatttttttttgtgtgtaatagaatactattttatttgagtaacgcaattattatatctagttattttttttttttgaatgggttattattttttaatacaagtgttactattgattacttcataatattggtatagattattaaactaaaacacaataaattaaaataccatagcagatttgtaaataaatattacaattattgaagagaaaaaagcataacattcagttaaaatataacccacacattaaatattaactaaactatatttatttttagaattagtaaatttattccacaagtgttcaatttaaatgttttgaagtcaaatgggaactgccttcatctttatttttttgtgtcgagcaaggaatcattgaaactaaccagggctttgtcatcaacaaccgtctcaaattctggacttggaacctcgactcgttcttcaatagtttcattaacatcacatccatcctttgctactatattttgcacgataatatatgtagtacttgctcattccttaggagtgttggtcctacctaccacatgtttcttgtttcattgtagacaattttttcttcggaccactaggatcatgaatactttgaataagagtagactcgcattatattcttttcctttaatgacgtaattagctagtggagcaataccttcagcaagattagcagaaagatgagatactttcagcacattaatatcattattaaatatcggtagactaaaatattcatgtcatatccaaagatcacagttagctatacaagatcatagttgtcctcccctagttgttggacaatttttccattaacagaagattgatggaactttgataaatattttaacaaaatatagaaatgtcctagtgtgtgtgaaatggaaagaatcctacatgggatatgaacctttgtttacaagagtataggctgcaactttggcacttgggtttgggcttcaaggggtacctagttttgttcgaatgggtgaggactcgcacatttgacccaccatacgtgcgcgcgtgtcgtctgttcgagctgggctggttgatgtggtgtgacactttattattttaacggaaagattatttaataaaataattattttttattttttaatttaattgaggaatgtgtttaattggaactgatcagttaatgggacacgttcaactaattacaccccacgatttagaaaatgttcttctttccgttatattattttaatccattcttctatatagtgcgattgaattgatgggaaaaatacatctttttcatatcgaaaaaaataaacacaatttccactataaaattccatctgcgatattagaaattttagggtgtatttgacggttcagtgcagtggagaaaaatacatcttctttccgttatattatttcaatccattcatctatataatgcgattgaattgatgggaaaaattacatttttttcatatcgaaaagaataaacacaatttccactataaaattccatctgcgatattataaattttagggtgtatttgacggttcagcgcagtggggtttcgtaaaaatgcataaaaaattgttttgaagtgtaaaaatgaaaaaatccccatttttttattatattttatgaaata

SEQ ID NO: 23048 - DNA, 6733 bp, Cannabis sativa
ttttttattttgagctcccgaaaagtgcaggccctaggcacgggcctagcccgcctatgcctagggctgaccctgactatattataccttacaagggtgttaggtactttaagtacataatttttttttaatcatagggaaacgtgccttatagtttagccaatgaagttttatttttcaaaattagggttatgtgcatttgtttttctttgtgcttatttaagttgagactggccattttctttgtaattgcttaaaaaaaatagtaaaaatataaaaaggttaattaagatttttgtttctcaaactttgacatgaatcgaatcgtgtttctttaatttttcaagtcgttaaaaattcccttaaattattaaaaatattagatttaagaactctcatctaattttactaacaaaagtctaacattgatgaaagtctatgaggtataatttaacacatgtgaaaattcaaggacacagtttagtacacattaaagttcaggagtacgattcaatacacaaagaattgtcacattagtaaaattgaacgaaactggacaaaaatctttgcatctaacaatttcattttcaatagtttattagaaatttttaataattagaaaaatgcaagggcataatttaatacatttgaaaatttagagacaaacatgctaattagccacatttgggggtcaaaaatcctaaaaagtaaaagaaagaaaaagctcctcaagtgggagtttggttttggcgccataactcactctctcactctcactcctaacgacgcttccgtagaaaaagctcagacctttggactcaccaccggccaccaccaccgccaccatgaccgaattcatttctctgatggacatcgacgatgaaagcaccggaggcggagacacctctaaacccgtttccacacccatcatcaataaccccaaaaacgtcgccaccgccaaagcagcgccttgggtcgagaagtaccgacctcagtccctcgccgacgtcgccgctcaccgcgacattgttgacaccagtcagttctttctccccttttccccccatcatatttctttttctccacttagggttttgttttgttttaattttttttttcttttcaattttctgcttggttctcgggaatttgattacatttctcatatgggtatttgcttaatttgttttgcatcatgttcatgcgcaaacccatttgtgaattcaatcaattattcttcttatttttgaagttttaatttttattttggtgtgtttgaatagttgatagattgaccaatgagaatagattgccgcatcttctactgtacggacctccgggcacaggaaaaacttctaccattcttgctgtggctcgcaagctttacggggctcagtttcataacatgattttggagctgaatgcatctgatgataggggaattgatgttgtgaggcaacagatccaagattttgctagcactcaaagcttctcctttgggtatttttctgtattttgatactattattctcttttccagctatgttgaaaatggtaacatttaattgcaatggtagcttaaatggttagtatatggtttgctcccacaagtccgaggagtgttttgcaaaacaaaacctattggataggcagggagcttagtttgaaaaaaattgtaaaacatttacaattttttaaatgattcataactgatgttgtaatggttttggttgacagtgcaaaggcatcggtaaaattggtattgctggatgaggcagatgcaatgacaaaggacgctcaattcgctttgcgaagaggtattgtattgttctctgtattagatcaagtttttgtcatttctggaaagaaatactcctaaagttgctttgtttgtctgtcaattattgtttgtggtgcagtgattgagaaatacacaaagaacacaaggtttgctcttatcggtaacaatgtcaacaaaattattcctgcactacagtcacgatgtactcgttttagatttgctcctcttgattctgttcatgtcactgaacgactcaaacatgtaatcaaggctgaagggtaagttttatatcccttcaattatgtattttctttatcttgtgatttttctgataactcagagtggggtttagtttgtgtgacattattttggactgttgtttgcaattctattaccaatataaatactttgtctgtgaagtgtggcatagctttattttgagaaaactacctttgttgttcctgtaaattcttttgggagctcccacattctcccacccattgttcattttcttctttggttttttgttattgagatgataactgaaaactgaaaagcttctttgacaactttttcactgaactaggcttgatgtatcggagaatggcttggcagcacttgtacgtcttagcaatggtgacatgagaaaggctttgaacatcttgcaggttatttagatctctgctctagtttgttcacgtgtttctacttccttgttatcgaaggaagtttgttaatctgcaaatattaatgcatttaaatttccaaacaaaagtctctaatttaaaagactaaaatgcttgaaactttgaattatgttttctttttgttgttgaattgacattgaatgacaagttccttttctttttcttactgaatgtgcacagtcaacacatatggcttcacagaagataacagaagaagaagtatacctttgcactggaaacccattgcccaaagacattgagaaaatatctcatgctcttctaaatgaatccttttcaaagagtttcaaaggtacatataaccttttcttgttactttgaatacctaatccgttacaactaacttttctgagctgtttttcacattgcatcctttttttttcagaaatatctgatatgaaaggaaggaaaggattggctataatagatatcgtacgagaagtaactatgtaagttctattgcatggatactaaatgcctattctgataatttaactaccccatttatttaatcaaggtgttgtttgaacaggtttgtcttcaagataaagatgcctgctaaagttcgcgttcagttgattaacgatttagcagatatagagtatgttaatacttaccttcctttctctatgcattatttttttagtttgtgattgcaacagttgatgatccaaaccggtttttaatcactagagccgattatccgtgtgcgcagatacagattgacttttgggtgcaatgacaagttgcaacttggatcgcttattgcttcattcacgaaagctcggtcttctctagtggcggctgcatagtaatatttctgtgtctaattttgtcaacttaatttctaggcactgattcaaaatgtggttattgtgtagacagatgttttatttgggataccccactttgtcaattaaagtttttggtgatgtgcttttggaatagggaaatggcttcaagaaagagtgacctttttttgttgatgttttcaattagagtgaattttagtatgtaaagctcaatttggcaaacctcatataaattatcaaattttaagagtaaattaaggtaaagaagagaggttgttgaattttgggatctctgtattttgaaatttggaggaattataaaaataaatattgggtaaaatgacaaaacaatgctcatgagtaagctacttgaaaaaagtgccaagaacaaaatacatatacaaacctatttatggattaaaaagggcataactgtatgccaaaaaagaaagcttgattttgggattttgaaatgtctattcttcctagcaatttaaaaaacttacacctagaacaaagactgaactgtacaaactcctaatcagcttttcttttttaagttcactatattgtgggaatgcctttttccactctttatacctctgcaacttgaaaaatataatttacacttacaactcaagcagcttttcttcatcttccagactacaaaaatggatatctagaagacatcaataactataagcataccaagtttgtccttcctatttggacactcaaccttagtctacattcgataatgaccttaatctttacgttccttcgtctgcgtttctgttggaccattcaatctcgatttctagtgttcgagaagatccatctttgtttccatcatgattaaggctgaataatccgctgtatactccttcagtaacaactttgtctatttggatggtcactttccctagagtactctgaaaaatagccacaattgtcgagattaggatgacaagaacattaaagtaacaatcctaaacacagaatactaattacctttccgaaagtgtttttgcttttgcaaacaatgtgaagcttttgtcctttcggaggtacatcgaatccccacgtaaacccttcttcccactcgggacaactactatggttcacaacctgattaaattatcgacatgttagcatgaaatacaatcaccgatatataatgagggcctcttccagtttataaactatttaccttagtttgtcgagcaggaccgttgcctattgtcaatcgacaaaaagcatttgtacttcccatagcctgctttaagttgttaccccgtcgaattgtaactgtcaagcaaccgggtaagcaatgcaataaactgtctgctctgtcatggaaacttggtgggcaagtcttcatgagcatttgcaggatgggaatggcttcggcggcaaccatggcttgagactttgctatatctattggcatggttgaccaagaatgctttagcaagcacagggtgtccagtacagactcctgagctgcatcgctacctgattttaaaaccccaatcagatgaggaatgcaaagggtagctgcttccgagatatggagcttcggaaagttggcaaatatgacattcaaggttctcaagacctcttcattgatggttgctgaggaccacaattccctttcaagtgcagctgtaaaataaagacataatgggatatcaaaattaagataaaactagaagatgaagatcctgcttttattgtaaacttccaatcaagatgaaaaatttgtttgcctatagggcttccaacaagatccttatttgataaacaatttattgtgtgacatttcaagatgcaaatgaaagaagaggatctttaaaagaaaggaaataaggagtgccattatagctacctgtcaaagatctgatgagctcgtttgaaacatactcttggagtgtgtgattagaaaataaaaacttgattagcaaggctgcctgagcagaaacttctggattcggtgacagcaggaattcctgaatgaccaaaatgccacctgcttctgcaacagctcgcctattggttctactatgcatgacgaagttttgcaacgcacaaattgcaaccattttcatatcctctgttggttggtcttcaagcaaacttattaatgcacgacaagcagaaacagaatcactagctcttgcaagcacctcatgctgtgaaaggtctccaagagctagagcaacaagaagtttaccaggttgcgatctggtctgtgggtctaataaatattgtgataaaggtgctatagcatacttggaaaccttcatctgtcgtatcttcacattattaaataaaccttctagtaatctcccacattcttcttcgaactgatgagatcttaacaggtccagtagagcatctatagcaccagcttcagtcatttgtatggcacttaaggcatcactcctttcatgaacagttaatgcatcaagtgacactgtaatagtgctctcaactgttgagagcaacattttcacaagaactaccacaggaaccttataatagtactcggcgttggatcgtaagacattagaaagaaccaaagcagctgattcccacaatgcatgaggtggctgaggatcatcctgaatgagtaatttagcaagctcgaaaattcctccagcatcagcaactgcctttggccaagtcatagagattttttccaatgccttgattgcagtctgctgtaagttcaaaataccaattcccgctagctgcacaagaggcacaactgcattttttgtggtaatatcttgctgaaaatgttcctgagcaagaagatgagataataattctgttccaagctgctggatggcttgggaaggtgattccagaaaggaaagaagaggttcgatgacttcgctaggtgtgagatttaaagttgcaaggctttgtggcttctctaaaatatttacaagtgcctgcaaggcactgtgctgtccccacaaactgaattctgaacgaagtaaaaccagaaacaaaggttctactatttttgcggctgctgaacttctggcgatcgcattactatttgtcagaatgcggaaaagttctgcaatagaagaacataatgaattgggtgcaacaggtaacaactcaagacaactatcgatgataccagcatcaaccatttccaatttgcgtggggtccggtctttccccagcttaatgagagaacagatgctagcctcaattagctgatagctcttatcagaaaccaagccaacaagaagatccacaatatcataggctgatgcaagctccaccatttgttcatcatccaacagtttctcaaaagcacaaactccagcttcgacagctgaactagaatcagattgcatcagtgaaataaaggg

SEQ ID NO: 23049 - DNA, 3909 bp, Cannabis sativa
actaatggagcacagaggtgattaagtgattaattattttatttatctttttataatattatttagcattggggttactatattatttattaattaaaatgtgtttgatttcatgttgaatcatgacatatttcttatatttatataaaaataaaaaattgatccatgaattaaaaaggaacaaattttttaatttttgtttcttttaggtttccagaagacgtttttgatcggaaatgggggagttttcaggacgagagtgtttggacgaccgtaacgacgtcgttgagtgtggaatcaaatgaattccgagtaccttctcagataatgagaactgcagcgacgaccatcaatgagagtgcacctttggagctttttgtgacggccagcgatgagagtaacagattttatgtctacttgcattttgctgaacttgaaaaactcaagcccaatgagtctagagcatttgatattaaactaaacagtgtcaacttatacaaaaattgtgtacccaattacttgtcaacaaacactatctacagcatttcaccatttactgggagattgaactatacaatctcaatcaacaaagcctggaattcgactctacctccaatcttgaatgccatcgagctctattctcttatagatctctctctaccagaaacggcccaagctgacggttcgttaattataacttaactatgattagtgttggttttgttaattatataattaataattataatatatattgtatgtagtggatgcgttaacgaacgtaaagtcagcttatagagttaataagagaaattgggatggagatccttgtctcccatcaaactactcgtgggtgggtctcaactgtaattttgacggttcagatcctcctagagtcacatctttgtaagttcactactttactcttcttcttcgttaattaatttaattatgaatttcaaatcttattaattatgtatatatatgtgtgatataggaacttatcttcgagtggattgactggcgagataagcacacatatctcagaactcactgagttggagtccttgtgagtaatatatacctgattaattaatcttatttaattacaatccatcggtaattaatttaatattattatatatattgttaatgtgaaatatttcagggacttgtcaaacaacaatttaacaggatcagtgcctgattttctttctcagttgtcaaaattaaaagtcttgtaagttatatttttacactctagttttcatctatacatgttaaaatgcatggattaccaaatatataattcgatctacctctgttttctgttttataatgcagaaacctggggagaaacaagcttacaggtttagtgccagcaggactcgttgaaagatcaaaggatggttcactatcaataaggtctagttccaaagctacgtgtgctcttacaaattttttttattacttggatattacacgtagactcacattatactaaaattcacattttttttttttaattttgcggataatagtattgaaggaaacccagatttatgtgagtcgtttccatgcaaaaagaataagaagagcagcaaagtaattccaatagtcgcatcagctggtggttttgtcattctttcgatagtagtagtagcgattattctgataattctcatgaataaaaagaaacgaggtaattaaatttctatatatatatttacatttttgttcaattaaccttaattggtcctaatatgtacatattaatatacagctgcaggtgtaaatgatgataaatcagcatattctaataatttccagaatgattcgtttgagttcaaacaacgtcaattcacgtactctgagattgttaaaataactaacaacttcgagagaattcttggaaaaggtggatttggaaccgtttaccatggcctcattgataacgttcaagtagctgtgaagatgctttctgcttcatcagttcagggatttcaacaatttcaagcagaggtactatttttacatgggcttaattatatatataattcattaacaatttgttgatttgaaattaatttgtgagtttatattcatgataacaggttaaacttcttatgagggttcaccatagaaacttaactacccttgttggatattgtaacgaaggaacgaacttggcacttatttacgagtatatgcccaatggaagtttggacacacatctttcaggtttgagtttttaactaaaaaactaatttttgaacatgattttcttttttctttcttctcccgattgcttcttataatttaaatatataaactatctaatgagaaagtagtagatcaacaaacttgactctgtcttttattatgcatatatagatgatagccgtacaaaagtcttgagttgggaggaaagactccacatagcactggatgcagctcaaggtattttagctttacatttattagttgatttgtttatttatacattataattgttttgctctatatataattaatttctatatcattatttcccctttttacttatataggattggagtatttacacagcggttgtaagccagccatagtgcatagagatgtaaaggctgcaaatattttgttaaatgagaattttcaagccaaaatagcagactttggtttgtccaagtttttcccaactgatggtggtacacatgtgtccacaattcctgcaggcactcctggatatcttgaccctgagtgagttattttaatttaattgaaaatgaaaaggcattaattaatagtcaatgaaataatattgttagctatattaatttgtatatttgtttgtaggtattatatgactcacagacttgtagaaaaaagtgatgtgtacagttttggagtggtgttattagaaataattacaaatcgaccagccatcagcagagtaattcatgagagggatcgaggtcacataactcagtgggtgagctttatgcttgccaatggagatgtcaaaagtattgttgatccaaaattagagggaaatttcgaaatcaactcaatatggaaagctgtggaagtaggcatggcttgtgtgtctaaaaagctaaacatgagtcaggttgtaattgaattaaaggagtgtttggcactagaattagctcagagacacgactacaacagcagccgtagtgtgactgatcatcattcagtaaatgatgaaatgctatctcttgatctcgatgttatgattactgaatcacatcctctcgcacgctaatttagaatttcagttaattctctaattgtttctttctttttcattgaaattgaaatgtaataatctgtgatagatcaccatttttatattattatttgaaaaaattatatatgaaaataaatgaagggataagttgaaaacaatttttttttattacaaattaactaaatataactcgaaaataatattaattgataaatatttttacaaaacttatcaaaattagatttctaacccacacgggaatataaattataaaattgagtataaataaaagttaataaaataaaataaaaaataaaaataaagagtgaatatacaatattgtaatttccttgtattcatgtgtgttatatgttttatttgaggtgaccagttagtcggctattatataattaaagtgaatgtaattaacatattataaatactatctcaaaaattcatttttatggattcataattttttttaattatttatgtttttaaacagattttattattattatttgaatagagttatttttccgttatttttacgttgtagctacagaaaagtaaagtaaaaataatgtttttttttttttttctgtaaaaataatgttgttgctatatttttaaac

SEQ ID NO: 23050 - DNA, 2827 bp, Cannabis sativa
ttttttaaataaaattaaataaaagtcttcaaatttaataattttaatagtttgaggaaaatttttaactatttgaaaagtttaggagacataatttagtatatgtcaaagttcagaaggtaaaaatttaaaatagccttttaatattgtaaattattcaaaaaattacaaaaaaattgtaaaaaattataaataactacattgcttattgtcatatatttttaattagattagttctattttagatgcagtaatattaacaagaataataataaagagatcgacattaggtttctatgtaatagtcctcatagtcattaatacattaaagaaaacaaatgagaaaacaagagttaattataataagagaatactataaaaagtattattagtgcttaatatcttttttaatatcaaattactataattataattaagtatcgagttttatataatttaagaaaataattttaaatattgctaaaaaatattaaataccatcgatatctaataacaatgttttttttataatgaagtagtgcattttggcagtgattaaaagacaacaacgaccattaattaatatgttggccacatctgcataatcaaaagtccaccctttctacatcatatatatatatctatctattatctaataacaaaacaatttataattatattactaacttgagtcttgagtaaatgaatgtatttatgattgagatatgttcttgtcaacttcttatatattataattttttaattaatttttctatttaaaaatacatattagaatattttttttatggtagtgttcattatagttacaatattatttttataaatttttcgaatattttactgtactgaaaatgagtttgaagtttattaaatacacatggtatactgaaatatcaaaaattttatttctaatagtgtaaactatttaaaattttttaaatattaaattaaatgttgatagacctatatgagtagtctgccttcaatttctacatttagttttttcaactccatacattctaaactttttccatatctatcatctaatcacatttaaacacaagtaacttaatttactaattttatagtgatataatagaaatgagttgtaagttttgtgatcatccatttcaagaatttacaactcatttttatgatcatataacaatttgaaaataacattattttgtaattattgtaaaataatataatatataactgcccttattttctaattttgaaaaaggacaaaaaaaaaaaaagattgtaaagtagtttgtgtgcttcactttattttggtggttgaacttgagggcacgtatatatacctacatataaatataaatgtttatttaacaataattatgtgacacattatcttttctatatatttgagtacctaacaagaccaacttgctctttccaaaaataaatataaaatcaacttgacaacttggccttccacttcttgttttctcctcacaaatattcataatcacatacaattacttagtacaattacccatatatcttttctttttcttttttaataaaagggtatataaataaataaagtaaaaattaaacctctcggttattatataagatataatctggtataaaagaaagtgcagccatactattccaattacctaactatttagtattacctatttgttttagtatttgaaaaaaaaaaaaagtctaattttttttatgatcgtttacattataattatttaagacattttataaataattttcagaaaaatttaacacgttgaaaacaagattcaaacaatctgttacacgcgagacttttttattttatacacatgtaaaatagactgtttgaactttatttttgacatgctaaatttttttaaatttatcaaagttatataaaatgttctaaataattataacgtaaacgatcgtaaaaaaacatttaactaaagattatttcaaatgtcaaaacaaatagaaaaggatattggtagaccatttttagagattgcaccataaagcttttcatatatatattccacttttatgttaattgttttggaaaaaagactctcttctaactaattgcattttcgacaatatgtttctcattaatcgacacatcaacattctttgacatctaaaaaatattacataattaattatttttcaaccactaatgatttattaatcgagttatgtatctctacttctacataaaccctctcgaatatttttttatttcttttttaaaaaaattatgtaaaagtcttattgaattttctacgattttcatgacatgatcctctaccaacaattaatatttaattaatacttttttaataataatattttattattataaagtctattatttaattttatagttataaatataaaataataaaaataaaaacatttcttagtttttaacgacagaaactcttcaatctaacaagaagaatagttcagaaagaatttttaacgacttaaaagttcgaaagatataatttaatacatgtcgaaatttggagaaaaaaaatcctaattagcttagtttgtatcaaacaaattgtttttttaaaacttttctcctattaataataaataaataataataattaataaaatatctgctacccctgttccattaaaaaaagtaggcaaaataaaagtcttgatgcctatgaacttttttttccttcctaaagttggtgcctatggactcttaataagtagtctaacgtctatagctcacttttgcctatggtcttctagaagtgatttataattttatata

SEQ ID NO: 23051 - DNA, 6178 bp, Cannabis sativa
  modified_base (890)..(899): a, c, t, g, unknown or other
  modified_base (2498)..(2511): a, c, t, g, unknown or other
  modified_base (5052)..(5056): a, c, t, g, unknown or other
tactctattcatcaggtccatgaaagctgcgggagcattggtcagtccaaacgacacaaccagaaattcataattcccatgcgtagtacggaaagccttctttggaatgtcctcctcttggattctcaattaataatagcccgatcagagatcaatctttgaaaatactttctttccttgaagttgatcaaaaagatcatcgatccaaggtaaagggtacttattcttgattgttagcttattcaattcccgatagtcaatggatattcacaaggacccatctttcttcttaacaaatagtactggagctcccaagagtgacacactcactaggcaggccgtgaaaaaaccctatgttaagcgcaacccctagagttgaattttaagttcattaagttctgttggagccattctgttagggggctttagaaaccggttcttctccaggtgccaagtcaatgataaaatcaatttctctttgcggtggtaaacctggaagttcaacaggaaaaacatctagaaattcccgaaccaccttaatatcctctggccgaatagagtcaggccgagtggtatccaataccaccgccaaaaaccctagtcatccatcacataataattccctggctgttaatactaaaattactgggaagcaagatccctaaaccgatccaacgaaaacaagcggttctttgccttctggttggaagattaccatcttcctcttacaatcaatactggatgagtacttggaaaaagaaatccattcccaatataatatcaaaatctgctaaactcatttctattaagtgagcactcaactccctatcgtcaattctgatcgccatagacctaatccaccatttggagatgactaattctccgctagnnnnnnnnnntccaaaccctgattcataactatcgtcaagtgtatccaattcactaaaaattctggccgccacataagaatgagtggccccagagtcaaacaacacagagaaataagagttgttgattgagacctgacctgttaccattgaagggctagcttcggcatcagcctgagttattacaaacaccattgctggagtgggtttcgtcccagtcttttgtacttccggcttgagttcgggatagtccctcttataatgccccggcataccacaatgaaagcatccttgccctatacactcccccatataaggctttttacaactagggcactctgggtaagtgtatcgggtttcaaagctaccctaacgattgcctcgaccctggttccctcggaacctcttgttctgagcagagccactaagtgaagtaggtgcctttcttttctgatcagtggccgagccactatttcccctactaaagcctgatgtaagaggagtaggagccccacgaacaaccggagtccctcgagactctaaggtgcactccgctgcgccctcagcttgtagggccttacccaccatatcagcatagcaccatatcagcataggtggtgttgtcatcagtagtgatcattaagtcttgtctgatcttcactttcaacccatccaggtacttctctttcttgctgaaatcagttgtcacgattcctgcggccaatcttgccaagcgatcaaattgagtcgtgtattcaataacactcatgttttccttatgagtcagctaggtgaattcttttctttttgcgcttctgaccgcctcatgtaatactttgcattaaacagtttccgaaacttttccaaggtcattgttgcaaaatcatgagttagggacagcatgtcccaccacactaaagcatcctcttagaattggaatgtggcacaggccctcaatcattgccgatgatgcccataaaattcaagattctagtaatgactattagccactactcgaatttcatgagatcagttcctcccaagaaaactggaggtgcctgcttatgaaacctttcatataggggttccattcggttgactgcagctacaggtcctacctacacagcaggggcaggagctgccggtatttctagagcagggattgcaggagcaccctactgtctcaaccgctgaatctcttcatcttgttcattaatcctggcttgcatttctgcaaacctcttttcccaatcttgggaagcttgggcaggatatggcgggttaacatcaccctgaccacgtgccctacctctgggacctctacctcggccacgaatttcaagaggaatccgagctccctgaccaccactggatccaactgaatttccctggattctggtgtatggcctggtgtccataataattagaacagcctgtgtaaccaagagctagtctgggcagaccgtgttaaaaaaaaacttactaatgccgcttatttggaaattaaaaatatgcacctattctactatcaggctactaacatgcttccttacatgcttttcttaaatcatactattaatacgatctttggaagacaacctggcggctctnnnnnnnnnnnnnnacaccctaactaacttaggcatgttagcgtcattattaacatactgtgcagctcattgctaatcaacgagattaatgaaaaaacgtgattaattaaaaatttgcttatttaattagaaacataaagcaatacatttataaaatcccgagatcaatatagatgggcagcaacaatgatgttggtaatcggcttgaaagtagagtgttggatgttgggaattagttaactctatctcaacaattgaagttaattcatcctttcaccaacaaagagatcaagaaggcaatgctcaggattccgagttcaaaaagtctgggtccggatggttacaactctgagttctttaaggtgcttttgtttaaaattggagctagggtgtgtaatgctatcaaggatttttttaatactggtatcatccctgctcaactgaatgaaactatcattactcttgttcctaaggttgaaaatctgaagagatccattgattacaggcagatcgcttgttgctccacaatttacaagtgcatcaccaagttgatatgtaaaaggcttattgaagtgcttccttggttggttcatcaaaatcagggagagtttatgaagaatagatctattgctcacaatattttgatattccaagatctgataaagaattatgggagaaagattgtctctccttgatgtgctatcaagatagacttgagtaaagcctatgacactatgaactggggctttgttgaagacttacttgttggattaaactttccagctaagtttgttatgtggattataaagtgtttgagaggcacctcttatactatcatgatgaatggaaggttccaaggtaatttcatgggaaaaaaggggctgcgacaaggggatccgatgtcacctctcttatttgtgctcatcatggagtatcgctctaaaaggtttgttttggtatcctctaaaaaatcttttaagtttcatcctatgtgcaaaagtctaaagttgattagtctttgctttgcagatgatcatatactctttagcaaggggactcctgaggtagtccaccacctcaaagttgctttggagagtttctcggaggttacaggattgattctaaataggtataaatctttagtttattttgggggagtctcttttggtgataaagctgagactttggaagatttacaattttgagaggaatcttttcctctcaagtatcttggagtgcctctttgaccaactaaatggaagagagaagattgtgatactatcctgaagaagattaaattgtggctgaacacttaggcaacgagacatctctcctatgctggccgaatttagcttattcattcggtgttcttagggcttcacaattattggatgagcatttttatacttcctcatactgtgatcaaggaagtggaaaggctttgtaggggtttcctttggggaaccaaggtatggaaaagcaagttccacttggcttcttgggataaggtatgtcttcctaaacattttggtggtcttggctttaaaaatggggctaattggaatagatctattctagggaaatttatttgggctcgcatgaataagatggacattctttgggttaaatcgataaacaatatatatatatatgaagggtgtagatttttgggagtatgagttgaagggggatgttagttggtattggagtaaaaaatttcaactaaggaagagatttagcaagcacaatgtgatagctgctactacaaatgggaagtttagagcatctcgactttataatggtctttcacagcaggatattgattgttactataaggctgtttagtgcaatttatcgctgccaatcatagattcatcctttggcaggtggttcatggtcatctgctcacaagagacaacgctaccaagtttcacattgagttagagactaaagtctgtcctgtctgcaacattgaagaggagagtcatagtcattgtttttcagatgaagatattcaagagttgttgtgcagtgaatttttgactcgtgtggttattcggcgtggcctttggacttcaatggctggttgtgttggttgtctagtaaatatcctggtataatcattattgtaattgttgtcacagtttatatgatttggaagaatagaaaccattgtgtctataatgatagttgttatactatgttgaaatctgtaaaggaaattaaagatatagttcactacaggttgtatagcatgaaggataggaaagttgtgcttgctgaaaaaggcttgtttttgcgccttcttcagtagcaggttgttttctcctggttttggccagctgtagaggggctattctgggttgttttggggctattttttgtagccttggtgtatttggtttgttttgattaatgaaatattctcttttgtcaaaaaaaaaatctcgggatcccatttacaagagtttgctatccatatacaaaagttttgttgccaagcaactatacagcaaaaagcccttatgtcccaaagattgtacgctccaggcctnnnnnccctgacatgtacaatcttcatctgctcgccctcacggtttctcagcttatcccgggttataactaggcgcccatacacccgatcataaccctatcactgtgtcccacacggtactgagtctagaacgttcataagacaatactatcgaccataatgtcagcctaatacccaatatgctagtcatactctaaccatattgatgtgacaacatcgatcaatatttcagccaacatacatttatcagtaatcagtacaactctaagcatactattactactatcaacgtaatctcataggcataaacaacatgtatgctgaacatgtaataacatatgcataacatcatactaatcttacctcaattttgaattcaagtgtgccagccaacctgagtggaaaaactactcagcgaattacaggctcctaaatcacatcgataacaacaaggataagtgatgcgctaaatcacaatcggggacttatgttttaaaccaaaacctttctactataattaaacattgcaataccctaaactaacagggaattaaccaaccaaagctctgaaactagcacgaatcgacaatacaaatttttcagggaacccagcagcaaatactagtaactggttttacaggcattgtaaaaccggttagccagtttataccagaaaacccaaaaacaccaaaacctaaccaaatcgattccaaactttaccaaaccttccagttgcatattataccccaatagacagattccaagcaataaaacaactacccaagctcagaatcaaaaaacaccattaaagagccaagcttgtgttctaaaactcaaagcttgctcaaacaacaaaatagccatcaaaacaagcttaaaaaaaacatatctaaacatatttgaacttcaaaaacatacttcaaacaaaaacaataacaacaacaactaaaatcataatttcatgcaaaatccaatttcttacaatttaggaaactaaggaggttactaagagcttacctatagcttgagaccacaaaaaacttgctgaacttagcctgaattgcaaggaacacaccaacactagttggttctaggtgcgttcgaaagagagagagttgagagagaag

SEQ ID NO: 23052 - DNA, 2281 bp, Cannabis sativa
  modified_base (2180)..(2182): a, c, t, g, unknown or other
attaatcatatttatatatttagattgagaatgagttaagtcttccatggatggctcgactagatcacttggaacatagactttttattgaacaaactaatgaagctcaatcatctttatggatgggaaagacttctttccaaaggtaatctatataaatatatctatcaagaaataagtttacaaaattattaatttcaattttgaaagggccaatatatacacttgtacttcatatatttatcataaattttaaatattatatttaatcaaacaggttgtcgaggtttcacaacgacaagctagttcgtctagccaccttaaattatgagttcaaacaatctatttacaagaccgaacttgaacaattaacaaggtacattacctcattaattattattattttagaaaaaaaaaaaacaacacatataataaacattattgtatacaatatttatttattgctatatgttgtttgaaaaactaatattatgtgtatatatacatataggtggtgtaaatattggggacttaatgaaatgggatttggtagagaaaaaagtacatactgttattttgcagtagcttcagcttgttgttctttgccttatgattctccaattcgattgatggttgcaaagggtgctataataataacaattacagatgatttttttgatatgaaagaatctctaatcactgagttaaaaacttttactaaggcctttcaaaggtattatttttaatttattattcaaaaaatatattaatgatttatagtaataaataaatctaataatttctaactaatttggccaggtgggatggtaaagagttgagtggtgttagtaagaaaatatttgatgccctagataatcttgtaagtgaaatggcaactatgtaccttgaacaacaagaaaatagtaatcatgacataaccaattggctaagaaaaattgtaagttatagtttgataacaaataaattcgttatttatttagatgttttaaatgatgttacatatttatttatttaatatttcttatgttcgataatgtgtatagtggtatgaaacgatttgttcatggcttactgaatcggagtggagtaaaaatgggattgtaccaaccatggatgaatatcttaaagttggaatgacttccatagcaactcacaccttgcttcttccagcttcttgttttgtaataaatccaactttaccggtctactctcaattacgaccaattcaatgtgagagtgttacaaaactcgtcatgactatttgtcgtctgttaaatgacttacaaagttatgaggtaagtaattagtgaaaattacattttctaaatttaattaagatagggtgttaattgagtacatttagcaaatactatcaaaacaaatgttacccatgtaacaatgtacataaaacaaattttgttgttactaaaaaattaatatttcgatacaatttgttgtaattgaacatatttagtcgtaatgagttgcaacttttgtacttaattattacagaaggaaaaagaagaaggcaaaccaaactcaattactgtgtacatgaagaacaattctgaggtagaaatggaagaagcagtaaagtacgtgaaagagatattaaacaagaagaagaaagagttactcgaacatgttatgattgatggctttaccaatctttcaaaagagtgtaggcttctacacctctcttgcttaaaagtatttcaaatgttcttcaactcttcgaatcgatatgattcagacactgaaatgcttgacgacattagcaaagcaatctatgttcctttgaaatcaattgatcatgaaggactcgaaaagaatctcttaaggcctccaaagtcaccgatgattgatcttactcgagtcaaatcaacgaccatgaaatgttcgatgaacatgaataaatttagtcaaccctctaaatgttttgtgatcatgaatgaactttctcttcgtaaacataaaaaagttggcaattggaaaatagcaacacctattaggcctttacaactcaaattatgcctcatttgataaattacaagtaatttgtgtaataagaattggaaatgcttataataaagtttttgttttatgaatatagttggttgcttttccctaataatcaagggatatatatatatatatannntagcaaaaactacgtgcgaggcacgtatattaaattttatgctagtttttttctatgtcatttgaaagtgatacaataaaaaattaaagaaaaaatatt

SEQ ID NO: 23053 - DNA, 4484 bp, Cannabis sativa
  modified_base (3882)..(3914): a, c, t, g, unknown or other
acaatctttggaagacaacttggcagctctaataccaaattgtaacaccctactaacttagtgtgttattgtgattttatattaattgttcagaatgttgctaatcaacgagtttattgaaaattgtgaataattaaaactttgcttaaatacctataaatactagataaatggtatatgtatataaacaggatcccgagtataaaatatttacaacagttacaaagtacgtaatacaaaagttgttgcctagtgactagacaaaatacaatcagttgtcccaaagatcgtatgctccaagtctaatcgccctgactgtacaatcttcatccgctcgtcctcactgttgctcaaccttagccttgtccttacctacacttgcaaacaatatttttgagtccacagactcagtaagaaaagtataatcataacataaatataaactagattataattaggtgcccatacacccaatcataaccctaatcccacgtctcgcgcaatattgagtctaaaacgttcgtacgacagtaccattgaccatatgatcagcatgtacttgatactcttgtcgtactgatgtgatagcatcaatcagtactcaagccaaacatacatttgtcggtaaccaatataattctatagatactgctaccgctatttcaatgtaatctaacaggaaatcataaacatgcatactaagcatgtaatcacatatgtatataattatactaatcttaccttgattccaaattcaggtgtgtcggtcaacctgagtggaactactgctcgacggtttacaggcccctaaatcacaaattttgtaaaactagtaagtgatacgctaaaccacttttcggttgactttaaactcaaaactaaaggtttccctattgatctcaagtaagaaaaatttctaagcattgtgaaaagatgagaaaaacatcgaaacagggaacctgcctaaaaaaatagcaggtcgtttttttgggttctgcaccaagaaaaacgttaagccgtttttcacggcagaaaaataaaactcttcgaatcaaaactacaccaaatcttccaataagctccaaaacacctatttatatcataataaactaaaaccaagcaataaatcacaataaacaacccagaaaccaaaaacaccattaaagagcaaagcttgagttcttaaactcaaaccttgctcaaacaccataataacccacaaacctagctcaaatcaacataaagaacttcaatttaacttcagaatacaaaatcaaacaccccttaacaactcagaacactaattcccaatattatgcacataactaacttgaagcttaagaaataacaactagagaggctaaagatttttatcttggattcaatcactaaagacctgctagaggatcctgaattgagttgaaaaacttcaataatttgcttgtttttcttgagggttcgagagagagggtcaaagggagagagaaagttattttcttgattttttttctattttgattaaagaggaataatacctagtattatctagcataatccctaactcaaaaaaaattagaattaactaattccatcatatttcacaaaaggacaaaaatagcgaaatggcaaaagaccattttcccctgcatacaccaaaaagcataaagtcacctaggggtatttcggtcaaacctaataccgtgaataatctcaacattctcgatgtctatctagcttacctcgctattaataaaatactaaatcataagaaaatatgattctattggccaaacgtcgcgttccacagttactggacataaaaatatgaaaaatcataaaattcatatttaatataaataacacacctagaattcaaatatgtcttcaaaaattcataaatcataactaaaagtttaattccaaataaaacccacattatctgctaattctcatactaaaatttagcggtctttacacgagagatgagtgaggtaatgatcaatattctggtttttttttacattttaagttttttttttttacttttttcaaaaaatagaaaataataattaaaaatataataatatatattaacagtttacgggtggctctgagtctaacctgactcgtggatgttttaaagcactaacccataccctgcccgtttattagtaataggatcagcctgaggtgcaactcgttttatacaagttttcttcaatagactaaatttacaagtcatgttcagacgaattgatcacggatcaggtcagcctcggccaaagttttcaaccctatcatcaagcacctataaggtttcttgaacaagatgaaataagtgaacaaaaaatcatgagatcgagtgcccccaaattctcatcgagcaagatcaattgatcagaagcataaaattaaagatgaaactattcccccatggagctagctaacattgaggtgaattgagaatattaaaaaagtacccattttaggccttaaaaaccaattttcataccatcaaaataataaatctaatggaaatcataaattcggtgaagtaattgcaactaaattaataaaacaaattcaaccttcttgaatgcaatagtactcgaagaaaagtgtacaatgagaaactaccaaaatacaaggtcaaaagaattaagacattattaatttttgcatttagcctcaatatttggtactacattcaaaaattcaacacacatacacagatttatttattttaaataaaatctaacacaaacatacttatataaatatatcaaaggaagaagaacaataatagaaaaaaaatcaagcaaaataaagtaaactatagaaatgccaacttttgaaggtttatggggtaacagtcgttgggtggacctaaatatgcgcgccaagcgaaaacagcattggcagcctcagtaggatggaatgcatcccaaaataggtagtcattatgattagcgcatggcattgccaatggtagacaagttatttgtccttgatttctccctattccacaacaaccagtgtctattactttgaaaccatataaggaaggattgttaagaatgtcaccaaaaacagcataagtgttagcatacaggaaggtggcaccctggtatctggtatttagctggtctacaagtgactttagaccttcattgaagctaccaagcatttgattaactgagtctacgcaccttccgggcggtgctcgaccagtagctctttgattggggatgcaccccaatggtcctatgcctgccagcagaaacttacgtagccccacgctatggagcgccaccatctgtcgggcataatgattgagcaagaggttggcatagtcgtgaggagtgtaggagctatagaggctgccaggtagtaagtaattgttgatgtagtcattgcttccagccacaataatggctatagacttggccaaatactgtgttaggttcgttgcacccatcattaatcttaactcgcttaaattaatctcaaaattcaccacctgctggcttagaccgtatcgttgtccctgcaacacacaccctataaaatattagctcatcacatcattttgttgacgtataatattcatcagccgaatgaacaaactctacttataaataatatagtactgtatcatcatcattattattggagtgagtatgttggtgcatgctcatgtttttgttaaattatatgtacaaaattaaagaataatgatcatgtattatatagatactacaagtattatttattaattgaaggatctaaattcatcatgcaaggttgcatatttaataaaaatcataattatatacacaattaatattacatgtctctacgtaataataataataataatannnnnnnnnnnnnnnnnnnnnnnnnnnnnnnnnataataataataataatatgctttggaaacacatgaaaactatttctaaatgaatacaaattccttgaatagttggagagacttcaatgttgtgttgaatacctcttaaagattgaattatggagggaatgccaatgatatggttacttttcaaaattgggttgctgcttgtggtttagaagacatcaaatgcaagggctctttctttacttggaataataagcaagaaggggtgatagagtgtatgctaaattggataggagtttagcaaactgagaatgaattgacaaatacaatacaactgaggtgacttttcttccaaaaggttttgaacactcttctgctatcctttcaatttatcctagcctccagattatgaaataatccctcaagtattgtaatttttggaaagatttgagagatttttttaatattgtgaaaggctattgggaaggaaaaagtttcagagcagcgaatgtatcaacttgttactcatttgaaatgtcttaaatcgagtctggaagaatggattaggcatgataaatgggatgtcattattcaggattaaga

SEQ ID NO: 23054 - DNA, 2232 bp, Cannabis sativa
  modified_base (2013)..(2027): a, c, t, g, unknown or other
gatttgatccaagatccaataagtatctgaatgttttggatcagagatgattcgtcgggtcagagccccaacccgctccaactaaatggatctttttgacatgcctaaactccagttctgagcttgctctgtcacctctaccaaataaattttagcaacaggcttaccaaattttatcatcagttcctcatagtgaagctttgctgctgcactaattttttgaccttctttgagcttcgcttaatgtctttgtgctgaggtttggaaatcttccttctcaacttccttagccaagttagtgttcagcatagcttctatagaactcttcaatccaccattcactaatttttcaatcgatctcaaatttgatttttcaatcagttcctcatcctcaatcatctgtgaacacgattgtatctctagtatcgcaattccatctaattcatcaatggcagattcatcaacaatcttaaattcttggtttgaagggggatcttcaactctagatcgaaatgtaggatttcgagtaactttcttcttcttcatcgagagagaagctagttcgtatgcacgccaagggggctcctcccctttgtcaattctattaattcacgaaattgtcaatactctgttgctaaaattgagactttattgtcgtctcaagaacatcaaatggagagtcataataaagatttggactctattagtcttgctatctatcgtggtttcaggccaaaaccatctagcttttcttccttttctaacagtgaaaataccagatctctcattgacaatgattcaccaactaatttaggtcatggaactttttaatccatattttatttcactaagatcgaacacatctagtctaactccaaatcactacaatgttggttgtggctcatccacaccagctacttctattcctcattcttccatgatccctggatcgagattagtttgccaattctgctctaaacctagtcacattgcttcaagatgctatcaaaagttcaactttgatttccctggtgttggtgcaactaatgtcactaaacatacaactcaacttgccactacaaatagtgttgttgatgatgcttagtaccctgactcaggtgctaccacttattgcactacaagcaattcaaacttcactcacaaataaccttatgttggtttaggtcagatgcatataggtgatggtgttggccttctaattcaaaaatggtaacattctctttcattcatatctctcttctaaaccacttgttttaaagtgaattttacatgttccaaatatcgccaaaaatctcatctttgtctctaaatttgcatcaaataataatgcggtctttgagttttatcttcatttttgtaatgtgaaagaccagaattcgaaggaaatactaatgataagacaaattaagctaggactttatgtcaaagagccttcccaattacacatcaccaagtctaatctgttctttaatcccattgtcgtatgtactgttacttccccaactgtgaatgtcacctctgtgtttttatgtaataatttttgtttgtggcataagaaacttgcctatcctaaaggaaataaaacagttattgattttcgtaatgcttgttctaaaagaaaaatttataaatttccctttccttgtttagatactgttttcactaaacctttgcaacttatccatactaacatttagggtccctctgtcatgatttcatcaccaggctactaatataatattcattttatagatgcatattctaactacacttggatttttcttttaaaaactaaatgatgccttccaaacattcatcaattatagaacccaagttgaaaaaagagctcaatcccccattatttctgtgcaatttgattgggggagagtaggaagtcttagaaccttatttgatcaagcatagtattaaccataagttgtcttgtcccactactcaccagcaaaatggtgttgctgaaagaaaacatagacnnnnnnnnnnnnnnnctcttacctttcttgctcaggcttccatgcccttatcttacttggatgagggtgttagaacatcttgctatgtacagaaatagactccttacaccagttattaaaaatgacactcccttacacaaattttttctcaaatatcctgactatgctactttaaaagtctttggatgtgcctgtgtccctaacatcagaccctataaca

SEQ ID NO: 23055 - DNA, 6564 bp, Cannabis sativa
cattaacctcgtcgcgtggaggaggtataataaccatataaatacttagtgtatatgacacggtatacaaactaagtataaacagaggggtggatcaaggtgacagatggcgaggcgtctatctcgccgtaagatggcatgcgcgcgagacagatcatctcgacactagaaattttagttgtctgaatgaaagtaaaagcaatatcaacctcaggaagatatgatgagctccaactcgccatcaaagttaactcggctccattctcagcgaggcatccccatgagataatgcttaccgtatatctttaatatgcattcattttgacccaataaaagtggaatattcacagctgtgtgaattctaaataaaaaccgcttttacctagcgtgatttgtaatcaaatctcatgattctaggggataatcattgtaaaaagattacagtcaactttgtaatgaactgcccactatgtaattgtaaataatgccaagcaagataaaaagagggacgtaaaaactcatacaagagaggccctaaaaaataatcagaaatctataaataagattgactcgtggactatgaagaattttaactgcaaaaccacttaaaatccttgtgtgttcatactttttattttatctgtgtgagattatcacggttaggctcaaatttagttaacgaaaatctgcgctaacacaatggtatagggtttgttggtaggcctccaatatcatccaaatgccctaaagtctcctcagcccagtccatgatttcagaaatattctgatcatcaggtggatctccatcatcatcaacttctccatctccttcatctccatctccatcatcatcatctccatctccatctccatcatcatggtcatcatcttcatcatcttcttctcgatcatcatcagcagcatcatcatcttcctcagattctgatgatgagaaggatgaaataatcatggtctcaggcatagtattacttggttaggagctgcactcatgagaatctacctcttcatcaatccactgtgttgctaaatcaacccactgcacaaacttgttgaagaattcatcattacgatcataatggccttttggattgacaacaacatctggtactaaataattgtcagatgggaactcttccagaatgcatttgtccaatttaccaggttggggttggtggacatgccttattgcctcctcatccagtctccattcaactgtaaaaacttgatctgacaatataaaatatatgttgtcctccctgtaatttctacccctcaaatcatccaacatcatattaatttcccttttctcaataacccaaaatcccatattcaagttctttccttttggcttaaacagaaaaccaaaagggaatatgtatcccaattcttgagccatttcttcaagatggaggctgctgaatccaaagaaaccacaaaaataaaagtagataattcgaccattttcatactttctattgccacctcgtgtaaaccaataaccaccatggaaaaatttcacagtgaaattatccaaattcaaacctgcaaagttaatatagaactaagcacacatttaaacttacaggtgacataggcaaaactaattaaactttcccaacattttgacttaacccccaatagcaattaacccccaattctaattaaaccccaatagcaattaatcccccaataccgacaaacagataaggaataatataaaatagaaaaaaaaaaaaacatgtggaaatgtttccattgaagaaaacaacaaccaaagatttccaacatcctttgactaatatgtttttaccaataatatcaaactttctactttaatatcatatccaaccactgtataaaaatatggaccacaagcctcacaaaccattaaagctactaccaacagaaaatttagtataaaacccccaataactcattctacttagatttacccaagcaacaccaacattttttgaaaactcaaaaaaaaaaaaaaaaaaaccctaaaatattgatttgggacttactgtagtcggtctttttcacctcgatgacgatgcgccatttcaaaaaccttctccttccacgaattttttgggttttctttgtattcacatgaggatgatgaatctattcttaggctggctgggtttcgcgtttccccctttgtgctttctctatcactttaacggttttgtttttctcggcttacttcaatttctcacgaaaaatggtaaaaatttgtatactttttctgggtttccttcgatttctcaagcacttctctatctctttttatgtttagatttacaattatagtttggttttcattttgtatcgttctaataccgtttgtatttaaatttaatgtgtgatttagagaatttaatgcgtcttttaattttaatgtgtgctttttttcttttatttttcccttttaattagccattacttacaaaaaaaaaaaaaaaaaaaaactcatgacctttattttattttccacgtcattaactaattaatgacatagcaagcatgagtctacctggcattggatggattgagccacgtaagaaaataacggggtcagggggacggaggtgtatttttgctaacagtgcaacggttttgggggttataccacataaatttaggttttggggctaagtgaaagcaaaataaaaattttgaggttttaccgcaatttaccctaatataaatatagttatatgagttgtgacacttaaattcattttacacattaggagagagactaattttaagagagtatcttaattgtatttctaattaagtaatgtattaagcatgcttaaaccaaacttcgcatgtagtatgtacacattcttctttcaagtttactcaaggccaccgacactagccatatctatcctctctggtctctataaataatctaatttatttgtttgtgcatgaataattttccatttttttgtataatataaaaaattaaatatatttatatatataattaagattcccctttacaatttttaataagctatctgaccaggccttgtccgtacagtctcttctaaacccgactgactcactcactcactgtctcactcattcactcattgattcagtacttctgaacccgatcttcatattttccttctttcttattcaacaatggcagacgacccagtagtaatagtacttgatcccattctcccatgatctctctctcaccaccaccttcttctactatactatatccataattataatgcttgatcttaatctcaacgtcctactctctcccgattcggctgcttccgattccgtcgacaataagcttcttgagagctccggaagcttcaactcctcttccaacctcactaccgccgatgacgactcttcttccaacctcaacgcaactgcttctttgtttggttacagcttcgatatccttaacaaccacaggaacgacgaagtttacgtctctactacgaatgatcacgatgttcatcgcagctgtttcgctcagactatcgagctttttccggtggctaatagtatcaacaacaataataggtcgtccgtaccgaggaggcagtggttaggtttgtcttgctcagaagggacttacggtggtccagcggagcagggaagcgcgccccaacaacagaataagcaggtgaagaagagtcgtaggggaccaaggtctcgaagctcccagtatcgtggggtcacgttttatcgaagaacgggaagatgggaatctcatatttggtttgtgattatagcttcatatgcattgaaacaattctcttttatttttgtgttactttctctgagtcattttgaaatttttgcagggattgtgggaaacaggtttacttgggtaagaacaaacaaaaatgatcagagaattatatttttcttctttctgacagccagatttatatatatatatatatatgtatatatatatatttctgcatgtaattttaaatctaatgctctattctctgtgatatgtttagggggttttgacacagctcatgctgcagccaggtacagataagtcttacctatgataatggtgtatgtggtaacagtagagcctttcatggagtttgaatgatggagattttggggtacgggtttttgattttcagggcttatgatcgagcggctgtcaagtttcgtggattggaagctgatataaacttcaacatcagtgactatgatgaagatatcaagcatgtgggtactcttgctctattcattttatgttattgggtttggaggttttgtttgattttgagtagccttcttctacagatgagtaactttagcaaggaggaatttgttcatatacttcgtagacagagcactggattctctagaggaagctccaaatacaggggagtgacactacacaagtgtggacgatgggaagcacgaatgggtcagtttatgggcaaaaagtaagaaaaaaaaaaagataaaacaaaatccttttaatcatttttcgctaataacaagtagtagtaggtttgaggaaattattttaaaaatgtgtatagctgggaattctgtttttattgggtaaagtatatcaattccttggatgcaggtatatttatctgggcctatttgatagcgagattgaagctgcaaggtctttaggctttttcaatattcagttgaactctttatatgtccttaattttcatggtttcatttgatctcaacaaaccattgttttcgtttccaaaatcagggcatatgacaaggctgccattaaatgcaatggaagggaagcggtcactaactttgatccaaactcttatgatggagaaatcatgatgtctgaggttgaccatgatggtgtgtatagtttcttgtttaaaaacctcattttcttttgtaattaatattcctgccagtgtattataaaataatgcttggctctttcaggatttacaggcagcaaccaaaatcttgacctgaacttgggtattgctccactttctgcttctaatgctgaagccgatgatgcttactttcagcaaggatacagtgactttccagttcttaagagagacaaggtaatctaactaaaactttggtattaaattgctataattattggtggagtacaaacttgattattcatctaaaatgtacaatcaaatcaccataaaaagttaggatcgtagtgtacaatcacaatgaatgaccaggatcgtggtatctaatatttgatgaataaggacgattgtacagatatggtaaaaaatggtcaaaggttataaaaatctcgaaaaatgtataatacaagacactatttccgaacacctctatttgtttttatatctgtaagaagtttatagcttaattttattttattatttttttttatggttatatactttataattgtttatgattatttgtaaatttaatttaaaaataattctaaataactataacaaatgattatgaaaaaaaaaaaaaaaaactaaaatgaactcctgaatgctgaaccaattagaaaatgtagattcttttaggaattgtactaaagaattacctagaattaccctaaaaatcagaacctgcataaatctatacatgttgcttagtaaaatttcattttggttttctttacagagtgagaactttgccactgttggggctacactgccatatcatggctcccaaagatatgaggatcaccactcttcgagtagcataaattccaatttctttgccaacaacagggtaattaacttacaatagagacatgctgtacagtgaatatgtttacatatctgagctcaggttttcattacatttcttataggaaagagaaatagagaagggggtagatgtgaattcctttgtacacaactgggcagcttggccaatccaaggcctaaatggcagagcagctgtattaccccctccagtgccgctcttctctactgcagcatcatcaggattcccttcttcaacaaccagtgtttcaccaccatcgctggctgccactactactcagccccactttccgaataattcctctaatatcctccatcaccattttattccaccttcatcaataaccaccaccaatggcttaccacatttctattacagaacctgaaacaagtttgagatagtataacattgacacattgtagagatggtgaccagataggctgcttagctaacagggtaaaacagcaaaagattcttcaattttattgattacttcaatctatttgtatggtttgttttagtttgtgaagcagtacttcactcatatctttatccaagtttttagttcaaaatagagatttcatgatgtctcatagttataaactttggataaccatgcggatcctaacaatatactcttttcatagttgacaagacatatcattcttgaattttccttataattgtattgagtaattctatttgacaatttaaggtgttaccatcatattactcttggttttcatttctttttggggaatatagttattt

SEQ ID NO: 23056 - DNA, 1945 bp, Cannabis sativa
gccagccatctgccttgtactcaagcagggagctgtcaaaattggtcaagtcaatcttcccaaactggccaaatcgaattgcccatcgagccacatagtgggctgcactgttgaacttcctcgggatccaactagcctcccaaagctcaagtcgaccaactagatcatggaatgtttgtactaggacctgaatgttatgttttagattcgccacccttgtattattttattttttatttttggaagaacacataggagtttattgaaacagaaaattgggtatcacaccagggaccctccctaatacacaggccacccttgtgtttaccgtcaagaaaacccaaaggtttataataagagtagaccaacaaattacaaagggccgccaagaagaagatttgttattgaggatccaaagggtcacataataaaataaagtaatacagtagataaggttatatttttaaaacactttgtgattggggtgattgtgcaatgcaatgcaaatagtttatttatttatgagttttatttaacaggcaacaatgctttattggttcaaaaaatttatagagagaaatcaaaatgaaatattatagatttatttatttatatttttgaagtggggtccttttacttggcaaactattattcttagtgctagtgaaatttaacaattttcaatcttatttgtcacgtataactatagcttaggaaatataatagacaaatattaaataactaaattagaataatataatattatctaaatagataagcaataaacaagtttaaaagctatgattacagtttgttgagatttcaaatcatggacttcataaatcaatattattgtaatatatttattcaaaaaaaaaatattattgtaatatgaatcactacatgaggactcaattcgaaactataaggaggttggtaattttgtatctagcatgattaataaataaggtattctatattttgttagtggcgtacgatttattattgattgtttttatgatttatgtaattattaggggtatttattggactaaatctaatgtttttaggtctatttagattcaattcaataatatattagatgatagattttacccgatccgatccaattaattttagtcatccaatcgatccaacatctattgaattttagattggatcgattctatccatgagatatatttagtatatatttattaatttaatttgggtttatttaatatttcagacttatttttttttgtttttttatcagatcgaatatactgatatttataggtctaatatgtattggattggactagatctatcccatccaagaaaaaaaataataaaattttaatgttaatttttataaatacatatagaatttacgtataataatataaaatttaattacttatccaaactaaatgaaaaattattaattaatttaaattgaatgttgaatgtattggatcagattcaattggattgaatcgatttatgcacacccatagtaattatgttttttcttttcttttaaaaatgtcttgcttaaaaaagtgtgatataatcgtgagagataaaataaacaaattagtattacggtaaaagtaaaatctttttaaaaatataaaataggttaaagcgtgataagagaaaaataaaataaataaataataaaagagttgcaggcaaattagaatttcatttaattataaagtcaaaagtaaaagaatacaactactcataaaaaaaaaataataataatcttaaataactatttaacaatatgttaccggggaagatttaaatttaggtttgataattactagttcagtttgtactgattcaagtagttacaccaaaatcaaatcttcctaaatttcagttttaatggtattagttagctaattgtttagttaaatatttggtaatccaa

SEQ ID NO: 23057 - DNA, 5606 bp, Cannabis sativa
ccgttttgccacccctactatatcgtatgagtaacatttggaacatgatgtatgtcattttgggcaaccggaaagatattatgttgaagaatatccagatgggaacaagctcccaagatggatcgttcggatggggacaaaatgatactctttctggaagtacatttcagatttaaacggagtatcccacttatagtttcgtccggatcaagtcagagtagttaagtttgagccttcgacatttactatccgggcaagccctaagccttgcactacctattccaatcaggcatgtcggacaagtgtcactttccaaatagaagcatacaccaagtaaagatcttcaatatcctcaaatatctctacgattgtagcttatttatgggactttatgtttgaattcccttttctacgattctccccctttattttaaaataaaatgtattcaatattctgtaatttaatggaaaaatactagaacatattctttataaatagtgagctatattcactaaaaaggggagggcttcttgtgcctcatgcactaaaaataaagaaagaaatacttaaaaatatttgaaagcttttgagagagaacaagacactcacttacttcttttctcacaagtaatacaactaaaagaagagtagactattactgctgaaagtggctgaacctacaaatcttgtgtgttgttttctttacaacctttataaatgctttattcccgttatcattttctatttgttccttatgtaatgcatcagaaccaacaggagaaagacatcatttttctcattgaaaaatcataaataatttttacgattatattataatatgtattctgagcagtagtaccttttgagtgttgtatttttgacgattctctatagtgcagtggaggtccgatacaatatttcaattggattgttttatactaggtatgatggggttaatagtctgcttgcacaattttgagcagtatcgcgaacgtcttaaagtgagaacctagtccgtgactcaacctaaattttcattcattaatttcattcctttttctttttctgcaacaactattccaacaatttttaaatgttttgtttctgtcatgactactgatgagaattagtgttgttgatattaataaactttttttcgttttgagggaaatcattttaaacgagagatagaaaatgttattttttcttactatgaaaaagattacttatgttatgactactgataaacctgttatttctaaaactgctaagggtgatgaaaagcagaagcaaactactgatttagcaagttgggttattctgaatggtttatttgatgatttgtatgactcctacaattttgacaaaactggcaaggaaatttaagacacacttcaaaagaaatacgacattgaggaggttggaacgaagaagtacactatcagccgctacccacttttgtggaagaaggaggagtcacacaaatgctcatatgagaaaaattgtttattaacttattattttttatttaattaattaaaattaatttataaacgtgtttaattgatgagtaaaactgagacgttttctccttagctttttacagcaacgttcacaccatccagctttctctcaccacgattagattaaatgacttttttcccattattattttatgtgggttccctatataatgcattagaaatagtaggagaaagacattcattttctcacaaaaaaatcataaatattttttacgattatattataatatgtattctgagcagtagtatttttcgggtttgatattttcgacggttctctacagtgcggtggaagtccaatatagtgtttcgactaggttttttttatcgtggggacgatgaggctgatagtctgcttgcacaattctggcagtactgcgaacgtcttaaagagagcgacctagcctgcgactcaacttggattttcattaagtaatttcgttcctttttatttttctactgaaactattccaacaatttttagacgttttgtttttctcatgactaccgatgagaattctggtgttgttaatattaataaatctttttattttaagggaattcactttaaatgatggaggcagaaaatgttattttttctattatgaaaagcttgcttatgttctaacaactgataaacctgattcttttgaaactactaagggtgatgaaaagtagaagcaaactgctgatttagtaagctaggttgaaaatgattttttgtgcaaaaaatttattttgaatggtctatctgatgatttgtatgattactacaattctgacaaaactgccaagaaaaaatggcatgcaatttaaataaaatacgacactaaggaggctggaagaagaagtacgttgtcagccgctacctaaaattccagatgactgacgataagtcagttgaggctcaatttcatgaactaaggaaaattgctcacgaaataatttttgaggtatgtctttagatgaataattccaaattgctgttattattgacaaactgcctcctcattggaaagattttaaaaatactctctagcacaaaacaaaaaaaaaatctttaaaaaagtctgttcactcaccttcgtattacggaggaggctcacaaaaaagactagaaagaagaagtgcttgttattttaaacaacaatgctaagaatgtccagtgcgattacgaaaaccattgagaaaattttttaagattcagaatcgtcaccatgatccaaaccgcaacagtaattctcagaataataaccaaaattggattccaaggaaaaaaacaaacaacaacaaccttctaataataagaatgatccgacaccttttttgtgattgcttgtaataaattgggtcatatggcacgcaagtgtcgaaataggtctagttatgctccactggctaacatgagtgaagaattaccttatctagttacgattttcgagatcaacctaattggcagatcataagggtagtgggtagacattggcgcttctcgccgtttttgatatgatcgtgctatgtttaagacatacactgctgcgactgaggataagaaagtgttgttaggtgactctcacattacaattgttgcagatactggtgatgtggaattaaagtttacctgtaaaaaaatcatgattctcaaagaattcatgcatactccagagatgcgaaagaatctagtctcgagtaatctcctcaataaggcggggttcacacagactataggggcagatttgtttactttaattaagaatgagatttttgtgggggaaagggtatgctactgaaagaatgtttaaattgaatattgaagttaataaagtgaatatttatgtttacttgttgtgatcatttaatacttgtcatgctagactttgtcccgttaacaaaaacataattaagaatatgagtaatttagacttaattcctaaattatcactaaataactttgaaaaatgtgactattgtagctaggctaagataaaaaaaaccaccacataaatcggtagctagagaagtgagcctctaaacttaattcattctgatatttgtgaattagatgatgtagtaacaaggaatggaaaacattactttatcactttcattaatgactgtgcagactatacttttgtatacttaatgaaaaataaaagtgatgctcctgatatgtttaagttgattataattgaaataaaaaatcaattaaataagaagattaagaggttttgtagcgatagaagaaatgaatatgattttggtttatttgttgatttttttaactctcatagaagtatacacgaaaccactgcaccatattcacttgaaatgaatggaaaagctaaatgaaagaatagaaattttattgaatctattgttgctattttacttaattctggtgctacttcttattggtgatgataaattttcttaactgattgttatgtgcttaatagggtacctaaatcaaaaagaaaaatttctccttatgagatattaaaaaatagacaaccaaacatatgatattttagagcttgagattgtttagcttatgttcatattcctgatcctaagagaattaagctagcaagtagagcctatgaatatgtatgtttaaggtatgctattaatagcaaagcatgtgggttttatgatctgaatgcacatgttattgtggaatcaaacgatgctaattttttcgaagatagatttccatttaaattgaaaaatagtgggaagcatcatttagcaatgtacatagtgggtccgactcatttttatgaaagttcatcactttttttaatgtgagtttgacccgacccattttataaaacaagttaggccaggcctggcccatattttcaaagtaagtccatctcggcccatatgcacaaattattcgtgttgggacagacccatgccaagcctaaacgggccatcccattttttatgaaatggctgacccatatttatcaaatgagcctaaacgggcctatagaaaattaccattttttgtactttttaaattaatttctatattttaaagcacaaatgaattgtttcagttaaaattagcttcgaaatcacaaaaaaaaaaaaaaaaactacaattacatgaaaaataatcaaattaatatcactataattgtggtctattactaaattttcacataaaattgtacataatctctttcagcataatctctttcagcaaaaagaaatgttcaacataatctcaataagaaaaattatgttatgaattactaaataaaaatacatttaaataaagtatttttatataaaagagtaaatgaattacaaaataaaatattattttatggatttgaatttgtattttatgtcgtgcttttgtgctaagaaatttatgttttcgtacttttcgtgtcgcgttgtgtttaagcccatattatttgtgtcatacctaggcctatatttattcgtgtcttctttcatgttgtgtcgtactcgtatcgcccgtgctcgtgccgatttctatcgtgtcaaaaagtccaacccaaatgtacaactttaatttctatcaaaaataaaaataaattgtttttatgttttttttatctaaatacacagcttgtaattatttttttaaattaaagtttgagattatttttaatgttttttaattgatatctcaattatttatatttactttaaataaatcaatgattattctttcaatacacagaaacataaatagttgcttgctaacacatcaattttatttttttaattgtcttatcatgattaatgatgagagtaacattttgataatatataagatacatctaatatagtacacttagtaacctttttatttatttatttttggcaaaatttcctaaaatttatttctctttacaaatttgacacgtcaattaaatattacaattaaatatcaactaaatgaccactgtatatacctgtatgggtgagtattcaattgttacatttttattgtaaccatggttacatttttttttacctgtaataacaggttacaataaataaaaattctattttta

SEQ ID NO: 23058 - DNA, 2607 bp, Cannabis sativa
ggtttaaattatgtatgagcctagtatttcttgccttgtgattaacaaatgaaaatatatccagatatgtgggcagttggtgcaatcctagctgagctattcaccttttctcccattttccctggtgaaaggtgatattatgatcccaagtttgtaaagaactattcatgttcacttgtaattttcccaattttcacaatgtctaccatgtttgctgattgtattcaattgctgtctagcattttatgatagctcttcacacacagtctaatttcaaattattagttagtgtcatctcatagaacaaatttctacatggcagtgaaatagatcagttgttcaagatatgttgtgttcttggtacaccagacattgcttcttttcctgaagggacaaatatatctcgcttatttggaattgttaactatgagaaggtacactatcgtagtattatttgtgtttggttttctttatatgctcctaaccttaattcaattgttatatgttttgcttggttagattgcacctgcaaacctttctcatatgattccaaatgcaagcccggaagccattgatttaatattggtgggttgtcattatgcaatgccttttgttactatgtatatcaacgtttttatatgtacccattgtaactttgttatatttcttgttttcctttggatgatggtctgcagcaactatgctcatgggacccatcaaggaggccatctgcaaatgagtcattacagcatccgtttttcaaagtatatgtgtttccaactcttgctactccttattaattaataaaatcaacataatttacatttgtttgcttgataggtgacttgggttcctcgtttactacgtgacccacttgagttaaagctgagtaacatgggtaagttcttttgacacttgattctaagccgacatatatgtaattcgccttattcatctggatgtattgtatctttctcctccctttgatccacaggggcacaaccaaatcttgagctgaaattatcggactttggttctgaaccagaggactgctttcttggcttgacgttggctgtgaaacccagtgttccaagcttaggtaaatagaatttttctttggtgttttgttggtttaatgatatggtaaatacttattttatcaaacaaggtgatttgaacataattctttattttcttcttttcttttttctctcagatttggttcatgatgtatcacatggtgacaaggttagctggaggctttatgcattgttgttgtgacattgacattcatgtacgcatagttttataatatattgttatacactcgtaactcgttaactctgatatgcagaatgcactattttgttctgatttggaagatcgtagggaacagtcaggtaatcattgggtttctttctctgtacctttcttaagaatacctctgcattcataagctccaactaacctctgcaattggaatgaaaattatttgtcttagattcatagatatactaatcttagaggtgataaaatagttcattaaattttcactaaaagaaagattactattatcgcgattgatttgtttctcttaactttgtgttccagttttttggtcactgatttcaccggagagaaatgggattcgagccccagtagaaacatccttttctctatctttcaggtaggtagtttatctaatgattcaacattagtttttctttctactaatccatgtgatcgaaacagaagtgctttacaatctttctccttctccattttaacagttcaattcaacaccccgcaatcatgggcgcgcagtccggtgggttctccattccagctttgcagcctaacatcttggacggtccctttctgggcatgtccactggcttccctcgaaggtctttgcctttgagtgattgattgacttaatcttctaatgtctgtcagataaccggggctgtttttgtttttggttcttttttttttctcttctgtacagccttaggcttttagctcaattatctcatgtataagggaattttaagttctaattgtgttgggggaaaaagcatataccacaaatctttctaagtaattgaaattcacttgatccttgaatttcaaggtactattatgtctttacaagctctgttttttctctggtgctctcactccccaccttggggatggtgaagtgtaatataggtttatttttatgattttgtatgtacatttgaagtggaataaggtcaccaatctcatatggcaaagtgcaagttatatttttttggtccattatatcttatatatgataagtaaaatataagaatgtatacttattcagaaaaaaaataaggattaacaaggttataaaaaaatatttagaaaaatttacataatatacgaaaaattacaaatatgtcaacacatgatttttcttatttttatgctttaaatatttttatttataaaattagatttttagtaaaaataataaattatttttaatgttattttatagttgtaacaagttataattttagttttttttttttttgttattttatagttgttgtgaggttgatttttttttttttt

SEQ ID NO: 23059 - DNA, 2437 bp, Cannabis sativa
ttgcacatattttgtaattaattaaaataatgtatacaaaattgtaaaatgcccaatttaaaattcctataattgtataaggtaaagaatttttttatatttttattttttacgattttttataaaaaataacacgaaaaaaaaaactacataaatataacagaaaaatagcattcaaataatatcaaaaataatatacagataacaaaaaattaataataaattaacaagtatacaatagaaaaataccatgttttctataaataaaatcgtaaaaatattaagaaatcatattttttataattttttttttgttatttttatgtatttgtgaaataatctctttaaaatttgttagattcatcataataattgtataaagtaattgtgatatcttcaacttgagagatatgatattatatataagtttttttctcattaattttataatttggattgttttttcaacatttgaaattaaaatcatactttaatttaatattattatttagtagtgtgttaattaaatttatatatttattttataggtgtctcttcacttcacttggttatttaaagatccaaggattttcataaaataagttttaattataatttattttcttaaaattattttatcatgtgaaatttttatgtttttcttaaaagtttgttactaattcttttttagtgatgtaatttgtagatattcttttagtatgataaagaaagcaagatgagtgttttttcaatttttttaaagttttattatccatttcttttcatgcctttaagatagacaaaatatttattgtttggaaaagatacatatgccttcatgatttggtgctatattattttttcaaaccactacaatagaattgacaaaaaaaaaaaattacatccgtattccttttagtttataacatgttcatcataggagtgattcgttcatacaaaattttcctaaagaaagaaattgctattgcttatgctgtttttctttttcgtaaaaaaatgtttcaaaatatcttattttattttcttttcgataattaagaaatttattgaacaaatgatcacaatattgtacattaagaagaaagaagaaattcccttcaattaaataagttttatatacacctaaaaagacatgcacaagtactaaattatgtgcaatttgttctttataatttgggatggttttagaagattggacatcaaatttaaataatctacaaatgatcttaagttatttaagtatagtatcctcaaaatagctcaacctttacggtctgctaacccaaaatccttacaaaaataaaaaacaaaccaaaataatcaaagaacaaatttatacaagtttagcttattatttgattgatggagcaattattttacaacatgcttaatttaaactttataagaccattaccgattatactgttcagggaggttaggaatgttttttataacaaataaaaataaaagacaaaaaaaaaatataaggtacaattttcactacttagaaaggttggcccaagaatttagtcagcctttcgcaagcccatgaatacaggccgaaagaccaacccaaaaataatataccaacatgaattaattagagtaaattagattctataccctttttataatatccttttttttatttttaccctcttttttaaaagtctatcatttttacttttttttttaaatactttaccaattttcctcctgtcacttcaatatactctccatgtgattcttgaggatattttgggtacagtacatataaaaagaagtatgtttcaattaaatttaaattagaggtagatttagttaattgataaacaaaagaagtatcttctaatttattccaattaattagggggttttacaaaaatatctatttttttgtcattttaatattttaacgtctcactcttttttttttttttaatatttataccaaaattttaaaaatactgtgttaaagtttcaaaattataaacttactgtattttagtaaaataaaagataacttaaaaacaactctaaaacaatttaacaaacaacataataataactataaaaccacaaaaagataactgcaaagtaacaaaaaataataaaataataacttaattgcaatatgcaaaagaatgtcaactcaatatatttctatattacgattttttttttatctttttctactactacattactttttcatagaattttttattataacttcatacttttcattttttctattattctttttgagttagtggaaattaaaaataataatttattttttaaaagttaaattaataattcctttaattataaaaataataaaataggttatataatataatgtctaatatataattaaaatatggatatctactactacttgtaaattaaaaat

SEQ ID NO: 23060 - DNA, 3817 bp, Cannabis sativa
tagaatagatatatgctacaatttttcccatatgatgataatctttaactattattatacatagtacaaaattaaaacaacttttcctagagcaaagagtatcgggaaaaagtttagtgaaaaattcatgtttagggttttgatcgaataactcgattaaaaaaacataagaaagaaggtttttcctaaaaaaatacgaattttgaaagttttcgcattatattcacatgtaatatgagaaagactaaagggtatcagtggtacctagcacccttttacgtgtcaatatattactattggttcaactaagtatcgagtcccatatagtttaatgtaataacgtttaggtgagtatcgctagccaatcgcaaggtaacacgtctaaaattaaagtacttagcattactgatacctaatagtaatgatctatgtaatactttcatgtacatatatatgacatattagtttgcttaataacacgtgctccctatatcatgtatttcacttatatttagttatatatttttttagtttatatcttggttatgtgtacatgatggttatatatatagctatattttttttaaaatataggagcgttttgatcaatttagagaaattatattttaatttttttatatgatagtgtacatgatggttatatagctctatggtatgttttcaataaattttaaacaactaaagacatcaaaaatatattaaattcaaaaatatagtcacttacactcgcataaaatagaacaacacgcatgcaactaactacttttttttttttttttttttttgaaagagaaccaaagtccttcattaaaccgaaaaaaggttcatgggattcacagggggaaatccctccccttgacaattcaaaagttctacagatgaacttctagcttccttagctaacaaatcaacaaaggaaataacatcacgggaaacaaaagcacaagagcaattaactaaactatttttaagatctagaacactagagaaaagagtccaacatttctagctaggagaaattcctttcaacaaagacttcaccaccacctgagaatcagagaagatgcacacatcttcccactgtttttccttagcccaaagcagagctaaatgaacagcttgaagttcagctgctatcgggcaatccaatcttccagcaatggtctggataaaccacttcttgttggcgtcatcaatagccacaatagctcctccaaagttcccgtccttaaacgattcatcagccaaaatcaccttcgaaacaaaccccggaactgggaggccgttagagacaggaagcatctgttcaaaagatggcttatgagtgtcactcatttccacaaaacggtttaaggcattattgagcatctcatcaaccaaaatattcactatcctcccatatcgagctctattcctccacaaccaaatggtttcaaagacagaggccatccagataaggaaggacagcttcgaagacccttctaacaaaggcaagatggaacaaatcacttcagaaagagtggcaccagggattgattctgttctgagaggaaagggtcccccaaaccataaagctttagccatcgagcattttacgaagatatgcaaaggactctcattatcagagcaacagaacaaatagtcattagtagaaatcctaccatatttatcagatgtgggaagagctccgaccacagccctccataacatcatactctgtcttggatggattttacaattccatatccaattccacaaatcctgcttctcaacaagcctcgacttctggctactcaaataagcccctttaaccgagaaggcacctactttcgagtccttccaaatgatcaaatctttctcagcataggcattaatctagatagagctaatccgatcccccatctgatcacttccaaaaacaaagtttaggaagccacggttccaggtcctgcttcttctaaacataagatctgccacacaacataaagatggagctttagctcgagctagctccatggtttccctgaattccgagtaatcaagccacgggatccaaggttgccaccagatattagtgtcttcgccattagcaagcatagtacaagctccttcgcaaatcaacttccgagcttccaagatccctttccaaattgggttgtcggtagggcgtttctgaatactccaaaaagaatccaagggaaatatttagcttttaaagatacagcccaaggtctgttgtagttatttgccaaaaaccaagccaacttggccaaaagagcaacattcatatcactaaatcttctgaaacccaagccaccacagcctttaggttgacaaagcacatcccaggctttagtagcaagaaaccgagagctatccaaattacctttccaccagaattttctgacaatggcatctaattcctgacaggaggtagtagggattttacaagagctcatggtatacaacggcatagccatatccaccgatttaatagtcaccattctcccaatggtagatagagttttcatacgccaaccctctaatctattacagagattggttttgaggaattgaaagtccttcttcttgctacgggaaaagaggaaaggatttcccagatgtttctcattacctttcaccaaccccactaccaatttctccataatctgacttcgagaatcatttacacaatttcttgaaaacagaatattcgatttgtgctaaatacattcttttttgcagagccaatgtgaaagaggctgaatctctgcagctaaatacttgaacactgcagaaatgagtctaaagtattttcgcgcgatcgctgaaatttgattgctaaatgctttgaatagccattgatgatgcatgtttaaaagcatcgcgcaaaaatactttccatgaccaataaatgaccatatgactttttatttatttatttttttgtaaaatccaatcttttttgcaacgagatattattttatattttatgttttggtaaaaaatatttcgtctctaatagtaaaatttacatatttttattttaatttatttgaaaaaaacaatattattatatatcccacatatcccacaaaaaaaaaaaaaaaacacaaaatttataataaaaacaaaatatttatacaatgtttgtaattaaatgtgccgacaaaatatattacactttaaagagtaatttctaacatgaaatcctattagagtgaatccaacatgagtatttctcgaaaacaaacaacatatttactatttatataattataatgtatattgttatataaaaaaattacaatttctctatatacaaataaaaaataagaaatatctcacctaaaatttaatctgagtcttataagatatatatatatatatatgatcattaattaaaattgtatggatggtttgattatacatgttattatttggtctaattttaaaatagaatactaatagttttcttataccatgcattatattaaattaagctaggctagttttctttgcatatagaactattaattaatacttatatatatttttaggaaaaattacacaaattaccttaaaattgtacattttttttaaaaaaaaaaattacgattttttttttctttatatttttacagattagtgattttttaaaggaaaaataatgttgttttcatgtgactgcctatgaaaataacgtgtaaacaacaattttttttaaagcaacctaaaaacaacagtctataaaaaaattccataaaatgtaaaaaaaaaaaaaatcagaatttca

SEQ ID NO: 23061 - DNA, 1833 bp, Cannabis sativa
taaaagctttgaacatgggaagaaaacctttcattgttcatgaaaactacaacaagtgaatcccaaaattaagtctcaaaatggaaagaagattataagacatagaagaaatccaagtaagagttgtttagggcttgatgatgttggtgcactttggccgttcttctgctttttaatcatgtctccagttccaccatacacttgctttgcttttccaacagaactcaattcatcatcatcatgaccatcttcactttctgctaaccctaatttctgatggtagtcattgatctctctggttgataattcagaactgatctctacaccattctcatctaaacaaacagaatattaattaatattgttattaattattataaagtaataaataataactatacataatatctttgaacaaaaaaaatatgatatatatatatatatatatatgcttacacttgagttgtttgttcagctggttatcagatttgcatgaagaattagcagcaatgcaaagaatcatgaagaagagccaaacaaggtatttgatcttcatcatgatcatgatgacctaattttaattatttgattaattaattttctatattattataccaaattatatatatatatatttattaaagaagttgattagagctaccatgcttttaaatacagctattatatttatagagggacaatgggatagcttgaaaaaaaaagaaaaagataatgaaaagcaccttcatgaacattttgcatgataaagaagaatcctctatttatggcatcaaactactgttcatgaggccacttatgaagtttttattattctttattaaattcgatcaagtataaaagatttaaaaatgaactttcttacacacacttctattatactttatgcacaacaaaatttatagtaaggaaggaatatgttgttatttggacaatgatttagaaaatatagcatgatcactctaattttttttttttttttaatttgtgatagatcattataaaagttatatcaaaagaataaagaccaatatttgtttcttttcaaggaattgattcaccttatttaactaaacaaaattaatttaaagaatcgaattaggtgcatatcttatatgttatcttttcctttaacttttggagaaataataataatctaaggagggcacaacaattctgatgacattgtgcttcaactttttatcattattatttaattattatttatatgcagttgatgaaaaattgtgtttttgaaaatgtcaataattttattaaattacagtaaaaacacaactgtaacagtctacagtgatagaattagcagcagattgcaattctgtcactgtagaatacagatttgtagaatcaaatttgaaccaaaaataaataaatatagaatttaaaataacttgacacaagagaattatatgtggtatcaatggtcttttaaatgctcttagtccttggggccacccagaggatgaaatcaattagtaaagtatcaaaattacaaaagtaattgacttaaaaaaatttagattctctctagtgatttgctgtaatcctttaaaattcaccttgctaatttgatctctaaaacaaatcaaatagtgaattccctttagctattgatgtgtgcttacttcctccagaagtaaggcttaaacaaatctttttctgaagatatatgcttactttctccttaaatgagacttagaaaagtcatctcttgaagactcgcacttgttcaaagcttctcttcaacctattttatgaatagtatgagatcataataagaaaaccaaaacctag

SEQ ID NO: 23062 - DNA, 2972 bp, Cannabis sativa
agagagagagagagagagactctaaactcaagagagaaacttcttctcgtaatctttgagaaatttgtaaagattcttgtaaccttgtaaacactaatatcaataaagatatgactattgctattctaaccgagatggagcattgcacatgatcgaactcgttaaacctggtatcattcttttctattttactgcttaattcattacttgaattttgagatctcttatttgatttttttttacatgtgttgcgtgtttgttggtttggtatactaaaatatccctatattttagggtgcatttacgatatgtcaaagttcctaaatcttgggcagaaattcggatttgaatttgtaggacatggttagagatctttatggaagttgctgaagaagaaaccatgtcttgtgtagccttattcgaccttttgggattgtttaccctggggttaacaacccaattaggctcttttcgagacttgtctttttgattgatgagattgcccatgaaataatcttgtaaggtatattgatatcttctcacctagtcggcgtattgatagcccgatagaatgcttcccggaaggcaatatgtaattcatggatatcactcatgtaggatttgactggcatgctcctattactactgacaagctaacatcaacatcggtctgtgcataattagcaaagaccaactaaagtgcgttttactctcttttttgaatcttctttctgcaactgggaacagtctttctaatagtgtcccgacatactacactgaaataaattcctacctttacactcacctagatgatgcttcctgaaactgagtatattgatcaagtgtttctaccttcagagataccttgatgaccattctgactttggttccctccaaacctcttattctaactcgaaacactggatttcaatggagcttttctattatgattaaatgatgtgttaccactacccttactaaaccataagtaggaggagtagtaactcgatttttacgttagattgaataaaatgtagcgtaaacttaccaaatcgactgatgtacactctgtgggtataacttcggccaccaattttagttgagaaaacattgaatctcaacgttaattaaggtttaaatatattttttattcatttttaaaatgtacattgttttattttttgtttttgtaaatttttttaggatttttttatattattaacattgttgttgtatatatgtgtggtggctagattttttgcagaatttgttgccgaattgcgcatataaagtaaaaatttaaaccttaatatatagtatatatatgcattttgtgtttaattaaatatgtgtgtatatgttgtgtattttatttatgtaaatataatattataattgtattgtatatattctaaataatatatatgtatgtatatatatgtactgtgaatgagaatgagatagaagagatttaatgagtttagaaacaaagtttttaaaattttgttagtgtgtaagatataatttattatatatatgtatgtacatgtaaagttttcaaaaatatatataatttattctagtaactagttactttttttttaaaactggcaagtaattaaataattaaaattaaaattttgttgtatttcattatattgtaggttgggagctaattttgaaggtttcaaaaaatttggtgttgatcagattttagcttgctataggtatatatattcactaataactttttgttattaattaattatcaatgcatgcttagaggagtttatcttaaatcatctgtagtgaagtaggttctgcgatatattgtacttcgatcagatgggtttaataatatgcatgttagttgagtttgaatatcttaaatattcaaccatagtgaagtatgttttacgaatacatgtattacagtcggatgtgtggataatttttgtattattatgttattttgtttgtgtatattactttatttcttttatttttttattttaggcatgtttaaaatttttggaaacatctaattacagtcgttatgctttcaaaatctcggtagaattaggataaatttttctaaaaatgcataaatattaaatgaaatgcgtataacacaaataattagttaattactagctagttgcaagaaactaggtgacataacacaaataattaaatacacatttatataatttataaatcatcacatatattttatataattatttatgtctaactttaaaagctcaaattagtaaaactctaatagtaaaacttttttttacattttaaaaaaggtacatttgacgtaatctaaataatgttggaaatgaattacttttcattttgaaaagacaaatcctatctccacgtgaattacaattctaaaggaataagctttctaattataaataccaaaccaaacaaatgaatagattcactttaattaagaaaaatcattccattctcagatctattccaatcaactaaacactatcctagttagttaattacaacttatacaatttgataacatgaactaaactaaaataataattatagtaatgtataaattaatatgaaatataattgtgagaaacctagttagttacattatgtaagtactaactagttataattagttactacatactgagacttttttgttaggatttttattatggataaatcatggatacgtgaggagagagacacactgcgatttccagtaggatttgatgcattatagagtttgccctaaagaattctagaaatcccaaacgtattcatcgtacatgtgtagattgttgtaatagatctaaagaaaatattacgatgattaaggaccatgtgtatttatgaggtttcaatagaagttatactacttggtattgatatggcaaatatttagctgatgacccatatccattagggaagcggggggtagatgatat

SEQ ID NO: 23063 - DNA, 5115 bp, Cannabis sativa
  modified_base (3352)..(3366): a, c, t, g, unknown or other
agtctaaaccacaaaggctacaagtgtctagatgtttctggcagggtatacatttcaagagatgtaatatttgatgaaatgtcatttccttacacatccattcccaaacttgcaactgatacatacacttactctgaatttcttacatctgccaacatacctattgctcaagtgtccaactcccaacatcaccccactaccactgttattcctaattcgactgtgcctactgtggcaagtccatctgttcacttgcaggaacatattatgcagcagcagccatctccacaaagaccaattgcagcacttgtttctcaagttgtatctcccatacctgatgctaacactgtgccagaaacacaatctcaacactgcaatacttccaccactggagtgaatgctcaatcttcaagtttgcctactgtttctgctactgtacagacaggaaatgcagcatcagatgtggcacaacgaagtcattccaccaatactcatgccatgcaaactcgtgccaaatcaggaatacataaaccgaaagcatacattgcaacaaaaattccaagaacagtcaaagaagctttacaacaagagaagtggaaccaagctatgacatatgagatgctagctttgaccagaaatgcaacctatactctagtacctcttcctgagggtcgaactccaattggttgcaaatgggtgtttcgagagaaagaaaattcagatggcacacaccatagttacaaagcatgccttgttcccaaagggtttcatcaacaaccggggtttgatttcactgaaaccttcagtccagttgtcaaacctgtcacaattcgacttgttctaagtattgctttgtctcatggctggccaatcaaacaacttgatgttaataatgcctttttaaatggcactctctatgaggaagtttatatggtgcagccacctggattcgagatcccttcagctcctcacttggtatgcaaattgcacaaggctctatatggcttaaaacaagcacctcgtgcttggtttgacaagcttcatcactgcctattggatcttggatttcactcctctaagtctgatcattcactctttatccagcatactacccgagatacaactctagtgctcatttacattgatgatattcttgtaactggcagcaaccctaaactcattcagcatctcatcacggctctcaatgacaaattctcccttaaagaccttggcaatttacactactttcttggtgttgaagttcaaaccactccatctggtttacacttatcacaggcaaaatatgttcgagatcttctcaccaaagctcaaatgcttgatgcaaaacctgccccgacacctatgacaagtggtcttagactctctagttttgctagtgaaccagatcctgatcctcaattgtatcgatcaatcgtaggagctcttcaatatcttcttattactagacctaaaatctcattcagtgtcaataaagtctgccagttcatgcacaatccacttctcactcattggcttgctgttaaaaggatactttggtatctaagtggcacaatttcacatggacttcatcttaagaaagctcctcttcatgaaatagtggccttctgtgatgctgactgggccacggatcctgatgatcgtcgatccacatctggttttaccattttttatggacctaatctagttgcctggcagtgtaaaaagcaacataccatctctcgttcaagcacagaagctaagtatcgcagcttagcaagtacagttgctgaattaacttggattcactctctgttttctgagttacatatcacacttcctcagccaccaacaatatggtgtgacaatctcagcactgtccttctaactgctaatccggtccttcatgcccgcaccaagcacatagaacttgatctctactttgtgcgagaaaagatactgcagaaacttgtccaagtcaagcacgttccagctcatgatcagcttgctgatggactcaccaaagcaatctctaccccacggtttcatcattttcgaaccaagcttaccattgaagacatctctgttctcatagatgcttccaattgtaagcttgaggggtcgtgttaggagtgttagttagcttactgttcattagagttagttaattctgttattggttatttctgttattagtcaatgtcagttctaactaattctgttgtatctaactgattctccttgtgtaattcattggctatataaggccaatgttcattcctttcaataatgagattgctatttgttcaatctatctttctcttatctttcttctctttgctactgtctttctctctctttcttgttcttctctcctttgctctgttttcttgttcttggttcatcaatggcggagagattcaacacatctcaattgttatatatatgtatcagatataataatgacaaaacttgttgatcgactatgaagggtatggtgatggcgattcgctagcgaggtcttcgattgagatcttctcaaagaaagcagtataaacaaggatagtagtcggtctattgatggcgagttttgatggggctgtgaaggtctagcaatggcaagctcttagtggctaattacgaggcctgtttgacgatgggaatagtcaagcatggatgcaacatcttttctctttctcttcaccatatatagttttgcataatattttctctttctttgcacgagattttatcatctctatctgtcttaaagccatttcttttttaatctatagttcatcatgatcatgctaatagaaaccttcctagtttattttgggtttatttcatattgagtgcaatggcatgcccagatgtcgttgcaacgatcgtcagagagaattgagaatctaccaatattttctgatgaatggatgcgtgatgatcggcgttgaatcatgaatcaaccattgtttggctttattaattaatatgcgtagattatctattttaggacacttttatagtagtagacacctttaaaatggacacaccaataaacactctttttgttctcattttattggctgttaaataggccccatgctattatgttgttgctacacacaccatattgctaagaagtaatatttatttttgtcctggactcttcctctgttttctagtcgctagtcttcaacaataaaaggctaaacgttggagagttttaatttactgaacaaatatgataaaatttatatttacaatttatgagtttgttttgaggatatatatatctgcattttcttaaaagagaattacatttacgtttgctctttattattattattattannnnnnnnnnnnnnnttgttgttgttgttgttgtttgagtacattttcagactgctactaattttttacccactattttttttttccatctctttaaaggatcctttttccaatttttcattagtgtgtaaattaattgaaaaatgtggatttttaatcaattgtacagggtttatcgttctaataaatttattagtagttgaaactttcaaattttatttctaggatgaagtcctgaagatttcaaattgttccaagatgtaggttaaagaaaaggtaaaatcaatataactaacaatagaattcaaaacaccaacaaacaagaacaacaacctccaaattaaatcgatatgatttaaataaaaatggaatacaaaataataataggtttaaaaatttttaaaataaaaataccaaaacaaaagaagatgaataatgcttcaatcaaggaactcgagattaaaaaaaaccccttcacgaaatattattccgccaactaaactcctatttaattatcaaattaaattatttctaaaaactattgaacaccataagtgtaccctttctcacaagtgaagtaatcatatgtatatgcattcacattaaacgggcccacaaacaacacttgtaaacaataatatagcaacaaaatagacttattagtgtggtcgttattggggtgtctatgctagaattttcctctattttattatatctagtttttaatgtataattcatttgtatttaatgtattttcttttagctttttctataaataactatttatataatctcttttatttatagttttttattttttaattttattatgagtctttttgttaaatcaggtttattttaacttttatttcttttatgagactttgtttttagtataatgcctaattttaatgtttaattttttttttgcattattttatggttttttgtagttcactactattgaagtgttggccaaatatcaaagttcctaaactacccctactgctcataatagaattaaccaactatcagttatgacagttggtgattgagcctttcacaccagcttcaacattactatttaaggctaattggattaaacattggtgattgatttttagggaaaacaattttgtgtgtgagagaaatctataagttgtttagagagtgatgagttgcccttgagtgttatgtaatggtgtgatgcgttgattgttatcatcaccactaatgagttcaattacagaagcaatgcttctcaagattgtgtaattggaactattgtaacctctcattgaatatcagctaataaagattctctaaagccattgttgtggctgttttctggtcggggatgtaggcaaggtgattcaccattaccttgttcgaatctcgttaaatttgtgcgttcttaatatttgtttaaggttcttgttactggttttatatttgctgcattacagtgttagttgttgatttggtttccttgatcattgtcttgtttattgtgttcttgtcgatgtgttgtttcacaacaatttgcatcagagctcaagtttcttggagcaagaacagaatcaagaaagcgatccatggcttccgcacactttgaagtagacaagttcaatagagccaatgactttggactatggaggatcaagatgaaagtatttctggttcatcaaggagtgtatcaagccattgataaagaagaattgaaggagttgggagatgacaagaagaagattaaagaaattgaaa

SEQ ID NO: 23064 - DNA, 6032 bp, Cannabis sativa
attttagtataaattaaagtttactatagtattatatgaaaatataatatataatttaatttaatataatataatacaatatgatctaatacaacgtactaaatgagtagatagtggatttaattatactagtacttcaacattaatttatacaagtattgtatacatcatcgttttggaaacttattattttttttttggacaaatagaatttttcttaatgagtaaactgaaggaactgaatatagtctattatatggataaatggacccatataaaaacgagaggaagtaaaaaatatatatatatatatttaattagtaacaatatatatatatatatatttataattaaaactgaaatataataataattttaacatgttagttggactatcttatattgagatcaaaagctcaaattcgtatgaaaccatctttatttagtttacttttacccactaaaaaaaaatatgcctccaactttaatttgggtcccccactgactatatccatatgttattcgtcgagcatattaaataaaaatcagcccatcaaccgtttaccaaaacaaaaatatgtaagggtaaaattatataaaaataaaactcttcatccattatatggtgatccattttgacttttggagcatttcaactcacaatcaagtttatatgaattaatcttactaaatacctaatatgtgtaaatttaagtgttaataagtaataaaaagtaattaattacgtacttatgtaggccattatagttacgaattattatgtgactacaataataaataataataataatatttaagggatacattaatattatgattaattgtgttataattaattattagggttatgggcttactgaggctacgatgacagtatcccaacaagagagcccagaagaaagtgaacaggtgggatcatcaggtaagattgcagaaggtttggaagcaaagattgtagatcctactaatggacttgccttgcctcccttcaaaccaggggactaggggagctttggattagaggcccttcaataatgaaaggtataattaaataaatacacggttatgtacgtatatgaccaattaatactatgtataacatacaagtgttaaatttaagggttaaactagaataatatgtttagggaaaaataagaaagaataagaaataggtagagctactgcatgtactttatacacaaatatatatataatgcgcaggttatatgggtgacaaagaagcaacgtcggcagccatagacgctgatggttggttgaggactggtgacctctgttacatcgatgatcaaggttttctttatgttgtcgataggctcaaagaattaatcaaatacaaggcatatcaggttatatatatttacatacattaaatatattgatcatcataaccatcgtggccttaatttgataaaaaatgtatgatcaggttgctccagcagaactggaacagttgcttcagtcccacccagagatactcgacgctgctgtaataccgtacgtaataattaatacaagattaattaattaaacatttttaaatatatattttattgaatttgtgaacagatatccagaggaggaggttggtcaggtgccgatggctatagtggtccggttgcctaaaagtaccttgacagaagcagaggttaaagattttgtagccaagcaggcaagcctctaacattttatgagttattaattatatatttctgtaatgatctagttataataaccaacaattaaaacacatatatgcatattatacataattttcattcgagttataagtttattatcataatctaatctatatataattttgtattaattaaatgtaggtttccccgtacaagaagataaggagggttgcatttgtggataccatacccaagactccctctggcaaaattttaagacatcaactcatcaaaattttcatcccatcatcaccctcatctcgaatgtgatacattaattactttacattacatgtataattaaactaaaaattaattaataaatcaaagagggacacatgacatttacatatatatatatatattaatttgatatttcctatgtatacatacatatatatatgcttgtgtatttaaagtatataaattatgaagccatgatttttacatgataatgttctggttacagcaaattttatttaaacttttaaagaataaatagagaatttctccccttcaactattaccacattcacatcttgcctcctaaattttttttcttggtaaaaatctctccgcaactattttcaatttttattaaagagttttaccccattagtgtaattttggagcttcggtggcaacaccgcctcagcaccacacgtataattaaataaaataaaaatttctatatcacttaaaaatatattattttttttaaaaaattaagtacatgatttggtagccaataaattttatttgtatacataatggattgatagcagatgctatttttgaataaattctccaccctcaccgttctagagtacttattactcttgttgtttttaggtcgagacctttttttcaaaaaaaaaaaaaaaataataataaaaagaataatttacaacataaatacttaaatttaacttttaattacaaagaaatacttaaacttaatttttggcggtaataatacttatgttataattctagaacttttgtaagtacttaacttgcaaagtgacaatccctgattagtttaggtcattaaatttttattttttatttatttaaaaaataatttaaataaattaataaaaaaataacacgtaaataagtaattaatattatgtacttatgtagttttaaaaatattaattaaatattattattgtgaaaaataaaatatagatatttatttataattgaaaattaaccaacctatttatacagtaaattaatggtaaaaaatagttgagacaaaaataaaaataataaaaaaaaaatgtgaaattttcaaattagaaggcccataagaatcattgggctttaaagtggccggttaatgggcctaatcttctaaaggaaaaagagagtgagagagagaaacgagatcacaactcggttgcgtgcccggtgactcggtggctcaccaccatttttttccatcttggactgtaattcagttaacaacacaacagaatgaaaattctaaaccagaacttcaacaacaacactcctcctccatcctagctacgtacccattcctaattccaagctcatcttccccatttctcttatgtcttaatctcctaaacttcctaacctaatccagattcatccatagtccttggatctgcaccttcggtttccatccgatggacatcctcttcgctcagatccaagcggaccttcgctccaacgacgctctccgtcagaccggagcgctcctccaagctctgcaacattcggccgccggtcgagacatctccgttctcgccaagtccgccgtcgaggagatcgttgcttcgcctgcttccgctgtatgtaagaaactcgcatttgaccttattcggtcaacgcgtctcactgctgatctttgggatactgtatgtactggaatccgtaatgattttgaattccccgaccctgatgtcactgctgcggctctctccatcctcgctgccattccttcgtatcgtttgtcgaagcttattactgactcgaacaaggagatcagcagttgttttgattcgccgagtgataaccttcgattctccattaccgagaccttgggttgcatcctcgcacgtgatgatctcgtgacgctttgtgagaacaatgtcaatttgcttgataaagtgtccaactggtggtctcgtatcggacagaatatgcttgatcgatctgacgctgtatcgaaggtggcgtttgaatcggtggggaggttgtttcaggagttcgattcgaagcgaatgagtagattggccggtgacaagttagtggatagtgagaactcggttgctattaggtccaattgggtatcgtcaatggtggactttgtttggaagaagcggaacgctttgatggcgaggtcactagttatgccggtagagagtttcagggccacagtgtttccgatcgtgtatgctgtcaaggctgttgcttcgggctcagttgaggttataaggaagctatcgaaatcctctggtggtaccaatgggacggttgtggattccaatgcagagaggttggttggagtttcagacgtggtttcgcatttggtgccatttttggcgtcgtcgttggagccgtctttgattttcgaagttggtattaacatgttgtacttagctgatgttgctggagggaaacctgagtgggcttcacaatccattattgctattctcacgctctgggatagacaagagttctcttcggccagggaaagtattgtcagggctgtagttacgaatctgcatcttttggatcttcatatgcaggtattcttactgtttttcatcttttacttttcaattcgaagaaacagtttggctttcatgtatttcatagatgtagacgcaggatccagatgacagtataattcacgtgtgttactataaaaggaatttattatcaagggatagtagtagcattgttttactgttgcttttaatttcaaatgtgaaaatagttgagcttaattggttgtcttgtagatgattcgaaaaaaaattatgtttttaggaggattacataattgggatagtaaaatatattatcatttatttaaaaatatctgatatattaaatttcggggttttagatttctttgtttaagaggctgctgctgatggtaagaaacttgagggcagaatcagaccggatgcatgctttagcatgtatttgtcggacggctctttgcgttgatctgtttgcaaaggaaagtgtgcgaagaggtcagaaacctctgcctggaactgacattgcttctctttttgaggatgttagaataagagacgatcttaatagtgtaacaagtaaaagcttatttagagaggaattagttgcgtctttggttgaaagttgttttcagctgtctttacctttgcctgaacaaaagaacactggtatggaaagtagggtcattggagcgttggcatatggaactggttatggcgcattaaattggacagagccttctttggaagtagtagaagtttgtcggccttgtgtcaaatgggattgtgatgggcgaacttatgcacttgattgctacttaaagttgcttgttaggttgtgccaaatatatgatacaaggggaggtgttaaaagagttaaagatggggcttctcaagatcaaattctaaatgagacaaggttgcaaaacttgcaacgtgagcttgtgaaagatttacgtgaggtattgcatttatgaagttgtaaatactttatacagatactttgcttcggttatgcattaattaggcttataatttatgtctgtttggcagattaataccgcaaggatatgtgcccgtgttatatgggctgtttcagaacacatagatctagaagggctggatccgcttttggctgatgatcctgaggatcctctgaatatcattatatcaaatatccacaaggttttattcaacgtggattcatctgcagatacaacaaataggcttcaagatgttcaggcagctcttttatgtgcccagaggttgggatctcgctatgcaagggccggactattactgactaaagaacttgaagaatttaggaccagtacaatggctgattctgtcaacaagcatcagtgtcgtttgatactgcagagaatcaaatatgctactagccattcagaaagcaagtgagcacttctaattttaatctatctatggattcaaacagcatcattattttacaagtaaagttccatcttgctgctaaattatggccatgctgtctgagcaactcacttggttatgctgtttaccatgcctt

SEQ ID NO: 23065 - DNA, 3412 bp, Cannabis sativa
tcaagacaatcgtacgacagtactactgaccatgatatcagcctatactcggtacgctactcgtactctagtcgcaccagtgttattttgtcaagtagtatagtactatcaaccataatatcagccaatacttggtacgctagttgtactctaggcgtaccgatgtgatattgtcgaatagtacttaaggcaacatacatttctaatgtaatctaacaggcttaactaacatgcacgttaaacatgtaaatacatatgcatatcattatactaatcttacctcgtttctgaattcaggtgtggcggccaacctaagtggaacagctgcttgacgaattacagggccctaaatcacattatttgtaaaactggtgagtgacacgctaaattactttttggggacttaaacttgaaacttaaagtttccctatcgatgaataacatggcaataacctaaatattacaaaaacaagaaaaagtagggttgccaaaattgccctaaccgaaatatcagttccccaatcggaagttcagttctgtggggtttcctggggacctaccggtagaccggttcctacaagtccccctgaaccggtcgactggttcagtgcaggaaaaacacaaaagtccactacaccctcaaatcaatctcaaatagcacaaaaacttccagacctgcttaatataccctaaagaacataaaccaagcaacaaaaaaacctaacatgctcagaatcaaaaattgtcattaaagagtaaagcttgagttcttaaactcaaagcttgctcaaaaaccacaacaaacccaaacctagctcaattacaacataaataactttaattcaactacagaaaaacacaatcaacatcatagaaccctaacacacaattcatgcaaaatttcattacttaaaacttaagaaaactaagaggaaaaggtgctagagagattaccttcaatggaattaccaaaaattaactacaatccacaaaaaccaaatgaagaactcccaattgttgctggttcttcaagggttcgagagagagaggggggagtgaagagagagaagagagctttttcttattttttttttctaattttggtaaaagtaaaataattgtaattatccaactaaaaaggatatacattcagctatcaaacttaatgaaatcccacaaaagacaaaggactaaattgtgaaaagactattttaccccttacaaaaaccaaaaagcttctaaatcacttaggggtattttggtcatttctaaacctcaaatatctcctaacattcgcaatgtctaactaattttacccgtaactataaaatactaaaatataattctaatggccaaacgtcgcgttctaatgttgtcagacacaaaatatgcaaaaacataaaagttcatatatggcataaatagtgcatgctgaattcaaataaatctccaaaaaatgataaatcataattgttattcaagtttcataaataaaccctaattatctgctcattttcaagttaaaattaagtggtctttacagaaagcgtacgaccactactaaaaaaatggtttttcttaatggtttttaactgttagataaaatattctcgtcgattgctataaccgtcgcatattcgaccgtcataaaatgggaaaaattggcgttggcgacagcttgaaaccgtcaccattttctcattcccgacggtttaaaatcgttgcctatgataggttataggcgatggtttataactgtacctaatactataggcgaaaatataaaatcgtcgcctatagcctatcataggctgcagttttaaattgtcacctatagtataataatccatttttcataattttaaaattttaataatcttaaatttatattatatattcgtttatatcataattataattgtcaaatatatcgagcataaataaaaatttattaataacacaaatataattacaatatatagtgtattagtttaggctacaaaattatatactcagttccaattctattatcatcaactataaagcaaaaaaatatttataaaataaagtacactcttcgaatcctaagttctcaacttcaaatacctttgaatattgctctaaagaaaaacttaacgatatacctaaactttataaaaacaaccattgatgaataagcacgtcaaacttgtaaagaataacttaccatattgcaaacacatcaacacaaaaaaaaaaaaaaaaattaattattctaattttaaataaactttgtataattaaaatttaaagttaaatattacctaaactatactaaagttataattaaacttacactaaaaaattttctttactaaataacattacatattttttttagtaacagattaaacattcatattaaaattaaaattctataaaaaaaatgcttatacatttttaccccaatctaacattttttctcttatatttaagtagttttagtggaatttattctaattctatcgaaattttggcagcataagaactgtaatcggatgttctcaaaaatttgaaacatggaaaaaataagaaacaaaacgtacacaaagcaatacaaaacaaacaaaataacattaacaatacaaaaattatccacttatctgaccgtagtataattaattgcagaacctacttcactacggatgaatatctaagatatttaaactccactaaataaaaatttttaatatttgagtgattattcctttctccaataaagctagctacttttacactctacaatgaacaccaagaatctgataccttaaaaataataaaaatattaatattgttttaattttaaattttacaattactatcaacttatatatatatatatataaataggtatgaactaaaaatacatatatatattaccaataataaggagcctctctcgtaagactgccaaaaagggaggaggagcttagcaaagtttggcaacgactaaaaagttcattaatatatataacataaagtttcaataacaatttaaataaaaataaataatctaaagataaaaaatttcataacaatttaaagaaaaactaatagctaaataattgataaaaactatatttttaatacctcaacaattaatattattgaaactaaatatttttttattgtctaacaacaaataatctaaataatttctttattacataacaataaataatttaaactaaatatttttcaaaatacctaaatctaaaactaagtaattcaactaaactaaatatttttattaataggtaaatctaaaacaaattaaacaattaatctaaattaaattttaaaatatctattaaataaataaatatacatgtatatgtatataatagtatatgttgacttcgattttagccaa

SEQ ID NO: 23066 - DNA, 6642 bp, Cannabis sativa
tggtagttctccagttggattgagccagaaacacatctcacgtgatggatcaattattattagcacccaatgataactagtgatggaagaaaaaattttaatatataaatatattactatatagctaaaataataatttaagttaatcttaccctaaattaatagggatcaatgaaagttgcatctcccctgcgcttgctaatcgatctgctattgattctacattttgctgcaaataggatcccactatagaagcccaacttggatgaataaaacgaaaatacttctctctttttgaattttttaacctttcatgtaagatcctaaacattataacaataccaaattaaataatgttattaagtgtgcgattaaaaaatatgataaaaaaatctcttaccttatataaaatgcgatacactcagctccaatctcaacatttgtgccaagatgaactatatctttaggttcaatatacaaatcttgatcagacccaaaaatatttggatccatttcaatacgatactcttctctacttttgcgatattgaacacttaacaatatagctttgacgctccttgggatgattttgggcataacaaatggaacaggagagtctttcacattcatcgaacttgttgaagctttctgagttggcatgtgtggagataaatgttcatttttctccatagtttttaatgcctaaaatattattaaacaataaataattataatagaaaggctaaatacaaatcaaactattttcttttacctcagaatcaccaaagatgattaagtgttccggccatgcaacaaagctttggactgcatcttttacgaagattaaatcatcacgaacatggacaggaagacgagcattttcattcaaacattcaattatgcgtactcgtacattgcctttttccaaatctttcccatgaacttgttttcccggaaaaatttcaccaatagcaactacatcaccgtctcccaaagttaatctataagttttatcctacaaacaacatagaagaattagttataatagtagtaaaatcaatattattttaaataaaaaaaaaaagaaaaaaccattgttggtggagttggccactgttgtggtggatttgtctctttatttgatgatgattgaaatttatgtccttccaagaattttctttccaatgattcaacccgcttgtccactttttcttgaagatatttttcaaaaacaccatctttttcactggtaaaatctttgatgattttttctaatttttcaatgcgttgttcttgaagctccttggatttagatgataactctattgataatttttttcctattacaggtccagtccctcttagccacccatacttagcatcacctaaaacttgtctatagatagcagcatcgtctaccattattaatgtaccagcttcgagttgattaagttgatcttcacgtaactcaatcatctctttctacaaagataaaaaaaattgtgtaatatatttatataaaatgtaaatagtggagaaaatgttattaacttatagtgaatgtgttgcatacatatttttcctcagcaatttggttgatccatccatttttttctgtgtagtgagtttttttgaatgtttcaatctctccagctttaatagactttgattgtccttcatctacatccattaccggtgtagacttctgaaataattaagtgaaaaaatttttaaaacttatacatagtaatttaaaattaattagtaataataaattatttttaccgtctcatgtaagtgttgagtaaatgatttacttccacccctatgcataaattttacttttgatctattttttgagccagccacagactttttctgcaaaaaaaaagtaattgacattaataattttttaagaaaattaaaaatttatatgatgaaatagacattatgataccttccactcttcgctggagaaacatgcagtgcacatccatttccagtcagcttcttttatcaccaaactcgtaggtcgatgctctaatggattttttccttcctcgatcatttttttataatgtcggtgacaattatgacgatgattgctgtatgcatttttgcaatattcatcacaaattacctcaagatatggatcttttgcaaagtccaatttgaatacatcctgcataagttttgaataaataaatataaaattacctaattaaaaaaaatattgaaaaatgaatatattaacaaatgtacctgtatacgagcatatacagcttttttttctgcaggtggaactttgctccaaccactatattgcaatggagcatgatggcgtacatttacgccaacattagttgtaaaatcagaagcattatcaccataaactcgaagctcgcccttattataggtaatagttaaattagttattttgtcattcttcagttcacggcttaagcgatctccacgagtaggaccacgtacgttcttttgtatttctattttttgtaagaaaaatatataattaataagtatttataaatgtatttttttccaaaataagagtgatgataaaattttgtaccttttgaagattgacgttgttcatcatgtaatggaactgttgaagggtcatcagtagaaggtgtcaaggattgcggtgaatctgatggtgattgagtatcattgtgtgcccgtttagagctaaatcttctcgtactactcaagggttgatctgaagtatcagtgcgtccccgttttgaactaccttttctcgtactacttgacataataaaatctgaaatgataaattattagtagctaatattaaattatcccattaacaaaataaagttatttacacaccctttatattaatcactttcatcacagtcagtttcagaatctgaaccactaagtagtgcttcttcatcaatatcatcaatgtttaattcgtgttgaacttgattattttgatcttttggggagtcaatcaataactcatcagtttcaacttcatcaatatcttttcgaataagaacgtcgtccatgttgtttgaagaatccaatgtgagattaatgttgtttgaggaatcttcttgatatgcttcacgattctggacaactcgttctccatcatcaacttcaggctctgatggtatttcccaaatatgacgatggtttaccttttgcaccactttccaattttctccttttttaatgtcatctaaatagaatactggattaacttgatttgcaagaagaaacgggtcgtcttcaaaccaatatgagctaatatttatactagtcatatgatattccgtatagattctacgtggactctcactggtgttataccaagaacatttgaacaatatcaccttattgaaatagatgtaatgtacttcccatatttcatcgatgacaccataaaaatcacaaaggttcccattatattctgcctcaactcgaattccataattttgagtgactcgtttttcatctcgagtttttgtgtgatatctaacaccattaaccatacaaccagcatacttgcaaattaaaaaattaggctgaattgcaatggcatataaatcatcttgggctgtagaatatgagcattcattcattcttttaacctgagataataatttgtatagttaaaatgagaataaatatgcatattccatttgaaagatatacaaatttacgaacttactttattttcaaaccaagatggaaatttttttttctgtgattcgtcaatatccaaaacacctttagattgtaaaaacaatctgtgttctctgattcaaagtaagtaactctcagataagaattattttatttacgacaacataaattttttaggatatatttaagatgaattaaagaaaacttactccaaatatggctccaattcaggacaattattcagaatgtaccaatgaaccatatttcgttcatcttcacttattctgattgatgattgtttcccaaatggtctagttggtaagttgaatatggataatgttgattctcttcttactccgacatcatctggatttcgatctggacgattgaaacgagtttctatcccatgaagatacatagaacaaaaatttaatgcctcactaattatatatcctttagcaatggaaccttcaggccgagctttgttctttacatattttttcaaatgacccatttccctataaaaggttatataattaatatatacattagtgcacatttttaaaattcattatttgttaaggtaacaaaaattttgttacctttcaattgaatacatccatcgcatttggacaggaccacctaacttggcttcctttggcaagtggaccgctagatgaatcatcacatcgaaaaaggcaggggggaaaatactttccatcttacaaagtgtgaacacgatgccttcttccaaatcatttaagtctttcacatacaatgtcttcgcacatagtttttgaaaaaataaggataattcagcaattacactcatcacttttttttttcaagtatggccttacacaaataggtagcaatatctgtaataatatatgacaatcgtgactttttaaaccagtaatcttcccatctttcataattatatttcgagacaagtttgctgcatatccatctggaaatttaacagactccaagaacttacaaatagtttgtcgttccttcatcgataatgtataacaagccgtaggtttcacccacttgttcccccgtttcttcatttgcaattgcttacgaattttcaaatcttgtaagtcaagtcgtgccttatcggtatccttacacttgccgtcgatgctaaacattgttccaaccacactgtcacatatatttttctcaatatgcatcacatccaaattatgccttagtttaagtttgggccagtatgctaactcccacaaaatacttttacgcctccaatttgttttattttgatagcctgcattcttcatctgattctgatcatcttttacaatatcaacatttttacccggcctacatttccacataccatctaatttagttaaaatttcatcacttgttaactcttgagggggatttcgtgtttcaattgtaccatcgtattccttatcattgcgccactgatgttcagcacacaaatatcgacgatgtcccatgtaagagatcttacccctaactcgaaatgaagatgtgtcatcctcacaaactggacatgccttatacccttgagtgctatagccggacacagtaccatatgcagggaaatcattaattgtccataacacagcagcacgcattgtaaaatatgttttatcaacaacatcaaaagttcttactcctttctcccataattcttttagttcttcaattaagggttgtaaatagacatctatgtccttacctggagcacgacgtccaggaataactgccatcattaagggattctcgtttcatgcatatccatggtggcatattatatggcattagtattactggccacatgctgtatgagtttgataaatcaccaaacggattaaacccatctgttgcaaatcccaacctaatgtttcgaggctctttggcaaaatcaggatattgcttatcgaaatctttccaagcctctgcatctgccggatgtctaagtacaccttcagtatccacacgtttttctttgtgccacctcatatctgctgcggtgtgtcttgacataaaaagtcgttgtaaacggggagttattggaaaataatgcatctttttatgtggtattttttttcctttagttccttggtactcatatctttcatgaccacatataggacaatttgtagcatctttattgtttttccagtacaaacaacaatcatccttacatacatctattgtttcgcactctaaaccaagaccactcaatattttcttaacctcataataagaatttgggattttgttatcatcaggaaatgcatccttaagaagctcaagaatcatgtcgaagcctttaatactcaagctagtcaatacttttatatgcattagcttaaccatgaaagtcaaacttgaaaactttgtacatccaggatacaattctttttctacttcatcaaataagttatggaagtttttccatttctccttatgacttgaatcctcaaaattctcagaagcattatgtgtaggaacttcttgagccaagtcttcaattgctgggatcatatcatcattgtcatcatggtcaatgtcattattattatcgccaatatcactgaaatcttcgacatcagtagcatcatcattatcatgatcactttcttctaaaatatcttccccgtgatgtacccagttaacatatcgagtataaaacccttttacgtagatatgacgctcaattgtctgtaagtcatgaaagtataaattcatacacataacacatgggcaccgaatcttattctcctcattcagatgactacttgataatctaatgaatttttgcaatcccttattgtacttggcagacaatctattgttattagaaatccaactcttatccatagcttgtttattccttttcagaggtgtgaggatgatgtgttacactagaaaaaaaaa

SEQ ID NO: 23067 - DNA, 2671 bp, Cannabis sativa
ctaatggcttgtactcactctggcatggttgataaagctactgatttattctcattaatgatagataaatacaagattgaaccatcaataaggcactatagttgtatggttgatgttttaggccaagctggatttgttgaagaagcagaaaatgtaatcttaagcatgccaataaaagcagatgccattatttgggggtcactgctttcagcttgtaggaagcatggaaacattgagatggcacaacgagcggccgagcaagtgattgagttggatcccggtgagagttcggcttatgtactaatgtcaaacctttatgctggttcaagccagtttgaggaagcaattgagcaaaggcttaacatgaaggagaaaatggtagagaaagaaccagggtgtagtcttattgaagtggatggacaagttcatgagtttgtagcttttggaaggacacatcctagagcaaaagagatctactcactattgaattagtaaggactgttaaactccttgtttataaattgtaaattcagattcacaatatactttgttaatataaagaaattttacatagtttcgtcctaaattttaatatctattttaaaggtgttcaaagtattaaagaagaatattaaatctttagattcacacttgtttaatacaatgaaagtggtagtataagaggtattatctaataagtgaagctagaaaatctactcagaaagctttatatattgctgaacagataacagagaacaacacagaataaaaacaccatcagtaaagagacatgggaaattcttgaaatcaaacttgagtctttgacatggttcggcatgaagcccaggagaagacctcaggagacatattaccattggtgagcaagttctgaggcatcccatataaatctgagacatctaagggatgatgacgaccattttgatagtgctgattctgcagggctgcagctacttcatcctcatccaacggtaagcgatcaaatgtggcgttcatgaacgatgcagccatgatcacaacagggcccgaggcaatgagcgagccaacaacgcatccacccacaacctggccctgagccccggccaagtagatggtcagtcctgtaatcccaggcggggctggaggaggcaggatcgaacccagcaaggagagaatctcaaacctgccatggagagttacgatggcaccagatgaggctggttgcctaagtgtgacattggttacacatccactgccactgagtatgcaaatgcctcgttgcttcctcctggcaaagttggctaagctctcactcacatcacaacctgagctcacttccatggcatgtgcccgaagtgcatttgcactgtcacgggtaacaatgatgggtggtttgggcttgtttttggagcctgctggtcttcctcgaggccgtctaatggattccctgtcggaagcagaagaaaccggtgtgactgcctttggtattttctgtgccatcagtaaggcctcaataccagatttgtggtggttagttttgtcaggttcttggctcctgtcaatggcagttttagacacaacagaagggacagcttgatcaacaccacctgccatttatccaactcgaaaggaacacaactttgttttttttttttcctttttcttttcttttttccttatttaaggaaattttagcagaaagatacagtgaggattgtgttgaggacaagcgtttaaatacaagtatttgtgccaataattatatcataagaacctgaacgaatgatttggaattaggagatggttaagtactaccaaatccaattgtttaatataatttaatgtattactctcactgcctacctttcaactgaattttccatgtcaattgtctttcccaacagataacccaaaatctaatatatattctacatgagataaatgatgcacaaagtacacatttaaagatttctttttaagtcttgaagctacctgcaccacccatccttgttttatctgaggaaaatttggtgataaaaccataaaaatagaatgaacaatagtactaaaaaagagacaggttatattttgcttgaatatggtcgtaaatgacttcaaaatatctatatagtagaaactaacttaagttagaaaactgttctatcacaaagctttcttcattgggaaaatttgaaatagaaagctattatctaatatcaaaaatcatgccccaatgtgaagtttcgtaagatacaacggggcagactctgcatgaataactcttccgattatgtacaattggacagagctatacacgaaaaaccatcacaagatcagtattgtattaaacacttagttaaaccccaaactcacttgaaaatccccatgaaaaaagaccgtaattaaataaaattaagatgctcagcggcggttttgctgccaaaattgctgcaatcggtataattgtttcaattgctcagacttaagatccgaagtgtcattgctcaaactgccaaagttgcgctgctgatgttcacgggtcattcctgcttgcgaacgatagaggtcagagtattctaaagactcatattgatgtgagggctgctgctgcgggacccgtcgatacccgggatattgctggttctgtccaagtgagctgttgtagtaagcactt

SEQ ID NO: 23068 - DNA, 4472 bp, Cannabis sativa
gtaagtatatatttatctacacaatacaatacaacttcttctattgattaattaagtgaaatcatgttctatgtgttaatattgctattgatccaactaaatatcggatcttatataatttaatataataacttttagagagtatcgctatccaatcgcaaaacgacatgtctaggggtgctacgtaccactggtgctcaatagcaatgcttatattaattgcttttttgtaacactaataataatttcatgccctttaaattctgaatttggttattatttattaaacttgtgttgtggcctatatttttgtagaaaagaagagagagaataaatgagaggctgagaatcttacagaatattgtccctaatggaacaaaggtatgttaattatataatatgattttgagtaataaattataaaagtgttaatgcatgcagaataagaattaatgagaaggtatttaattatttggttgtgaaattgcattaatgcaggtagatattagcacaatgcttgaggaagctgtccaatatgttaagttcttacaactccaaattaaggtaatatatataatatctttatatatagcataattatctcaatctatatatacacaaacaagtttattgttattattatttataattgattataattaatttgtgattaaataatggaataaaatttgtagcttttgagttctgatgatatgtggatgtacgctccaatcgcttacaatggaatggatatcagacttgatcatctcagacttgccatatgatcatatcataaaacaacaaaatgagatcgacacctatatataccacgctttaatttctgtttattcaaaagattatattgttatcactaaataattaaataaactatatataaatcttgtaaagaaaaatcagaaacaattcttttagttcatttattgttacggtggatctgatccctggggaaccccaatgccaaatttcaacatatcatatatatatgacaagtttttgagtttttttttataatgtcccataacatattaaaacatgaaattaattgattagtttttttatttcggctgctataaactgtctactttgcggggaagataatttagattttttttaataaaatacagatattacgtattggattggattgaaaattttaaaatttatacttatacggattgaatattaatttacatatacgcaaaagtaattgatttaattcaatccacacgatttaatgtgcaaaagtgtagatattcaaagtacaatctaaaatttgcaaagtacaaatttatgcacttgtgcagactggttttgattgaaaaatctaaaatctgtacttgtgcaaattgaatgttgatttacatatgtgcaaaagtaattgatccaattcaatttagacgattcaatgcaaataatcacacttatgcacattggattgaaatgaaaattttaatatttatactttgtgcgaattgtgtgttgatttacataagaaagtaactaatcaagtgagtttcttcctatctctgaagattataaataatttgacagcgtgatagctcttttgagaatgcagaatccgatctctaaatagtaatttggatcaactatttataagaaaaaatatgtcaaagatattacattttattactgaataaataattgatgttagattgattcaataccacaaaatcatcaaacctacttaattcccgcaatttcatcattgtaggcgggttgattaacctatttacaaggaattcacttgaaggaatgaatttgggcatcttttctcacgagggtcactagtcggacattccatttgcctagtacttttctagttgctcagcaagacatatatcgtgtttcgttcagcacttgtacagtgctggaaggccctagcctgtgcatgctctgcttaattgacacctttcgagtagattataagtccacccctcgtctgtccaatcctggctatgctcgccacatgtcacatagattcacaccacatcatcagggagatttttgggataacttttaccccccaaattcgcgtggcgacttctggaggcacgacgactttgttggtttcttcctaatttgcacagtcaagtgacgtgtggccttactcggatggtccatttagtctgggcatcgtacctacccaaggcaaattttttccttgtcctttcaaatcttttgccatgattattttccattgaaaatagcacccttagagatagtgtccgatagttacaaattttctcaagtagtttttaatgcaaaatgaggcttttagattttgggggtaaaaaaccaatcatttcaaatttaattcccaaaaacttttctcacactctcatttttcatataaaattaaaagggaaaatcatttggaacggttgtcatccttgaaatttcaaagcaaaaggagagttttcttcgagttcttgagtcttcttctcagattgattgttgtgcagaccaattcttcaaggctttttctttaaaccatcaggtcaaacatggagtaagctccctcttcttttttctcttaaatttttacgattttgcgtgtattttcatatgagcctgaatctgtattttgtaaaaaatgcttgaatgttcttcgtttgtgaattgttgaattcttatttgctcggatacaatgttataatgtcatctgttagggaatattctggctcggtcttttgatacacttagtttctagtaagctttttatcaatttgaaacacttaagaaattttagggttttgaaaaccctaaaatcctttttccattcaaagattttataaagaagatgaaatcttcttattttgattcgaacattttcactggtgagagtcggagcttacagaaaccatgcccctctagaagaaatctaataagcctcaccccctatggcaatctcctccatccaggctgacgacgaaaaggctaaataattttcgttttagtgaagtcgttatttttcttcctcgcgaggatcaactggctgacagactcgggcaaggcctttgtgcatggtctgggccctatatcgagcaaggtgttattcttcccctccacccttacttccaaagggtagccaattattacaatatctacccgcgtgcagattaacccaaaaggtttgaagtacttgtcgacattgtacatactatacgcctaacaaggttggggggagccctctccccatgagatcaattggttttttgatctcaaatccaacccccacaactacaattcaaggtacttttacttttccctcttgagctacctgtggctcgaagcacataacgaagataggaggctaaactcaaaattactttataacaagggacgttgaagctaaccaccattcgttccaaattgttgggtcattcctccgcccattgttcaccttggacttgaggagtaaggcccgccagatagtaatactttccaacgaggccagggacatctccaacttggccaccgaggaaaactttcgcaagtttaggctctatccatccacaaagggaaaaagaaaatccaaaaaggccaaagggaagtcctctgtagctcaagtagcagtaaatatagtaaaggttgccttaagagatcctacccctcctacccaacaaggttgttcaaacataaggataaacagagccttggttgagaggaagcacaatctcctatgcccattgtcaagggcaaatggaagaaagtggtggatgaagagccgacccacgactcaagttttgtaccaatgctttcaatttcaactcaacactaattaactaacttgaaaaataccgaattggactgcatccaaccccgagagtaaaatatgaagagatcattattaagttccaatcctattagatccattactaatgtagataatatagtcttaaatgtgcatctggttccataatttacgattaataagaaaaaagaaaagaactccctcaatcaacaacaattgtgatcctagcaacaaacaaaaaataaccaatagcgataacaagaaattcaagctgtcctaaaagtacaaagtgggtaaattacagaactgcattcaaatatgaaaacatgttccacagaaatgaaattctggatattacttaacttcctaaccctttgaaatcttccacttcaaaccacacaaaatcaaatcccttccttcaactgtcgtcctctgactctcgctgtagtgcataatatagtcctaataaacaacgggcatgttgaaatctgcattaatttattatccaaatatattacactcatctatacgacaacactcggagaatcaaaattctgactagatgaagaaaggctgtttctattcatgatacacatccagattttcatcataaaggagaattctttctcatgcgtgattttggttgacgtggtttggaacttctccttggctgtcc

SEQ ID NO: 23069 - DNA, 6964 bp, Cannabis sativa
ttaatcttttctcaatgatgcttcagcttcagcaaaatttgttctgttcactgttcttgggtctgcacctggcattcaaccgaatccacaagcagcttctgaagcagagaaaattctttcatcctctctgtcaaaactaaagagtagagaccatttggcattggggaaggccagtacttgctatattacaaacgttgatttttttttcttccctatagttattgtctttctctctctgattattcgtcataattggatttctttaatattcctatcaaacacacacatatatatatagagagagatagatatgcatatacaggccagtgatttccttgaccgagttccttacttgggaaattttactacgctttctataacaaagttaaaaacgtgagttcaccattgacaacagtgcgcacattcaattcatctcacccctaaagagcttctaagagctgccaagattaaataacatttctccttaatttttgtttacttttttttttggtttattataaataaaataaattgtaatatatatcataatagaatttcttggctcatgttccacgtgacacgactcgttgtgtagtgtccaaaaatggcttggacggactcataatatattatatatatggtttagctttttagaatttctccgtttagttttaaaatagtatgaaaggaatatatgcttgtgggcacactttttatgctcaaagaaagcttctaatgcttatattgatatgtttgtgttcattgcagtgagcttcatcagccgaagaaagacgatcattgaaagcattgagaacacaagcattaactcaaaagctaagtagcttttctctgtccgtgcgtactttgaagaagcctgtgcaacaaaggttaagaggaaacatgtaagcttctccctaaagttacatagtataagttttagtttttgtcttttcaacactgtatttcttctaatgcaatgcaccatatattatcatgtagtgcacaaattaggaagcttaaattcaatatacaagaaagataatagtagattccaacaattattgtaactcaatttctaattagcttgtcactttttaaattgaaataggtacgcacatatgctcttttaatcatgtgcttatttatttaataagcaagtatgcttatttatttaattaaactagtttaagtaatcattaattcaatttaagtttgccacatatcaacccccacagtgccaaaccagttttctgtttgccacgtaggacaaaaactacgggattgtccaaaactcaataacgtggataattcgggggaatgtttaacaaacagaaaagtttaggagcatgatttgaaattgtaataatctaggagagaaaatcctttttattctaaattttattcaaatgttttcattattctcaaccaaccaatgtataacccaagaaggggaaagggaaaatggtggatctggactctagactctagagagtccactgtactgcctgagaaggctcatctacatctaactaggaactgatttgctaaatattgctacggaggaaattgtgtgcgcttccaccatttaatcacattgtttttgtgttcagcacacaaaaatgggaggaagaggagtaataggagacaaatggtccatgagggttctctgggcatgtgcaattggaagtgcatttagtacgtacaatttcattcattttttttgtactatccatttcaaatttacaatacttttcttttatttcttattgatactatctcatgatcacattcttatagtctatacactctttgctttttattttttttgccttcacaaacttgactggctgatagtgatggttgattattaatgtatataggcttgtacttggttgctgctgaaaggcagttgcaaaacagacaacgaatgctggcggaaagtttagaagccatggaattagagtccggggatggcgatgagtgacattttattctgatgaaatttggagaccaaaactagataaagacgtttctctctatgggagtacaatgtttatatattttcctgcttccttaacaaaattccacacctttattttattgataggaatcgtcaagtacaagtaaaatggaaaaatacattgacggaatttcttccatccataatgagaatgagaataaaattttaagtttagagaaattacctttttcactaaaaaaatttcaaagactgattcaaacacaggttatgcttatgataagcctccaatataccaagtatataaggagacagctaaaagataatttgagcagtattggagtattagttactgttgttattcttttatttgtatttcctttattgattagtcctttgtccagctggcaattgttttaattgttaggctgagttgtcttgttttcattagtccaagttcgcattaggtttttttttttttttttttttctaagaaatgttggcattagttaagtgtaagtaatgtctataaatattgaagagtttactcttgtggagagcttcaccctcttgaaaggtgaaaaataggagattgtagccagctcgaataagagatatcaacgttagagagtaagagttcttttatcttattatagctcaactttcttaaatccagattgcaatacatagagacaatactaactgaaatgcagtaacaaacacagtaatatttaactactgacaaagtatataaaaccattcacatcatttggtgctacaagggaaaaattaagaaactataactggttttcaataccttgtttgatagccaaaattagaaaaatttgaatgacatagtttggtaccttagtattttgaattggaactattaaaagcaaaatgacccgtcaagttactataatatacttcagattatctaaaataacatgtaaggtgtgcttattgggagtaatggaattgaattcatgggtactctatgtattttgtttgattgtgtttaaagtattgaaatgtcatatgaaatgacttttactaaaaaaaaatgatttttacactattttagtagaataactattttattttaatagaatgtaattggtagtcgcattctcacgcctccctactatgaagacaaggttgtattgtgtggaagtttgcaaaaaagttgttgtttctctatcaaggcagcttatatatgtgtgatcagaagcatagatttgggtaacgatctgtcgtaagggaatgtggcgcctcacaggtttgcttgtgaggtttggccaacaacttgaaagcaacaacaatcaatcatacaaaaaaaataatgaacactagagggataaccaaagaaaagctctctccatcaaaaaagggatctttacaaccaaaaaaaaaaaaaaaaaaaacaactaacatttataaaggaaattgcttttgtttaaaggtagccaacaaatatccaaaaagcataaagcattaaaattaattaaatcatatacatttaggagagtttccttacggaaagtaatgcagcctacttgggcgtgttccatcaatttgtggtttgctcatttggggtgatatcaccatgaccaaaacccatctgctcactaccttgctcaatattcataccacttgtaccccgacactttctctccttattggatcgcttgcaatcagcgtgctacaagcaggtacaacatcccgagaaataatttccaagcagctcatgcagcttgcacccaactacttgtcctgaaaatactcgagacgtagcaccctcccccactcaagcttgcgacgcccccgtcgcatcaccatccttgaactgaaggatgtgatctttaaattgtcatagtagggactccaattcctaacttgcctcagcatcaagcaattttttacacttcaccaagttttcggtgtattgagggattctcttctttttgacttcccgtaaagacagaatgcatttgacttccttgtcataggaagtcaccactacagtcagagcgcactttgacactcccctgaaagggtcttcctcgtcattgtggtatggcctcatcatacttacatgaatacagggtggatcttcaactgttgtggcagctgaagcttatatgctacttcgcctatccttttaagaactagacaaggccctttgtacttgcgcaccagcgccttgtgaaactttcgtaatgttttgaactgttacgacataatctttactagtactaagtcaccttttcgaaactcaagaaattttcttttcttgtcagcccattgtttcatccatttttgagctctcattagttgagccctcgccaactcagcttgctcactccagttcttggcaaacttgaatgcagcaaggctctgcccttcatactttgttgctgaagcatgaggtgtttggggctagaaccccatgattagcttgaatggactcttatttgtagactcacttctctaaagattgtaggaaaattgggcaatgtcaaacagctttgcccaatctttctggtttacacttacgtagtgcctcagatataactcaatcaatgcattcaccttttttgtctgtccatcactttgaggatggaatgaggttgagaaattcatataagtatcgaggagttttaacaactccgtccgaaatcggccagtaaactgcagatctcgatcactgattatgctcaaggacaaccacccaaaacttcactatgtgcttaaggaataactgtgcagtcacttttgctgtgtagtctatcgggcaacaatgaaagtggaatacttattgaattgatcaacaaccaccacgataataacacagccatctgactttgggaagccagtaatgaagtccatggagacactctcccatggtcagctcaaggtggtcaagggaacaagcaaaccaacaagcgcttgctgaagaggtttgtcttgttaacaaacaaggtaggtgcgaatgtaagcttccacaacttctctgagttgtggccagtaatacatcacctttataagtgccaaggtgcgcttcattctaggatatcctgcccacagcgagtcctgtcaatccttgataatctccttcattagaccagccacctttggtacatagaggcaactgccttttgtatacaacaaccaccttcatatagaatctctttgactttccctccttagccatagtaactagggtctggcctagtggatcactagccaatcccttccgtatcctttctgttagtggacatagtggcttgctcaagattgccaagttggccctccagctcaaagcatcagcaacaacattcattttcctaggcttgtactctagtttgtagtcaaaatcagctagaaaatcttgccaccgggcctacttcggactcaacttcttctaagtctgaaagtagcttgttgctatgttattagtcatgaccacaaaggtacatcccaaaaggtagtgccgccgtactctcagacaccggatgatggcagtcatctccttctcctgaacaatataccttctttctctctcattcagtttttgacttttgaatgcaacagggtggccatcttgcataagtaccccacctatggaaaaatcagacgcatctatttgcacctcgaatggctttgaacaatcagatagaaacatcacaggttctttgcaaactgctgccttcatgtcttcaaacgccctttagcaggaggcgtcccaatcccaatgtttattctttttcaacagttcagaaagaggtgctgctcttgcagagcagctcttgatgaaccgctagtagtagttgactaggccgagaaatgatcataactcagttcgttggttctttccagtattggatagcacgtaccttctccacttccatcatcagaagaagtccatctctgattttgtgaccaaaaacatcacttctcttctagtaaacgtatatttctccctcctcatatagagagaattttccctaaaagcagtgaacaccagcttcaagtgttccacatgctccgccaaagtgttgctgtaaatcactatgtcatccaaataaaccactacgaacacgtcaatgaaggcatggaatacttcattcatcaaagtgcagaaagttgtaggggcattggcgaggccaaaaggcatcaccaaaaattgataagagccatatcgagtcacacacgtggtctttggctcatctccctcctgcatcttcacataatgataccctgatcttaagtccagcttggtgaaaaaatgagcatgtcccaactggtcaaataagttagtaatgagcgaaatggggtatcggttcttaatagtgatctgattcaaggcacgatagtctatgcacatccttagactaccatcctttttcttttgaaataacactgatgcaccaaagggtgctttagaagcttccataataccagcatcaagcatctccttcaactgatttcaaagctcagtaagctctagtggtgacatatggtaagcacatatagatggtggcttcacgccaagctccagttcaatctcgtggtccacaccacgtcgaggcggtaatccttttggcagcgcatcaggcattacctcctcaaactcattgaggacagcttgtacctcattgagttccactactagaggggctagtggctcatcgtcgaactcactcagtatggctaggaagttgatacatttttttgttcatcccccccaaactgcagtgcagataaagaccttgtctcaacatcctgagccttcacaattggcactatgacaggttgtgcaccgtccgttatgcacattgaattggaatgagaaatgaggatcgcctttgcttggttcaggaattccattcctaggacagctttatagttgtccatgttaacagtagtccaatttgttcaaccaacccctgcaccaaggctagtctcaacatcgtttgcaacacc

SEQ ID NO: 23070 - DNA, 6450 bp, Cannabis sativa
tatttatgctgacgtggcaatcggtatttgtgcaaataattttcttaaaggtatttttataaataaaatcaatattaggtataatattgaaaagacccctttttctaaagtgtttggtaaaagttatatattttgaaaaataaatctctagatagctagacacatttactctttcgtcattttacaaaaattacattattggaaagcaagtcttaacattgaacatatataaagtgcctaatttttattttgtagtaaagatcttatttaaaaaaaaatacatatatctgatttaacaatatttgtctttttatatatttagaatgctccggccgacgtgtttgcgactggatcaggccacataaatccggcattagcacaaaatccaggtctaatctacgacctgacaccagaggattacataccatatctttgtggactgaactattcagatgtacaagtctcaatcatcactgacgaattcgttaagtgcaaacaaatcaaacccattttagaagcagaactcaattacccttcttttgctctaactatcgatcccaaatcctctgctcctcaaacctacacaagaacagtcaccaatgttggtgaggctaactctgtctacacttccgtcgttttcgacccagaaggaactaaaataactgtcacccctaataagctcatattcacacaattgaatcagaagcttaagtatacaatcacggttactgcaactgctaatgctgctacttctaacaaggatttctctcagggatatttgagatgggtttctgatcataaacacgttgttagaagcccaatttctgttactttttcgtcgtgaaatatttggagatcaagggaaggagaaaaaaaattctcaagatgataagtattgatatataataataataattgcaagaatatgttttatatagtttctcccatttaaagttattaataaattatttgacgaggtagttatattctagagaggatacttgtattgggtcgatgaagaaatttgcacccaacttatgtttttgaaaatctttcaataatctttatattgatatttacattttattattattattattttattagcttgttaacacatcatccattcctcttgtagaatgtgatgtaataagtaactatggttttatttgtcatttttgatgaaataaagattgcaaatttggttgagatttcaatattaagtgtttgttcgtgtatttgtatatggatggattttaatggcctgataaacaataaactggcattacacatatcttttaagtattttttataaattacaattacaatttaaattcattattattacacagatttaaaaaaaatatttttttttattatcatttattttactcaattcacatatctaaaaaacaaaaaaaatcgtttttttaaataataaaatagaaataatgtttatgttacttaaaaattactattgtgatgctattatttattgtagttactaaaaaaaatatatttttattattatttttgtaaaaaaaagtataagatatttttaaaaaaattgaaaattattataaaattaaaagtattaggattaaattaaaattatgattaaaaaccattataaataatattatatattttttttaataaatagtatttaaattaaatatttttaaataaaactataaaagatgatattgttcattaaataacattagaaaaaaaattatataactaaaaatatacataaccactttaaatttactaattaaaattgagtttggtgatcatggttaagtaaaaatatacttaaccacattaaatatacataactaaaaatataatggcctcacaaacaataaactcgcattacacaatacacatatcttttaagtatttttttataaattacaatttaaactcattacatatatttaaaaaatatattttttattgtcatttattttactcaatttacatatcttagaaaaaaaatcttttttctaaataataaaatagatataatatttatgtttcttaaaaattactattgcgatactattatttattataattactaaaaaatatatttttattattatttttgtaaaaaaaaaaagtgtaaaatattttttaaaaaaattaaaaattattataaaattaaaagtatattacgattaaattaaaattataattaaaaaccaattataaataatattatgtttttttataaatagtacttaaattaaattaaatattttttaataaaagatgatattgttcattaaataacattaaaaaaaaataattatataactaaaaatatacaatcaaaataaaataaaaattataattaaatatatgtgtattgcatataatattaacggatgaataagtatttatgcagcatattatatgctgtagatgtgatgtgataaaattcaaaactcaagaaacttgatgtggtgattcattgaccatccatataaagttaagattatttttattaaatttttaataaaattaaagctgaattacgttttatagggagagatgatgatcaagagaaaactaaatagagagatatagaaaagacaatgagctaaggaacctatacggtatatttctattattcacacttataaaattatagtggatatatgatatgtccactgagagggaaaagaatcaataatatatcaactatgttttcataatgaaatagttcatgattccctttctttggtgtctctgtcttatatgattgtgattagtacataaaataatagcaagcagaacggcacctcgcaggaaaatatagaaatacattaatatatacaacaaaaatgggccattaaaaattacaaaatactactcattgtatcaaggacaaacatcccaaaaatacattttattcagaagatttatcgtaagaaatcaaagacagttcgcaatcaatgtgaaaatcaatacaaatacaacccaagtccaaaccttaaactccaaactaattgctgtctaacataaattatatcgctgccttgttccaactgtaacaaagtctcatttgctttttgttttgatagtactgatctccataggtttcaccatgcatgcagcccctttattatatatataaataacaatgaatattgtttgaatatatacacttcaaattaacactataatttgtaaaaaaatatggagattaaacgacaatggacgatgttggatcactttgtctaccttcttcctttaatgtcaattgtcgttttcaatggttcagctgctctagctgaagaagagaccttaaacacatacattgttcacgtcaaaaagccacaacactacaatctatttgatcattcaactaaggatttgaacacttggtacgactcatttttaccatctacaactactactactactacaacctcaagctcaaaccagcacacacgtttggttcacacataccataatgttgccaccgggttcgcagctagattgacggctgaggaggccaaagccttggcagccaaagacggcatcctttcagctaaaccacaacaaatcttttctttacacaccactcgtactcctacctttttgggacttcgccaagggttaggattgtggaaagagtccaaattaggccaaggtgtcattgtaggggttcttgacactggaatcttccccaaccatccttccttcagcgacgaaggagtcccacctccaccaccaaaatggaaaggcacgtgcgagttttctagcggtgtgtgtaacaacaaactgattggtgctaagaattttgttaccgattcaaaaacaggggtcgttgaaagccaacctccttttgatgaggaaggacatgggactcacacatctagtacagctacagggaacttcgtccctggagctagtgtgtacggaaatgccaatggcacagctgttggtatagcgccatacgctcatttggcgatgtacagagtatgcagtgaagcaggttgtgcagaatctgacattttggctgcgcttgatgctgctgtggctgatggcgtcgatgttctttctctctcccttggcggtggctcagctcctttctttgctgactctgtagctgttggtgccttcgcagccatccgaaaaggtatttttgtaagctgctcggcagggaacgaaggtcctgattacttcactctctcgaacgaagctccttggattctaacagtcggagctagcaccatagaccgaaaaattaaagccaatgttaaactcggaaatggagaagaactcgagggagagtctctattccagccaaaggatttcgaccaaacaaaattgttaccacttgtctactcgggagctagtggtaacgagtccgctgctttttgtgatgtgggctcacttcaaagtgaagttgtagcaggaaaaattgtggtttgtgaaagaggtggtggcgtagcaagaatcgacaaaggtgtagaagtgaagagagctggcggcgctgccatgattctgttgaaccaaaagccagatgggttcactactttagctgacgctcatgttcttccagctagtaatgttgccttcgtctcttcattgaagattaaagcttatataaactcaacattatcaccaatggctacaatcttgtttaaaggaactgtgatcggagatttgcatgctccatcagtgtcttcattctcgtcgagaggtccaagtggggctagtccttcaatcttgaaaccagacattgtaggacccggtgttagtatcctagctgcatggccgatttcggtagacaatagttcaaccgtaccgtttaacataatttcaggtacttctatgtcttgcccacatcttagtggtattggagctctgctgaagagttctcaccctgattggtctccagccgccattaaatctgccattctcacaactgctgacgtcaacaacatcggtggaaatcccattttggacgaaacggtattaatactagtatttgatagcacttaagtactacaaataccataacttatataaacaacactaaacgtctcaatttttataagaattgtttagagataattgatgaaacaatggacaatgtacttaattaacacaatcagtactaaatctattttttttttattgtagtgattagttaattcaagtttactaattacaaagttctttcaattaggcttcctcagcagacattttcgccaccggggcaggccatgtaaacccctccaaagcaaacaatccaggtcttatatatgacattgcaccagaagattacataccttatctttgtggattgaactatacagacgatcaagtctctctcatctcccaacaagcagtgaaatgttctcaagtgacaagtataccagaatatgagctgaactatcccaccatttccgtaattcttagccaataccctctgaactttacaaggatcgtgactaatgtgggtgagcctaactcaacttatactgtagagtatgttacaccggctggaactaaaattagcatcgaccctccaacacttagtttcacagaagtgaaccagaagcttgaatattctattagtattttccctgaagacaagcctgggatcattgacaagggcttttctcaaggatatttgagatgggtttctgctaagtactctgttagaagccaaatatctatcatatttgggatttgaatctttttctctttgtagaaaactaagaatagaataactgagaagcccattataggagctagtctaatagagtcattacctaccatttatgtacttaagatttggttttgaccaaataagaagtaccagaaatgttttagcgtttatttctataattgttggaagtaataaataaatgaaaatgtttgacggcattttacattttagtaattgaaaataattacaatactgcatatctcccacgattagcaaatcacaaagggcctgaaaaaaaaaatcaagttattttagatattttaacttgttttacttgaacatgaactattgaattagcctattaacatttttttcgtaatgttaacacaagactgattaacttctcatgattatatatagtcttatattaatcaaaaaatatatatatagtctttttttttttgaatgaatatatatatatatatagtcttaatcctccaaatatatctagttttagtgtcttgaaagagttaataacactttccagttccctgtgtagcacatctagaaatcaatcttcagtcctccttttcatgataatatgatgctatcaagataatagccttaggttgtttagagtgtagtaccttaagatgtgactatggacttccaaagctccaatgttacaaaacaaaacaagtttatttgtaggaataaactagctagagaagacagcaaagaaagatttacaa

SEQ ID NO: 23071 - DNA, 5455 bp, Cannabis sativa
attatgtctagaaaaacaaatctgtaccagattcttatcatgtacataaaaaacatatcaatagtaataaaaataaacataagagagatgaaattgataaaaagaatatatatacaaaaataaagagaaacctcactttcttcctggtagtggttcaagacgaaaatacctgagaaaaaagaagttaagacaactaagaaactctgccttgaaaacaatagcagctttaatccagattgttcctaccacaatttctacaattcctttaatccagaccatatatagataaataccatgccatagttttaaacttctgtatatgtatacctcagctttatgcaaatcccaatattaaagagggcaaagtttaaaatgatggtctagaaatctaggcaacaagtgatttatgccgacaggatagcttgtataaattacagtaataagagtcattaagacgccacaacattgaaagaaccagtatgcttaagcagaatcccacagataagaaatctgattatcaaaaaggtgtaacaagtctcgaaagcttgagagctttttgctattctttgacctttttctgcacatatgatattctaaagtccaaaatatttggtgacaagttaaccaacttgcttatcattatttgtaagaaaattaagtgttaacccaaaacaatatggggtttgttaatcaattcactgcataaatttaagtaggattgcttaggagtagagaagcactaaacattagaaacttgatataaagagattctcactcatgatctagagcttgtgctgctgtaatacgctttcgtggatcatatctgcataataatatgcagcaaatgtaaattactgtatgggattgcaaatcatcatatctgaatatcaattagtaataaataatatgaccaaaatgagattagaatcttcaaattttgtatgcaccataggtttcttttgttttataactgagcagattgaatttccctagcagtgtcacagaagaaactagatttatgtgatacatttgtacagatttatgtcattggtattagctgttagagtcatgctactgtgagacatgcaaacatacatttcatatatgccaaaaagagcacattgaattcataacagtttttatatactttataatctttaaccaccgaataggttttataaagtgccttaaagacaaaattatatctgcgggtgatttgatgattttcatggaaattgccaaacgcaaagtcccacccaatacttgcgataaagatcaatcaggttctccaacattctcaaacatacactgtcctagttgtcaaatgtcaagcaacaaagtgatgatggtaaccatattttcctcttatttttttttctctttaatgatggcacactatcatgaagaaacaagacggaaataagaacaaggaatacccccacagcaacaataataactaaataaaaagataacaaaagtaaagcctaaatttaatgagacaagttgtaaaataaatataattccgtacttcaaaattggagtgtcaataattcattttatcagtcctaaacaaaatctaaagtccaaccaaactgtggaagtgatctgcgatgtgatttcaataaagcaaaagaaagaaacaataattcagctttaattgtggttttgactcttacaaggttagtttggaaaatatgattcctgagaaaattataggtttgtagaaattgatttttactggaaagacaaacaatgtgtctatcaaagctactgagcactcacatcagatgctttaaaatagagattctctaaaataagatataaactaaaaacacgctacatcagatgctctaaactcgttctttattttaaagaagatctaaactcgttctttattttaaagcttctttaaaattcaatgtttatgctctacatttatacaactctatttattgctctaaacatattatattaattgtctgagattttaatttttctttttatatggggatatgtgtaaatattaacattatatatttcaaatggataaaatatattaaatttgaaaaaattagagtttcgatgatgtattttaaagaagctgatatatggtgtaatgtaaaacttaagggaaaaaaaatagagttttggtgatgtattttgaaggatagagtagaaaagctattgggagtgcttttgtggaaacttcatacttattatggttggacaataataaaaagattttttaaaacatttctcaggccaatgaacataggaaagaatgaatgggtatttctccttcaaggattttttttcttcttttctactatgaaataaatttgactataaaagtaacaaatataaaactaatttttccttgtgcatatttagtgttgaggacatcttgctaagttgaatttgtaactttctcttcttggttaaatgaaaagtttatgctttaatcagtaaacattaataacaagatgtcctctacaacaacaataataataacaatataaataataatatatgaagcccactattgttacaatgtacaaagttcataaatcaatgaacaaacaatccactaacatacaaatataaaatgtagttcatgcaatttaaagagatatacatactcaagcatcttagataagaggtcaaacgcaggactttttggagagatgtggacaaaaccatgaagcccatgattgtcactgtaaaaagaatacgcagaaagcaaaacaaaacatgaataaaatcagaacacggcaaaagagaggtttgtaaaggatggtcacagtgaagaataaataaattatcttttacggtgaccactataaacagtatgttcaaaatattatatgtatcaaaaacatactacttgtggccttgaatatgctgtaaatcattttgccaatgcggaagatttgcaagtgttggccacttctctatagtgggatgacctgatgaaataacaatatacaataacgatcctaaacatgaagggaacaaataagagtttattagtctgaaataagtacctaagaccttgaatatcttgtcaagttgatcaagctgaaaaaaaaaaattaaataaatctcatgagtacatcactatatcaaaacatcaaagtcggttaaggacactgagaaaagaaagaagacctgaaacggatttggggtagctttgacttcagctccttgaaacagtggcttcaaagtcaaaagctcagcaaaaatgcatccaacagcccacatatctaaataaagatatagtgtttatttagtgcaacactagaagcctttatttctttgatatattttagaatccaacatacaggaaattctatatgcacaaatgcacaagctacacatgggtgtttttgtgtgtgtagctgataaagcatagcacaaacaaaaatgttaagactagagcaaataacaactatcttttaagtcaattttgtatctagtatctagtatcttgctgttatgcttgctgtatatgcctgctaataataaaaatgaaatttggtgttgagaggtaccaacagcacttgtataatgcttcgccccaaggagcagctctggtgcacgataccaaatggttaccacaacctgcaagtagcacaataacaacaaagaaaaattatatattgtattcccattaataagattatctaaaaaggaacagtaaatgacattttatgttcattttccacaatagatgttgaaatggacattagctttcactaacagaaaattgacattaatacaaacagcacaagtattacaagcagaaaacttgtacaaaacttaccccattttcagataatggcttcaatggagcttgatatactctcgcaagtccaaaatcagcaatcttaacaactccctgctcctcgccgtcacccataacctgatcacaaaagcatgtaaaactcaacagcaatttacataggtgaaaacacactagcataactgatactccatgtaggaaacgcatctcatagtgaaagcatatttttccttgcacaaaagactaggaaaaatcttcttaaagagcgtagcgtaccaagatattagaaggcttcagatcacgatgaatgatccaattactgcagcaacagttccaatacataaaatgatgaaagatcaagaacattacaattaaattaaattaaacctgtttgccactaaccaaaacatacctgtgaagataatttaatccattaagcagttgccagagcaatgactttacagtgtactgattaatagcatgattaaccttgtcgcgatggtgtctaatgatttcctgcaaatttatggatttgaatatgaagctgcaatagaagctcgctcttcaactaaatataaaaatttaaaaagtaatactaacaaaaaaatagcaaaaggtaaaaacttcccctagtttaatgcaataaagaaaagtaatggataccacaactcacatagaggtcatgctcagcataatcaaaagccagataaagagacatatcagtatggttgatatgaacattcaccagctttacgacattctcatgagtaatctcccgcaataactgtacaatcaaaattctttgtgattattttaaatatatcagaaccaaaaaccctaaccatctgcttcgcttccatgaaacgaagaacgaaataaaaaaaagataaccaaaccctaatgaaaacaagtatgtagatgattcggtaagaaatgaagagccaagaccataatttctcgaatggcggtgggcgaaactccatccccgtctttggactgcttgaattttttaatggctatggattttccgcgattgctaggagtcttggtacgggcaagaaaaaccaggccataagttccctccccgatcttcccaatcaaatcgtactgaagcaaccactcaggcttgttgctgctattactgtttccaccattgtggttggaatttccagagctggcgagacctctgttgccgccatctcccatggctgccgagctcaaagctcaattttcccttgagcgggttttctgtccctgggtatctaactcgtcacaccaacgaaaggacttcgaatcatttggacaataatcattaaattaaattaaattcttatgtttatatcagattcccgttcctaaacgtttttaaaaagagaaatgtcatttttttttaataaatattataaaatatcgctcaaggttgagaacttgagatacttcatcgtagtataaagcacatataagtgactcgtagtaaaggtgttcaacaaaatttacaaattgcttaacttaataaattgctcaaatcaaactgataaaagtacaacataaaataatacaataaaaattcaaattgcctaataaatatattgggtggcttataaattattctaaactgtccaattaactcgaataaaccaaattaaatcgatt

SEQ ID NO: 23072 - DNA, 1442 bp, Cannabis sativa
ttatatttctgatgggtgaaatttgaaggtctgcatgtactataactatacatttacattcttatcaaaacttttacttataattttttcaaatatagaaaaatatataaaatggactaaaacatgtatgcaatagaagattattatttattaccttttttaatatagggaaacacatgtgtttcttgattaacattcccaatgagaaaggaagtacatacaaaaggttgacaatatcaacatcttgtccttcttcaaatctcaattcaatgaatttcttaatctttggtgtttcatccagcttagaaatttcattttttgatatccacaactctgccttttcttctattgtattcctctcatattttttgacacccaatattttgttcacccaagctgcaaactataaattaatattcaaaatgatcaatactatagtaaagtatatataatcacaacaaaaagaaattaattatgtttactgacaactttttagtcataacatatatttattacgattaaatatgaattttagtcacaacaaaaaattatttgtaacttaatatttagatacatagtatcactaatttaattttactcacaataactattgtgactaaaaatacatttaatcacggaccttttagtcacaacatataaaaataacaatttataattaattacaattttttcatgacttttaattataaattttgttgtgactaaaattaaaactttttgtaatgaatagatcatagaactaaaaattattgtctagtatagctactatataaatatatatatacatatatatatactagggaacaaaaccgcgcttcgcgcggttgtctaatttttgtaatatttttatattttgattattttttttaacttattgagtaatgtaatttaaattaaaatataattttttgatgtgtgtaatatattataaaaataaaataaaattttaagagtagaaatgtaattttctatgtattgtttgtaatgtagaaaaataggaattttgtgacgaatattaaaaacagtggaatttataaaaaaagttacatatatttttataataaaataaatataaaaaataattattttaagtttaaaattggatttgactgatgatttaattctaaaatataataggcatcaattatttattttataaaaaaaaaaaaaaatcattgattatttgtaattttttatttttatttaataaataattatataaaaatattgtaaaaataagtgcaatttatttttaaatattgaaatgaactaaaaatgaaattattcctttaacaaatatcataagctagaatatgtctactggtaaaaatatatatatatatgaacgatataattacatcatcatttagtttacatacttaattttttattcatgatgtgattaaaaaaaatatgtttgt

SEQ ID NO: 23073 - DNA, 2991 bp, Cannabis sativa
aagttgaaaaaagccatataaaggggtccataattaaatatgccatatttatcataaaaggtttaaaaaaaccatataccacgtaaattctacaatttgaaatgggatatgtgtgtaaccaatcatccaatgaggcattactttgttcaatatggtaaccaaacttggatcatagaccataaaaacatggacaacttacaaaaatactataaaatgtgaaaattttgcaaaaataatgtaacactgagatttttacatttttattgtatcaactttacaaaaatattgtatttaaagttttaaaattacgaaaataccagtaaaataaaaaacaactcaaaaacaattaaaaaaacaaccctataacaacttaacaaataactataaaacaaaaatataattacaaaacaagaaaaatgacaaagcattgacctaattgctctaagtgtgtaatgcattactctaagtgtggggatttaggtatggctcggttagttttcgaagaagaagaatgttgttccgtggacatcgatgatagcttgacttgctatgcatggttatggtgttgaagctatatatagagctctttcataagatggaagattctggaattaaggctgatgggttagctagtttcatttgggttttgtatgcttgtagtagtcatgccggtttgattgaagaagggtgtagatatttcttgatcgatgatgagatatttcgatatagaacctactattgaacattatggttgtatggtaattgatctttatgcatgagagagctggtaagtttggttgtgatatgccaatttcaccgaatgacatcatttggaggacttttttaggggcatggtaattcgatcttgacaattctagaggtggtgaatggtgatcatgttcttattttgtcgaatgtatgtatatgccaaatgggaagatgttgcttcggttagaagaagaggggagaaggaagattcagtgatgagtaggcatagtgagaaactagctaggtgtagcttttgggatgtatagctcgattaagacaaggaaatgttgttactacgaattgtgaagaatttgtagagattgtcatgttgtgatgatgaagcttatttctaaggtttatggattggaaatagtggtcagagatagaagccgattcgtcgaaaccaactgttgacactgccaagaacattatgaaagtgtccatgattaaacagattcagagattcttttgaagaagccaattttgatagagtatagttaaatctgttatttgttcactgataaaataataataataataatttttatttttatgttttataaatttaattagataataatactgtaattgtatttaaatattacgtactaaatttttgcaaaaaaaaagatatatattttaaattttacaataagggttagcgttaaaaaagtaaaaggataatttggaaaagaataagttaaaatttataaaggtaatttgattaggattagaaaatttaaaatctataataatactattttgattaggattagatatagtgattcgtacttgtgtttatatatattatattacattacatttttattaaataaaagtgaagaaatattagtaacattagtaatattagataagagattgagagaaataaaatttagaaaatttcaacatggataaatatgaagaaggagatttagaagagagtttgcattcttctccatattggattaggggttcgatgcttggaaaaggtggatttggttctgtttacatggcgagaatggttaaggaaccatcgccattgtatggaactacgcttgttcgtggctttcatccaattatggctgtcaaaacttcacgtcttgcaaagggtgaagaattagaaaatgagaaaaaatttattgaatattttgatgattgcccttatattattaagtgttttggtcatgacactactcttaatataattgatggtggagaagaagtattttataatgtcttcttggaatacgctgtcggggggacattgtttgatttcatcttaaattctcctctttataatgaatctaaacaagttaaacagttccttcaacaaattctgaaaggcgttgattatattcatgagaagggatttgtacactgtgatttgaaacctgagaacgtattattagtgaaagaaataagagaagaaaactttttctttatggctaaaatttctgattttggattggcaaagatggttgatgactcgacgactcgtgttagaggtactaaagcatatttagctcctgagtgtcgaggtgaaaaccgaattcaaggacagttttcagacatttgggcaattggtgtcatggttttattcatgctaaccaaagacctaaattggaataacaatctatactactgtatctccaacgaagctatcgattttatattgaaatgcacaaatcttaatccttctaaaagaccatcagcaaagatacttctcaaccatccatttataacaaatatgtaaacaaaaaattcagacataatttctttttaaaggaattttatatattttaataattgaatttattatgttttttttagaataatcatgtttcttcacaatacaatatttaatttttattttcataaaatctgtttaaagactaaactgtgttaattaacatttaattaaagtcaataatgtcttttttctaatgtagtataaaaacatatatattaataattagcaaaatattaatatgttatattccttttaaaaaattgattgagatcacaatttgggcttaagacccattttgatctgggccagcccaattgatagacacgcggcccataacctcatagcccaactcaattaggttgggaatatctttgggtaagttgaaaaatacccctttaattaaataattaatcaaatttacctctaattttatatctaattgaaacatacctcttttcataagtattgta

SEQ ID NO: 23074 - DNA, 2949 bp, Cannabis sativa
cagctgccttgcaccctttctggtctataaaagccagccttttttcttcactgggttactttcaccactttgccattttgcctcaagaacttcctcgagaaaaattacagaaaccatagattttttactgctattccttcgtcgttgccaatccgcattctaccgtcgatcaacatcaccttccagttcacaacctttgtgtaagttttctgggtactttatacttttgttgtttacttgcatgttagggtagaacttttggttaagcgcttggaaaagatccaatggttgggaggcggatgagcttcactcaaccttgacctgtgcccaccagttggagaagatcgtgactgtggctggtatcaagccttccgcctatggagtttttcaccgtctgccccgagatgaggagacgcccaactgcaactgcggtggctttggggcctggagccggactcaccttatgtccgggcccatactaccacttcaggattactttataaatttcttagtttttgttggccttgctacctatcaacttattccccaagtataccgcctactttcaggcttgttcattttctatgtagccaaaggttgggcttcacctagcccggccaaaattttatacttttatgaactcgtgtctgtccccaagaagggggatagacttaaagatggttttttcacactccaagtccatcctgccaatgatggtccggtcccttttaatttttaaaagaatgtaaaggagtatcatcaccggtttttcttttcttccggtttccaagctgtagaatgcccagaactgctcacggagtgggtcagggttcctccgatgcatcggaccgcccctacccaactcttcctccagcatgccaaggtcttctccacgtatgataaggacgggctgaatgtgggggacttagtcacaactgcaaactgcaggagggctaagctaatctcagagagccaatcagtggatgatttcaacttatccaaggttctctatcccaacattcgcagtctggactccgagaaggcactccgggcggacattatcgcctccgcggaagaccagtacaagaagtacctctttaggagggagcaagagttagcttatattaaggctcaagccgctgtcgggagggctcttcaggtagaagctggtaaagagcaggcgccttcctggcctaagctaccattcctgggtcccaacactggggctcttggcgccagcacctctggatccggtaagtctcccttagttgttcatcaagtcccttctgctcaagattattctcgatgtaggcctatagagtttgatgaacgtctccttagatttagaatgccccctactcgatggggcaatcatgccaagggtttttatttttccaacttaggtcattttttaggccgatcccggatggggtccgggcctcccgcacctatccctctggatcatttagcctacttgtcttccagctggttcctcccctcagacaaccttcttggggatgatgacaccagccttttagtgcatgactttgctagggctgcattagattatctgggtaggattagttttaccgctttgttcttgcatgcaaaatttctcgtcaatgttctaacacttatttgtttgtttcttaaagcagctaagccaatggatgagcttatggctacccttgctcaaacttacagtcccgacccggccctatctcaagcgcaagacttggaggtgaccttcgggaatccttcttctagcttccccttaagccaaattattttgattgataaggatggggagatcgaagaggaagaagagggcgagattctcacccctctggaccgaaagcgcaagggcaaaatggtggaggttgaggtcgaggtcgctaagaagcctaggagggtcgacactccggctcctagctctgattcagggatcctactcgaggcggaagagtaccctgttccacccagtatcattttaactcccgttcctgctgacgaggaaagaaaccaacttcggaatgcaaagcataactatgccacgacagaatacacaaaggggaacgctgaagtggaggccttgaacaagatcttgagggaggcccaggacaattacactcgcagtgagcacgccaggaacgtctgggatctaaatttggatctttgaccgactggtttaatcgcttcattaggcccactttgctccttttgcctcagaattaataagccacttcgcctcaagtcttgtccaactccccatgaagaggtacgcagcctgcgcttccaccaacccggtctaccagatccaggacataagtacagccatgaccgttgtaagtttctatgtgtttccaagctttttccttttagtgcttggcatcacgtacttacacatttctcttgtttttccagattgttgcagagactggtcgtctttcaaagattctgattgaccatgggtacaccatgtctgagtttgggggcatggaagaggccatgaagagtcttcgggacttggaggtgcagaggaagtctatccgggaggaggcccatcagagggaggcccttttggagcagagccatcaagaggcgctaaaggaaaaggtcgaggagctgaaggctaaggacgatgcgctgaaggccagggacacggctatggccactacgaggcgagagtttcgggacgctaaggagtccgtgcaggaattaactgccaagctaaagtctctagaagagctgcaccaagctgattcgcagacgacagccaacctaactgttgaagtgaaggggctttgtgaattcaaggagcagattcagaaggaggtggctaaggcgatgagagatgtgttgggttttgtgccctaaataaagcccattacaatctgattagttatcaatttagaatttttgaagtgatttatgtttacatgtatgtta

SEQ ID NO: 23075 - DNA, 4211 bp, Cannabis sativa
  modified_base (3063)..(3072): a, c, t, g, unknown or other
  modified_base (3284)..(3287): a, c, t, g, unknown or other
agtgacatttcttgtagtattataattagttacaacttttttacttttagttataaattttgttgtgactaaaagtaaaactttttgtagtacccctcgaccgagtttaacatatcgggggctcgtcgaacaacctggtctagctagggagtagatgcaatggtgctgcatgttcctgtgtagttgtgggggaatttcttagtatcctacttgtcgaaaattaaagtcctacaatcgtataccaatattgtccacacgttttgttgtgaacttgcaaagcaattaccaacacacatgtcaacaacagtgtgtttgggagcactataaatattctacagaatatactcttctggctcaaatttttcacaacaaaacaaccttaatgaagaataagaagacaattttggtcaaatatttcgtcttagccaagtgaactccaagttatacaatgtatgtatgtatgtggcagttaataatgtcatcactacttaataattaattgataattaagaaaaatcaatgagtccaatattataacgcggcaatatatatattcataaatatatatatgagaataaatatagtactagaactgagctgaggatatatttatagaataccaaaattattaattattattattatttttttttttgcttttagtcttgattaaataaggagtgagagaaaagagagagagagtgagataaatctatatatatatatatatataagatcgatcattcagaaaaatattatataattatggatttatcgcacaaaatgaatgaggagagcagtttgaagaaaggagatcacatctacacttacacaaacaagctacacacatcctcccttcatggtaaatatatttatatataaatatatatatatatatatatatctttttcttttttcttttatagtaaatagttcatgctttatacaaattttgaattatataaatataattaattcaacaattaaattgtattaaatataattttccttatttaaaatggggtgtattaatttataagttattggggtgaaaatataattttctattaataaatataaataaaatgacaaaattaactatccttaatagaaaaaattacaaaactatgtttacaggaatatatgtgggaaacaatgaagtgatttactacaagagtaagagcaagagcagaagcgaaagcgaaaagtgtgaaagttgtaaatacaatccaacgaaagagagaggagtggtgaagtcgtgcttgaagtgtttccatcgaggccacgggctgtaccagttccagtacggagtatcgaaacgccattgcatgatttggccatcgggaacatgttacacggggtcatgcatcgaagatggtaaagttattattaagaacgcggaaaagatgttaaaggacagtcataaaagtagaaaggcgacagataataataagttgtacgatgatttcgacaaaaacagcatgggcttcgcggttatgtgcacgacgggaaatgttacatgcatacaagagattgctgccatgtctaaaacaaagatgtctttgaagtgctttgtggttgcatgccaatttgctgtgaccatgtttgcattgcaagaaggtattacaaatgctgctgcttgtaagatcaatgagaactaacaatcatagagttaataataaataataatggtaaaaatgaattcattaattgtacactttttttattcatgatatgtcattttaattatcaaattacaattaaagatttggtatattttatatgttattgtaactgttgattgaaattttcagtaattaattaagtaaataaagatttagagcaagataagaaaaatgaatatgtagatcatgacttttttacgtggttgaagtattaatgagtcttagtttaggagtcacttgtattgagatagagaagatgaagttctctctctaaaatttggcaacgttttgactttaatagcaataagagagaaaggacaaaccccttttacctgtaatctcatagtcctattaaaaggcagcgatggaatttatttttttcattcgtctaaatgttttacttgagggaaggaaatacattgatagacatatatgaatatgtgaatatatgtcaaaagttatgcgagtgagacataaccgggttagacctgatatgcatcatcaggataaaccactaaaggaacataatatatggattgtgtttatatgaataggattatgcgggtaaggcataatcaggttagactcggtaactataaccgagataaaccctactataattccttattttaaatagacatgtgagcgtaacacgtgggtctatgccatatagacataaatgggcgtgtgagcgcaacatgcatgtccatattaaatagacaataagggagatggcattattatatatacgatatgttatttgtgattattgatatctttactgtcttgctaggcttgactcacgggtgttctattatgcaagaaagggtaaatcagactgtgatcagccatgagtgcgagagcttggtggtgcttgtacatgttcaggccacacaagaccaagcgggttggggtctaccagtgttgtgtattttgtaactctgattttgccgcttagtttcggttcgtgaaaaagacttgtaatattttgtgaaaatatttacaggatcccgaaacttgtattttttggttgtttgtaaagtttaaaattattacaagctttatttttattctgtttcaaattaaatttaaatttcccgcgcttacccttccagtaatcccggtttaggggattaaggtttcataatcagttgtcgtggcgtgcctatttgttagggtgttacaaatttgctcaaaggtaagtccaggagttgaattcttctttctctatgtggaggatggacccaaatgctcccaaccacttctcgcagccatcgccatggtatccgtaccagccaccaccaccaccaccaccgccatactgatgtggccctcaagtaagttcccttttctctttctttaatgtcacattggggannnnnnnnnnctttagtttggggggtgaacttaacttttttattttgctaagtttaacatgttttttttagtcttttaatttttaatttctattattttgagtcaatttgcttaatgtgagtctatctgaaagtaggtagattgcatgatttaaaaagttcatttattattacattcttgactaatttcacttttgcgctttaaaagaacatggaatcatannnngtaattttctagtaattgaattgatttatgtatgctaattgtacaatgtggaaagatgtttgaaaaattctagaacttacttgcttgctatttgaggtgaaataataaagtatgcatgactagaaaagtgatttcgacattttttttggatcgattgtgtgcatttcaagccatccctgtaattttatcctagttacctttttttttttttgagctttaacctattctttgtttctcacatattgagcctagaaaaaagataaaccttgaatatccaaaatttaaccctaagtataccataagtagatcttcagtttgggggaatttgcatgagaaatttgttgtatgtgtgtgggaaaaagtgtgaaaattgagagaagatgaaaaaataattgattggcgacaacttgaaaataataataatgataacaataataataataaataaataaataaataaagttgttgcaatattgttaaaaaatttctctcatgtaattagagaaaaaaggggtattgggattgtgtgaaaaatattttggatgacatgattggagaaacttgtggtataggaaaccctaaatgaccattttaactacctttaccctaagcctaacactacaagcctagaaagatcttttgattcttggttgtgcattggtttataatagtggagaatagtaagtattgcaagcatatggaattttgggttagtgaattgatgattgtaattggcatgcataaagtggttcaagtgctagttaattgcattcgatggtttcatgagctaaatacaattaaattgaagtgtgtcaatggcgtaattgaactgaaattctggatggtatacataagtgaaatttttcataatcatgttattgagtctatttgaaaattacccatgttctcgaggttgacttgttt

SEQ ID NO: 23076 - DNA, 1451 bp, Cannabis sativa
gaattcatcatataaatctgaaatatctctccatagcccttttcgagataaccgttcaccttttctagagtcccacaagttatctgccctcccgtagcgactagcaatcaccttatctcataaggtgttcaactctcatgggaacctccacaaccatttcataagtattgctttatttctcatgtccaatctcccaatcccaatcccccctcatctcgtggtctacactcctcccaagccaacaagtgatcaccttctgacacatctccaccttcccaaagaaagtctctcatcattttctccatagccttgatgattgcctttggagctttaaacaaaaatagatagtaaatggggagagaggaaagaactgactcgataagcgttaaccatcctcccctagataaaaatgagcaattccacccaagccttctagcacacttttccaacacacaggttcccaaaacgagcctttcgtaggcaaaccccccaaaggcataccaagatacttcaacggccactcacccacttcacaacctattgagaaagaaaaatgagcaaccacttgctcattcatacataatcccaacaattgacttttgctcaggtaaacttctaaatcggatatctcacagaaggcctcaactaaccttgccaacctctgaagcaacgcttcgtcattaacaaagaaaaagagtatcatcagcaaattgtaggtggctgacttgaatcttgtctttagcaaccaaaaaacaacataaaaagcctgaatctactactttattcactattcttccaagcacatccgccattagtgtaaacaagaagggtgaaagtggattcccgtgcctcaatccccaacaagaagatgtttttatattaaacatctttttgttggttgaagttttcgtgtcttcctattattgacactctttctttctcagagaatttctcaccaactgatgtaccctttcatttagttctacttctaataaataaacattaatatcacgatggaacaaaaagaattggtattgctataatgatttcattatgagtaaagatcatcaatcccaaatgaccgttcaagggccatgctcattcaagaaattcagcaaggccaaagaatttctttcaaattttttaatgatagaaaacattttagaaaacagttgcatagaatacaaatagaagacaaggttaggaagtcctttcaaagaaaaaaaaaataatagattgatacaaccacatgtgtagcactcactcccaaaaacaagcttaagagaggaggatgcccaagtagttatatactactaatcaatctcattcttagtcaatatgggaccctaacaatacaccacccttcgagccaacagtccacgtcaacctactctacaatggcttactctgccatagcctactttgggcttaatctgcaggtcgccccttct

SEQ ID NO: 23077 - DNA, 1850 bp, Cannabis sativa
  modified_base (328)..(328): a, c, t, g, unknown or other
  modified_base (463)..(473): a, c, t, g, unknown or other
  modified_base (764)..(766): a, c, t, g, unknown or other
attaattatattatataattataattaaaagtgataaatataaaaataatagttttgccataaagggtttaaatattcctaataaaaatttctttacattaaatatttagtttacttttgactcccctcacaaaaaaatagaaaaaaaacagtacatatacttctttcttaatttttagtctcaggtccgccactactaagcactaattaacaatatccttttagtaattctttttattaaactactcaaaatatatatatatatatatatatatatatgtaagatatatatatacgagcgtttaagtcttattattattattattantattattattattactattattaggctaattaggattattaccccttgaactttgacatgtatcaaatcatgctccctgaacgtttaaggtctttaaaaatgcccctgaagtattaagattgttagatttaaagnnnnnnnnnnnatttcattcaattttactacttcggtgattatttatatactaaattatgctctccagactttgatatctaccaaatcatgtccctcaaactttgacatgtactaaattatggcgcctggactttcatccatgttagatttttttactaaaattgaaaaaaagtccttattaaatccaacaatctaaatagttcaaggagcattttcaacgatcttaaaagttgaggggacatgatttggtacatgtcaaagtttaggggtaaaaatcctaattagccttattattattatnnntattattattattattatgtgtatgtggtttttaagatgtgtgctatattattgtgtacattttagtgtttaataagttgtaactattattttttattttttaggataactattattattttatatacttatatatataaaaaatttgtttgaaagagcttagcatatttttacaagtactcatgaccctctaactaaagggaaataaaaaaaaaaaaaatactgcgtgattgtcgcataaaaccatataaatttggctttaaaacacattaactataatgtatatatatacgtgaagtgaaagaataaaaatacatatatttattatatattatgttcatacgcagcatttgaaaattgtaaaaatcattccacagatttccatctaatgatggggagaattatcaatgattgtcatgtgcgagcagttgaaaattaagcctaaatattattattattattattatttttattaatttatctggattctaattggtttttttttgactttaaaccaaacatgtttcctagtgtggtgtcccgtgatgcgaaaacaatgtctcattgttttttcttttatgtcccgtgactaggaatgagtgaagaatgtacataattgattaaacctcctaatttcttaattcatttcttgcaaatttatatacctttatctagggctacgaccatattcgtcccgtgaatctacttgctttaattttcatcaaataatttatataagttgcttttatcacacacattcagtttatcactatatatatatgtatattatttactcatcttttgtatttccctgccgctccaacaactctactcttcattaaataaggtttcactcaaagaggaaatccattaaactaatggccgtatctttgaatcatcatatatatatatgtggatacatacatgtacacacataaaatgtacaatatgtttagtaagaaaaagagaggaaatacgctagcgtgggacggctggcaattaagaatgacaaaatatttgaagtccatgttcaataattgcaccacgaaaatttatagaggtaaattaatacacattatattat

SEQ ID NO: 23078 - DNA, 1041 bp, Cannabis sativa
  modified_base (1010)..(1010): a, c, t, g, unknown or other
acctaagtctatttcagtgccccgcagactaggcatagtaaaatatctatgtgaaaagatagtcttctactctattacaaacagccccgcggaccaggcgtaaaaaaaatacttctgcaaaaattaaagatatgcctttaaaaggggaacaagttaaaaataaaagtaaggcatgatcactgttaaggagggatgtcagacttaaggttttaattttggatttactctttgaggtccttctgcgaatgttcaccttccccggaagaaacttccacgacctctccagattcattccctctagcttttttatcctcaacctctttagttttggtttcagccttgccatcttctggtgcctcatcttcggccatgtcttaagtatcgaggtactcattaacatctctcttataaatcacgaccctattggaaaactcctctgcatcttcaccaagatagttgaagatgttgcgaacactctctgataagtgggtcaacataaggacatgggctaggtttaccgagtggactaaggctcgatgacgagacttttactcttacttgtgttcttccttcccgtccataagttccttgcgtacgaaggtaacctccttcagggcctagacctggccttgttgaaattgagactatgtcttacaaatcctgtacagtcttcgccttcgtctcaatgatcttgtccttctccttgataccagcagtaggtggtaacctggtttttagtaatccgaaaaagtgcctcagctaagccaaccttggcctccagccccttcatgagattatttttgtcttgaagttcttaaagcttaacggacatctggttcttgagagcctccttggcttctttggcctccttaacctcataggaaagagtagaattggaggattctcgctcagcacgttgggtcctaaatttttcctccatttgagtcttgaaatcctctttatagtcattgaacttctgcaaatacttcttgtaaagcccgcttagttantttggaaattagcagttatttatgttaatca

SEQ ID NO: 23079 - DNA, 6152 bp, Cannabis sativa
aaataaccgctgcaagaaaaataatgtacaatttagaataattcccacaaaccatattcccaactttagtaagaaaataaggaattgctaagttgaactactgattcgaagctgtaaatgccttgcaaaaattagatgaaaatgcccaaagtttacattccttacaagaaaagatcaactaatcagcagaactatattgctcatatccataaagtcaaaaaaacaaatatatacagaggaagtcatatttgcagtatagaacatggcttcctatttcaaaatgcaaaagcaaatagaaatacatatttatatataaatacgcatatgtatatatgctaggagacaaagcccttgtggtacaggcatatttgcacacacttgcatagttgcatccaaaaaatgagttgaatagatgctttataatgataagtacatagagagaaactaggttaagcagatctataactacaagaatctcatataaatattgttaaagagatgcttacaatcttatcctcttgagactgcacgttgttcttcaatatattgaaatcaactgtgtagatcccatatccaggctggaaaacaatattaaaaaataaaacaaacagataaaataaataaagaggggttacttacaactctaacaaatgcaaaatgtacaaaaaaatctaccttgacatcaagagaaacaagaatatggcccatcttcaagtgtggataaaacctgtaaaaggaggctcaacagtaagactcaactaccactagcatataaccaactaggaaaaaacttaatgaactaagctcgaacaaaataaaataaaataaaaaatgaacagtaaaaaccagatcaaaagtctcacctttccatgactgttgcaacattagaatccacacagctaggtgcagtgttatgacccccttgactgctgaagaacattcctatctgtatcaacaaaatgggtgaatgagcacggacataaaaatccatctaatgcagaccataaattctacaaaaaacaaaataaaataacatgaacaataaaaaaaatacaatagtgtaacaacctcattagctagagtataaagttcccgggtctccttttctggaaaccatccaactttacaagcattctgcagagaacattagtcatataacagtcattttaagagacatctttttttcccaaaaaattatagtaattagaaatactatacccttagctaagcaagcagtgggtattacttaaattaaattaataaaacacaatcagaaaccaaaagtgttcaacttctttccaataaaaaggtctaaatgtttgttatgaacactcacaaaaaaaaaatgaacatcattggctgcatttaacatgtacctttacagaaatcattaccaccataatcatagcttgtaaggagtgatcacttcttcgttcacaaatctacaaagacataaaacaaaggttttgatttaaatgacgaactaatacatgagcaaatccaaaaatatagagaccaaggtgccatgcaaacactttctccaaagataaactacaggtgaaaacaaaataaattcatcaaagagcaaattgtcccaatagaagaaaaaaatatgaggtctgatctcactttgtcactattccatacctagtttgcatttttgataaacataatagactagctaggtttgatgtcaatacaaaaagcaataagctcctctatagtttaaattcttaagaatgtatcacagttaagcagcaagaaaacagataagttatcgtctaaattcccgagtcatcatttttttttttgttaaacaaaactacctgtactacaacacactgtttactacaaccaagcaataatcacttgcactaattacaagcaagaaagagaaattagttagccaatgtacaacaaccaaacaataccaaagcacactgtttactactcaaatattcacacaagacatgagtatctacgtatgcatgaatgtgtctaaatctaatagtttacaaccctgcacatgctctcagcgtatagtatatgctaattataccaggaaaaaagttggggttcgactaagtcacctgcttcaccactgcagataaatcttgagatctagttgcttcgaaattatttgcaactgcataatcaatacccctgcattttcaaagttaaccaagccaagtaaaagacactaattagcaatcaactttgcgattttaatacaaagcatcccattcaaagaatgaaacagctaatcaaaagacattcagcattggagatttatacattatccaccaattaaaataaactgatataagcttcaccgccaagaccaggttaagtaggccttctcgttacctaagctagttaggtatgggtttctgcaaagttaggtcttccacgaggtaatagactaacttgttcaaagatcctaaaatctcaccaaataccaaccatatgaatttaaaaaattactcatagatcacacaaaacgacctgtaacaatatggttactaagaaatcgaccgttgatcctaaaccaatctagtcacttggtcacataaatgcaacccctcccagtcttctccacaatttgttaaccctcttaacaccataaagattctcttccattaaaccaataaagatactcttccattaaaccaatgattacaggttcactctcctccttatctatgaccgaccaaccttatttctattccactaaacactcctccactttcttcaatcagatgtactcaactgtatataaactctgatctctaaattataagaattattaaatgaatagtttaaaattgaactatttctgggtctttgtatacacatatataaaggatagccagtcgccactgggtctcattatctgtaagaaaacttgaactagaccaatattttcgtgtagacgacttttcatgtcatgctacgaacagtaaactttcaccaaaaccaatggcttttacagcacagctcaaccctctatagttcatacgcgccgtaaaggaaaaggggtgagaagagagatcacaggaaggaataatatccataaatttgggccaaaaggggtttctatttctaacgacgggtgatacagtaataatgtcaaaaattaacactggtttcagtcatacataactacatactccacaatgcagcactaacctctttcatccttaacattggctcccaaaaaaacaaaaatagaaacaaaaaaaccctaaaaatcaaagctccacaaaacaacatcaaaacccataattcacataaacccaacaaaaaaaaagtccgagtacaatgttaggtcatacataatcaaaaattcacactactttaattttttctccaccaagaaaaaaaaaccatacaaacctctaaatcaaaatcaagaacaaaaaaaaatgctgaaaaatatagaaacaaaagtgaatatgcagagagattgaaaacataaaaaagaaaaaaggtgaagcactgtacctggcgagggtaagacagagattgaaaaactcagctgtgtctacacgttggtgtcttagaatggtggccaacctatccataacgttggagatccgatacgcgttcacaatcgccgccgggaaccgcagatcaaatgtactactagcaacgcaaacagaggagttgagtttggggaaacccgccgtaactacagcctctctcggagcaaacgccgtcgtcgtctccgacatttactgcctcaacccaaccgcttctctctcttctttctctctctagagattttaatttgcgcggtatttataaatataaataagtatttatataacacaccaaatggactatctggcaattttcaaaagttcattaaaaaaagctacactatttatttatttattttatttagataaaatatttattttttttttgaacaacacaattttgtatttttagaataaatacaaaaattagatgattgttataggggtgtagcagtaccagtaccagaaacttctcagctctttcaaaaatacattctcaaaaataatatatattaattttttaatatatttgtatcattatatataatattaatatatattgttatataatagagtaattttaagtaaaaatatttaaatttataaataagttatattttgaaactcatatatcattattcacgtattatttttttttaatatatttaaattaatttttaaataaaataaaattttaataatttagaccaaagagtgtcaagtggttctttaattttcagaagttaaatatttatgtgtttatataatattaaaaataataaaataaattattaaaacaaaaaagaaaaactagtaacttatggatattagttattaatgataaaatcttaaataattaggaaatgttttaagaaaaaaaaataatatcttatagatataaaacataaatagtaaaattacaaataaaaatgatatgaagttaaaaatctgtgactagatagtcacactggttaaatgtcaatttttgtttatatatttagttattataataattctttaacaagtttttctttttttttgaaaaaaattctttaactagttaaatatctatgaatatacacttttaatgttaaatttaatagataatattattaataaaaaaaattagttatatatgggctaggtttaaataatgatagaaaaatatcttcaatgatttgtgatttcctaatgaacatgggatgtaatttcaataagatttgttggctatacttaatgcttttaaccttttgaaatatgtaaaataacaacttcatagtttgatagtcaatacaccactttattttttatttatttagactaattaataaaaaaatattgctaagagaaattaagatatttagtactactataagtagcggcttataactaatattaaattgtatcaataataatattacatctcacaaaagtattaagtatcatatgtgccttttaacatttctcattaataaatattcattccaaaaaaaaaaagcttctttggcatcattaattcatttatttatttttagctaaaaaattatgttcatttttttaccaatagaaaaaaaaaaaaaaaaaaaactcatttatagtgaatattatcattaatgataaaatcttaaacaattaataaaatagatttagagtaataaataatattttataaataatgatgatatttttaatggttcatgatgaaacaatgaacattggatccaaattcaatggttgagatttgttgactacacttaatgctacttttgactttttgaaatttgtgaaataacaatttcataatttgagagtcacatgctgacgtgacactttattttttatttatttaaattaagaaaaatttgcagtaaaagttcctaaaaaaagttttattaatgctgaatagtttacaatttctaaaaatagtgataataattcccaaaatcatgattcttataagtcctacccaatttaactgttaaagaatgcacatgtcgaagattaattggcccacatcataagcttaataaaaaatgatttaaaaattaattaaataataaaattattaaaaataaataaataaaaattttaatattcttttttttttatttgctgaaaactttggcatgtttaattaaggagaatgagaatcaattgtatggcattgattctcattcatttatttattaaatattgtaatgagagaagctagttgtaatgagaaaaactagtagcaccaaaaataaaatctgaattgataaaatttttaggagcaaagctcgatatttttgcttggtcacatgaggatatggtagaaattgattcatccgtaatttcccacgccatcaatatagatctaaacttccatcatgtacaacaaaaataaaggttgctggataaaaagcgagctcaagcattgaaagatgaggatgaaaggttgtgtgcgaataattttatcatcgaggcattctaccctgtttgggtgtcaaatcttgtactagtgcccaagccaaataacaaatagcgagtttgcatcgacttcactaacatcaataaagcatgtccaaaggtttgtttcccacttccaaggatcgactagcttgtggacga

SEQ ID NO: 23080 - DNA, 4595 bp, Cannabis sativa
aatgactgaatccgcagaagagagtctaaagagtgggggtcctaggaccaaaatgggaagggccgtatgaaattcaagaaaaagtatgtgatggaacgtatcgtttaaaacgaatggatggataacaaattccaagagcatagaacaaggaccacctgcggcgatattattagtgaactgggggtggtcgtttccttttgtttttctttacttccatgtatgcctcaaggcgggaaatattaaataagaacagaaagtatttccatttcaattttcactctatcataatttttagtcttgcaacaagtttctaagagtccagactcttaatcacttagaaggtaacatattttgtatttctctaaaaaaattatgttgtaaaccaaattaacattaaatattagagtataaagtgtagcccaaaatcagagcctcagggaactggaagtaagcaactatcataccatattttcaaagttaataagtttactaagttaattcaggttgactaatagaagtacaggcttcaaaaatgattaactctagtcaatcaaaacaaaagaagttcaagcttcaaatataataaattcaggttaattagacatgcattgtaaaaaaacaagtctttgaaaccagaaatttaaggatctggaagtaagtaatacttactaaaaatgatttttcaaaaattgattatatatttaaattctaaggtctaggtcattgaaaccatgtttcaaggaatttaggaaaaattatttgttaaagaaaaactaaagtttaagcataaagttgaaatcctaaggttcaagtcataggaaccagaacctcaagggatccgaaatcaagactaacttagcaatttaaattcatccaaacgatcaacaaatacttggtgaatataaacattaagtatgtaaagcttaaaattgtcataatatttacatacaaaagctctgcgacaagggcacaaatattgtcttcactaaaataaaaaggaggatcctcgtcccccaacaatgaaattataatattgcaaagagataagtttatagttgagctagatcagcagtttgtagagctgtacacgggtcgggttttcaggtagtcgggttcgggtttttatatttcgggtgttggaaatgcacaaccgaacccgattttcgggtggtcgggtatggcaggttttgggtcgggtatatcggatttcacgtggttaggtttaggtattatttgaataaattctcgttttcctctcgataacacaaaaaaatatgtatattatataatacatatatatggttatagttaattaatatatatataatcgatagtatataatagcggctattgtatctcacactgatggagaagcaaaacattaatatgtgcaattaatagcggctattgaatagcctttagtattatatatataatatttattataatagtataaagaaaagcaaaatatgtgcaattaatagcggctattgaatagccattagtattatatatgttatatttattataatagtatagagagaagacaatatagagaagcgaaaagtcattcctctccgagccaaagagcctcttctcaacagtcaacaggtcctccctcttccaccgccgtaagactcctgtgactccgactagcccctccgccgccatcggattctccacgtcagcgatgatttgggttcaacatggtcattttggagggattggaatacgaaattgaaattgatatgatgagtcatgagtgcctcaagtcatttttttttaccgtgatcaggttacgggttagaacccgaccaataaataaccaatttttgatacccgaacccgaaacccgtgtagggtattttcgagttagacccgacccgaccacacgagtttttaatttttccgttttcttggcagcgggtcggggcgggtggtcgggttttccaggtctgcgggtctaaatgttcagccctagcagtttgcatagttgagtcaggctgatcatcacctagaacatcactggctagagcagtctctaacgacaaaatgaaagattcttttgggtttacatcattcaggagaacggtctcaggatcttcttcaacaacatccttggcagcttgctttgcaacatcgagttccaaagatgaaacaaggtgacaaccaatgatttctttagatcttcttggtgctccaccttagagtcagctttttccttctctagaagggaatttttctcctcgagctccttagcgtaagactcaacctttgcaacagtagcctttttcttggcctactttttagattcatcaacaaccttctcagcttctttaagtttggccaagagatcagcctcagagatcttgagtttgtccaggactgccttttcaaaagtttctgtctgctgctagaggtcttgatggtgtttcaacttcttctccaaattgacaactataatgatcttgtcgttaagggcctcagtctggctattgtagtccaaaatcggtggttaatttttctccagttcattgactttcttctcagcatctacaaccttttcttctagagtgggaatgcgagatttcatcttgtcgtataattcttcgtagctctcaccatgatccctctatgtcttggcagaagctttacagctggtaacaacatcattgagggaggccttgactctttgcttgaccatagcctcagcccgagctttagccttatttagggccttgactgcttcttctttcttctcctccgaattagtatgttcgacctttaagactttaatcttataggacaacttagtcacaagagaagaacacatctctaccataagacccgcctaaaagaaaaggtgcataaaattaaatacaagtaaaagttgactagaaatcataattgaaaaaaaggtcaaaaaacctactacatcaatctggctcttaagactgtttgctacgaaagttggatctccactcattgtagaaaattatcaaaacctaatttgctacaagctgcagtattttagtataataaattcgccacaaaaggagcaagatctgaacccactctaggccaaagcctttcagcaacctcttgacgattaaaaatgggaggaagtggtgtatttcacttagcaacatcaacaaattcagctcttttcttagtcaatagcaatgaagtttttttcttcatttcgtcatactgagtgtcgtacgtgtcgtacctcttcgcaaagaatttttcaaccgcctccatctgggcacgatcttctttcgacaacaaagaagggtagatgggcaaagtgatcttgaaagggggaagaggtggaagatttgttctatcccttggcaactaaatgaaatgagcatggattggttgtgatggtggaggctaagagctggtaatgttgttgttggaatgagtgctctacttatttggcctctcatttccctaaatgtccgctcctcttcgttcagaagactttgaagcttgcttcctgatagcagccaattgctgaagcttttctttagcctcagctcttcttctctttctgtctccacctagctcggagctagaccttttcctttgagaccatcatcctactccatcgtccacgataattggtttctactagagaggaactatcaccaaggcggtgtcattcagtccttcatgagaagaagaatttactgttgctgaagagttttggggacgggcaacaatttctaaagtcagagccttaggaatagcttcctagcctttggccggaagtgctggcttcctaactttagcattagaaggctgcccagccttccctttacctcagttgcccttggcagtctctctgatctcatctaatctcttggcaagggtgcccaagaatttgtccactagacccatctggaatacgagtgggttctctaaaaataaagcatataaatgtcaatcccacgaaagaatcaaacaaaaaaaatgaaatgacacacaaaggcaattcagaccgtttattctagcatattgggggttccctctagcaaatcagaagatgtcttcctggtctaagaagcttccatattggaagaatcctggatatatcatttcatgaaaggagtctaccctaatgatttcttttgtcttatctttatatctaattactggatacttatgaccatctatacgcaggaagtcaaggtcaaaattgtcctggacaaaacaatttaagtaggctaaggatggagcattaactagacggaaggttgtcttaccacttccagatgtactcacttcaggagtaccttcatttaggacaacgtttctaaactagatttcaagtttctctccttcacttaaagcctccaggaaattttggctctagtctgccaaagattcatgatcagccttgacagcctttagagttacctcagtggtaattgctgcaataacttccttaacatcaagaggatcaccaaaataaagatcccggatgggatcgttgctctgatgagaagctagtaaaccagcttctcagagattcttagtatttacaagctcccctatttataatgtttttttgaaaaatattggta

SEQ ID NO: 23081 - DNA, 3293 bp, Cannabis sativa
acaaaacatactatattttgtatacttgtattactatacttataccttctcatggtctaagaaaggaatgcatggagcaggggaaaaggttgaatgttgagcagcaattgaacatgatcaaaccgtttacagctaaagagattaggagagctttctttagcattcctgattcaaagtccccggggcctgatggttacggagctgggtttttcaagaaaatgtggactgaattgggtgttaatgtcattaaagcaatagaaagtttcttcaataatggtgtcatgcctcgggatcttcatgctactatgataacacttatccccaaaactgagagtccgacaaaagctgtggattataggctgattgcctgctattccacggtttataaatacatctccaagctgctttgttccagacttgcccaggtgttgcctatttttgtcaatcagaatcaaggagcctttatttaggggagctctattgcccataatatcatgattcttcaagatatcttgaagaattacaacagaaggattgtgtctcctagatgcactatcaaagttgacatcagtaaagtgtatgatacggtaaactaggagtttttagaggagcttcttaattcttttaagttgccagccaggtttatcacatggattatgacctgtgtgagagccacttcctactctattttaatgaatggtagagttcaaggcagcttcaaaggcaagaaatgtttaagacaaggggaccccctatctcctctcctgtttgttctgataatggagtatctaacaaggagattacgattggcagccaacaattcagattacaggtatcaccccatgtgcaagaacatcaaaatcataagcttatgttttgctgatgatttgtaaagggaatattcagtcgatccaggtgcttaagaattgtttggaggagttcaaagacacctcaggccttgcaatcaatacaagtaaacctcagatgtactttggaggggttggagaagagacaaaacaggctatcttgagagaattaactctcactgagggaaaatttcccctaaagtatctgggagttcctttgaaacccacaaaatggagagctgaagattgtggtatgattatcaagaagattaagcaaagacttctttgttggacaagtagacatctctcttttgcaggaagagctcagcttatccattcagtgttgcttggacttcgtaactactggatgagcatatttgtcttgcctcaaagcatcaccaaggaaattgaaaagttatgtagagggttcctatagggttggaatgggaatagaagtaagctccatgtggtcaattgggagaaggtttgccttccaaaacattatggagggctggggttcaaagaggggactaagcgaaatcaagcaatcatagctaagtatatttgggccatttcaaccaaaagtgacatactttgggtgaaatggtcaatgatatttatcttaaaaacaattccatttggtcttatgatctcaagattgatacgagttggtattgggagaaaatttgtcatgttaaagacaaattttcgagagctgatattattaaagcaggtacggcaggaaggtttaaaacaaatctgctatacaatagcaggttaccccaggttatttgtgagtacagcaggagcatatggtgttccttcatcatgccaaaacatagattcatgctttggcaagctataaatgctcagctgctaactcgagataaattccaacaatttcgcatcaacttggatagtgttgaatgtccggtgtgtggagctgcaacagagacaaaccagcacttgttttttgagtgcagcctctctcaaagaatcaatgatcagatcaggttgtggctgggcaaaagggcttggccgaatgagtttcaaagctggaaaagctggctggagcaggacagaaagggtaagttgcacagggttcatagggtgatttttgctgctgtgatatatagcatatggatcaatcggaacaattgtatcttaaatgaatattcttgctcggtttctaagattgtacaggaagttcaaaaagctacattttatcgattgaaaattgcaaaaaagaggaacttaagtagagacaagagacaatgtatatagagcaattatgttgtaaataagggttggttgtgctaagcttgtttttgttgcttagctttggttttaaatgcttgtgattattgaagattgttccttcttgatcaaaaaaatatagaaagtctcagacgacatatacggtcaatagctttctggaagagaagaggatggcacatactcaaaccagaaatgctaatgaactattttcccaacaaccagaaatatcccagatggaaattggcaatactctaaagtccactagaaatagtgagatacacaaacttactgcatatatatctatatataaaaaatcaagagcaataatcagcgtctaaatcgaaatgggtcatcacatttcaactaaaaaaagaagaagaaaatataaatcacgaagtaagagtttgtgatgaaccaaatatagggatagaaatgagggggaaaagggtgagagaagattgtaccttttcagtgtgggattgatgaagagaatcgatcttggactgtggagtgatgctctcaatggatgggaaatcgtcgtcttcttcactgctctccatttttgacttatgtattttgatgttttcagagacgagaaatggaaattaaggcaaatgggtctgcgttcggaactgggttttcttggttggtcggtcagctttacagtaaactgcttatgatttcaggagtagtgtctattatgtttttattttttattttatttaggaatcatcaatatatatataggtaggaactaatatcaaaataaaagaaattgaaaactttattttttatttaatatcaaaataataaaataaaaaatagaaagataaattgataaaaatgaatatattaattataaaaatatattgaatcttgaaggaaataaaaaaatttatgtaaggagcaatactaaacttgttgatagaagtttggtattgctcctttagctttatttttaataactacttctatagactaatatcgaaattttatctatttgtagatggaacctctagagcagctaaacgagttcataattttaattattttaatgttattttttaattattttaatgtaatttttgttgacatcgcttttagccaacgacaatgagtctattttaataagcgataagtgatttatag

SEQ ID NO: 23082 - DNA, 17259 bp, Cannabis sativa
  modified_base (11994)..(11997): a, c, t, g, unknown or other
  modified_base (14085)..(14091): a, c, t, g, unknown or other
agagaatttaacacagagcaacaaaatcacgtgagtgaataatgaaagtaacgaacctgcaatgtttctgccaattcacgatcaaatatagaaacgtcctttgcatggtcattggttgacttggaagcaggctttgatctcagccagcttggttggcaactgctcatcaacccatgtagaaccaacaataatcgatcgaagagactttcacctaacgaatctgtaatgacagatgaggaagtttctgttgaagattccacctccttcttggacaaagtttgaatgggattacaggaaagctctacatcctcatgcaccactcgattccctaatagacgaagtattccggaagcaagcatgtgtctcatgttccttcccgatggctccctgacagatccaagaaacacaattgtataattaaatttaaaacataaatatatataaatattaccactaattttataaattcctaataattcagaacgtataacaactcgcaagtcaactaaaagtaatcataagaatcggtttttcattaggagtgttttctgataaaatgacattcataaaggggtattcaatttaatactttattttatattgggacttcatgctgaaaatatatgcttcaaggggcaagctctaacatattattaagttcccatgacaaactaaaaccaaacctctagcccattattaggtaagtccccatgacgaatcaaaaaccaaaacctcgtgagaacaaccttagaatctttaaaagccaagaattttgaacatatttgtttggtaaaagccgcaataaggtattgaacctcaaacttgtgggagcataacataggttaacagcttgatctttttcccaagggaaccccaactatatttcaaagaaacttatcaaaataattgcatcttccttcagtaataggtaaaagttcaataggcatcatgggctcaaaatcagaaacaaactttttaaaagtataagaacagaagccaaaagaacaagaaaagagtttcaaataaacaaataaaatatagtagttaagtgtggtaaaatattgcatgcttacccatctgaacaaatcccaggaagcaatcttagaagtaattgcaatcgcaacaacatagaagctcgcaaagctgcaggcggaggtggtgaagaatctgctgctgaacttgttactgctcgtctcgatagtccaggactaccacccttaatagctttacggttgcttcccttggtcgttggaccttcaattccagaaggagatgatcctgcttgattattcaccccacgagtaaatacatttatctgctgttcaatggtattcaactgcttaatcagatcattagcaaatgtattgcgggagtcatcagagctttgatctatgcatggaagaagtaagtcgatgagagccctatctgtcacattctgctgggtgacgttaaacccttcattgtcagatgttggaataggcccttttctgcatctttttgaatctgttccctcttcaatgacttctccttcttcaagcgagatggcttcaaatttctttttgtccccagttgtgacagggtgagaatcagacttataccatccccaagatttccaaaattggctttttgttgaaagaccttcgctctcagctatattaataagacgctgtctgatagttttccttcccaaaagaacatcagtgccagcaaggaaccactttgcatgcattaacatagaatcctccagagatctcccaaaacgatgaaccacatctgcgaaaagagatgcagcatcaggcctaaccaataaccttgtgagaatgatctgaataaaattgttctcattatcagaagcagccgcttttccaggactaggtgtcgaggaacgtatggcatctgccagggatatatcatgggactggagcttctcaacgagagtttgttcattcaaaagaagtcgtagctctatccattgccaacgaaactttgcaggttgtagggtatccaatacatgtgcaagcttgtccttaagctttgtctcagtctcagcaaattgagttttagattcaccatgtcctaagacccgatttccatcctctggcatcttacagtcaatgatagcatttaaaaaaagccttgcacggagaggtacaaatgccttggactttaaatgcatgtcagaaccacctaattcaagaatggctgcaaattcagcatcacttccatctgcagctattagatcataaaatccctgactgtctctcaagcatgcatctcgaaaaggcaagtgctttatggcatcattaaaagccagcgttaaagactggtataattgattaatatcttcacggattgaaaggcttgtacttaaaatgaatggtcgccatacaataaatgcaaatattgaatatgcaggtggaaataccaaaacaacaggaagcatattctgcatcctggaaagagctactatggaaggttcacccaagagttccacaatcaatccatcagatacagttctgcagtttccaacaaacagcctaaaccagtgaacataaacttcaatgaggttgtccatcttaaatcccattgaacgagcactgccattagaactagatcttgtgctccttataaattgaactatatccaacccttccttcagtcttagaacagttaccattctctccaagctagtgatcccatgaaccactgccccaacaacaagagcagaaacagcagctgcaattttagtagctctaccaagaaccacttttgtggaattgttcaagttttcgttggacatgctactatttgactcgtgagattcaggagatgactgaaactgatttcgagatgcctttccaggagcaaagactgcagcaagggctgaagaagcttcagttgcaagggctacctcaaatacacgggtttggcgctcaccaagcgcttccttaagtaggcctagacagcttatatggatacgcaatatacgcttggcaacatttatagaatctgtaggagatggagcatttggatagccacttcccactctcaaatcaggcaattttgcaatagttggcccaacattaccaataatggcagaaacagcagaagacaccaaagatggatccccctcctgagcagcaccaccagtctgcctaatgcattccattaagtcagcaattattctttgtgctatctgatacccatcatcccacttttctgcagcaggacccttaggagtcccggcagcaaaaacctttctctctttaccaaaaaactgctgaagaacatcctcaacatttaaatttcgttgcacaatgtctctcatgtttgcacccaccctggataaacggccaccactaatcttttgacggaaaaagtcatcaagatcttcaactcctgcaggaacaccaagcggaaagttttgctctccgtctgtcgaccgtccagactcaaattcagaaacaagtcttttatcgcatgttgccttaaagtttttctcccattcaataacactagccacattaccatatcttctcaataaataccgtgcatataccaaaactgatgagcctgacactcttccgttagaggccattactgctgcagcacgatgcattgcagctgacaacgcttctgaaataagatcttgtgcaataagtatgttctcatacctgaaccagatttatagtcagggcatttaacttgaaccaattgcaatgatcagccaaatcaagctaaagtaaagcaaagcaataatctaaacatagcataagagtttcatttatataaaataaattaagaaagaaagaaacattggatagtgatttggttaattaatgtaaaaagtgttttacccaacaatattaatgcacatatgctgcatggtacatttctttgaatgcaatatgcataatactatctcagttttctgtgagaagaaaaaacctctatgcgacttgataaaataaaaatttcataagttatctaattttgtgatttcttaagatgctgaaatgatttcaggaaataacaacactggcccaaaggaccagtatatatatgcaaaaacaattaaatattaagacacgtaaaacaataggcattcaccttcgaagtgatgatactaaaaatgcctctcccacttcacacacttggctttctacatttctcggcaacatgagactgttccgcccactatggattgtggaactagggctaccaagtaccttaggcagcaaccaaaggacaaacttgacagccagcactagatcgtttgaaacatccatcaaatagagtatggcagatagttcgtcctcaccaagcttccatcggatgccattcctgtcatcagcagaagggaatggcctccctaattgtccaaccttggatatggacttttcaacctcttcaacaaccttcctaacaacagtggccaaccacattgaaattgttctcttttctacaaaatgcagctgttttaatgctttcccaattgaaacaacatctgtgcaattgttagcttttatcctttcagcagacttggaattttctccttccagtccagatctgtgatgagggcaacttactttattatcacaaacatgacttgtagatgctccttggctaccttcaatcctagaatttgctaattgcgcaagactttgagtcttacggggtaatttctgcctattcctggggacctgcttatttgacttcagcgggagatcaaccttcatagactctaaagatttagacccctttttcacccaccaggtatcttcatcatcagattgaatcgaagattgtccttggaggcaagaggttctttcctcacccagtttttgccgctttgcttttttacattcttcacacccaggtgtgccttctcccaaatcaatcttgttaaagagtgccatagaagacctcttcacaccaataagtgtttcattaagtcctgcatctgtggattttagcaaagtgcttggtagctgtaacactactgagattgcttcctttagttcttcaatatcaacctcatgttttacctttttacgtgaaattaaatttgatggctgaacagatttccactgatcagcagaggctgatgaagcaccatccttcccggagattgaacggaacttttgtttttgagctgatatatttgttttattagactttttactgagattgcaaataagtccactaagtactagtcgtctctcatttgagtaaacttgcatggcctccaaaaattctgggtcttgagttaacccagcctccttcagtgcatcatgcacaaatatcccaggcaattgtttcaatattcgataatgcctcttccgtctatcagcctcaatcaacaacccattcatttccatgattccactcaccatgagctgccttacataagcatgcgggtaaaatatccctgcacgtatcaattcgactacaagcagctggaggcgttgaaacccttcccccttgcatgattcatgctgatcaatccaacatactatgatatcatgtaaaggacctgggctctcaaaaattgaagatatgttcataccccgttgatcaccatattttgaattacttttgaagtcatgtaaatctcccatggtatttttgactgaaaatctgttctgctgacttggacattttgccagaatattaactccaaatgggttgtcattcttggatcgaagtgaattctgcaaacctcctatcttcagctttaaaagccgaattgcaacatatacttcagaaaaatcttttctgccagtaaacttcaccttgtcaggaggagcagtccgaaaatccctgaaatcacatgttgcccattcacaaagtaaaaatacagagcaaacaaatgataagttaacattcccaatccacttcaacgatgatctcaagcagggactgacttctgcaatccagtgttcactggcaactccttcacaaagatcttcaaagagaagtttgtaagcccctttgacatcaccttgaatacgggatctatctaaagcctctgccactttagccacactatgaccaggatacccaggacgtgcagcctttgcaagattatcagcacgcttctgaatagatgaaacaacgtagttaagggccaaggattggtactgggcatcaagacccttactcctaaacagacatgaaacttctgatgagccaaatttaatctttctcgcatcatcggaagatgactttgacaaatttccatctgttacaacatgcgaagcaacacaagatggcaatgggaagcaatccaaagctacaaatgtatcaggcacagcaactattaaatatcgaagcatctcaatcagtgcagaggttgtgtatgcctttcgggaattatctacaagatctgatccacctgaagaaggttcacgtataaaacgaacggctattcccacaagagtgcgcacatatgtttgggatagaacaacagtttccaaaacaccatatatgatgggcaaaagcaactgcacaacttccagtaattctttatcctgaaagagtgaagtatgaaagatatttataaaaccagacaaaacttaaacaggaaaaagtaaaagataataataagaataagcatacatagatattttaagtaggagacttgggcaaagagtacctgaagctgacggagaacccaatcaattacaaaagaaggcagaatcagtccttcagcatggtgccactgcaaaaggcgtaccatgtaccaccatttaaaatgcagagaagactcttcgatatcaggtgcagctgaccctggatcactcctttggtgtgcagcagacccaccatacaacatttgtggtacccgatctctggtgtgtgaagaagaatgagcattgttctttgaaaagaactcatccaagagggactgcaagtaatcaatgacatcttttgtccacaactcagtgcgggacaactgagctttatcggatgctccagaaataccacctgaaccaggtcgaatctataaaatgttgaaatcattatatgtcagctttcatctttaaaagtagcaaagaatggtcgtgaaacaaagcaaaactgctggtgcttcagcacccatacctgattcaggtatgttactttgataaaccaggtagccctgagcaagggaacattattccttataagaacatcaaataggtatcgtttcctatacccatgaggaacatgatcagccagggaacgcaaccgtttgtgttgttgtgataaaccctggaaataaaaaagaatttgaaacttatatgtaattttcatgtgtatatatatatatatgaaaaaaaaaaaaaaaaagacaaaaagacaaaagacttctcaggttataatttctacagcaagcaaagcttctctttttttcagttaaacttataattgcattgtgaagcccagccgagataatggaagactgtagagtcaacaatagaagccccataagacaagattaattaatatgatttagtaatttgtttactctatacagctaagagttagtatttgttctctgcataattatttatttctttggctccataaaccatgttgcagatcattggttctacacattattacaaaaatgctgaattaacttgtatcattttccataaagcatatcctctctcacaagacatcaagatgtttgtgattaaccacgaggtcaatgtgttttataatataaactgacacaccctcaaatgacaattatctttcttttgcatccataaattttcttaagcttaactaggcatctcatggtccagtccattatgtagagtattcttttctccataacatacaatcaactagaaggaccgtcctataaagagttaccatcaatttaaaaggtttctgcctctctagtgaggtaagaaaaataataagtttctgcttgtccagcatgaatgccttacctcaatccatttcttacggaagtcttcactacatggcctttggtcgggaaaaacacctggctttgttaatagtgaatcagaaagtggaacaccataaacttgaccggcctgccaaggtaaaagtagataatcaaaactctgatgattttcaatcctataagatcttactcattggaatgcattcatgtgcaaaagaacagtgataataaataaataatagtttcaaaaagacaaaaagaattagagaaagaatatatgcatcacctttcgcttttgagcacgagactcatttatagccctcagacatttcctgatagactgaaaagaagaaaagaaatcaaaacagacatcattgaacaatatccaccaccgattggatagagaaaagaaaaggggggaaaaaactccaaattccaaatctagaagtaaaaaaattacctctttgcacttgacgacaacaggtttggtaaaagattgaacctgagtcagtgatatctctcttgactcctggtacattcagcgtgtacaaccatgtcaagtaaatacttgtaacagttacaccactaactataaaagcaattataaaatcttcatatctacattcttcattagtgtagagaatgtcatgaaacccaacaaactatgcagtgttactaacaaatttataagacagttttacataagagatgaaaactagtaatgcttttaaaaataaataaaaccctaaatgactaacacatcccaattaacagtagtttcagaaaaacaggaaggaaaaaacaaagaatcggagttgcagaaatttgtctgtaaatagaagcctacctcaactccttcaacagtctctctgtatccagattgcacatattctttggtaagtgtctcctctggacaatttgtagtttgcgggtgatagtcaggtgggccaagcctgatattttagagcaaattccagaaacgaaaaatgagagcaatattcagaagaaaattactaattaagcaaaatacaataaagccaaaatattatctaccttatctagttaggaattaaaataagaggattaaaaatgactaaactacaattgaaaatatgtcaaggttattataaaaataaatacatatttgttatcaaacgtccaaattttccatactacacaaatatacatataaaaataaaagcaactacagcaaagacatgtactgatccattgcaaattaccgtgaattcaaggattctttgtcacacttcaacttgtaaggtgataactgagacggccgcctggagaattgaaaatgagtcactacgttatatggggcaaaagaagaccaggtaatacaaacaacttgactgtaccaactgaagataccagtaatataatatgtaacttaaatgccagagaaataaccccttaatggggcaatattcccgatttctggtcagatcacatcatgattactcaatctcataaaccaaatccagttacaaagttttaaacagaaaatggacaataattactatctgaatgccacaaattacttttttacgcatacacccacatgacatgagtaaaaataatatacaacagcatatggagacaccgatcagaaattactagtatcataaatcacagaaatcgtgctcataatatgattaaagagatacatatacctttttctgcaacgggatctcagaatggggcagtaatcagaattgaagacaaaatagtgtgtgttggaaatcatttacctattcagagagtagttagttggcaaagaagatgaatcagctcgggcagtatcccttgctgatgctccaccaattgaactgttattaactgcactagtgcagccagcagcatgataccgttgcatgtctccctcccaactatcatcggcatactgcacccagcattgaaactgctagaaaatgttgaataaacttaactgcattgcagaagcaccagttctgtcaattctgacaatttaagtcatggaggaaacagaaatcagatcttttaagaggatttctcaattacaattgatgatcattactcacatgcctaccaaaaatctgaaactaattcaggacaaaactgtaagtctaaaatatctaaatgaaacacagttattgcaaaattgcacacagcatgaaaataagatagataaatattcagaacataatgcaaaacatctcccaattaggaaatgggataaatgatgccagttctctaaacaaaaaaattcaataatcagaaaatgaaactcgtgtgcagaactttctgtttgctatctcaaacggtcaaactatcctatgataagatgtttaaaattcaattccataacaaatctaatatgagccaaagcctaagaaaaccaggcacaaaaaatgaaacaaagtttcagcagttttcaaactatacaactgcataaggaagaaaactgcacacataaacactatgagattcttaaacgctccaaataataaagaaaaacactttgaggagggtttacattagcatagagttgcaaagacaacattagcagcaaaaaggggaacaaataaactataacaaatcttcaaacttgaacagtaatttgtttttatatacatgctaattcacagcccaattagcatgaagtccataaagcaatttgatctaaaattacttgctccacagcacgtaaacaggcgacaatatattcaaaagatttgccaaaaaacaagtcacccaagtatctaaaaccagttgaattcttgtaagaaaaaagaaaaagaaaaactaaacaactaaagcaaccaaaaaataaacagaaccaaacccccaaataccactgcaaccaaatatcccatacagcagacaatccccagagtaaaacccaagctaaactcaacagcttattaaacacaaatccacacccccaaatcaccaaatctaataaaataacaacaatagagtaccgaaaaggaaaaaaaaaaatgaaaaaacttgaaatacgaaccgcaactagggttttgaacaaattcaatatggaaacttcttcagagaccggaacgagctaacgcaaagcttcagattgagttttaagcaggaagttgagctagggttttgatggcataatttaaaaagataaaatttaactagaaaaaagggggaaagattagaatgagaacaaagggttagattgcgatgacgagaagaacagagagaaaaagagagattcgagatttcggaatgaagaaggaggagggggagggtctcgggccttgggctttgactcttaagttttgctgatgatgacgacgacgacgatggctctgttctttctagtgtggaatgtgtattaagttagccttattgggctacaatttgggtaccttttcttcttcccaacatctaattttcttcactccaactatttttttaattttttcttatcaaaaaaaactatttttattaattttttattttatattttagcatataataattgatcatttatactattagatctgatttaagatttatatacttatgttttgaattttattgtcctaattatatcaatgtatttcatctcaagaaaaaaaaaatctataaagtattaaaatattttgagttttaataggtagaattaaagtatgaagagttaaaaataatttaaaaataaatattttgaagcttttggtatgaagagctaaaaataatttaattaattaaagtattaaaatagaaaatataattatttataaagttataactatgtttgcttatacgtgaaaatatttaattagattattattaattgaattacgacagatttagaaatttttgttagttggtgcaaaattttaaatacaattatataatttcttttaatatattgaacatttaatgcagtgaaagagttctatttatctcttcttaaggttaatgttcgaatctttaacacttacaaaaaaaaaaaaatagaataaatatttgaaaattaataacaaaaatcttaacatcttgatccccgtgatgttgagctcatcaaataggtnnnnttgagtgttaatcttgcgagtgatagttggttttggaataaggatccaactggttttttttactgtcaaaagttcttataatcacttacagtcggtcaatggtagttggcattcctccatggaggatgatgtttggaagatgatgtggaagattaaagctcttcctaaggttttatattttgcttggaaagccctttcaagttgtttgcctacatgtactcaacttcatagtaaacatgttcctgtgaatttacattgtgtgttgtgcaactgtggggaagagtcaatattccatgttttggttcaatgttcctttgctcattcgtgttggcttagatctgcgttaggtgttggtcattatgcagcaactaattttttttattggtttatggaagtgttggcagtaggcaatacgggattggttgaagaagctgtcatggttggttgggcaatttcgaaggctaagaatgatatgctttggaatggtaaaagttgtagtgctgctgaggttgtttggctggctcgaaccactcttcgacaatggcagtgtgctcagtctaagcggctgggctcggtctccctagctttcaatcgcattgacacaagggaccactggtccaaaccggctgctggacagttaaaaattaatgtggatggggcaatctttgaagacacaaatgagattggtactgagtttgttgcccgcggttgtgatggtcgaatagttgaggcattttcaactatttcttctgtcagttgccgacccgagattgcagaaattctaagtgtcaaagaggcacttagttagataaaaatgaataacaagtcccatgtcattttagagacggattgcattttagttgttaaagctattcttatttcggtttctatgccttctatttttggtttatttgttcaagattgtcaatctattttatcttctttaagtagtatttatattgatcatgttaaacggtcggctaacaaagccgcgcactgtatggcacgtggtacttgttattggtcaggtcgtcgttttactgagagtgatgttccccttgctcttcagtctattgttttggcggatatttctctttaataaagcttattttcgtttaaaaaaaaaccttaacatcttaaagataaacattgattaagtttatcaccgcactagatttttatatacatgatatgtttacgttataatattctctttgtaacatatccaaattgacataatttaagtattttaattttgattattttatggtgtttattgcagttattcaaagctcgtgtacatttttaaaaatatatattttttatagtgtcaaaaataaaatttaagtaatttgttgcactagtattttttttacccgagtgaaagaacttgttttaaaatctaattttggtaatacaaactattcgtaattgtttagagtgacgaaaataaagaaaatattgtaaaatataaatctaacattgtaaactatttgtagttttttgaaaactttaaaaattaaacagggttagaatgcttaaattatgttaatttagaagtctatcgtactctccgtacaaaaatgagatactataaacatgcagttaatggggcctattgctccaccttgccccttcataggttagcctatgattttttttatttgaaaagagtttaaatatattaaacaccaacaacaacagtggtgatcacactggggatcacctcccacgagttcaaaataccagaattattctcacaaacaacccatcccgcaagttgatgagcccccatattcatgttcatactaattgagaaaatatgaatacgtaattgttatactcaaaattcggctaggtaccagaaattgacacgtgtccttgtttggttatttttagtagtatttttaggttaatttttagtgtatttttaatttagttatactcttatttggagcaattttacgtttttttatcttttatttttgtagatttaaaatagaagaatattaaaaaatatcaaaggaataagatggagaaaagataaaaagatctcacaaaaaaatgatctataaaatagagaaaatnnnnnnngaaaataaagctgaaactttaagcttgaattcgactatgttttgatcagattttagaaaaagtcaaaacgtaaaagttttagatctctcttttatctttttggaacatattgaatcgtctaattccgagcaatatcgagagttatgacaaatatactatcagtcgttgcagcaagaaatttctaaaaaaaaaaaaagataaaaagatagcgagaaaaaatgatagaattacgatttttatcttgtttaagtttaaactttaaattgtttttagtatattttaagtaaccttgtaagcctatataaacacattattattagtatttttagtacgtttcaaaactgaaaaaattcataaactcttatcaaagagtacgaattttggagagcaaaataaatattagagactttcttaagagagttttcaacattcttttcttatttattttctttattttctaaaattattaagtgtgaatttgttacaatgaacatgagtagttaaacaatttattagggtatagatggaaattgtttgatattgatttgtagttttaatatgatttaattttctctcaatttatatgtatttagtttatttatttttgtaaaactgtttattacttatttaattaatattataaaattttttattttgtgttttaataaacatattatattatgaataagttttaaaatattgatataataatatattattattaagctaaaaaattaagaattatgcaagaaattaatgtaaatatcacttatatatttacaattatgtttgcacattcaatattaaactaatcatttattatgttgtttaatattatatatatttacaaaactttatttacaatcttagtttaatcattaatacattatattatttaaagattaaaatgtacaattatatgtaaatatgttttcaaaatatataaacttttaagactatttttgtttgcacatctgtacttactaattatgttcttgttctccacttaaaaaaaaaaaaaaaagcccttttcatattttgattttaatggacccagaaatccagaggttctttttaagggaaaatatcgagagatttttgaatcagccgaatcttgaactcaagtgtgtacataaattactttagtgggtttaaagataggagcctataaatacttttctcagccaaaatcagaaacacacaaatcaaaatttatattcatacctgtgactgtgaggagaagtacttccactccactgtacccaatctcagtgagtcaggtactactggaatttggggattagggttttgggttctctttttagttctacacacagtaatgtagaacacagttctatcaatccataattattgcaaatctaatcctttattctcattctaaattatccttttataattacatattttttaattttggccaacaaaacctaatctcaagcttgggagagagctaaggtagcctgtggaaatatccttttctaattacatattcaaaattgtagcctctgctgattgctgttatggtctgctctttgtttgttccttaattttacagaacacctattcccatctttctcatacgtacacaactttcgaaagaatctaatgttatgtcgattcttcttatgtagtaagttacatttttattttgcaagatattcttttagcaagcgagtttctctttaaacttgcatatatgaccatgtgaggctgcaatcctaggtgtgtattaggattcatgaacttgttgaacatattcttcactttttcttaaagggtgattcactcttaccattgttttattcactttaatatctcttgtagagtgtttgatagaacgaaaggtagaaggccttattttaggctaatataaaatcataaaattgagatgtcttatctattttgctgaagacaactgaatttcacaatctgaaaggtttatttggttataaattgacatctgctagtaatagaaatatcactgtgttaatatgtttggcctcttctatttgatgttcgataaggtgttgccaactgatggatatagggggaacaacgggaggccatgcccacccctaatatactttgttctttttcgaaatttgtgtgcatatgaactgtttggttaaattgctcaatagcctgtatttgctgtaaaatgttaattgtgtgttttataatatgtaattatactatttaactcaagcttacctaacattactaatccaaagataccccaatgatttctagtgtaattatatttcttgcctgttaactcaaatttacatgctgatatgcttattcaaggttttggtatgtcttaatagagttcatgctgcttcagtacttgcatctttattgactattttttgaaaagcaataatgaatctgaagtattcttagaatggaaagattgatgtatgggccatggctagctgtagtaattgcttactgtttttaggttggcatgaggctaattaacatgagttgtattttagaaatcatgcttttgaaaaattagtatttattaacgtgattgattatttgtgaaaccttctaaaacaaatctgacttctaattcccttatgactaatatttgatcagaattgactgaattggtgcttctacaaacaaagaagaagaagagagagcatttggagtttggatatttagttacagatatacatattttcgttccatcatattctgggtaaactttcttctaccttaattgtatttagttgtttcattacatatttaatttataaaatgtggggtttatttagaagagtagataaaagttagagtactatccttgtggttttctgaatggaaaaataataacttgaagtattagctgggactcttggtttgtgtaggtttaattttaaggtcatagaacactaagaaaactgctactaaggggaacattgcacaagagctgctcaaccgggtgcctttaagaaaactttgttttcttcgccttctcctgggaagaacatttggagtgaaattctttgcttttaatttgaagtttctgtacatgacataggactaggattttttaggagttcaatgttagtactatttgtttttttttgtttctgcaaggaaaagaaaggaactttatgagattgtggttagagt

SEQ ID NO: 23083 - DNA, 3349 bp, Cannabis sativa
cttgccaactcagcaattaattacttgtgctagacaaaagtcagtggaggtctatcaataccccccctacgagtctcaccttgtcctcaaggtgaaagttggggaactggttgcgaatgacatcgaagtcttcccaggtggcttcaaaaggaggaaggtgctgccacttgatgagtgcttgaggctgaactttctgagttccaggccgaatggccaatacttcttcaggctcgagcaaccattccaattctgttgtaaggctgggaggaagcggagtgggttgctgatgcggtccgagggcagcgcgtagcagggatacatggaacacggggtggatggtggcatccgaaggtagctgcaagcgataggccgcctatccaacccgagccaacacaagaaatggaccaaagaaacgtggagcaagtttctcattgacgcgtttagctactgtgcgttgtcggtagggccgaagcttgacataaaccatgtcaccaacatcaaagtgtacctcccttcgcttcttatccgcttgtaacttcattgtttactgagcacgatgcagatttgctttgagtagtaccaatgtagcatcgcgatcttgcaattgatgctcaacctctgaattttttgtgctggccggttcaaaacggagcaggggtggggggtctcggttataaagagcacggaaaggagtcattcccgctgagatatgatacgaggtgttgtaccaatactctgcccatgccagccacttcacccatttggtgggtttctcacctacaaaacaacgtaagtaagtttccaagcatctattaaccacctcagtttggccatccgattgcggatggtacgcagtactacgcttaagggcggtgccatgcaagcgaaacaattccttccaaaaaaggctgaggaaaatcttgtctcgatcggaaactatggaacgtggaaagccatgtaattttaccacatctctcacaaaaacttcagccaccgtcatggctgtgtaaggatggcgaagagggatgaagtgcccatacttggtcaaacggtctaccaccaccaaaatagagtcaaacccatgagataatggcagcccttctatgaaatccatggaaacatcctcccatacttgctcaggaatcgggagtggttgaagcaatcccgctggagattgagccaagtacttgttacgttggcaaaccgcacattcagccacatgtttttgaacatcttttctcattccgggccaataaaggtccgctgccaggcgctggaaggttttaaacacacctgaatggcctcccgtattgctcccgtggtactcttgcaacaataatgggatgcaaggagaagtggaaggcaacactaaccttccccgaaagcgtaatactccttgtgtgagtgtataacctcccccatcccgtccttgttctaactctatgaggactttagacagcagcggatcgtctttgagttgagcttgcaactctagtattgacaacacgtttggtactgaaagagcgctcaaactactgccaacttgcacccttgaaagtgcatcagccgccttattttccaatccgggacggtattggatctcaaaatcataacccaatatttttgtgagccatcgttgatgttcctccgccaccaacctttgttccaagaggtactttaggctccgctggtcggttcgaaccacaaatttgcgcccaaggagataggggcgccatttttggatggccaacacgattgccattaactcccgttcgtagacagatttggcttgggaacgaggggatagagcctgactgaaataggctatcggcctctggttttgcattagcacggctcctaaaccaatccctgatgcgtccgtttccaccacaaatgtggtagagaaatcaggaagagctaacaccggtaccgaacacatggcttcttttaactgattaaaggcttgttcagcttcgtagtccacccaaaagcgtctttccttgagcggatccgtcaaaggtcgtgcaataaggccataattcttaacgaattttcggtaataccccgttaaccccaagaatccccgcaactccttgagtgtctttggtacgggccaccttgtcatggcagccaccttggcgggatcggctgaaacaccttgtgcggagataatgtgtcccaagtactccacgctctcttgtccaaacgaacacttctttcggttagcatacaattgatgttgttgtaatcgctgcaacacttcctctaagtgttcgacatgagtttccaaggatgcgctatacaccaatgtgtcatcaaagaaaaccaacaccgtgtgacggaggagatccccaaaaatggagttcatgagagcttggaacgtcgctggtgcgtttgtgaggccgaaaggcatgaccaaaaactcatagtgaccctcatgcgtgcgaaacgcagtcttctccacatcttgtgtcgccattcggatttggtggtaccccgatttcagatctaacttggagaaaaacttggctccatgtaactcatcgaggagctcatcgatgacgggtatcggaaacttgtcagccaccgtttctctgtttaatgcccggtaatccacacaaaattgccaacttccatcattcttttttaccaacaacaccgagctcgagaaaggactggtgctaggtacacatatcctcggtttaagcatttcccgcaccatcttctctatttcatccttttgaatttgagcgtaacgataaggacgtaccgagattggccccaccccttctttaagaataattcggtgtgccttggcgcgctccagtggtagtccaaggggcatgttaaacacccccgtatatttatccaacaccacagccacctggtcaggtaccaagtgctccgagacgctgcttgtagtatgtagggaccccaaatgaacccaaaatccatatctcgattgttccaccgtgtgaatcattgccttaagtgtgattggagacttgcaaagactcgggtctccttgtagtgtcacccaagtgccatccctctcaaacttcattaccatggagcgccaattcacttgcatgttacccaaggtttcaagccatttaacccccaaaatcacatctgctccacccaattccaaaggaaggaaatctgtcaccacccgtagtgcacccaattccaacttcacttgggcacaaaccccttcagccttgaccctatcacccgtacccaacaagattccatagccattagtttgagttatgggtaatttggcggctgtcactacctccaatgagatgaaattatgagtggctccactgtctataagaactgtgac

SEQ ID NO: 23084 - DNA, 1888 bp, Cannabis sativa
tctacaacaccaaaattacaactttattttttcccacaacgccaaattatcttaaaatgtaaaaccaaaaaaaaaaaaatgtgtttagaaaataggatagtacatgattagaagtattaggtaaaaccaattaataatattattgtgaaactctgttctttctgaattaggtaaaatcgatttagtacttctgagactctcaatttactcatcttaatgtaatgtcgggattcaatcaattcaagcagttacctaatttctttaattaggaaccaatttctattgcgaaaatgacacttttaaggtagctttcatttcttaagtaccaaaaaactcatatgatagaaaactattgaaaacacaatataaactccaatctatgttgttttccattattgaaatcttcaatatgaatgccccattaaataccagactatatgaaatctacaatatgaatacccctttataattttatttatttatttaaaaaaaatatataattttgtactaatttttgttgttaattagtaattagtattattattattattattgatagctactactacatagtatgatcatgagtacggacgtggactttctaagaaataactatcgctttattatagataataataataattaacgttaatattatatttatcttctacaataataagtagttaattaatttataatcttaattaattaataatactgtgaatggtgccacagcttaagacaaagacgtaataccaatcatatattatatataatattgtttacatttttgtattgtccctacccaatttttaatgaactacattttttatttatttttttaaaaataaaacatgaataaattaatccaaagtgattaaaaacaacatttaatttttacattctatttaatttcacatcatatgataatatgttatgtatatattaccacaattgacttaacgttcttgcttcgtctttattggacccttatgacgtttaatcttacaagtcaacacgagtgtttactttgtcctcactcgcatgctttttgaaaacacccattatgaagttctttcatgatgggctaccagaaaacaagatgcaccttattgatataagcagtatcaatatcaattcatctatgtagtctcatacttatacaatctcaaactcatcccacttgaccttctttaagcgatataagattgcacaacttactcgatattttttcccttatagattacggaactactgactattacaatcaatatatgaaacaaccaaattaacgtagatattatatcacaaaataatttaagaaaagaaaaaaagaaaaaaaaatgacaatttcaaataataaaggaaattaaatacttatctttttgctaaatacacaatagtgtttgaaatttaaacatgtgttctcattaaacttaaatataacctatagctagagtacttaattgaatttaagagaaattgttatattaattattgaaatcgtgaactacaaagataattaaattagaacctcctctaattaccatacataagaaactatagaatttattatttcaaaaaaataaaatgaaaatcattggaaaaaataatatgacaaccaaatactccatgttgttgtgaatcaaggagatataaaacaacaagcgttttagtttataccgactttaaaattagataggtcttaggaaaaagtaaaaattattaagtcatataatattttcaaaaactaaaaatggttttttgtgggctcatggctggatgggccctatgcatgcctaattctgaacataagcgagctaagcctgtgcttagggcccaccgagtctaggaacttaaagagatttttttttttaaaaaaaaaaaa

SEQ ID NO: 23085 - DNA, 1885 bp, Cannabis sativa
aaaatatcaaaaaatatctctttttacactatataaaatttgtgtttaatgtgattaaattttatcaaaaaaaaaaaaaaaagaaagaaagaaatttgtgtacgtattctattccacattactcatgtgtgagtgatttgtaggatttatatcagtcttatagcaactaccaaaactttaatcccatgacagaattttaggaagtgtttaactttataacttaaaaattattttcaatttttattaaaaacttaaaacaacttttacaaattaatatcagctatttggctaaattttttaaaaacaaatttttcaaaaacaagttaaaaaactaaaaaattaaaaaacatcagaatattattttctattttcaaaagcaatttttatttttttatctaacatattttttttgtacatattcattcacatacttggacatgagtccgggttcggggtttaggtcgtgatccagatcctaggatttggattcgggtcctggggtccagggtctggagttcaagtcaaagtccgagtccgagaatgggttcatgtcgtggtatggtgtataatattgaagtattttttagtaaaaaaaattctaaaaatagtatttcgaaaacattagtcaaacattgttaaatttttaaattgaaaaaaaaaaaaaaactgttttgtattctcatttttgaaaacgcaattttaaaaattgaaaacacatcaaaacatcctcttagtggtacatgcattgtattttgtatgatcaaatttatcaaaaaaaaatatgtaacacaaatagtgaaagcataccttaattaattaatcgatttttcatgttttgggtaatgaagaacgtgttggttttagggttcacattagagtcgtagcagaagagtagagttggatttagtttaaaaaatatttgttggatccgatatgaaccttagattttaacacaataatacatatacaaacctaactaattaaaattgagatttacctcttgttgcatattagagtttcctcactactttttgtataaataaaatgaacatccaatctaggtaagaactcgtcgaagacttcacaccagtatcatcaagatcagcctcgacacttaggaaaatagtaggcttttggatttactgagatgaaaataattttttaatcatagtgtattctcactgtaattgagattggaaaaacacacaacacactagtatgtgtgtatgtgtgtcgtgtaaagagaggaagagagagagagcacgaataggggagagagagagagagacagagagagattaaaaagtatttttaaattttgttttctttctcttgttatatcgtaccgtaaccctaatctcatgtaggaatgtcaatggggcgagtcggatctgatccgactatgatccgacctgatccagatcatgtacggatctgtctcctcgccctgctagatcagatactcggattggatcagatccgacccgccttatacggatcggatatgatccgaccaaacttttttaaaaaaatatatatattttttatctaaatttataattattttttccaaaatttatttgtttaagaactaataatgcatcatttttttcttatatatttttattttatttgtcaaaatcaataaaaaaaaaacatcaaattcttatcacataaaaatgtgatcatgtacgtataacctcaattctcgcataacctctctctcctttactcccctatatatacactcatatttcctcattcaataactacccaatcaataactaaaaaaaaataaggaaaaaatgaataattattgtaaaaaaaattagaacaactacgaaatacaatggttcgaaccaaactaatccatttttgagtggtt

SEQ ID NO: 23086 - DNA, 3579 bp, Cannabis sativa
ataaaaatatgatatataatccaagacaatataatacaatacaatacgacctaatacggcattccaaacgagccctgacaggtttattatgtaaaccaactcttttatcagtagcatttattttgatattattctttgaaggtatttgtgctgctttccgagaaataattataaagctattgttttaaccaaaggtttgcttttacatgtgtattgctcatgaagagaatccatataagcctccctttgccacttgagctagcctcaagtagtgcatatgctagagttttcttcttctaaattgttttatctttaacaaacattctggatatgtcatcttttgtgctgcttttattttcttctacttcatcatttccatataagcccccctttgccacttgagctagcctcaagtagtgcacatgctagagttttcttcttctaaattgttttatccttaacaaacactctggatatgtcattttttgtgccgcttttattttgttctacttcaccatttccataacatactttgtatctctgtctttgagctgcatcttattttttgttttgttttgtttttgtttttagacaaacatgttagtttattgctacttccctattataattttcttgataatcctaaatagtatttatttatttatttttgataagtaacagttgacctgattccagtccttatatcatgtaatgaaggaaattggtggtgcctcttgtttctactttgtgcaatgtatattctctgatggactaacatcacatctttgttgtataatgtcccttaaatttgtatctttttatttaaaaagaaatttattcttcctctccttatatcatagtataaagagaattggtggtgctacttgttccacatttggcccttagtaactaaacatatgtctgcttttttttttcttcgtctcttcattgaacttttccaaattatttatttttcaaaaagatatatctaataaaagtttatacttgtttttataggatattgaagttggaaaggcagtgcgtcctcaactagctatgagagttgccgatgcaactgttgcatggaaaaaggtttagttcccttgatgtcctgtttttctttacaccgtttacatttcccaaaaatgggttagcggtgggccgggggctacattttttttttttttaaagtttgattaatcacttattttgttctctgttctctttgctgctaatttttgctgacagtgagaactcttcaataaaattatggtctcgtcaataaaatatggttggaaaatcttaaatttaataatcaaaagtgataagctcgtaaaactttaaaagaaaaaatttgagaagataagttgctgaatagtagtgaaaaaaactcatatattgctctttaattgtgttctcatacaaaatttccaaccccttttcagttggggtgaggtgctttttgtagttagctctcatgtctcagcttacattgcggtcgaccgtcacaactcagcccaatgttagggacatttggaggtgtcaggacacaaaattggtggtgttgaggtagtgatagtcaggtgtcaggtgttctagtgggatggtgttaactgccactacttgtaccgtttgtgtcttcactactagttgggtgcatgtcaaggtggtacaaaacgttcacgaaccccttatcctttgtcttgcataggcatgttggggaaaccctctcttgcccttgtttcaccccaacttctcctgtatttatttggttttatgaagtcaaatatttggacaatccaagttcgtatagggtgcttagactccacctggctaagttgaactttgattattagaccatgctttgctgtagaccttactggtggcacctacttggagacccaagcaagaggatggattgacactacataataggcgagccatggggcggtggagtgaccttggaccacaatgtaagatgagcatgaaagctcactctatatagcacttcttcccagttgaaaaggagttgaaattttttacatgagaacacccttaaagaacaatatacaagttcttttcactactacttagtaactttaccaacttaaatttccttgagtcttttaaagttttactaatttatcacttaagttctcatagaacaattttttcctgccattcttgctaatgtacttatgttatgtcattgttatctgaatcacatgctgcaattttgctgtctttagcttcatggtaaggaggtggttgttgaatgcaaatttgatggtgatcgcatacaaattcataagaatggaactgaaatacactacttctcgaggtagttacacatgctctttatatctcttttagcaaaattagcaatcatcctcaacttttgaaaattactaaattctgaatcaaaatttagttaaaattaaatagtaaaaggctaaagtacaattgtacaaatgtaagtttcaaacttcaaaaatgtaaatagaaactaaaaaaatagttcaaactcttgtcaaatgaaaataatgataaaccaatccactttatataaatatatatatatatatatttatttatggatagattaatatgtattttttaatattcatttcaaatttagaattaattttagcttcgattattgtgtgctttgttttggctgctgtaggttttagtgtaatttatgctaaaacttttgtaaccacggttttcctccgtcaggagcgtcacaagtgagggttttcaatatataacgggggaggccaatcttagacaaatggtctccttctctctttttatttttttttttttttttttaaaaaattagaatttattttatattttctatatttttttaacagttctgtttaaatttgacgaatttatttattattcaaatttgtgtgggggttggggttggaagattattacaaacttagattgaaaatgaaaccaggtgcttcattctatttcatattgactcaacacgctcctagcaatctctgatagtctttatttcttccaatcgtacagcctacatgatgttagttaaattaaattttattttctttttatgacattatccgagagtttattacttgagtttcaagcatgccgtgcatctggaggaggagctttgggaaagaattaagttgggtagcttctgtggttgaaaaatgttaaagagttaaattttttgtttttattattttttttgaggacaacttcggagatgataggataagttgaataataattatgaatcttttgtttttgggtttgtgtggttttaagttttattttccacctcttacatgttttattttgactcataaacgcaagttttcttagcaagaaaagtaatacatattgtacgcttaagcattgtcaatttactttatttttatcctcaagtgattgcatattgagtgatgaaattgattgtgcatatttatgtggatctgtaatatttttcatcacatgcagaaattttcttgatcactctgaatatggacatgcaatgtcagacgtcattgtgcgaaatgttactgctgataggta

SEQ ID NO: 23087 - DNA, 3781 bp, Cannabis sativa
tatctatatctatgttcaagttttacaaactgatcttaattattatcaaaaagtaattttaatattcagaaatctttactttttcttcaaaattattcccatagttttccctaacacccaaggcattgtataatgtaaatccaagaccatgtgaagactgtttggaacggaagagatatctagatcattcagagtacttaaaattatatatttatatataagccacattttcccgagaagcatagctattacagatgacatctgcatatcaggattctggataagtaaaacattatgactaccaagaacaatcattgccactcaactatgttgtcgctatcaataatatcatcactagtaatgaaaataatagcagtaacaaacaaaataatagaagtacctgcaggccaactgtcatgcttagtagagcgatatcattcttccctgccttaagagaaacaggcttcttaaatttaaaaggtgaatgtgtgccattaccatatgcagtacctgaaattcaatgagttcatacaaaacttagaaaatttacagagatctgatgacatgaatgttacacaatcctcatgtgcattaattttcaatgttaataaacctataagtatgcaagtgtcaaagagcatagataacatgattgtagtaatataagcatctacatctgagcagtttttgcagtcaaataacaacatagacaatatgatgtcaattaaatttctctaaattgtacaaaaagtttttctaggcattctgcagttacagtagagtcgagcttgtcaaggataggatagaaaaaatgctaaaggaccaaattgaaccgccaattacaactattgtgtggtaggtcttgggctttcccagttatattagtccaacatgcaatctgtagttatgttaacagtcttcggaaaaagaaattgcaagagcttagaaaccccctctattctccttacagcttttactcaccggcaatatactttttcaaaagagttaaaacccagctgcatacactaaataaattgtactatcattttagtacttgcacatcgttttacttttagttactactaaaagacaaacgagacttgaagatagattatgaccttgaagtttttggttcacaaaggcatgaagagcatgaccctttgactcaactataagaaatggttggctccctttgattaagaaaccttcattttcttcaacaaatatactgcaatacatgaaaatatgaatcttaaattatatttgatttcacaaactttcttcaacttccattgtctaatggtctaaaatcacaagcaaataataaaactattatgttaacccattaaatatcacaaactaaaagaataaactcgtgtgataaacaacttgtcctatagctgcccctatgattctagacactaatgatgaggacagaaggatgtaaatatgattataacttttcattctagaaagctaatgagatcacagattattaagctaggtaagttctagtttggttgtaatttgaatagctagaccatgtgataggcatggaatccatcctttatctattataaagaagaaaaaacaataggaaaccatcattacatcaagggtgaaaacaaaccttgttgtataccaaaggtagtcagtagtatcttttgtggtattgatatgatctacaaagccagtttggacaaaatcctctttatcccatatcccagctttctcaacaaatacttcccacttgagagcttctgagttcttttctggggtacttactgatggctgcaacttctccgctaccatttcaacgatggaagttggggttccaatctgttaaaaatcagatctattgattcattatcaaaacaggaaaaataatacacgacaaagaaacatgaataacctctcacaccatattataactctccacaaacacttctaaatcatcaagacctctcttgttttttcttttcaatcatttgatataagtcatgttaaataattcacttactcgggatacatccaataaatgcatttttattgactgaacataatagatcaatcagcaaaagacacaaaagaagcaaaacaacactgatatcttaagacatgaaagcttcttactacagctgagttttgtgttcagttcgcaaagttctactcttcatgaatgtgtgacattacaagctgttaaggctgtctcgagttgtttaattgttaattaataattaagttagtttagtccaagtttcaagactgcagcttgttcattggtggttgaaatctcaatgtcggggtctagatgtcaatgtaaagatacctagtagctagtagctaaactgagataacacaagtcatcttgtgtgcactgtatagagagactcaagaaaaaactgttgagtaacttttctgggttgtttcagattcgttttagtattttcaggtctgttaatagaccgggaaagctctttgtactgagaaccgagtgcatctcttgggactgttgaaacagtaatctaacatcaaatagtgaattagactagaatgaacactctaccttggatgtgggatcctttaaaagccaaaccatgtaacaccattattgatgcacgctaatctacttgcagaaagtaaactaatttacaaattattcttttttcctttttttttctttttctgtcgggattaagttccccattccggatggaagatgataaaaaagaaaacaaaaagaatgcttcagggtaatcgcattaaatagtatcttaggggtaaatagaaaataagaaaggtaccttagctgtgttaaaaaccacattcttgcaatcaggcagaatgctaacagaccatgcaggcaaatgatatgatgaattgcggaatactactgtcctgtcgtttttatcatccacattagccagaaatgcagcacatgctccagaagtgtctgtgaatacatcagcctacattgtggtaatcgatcagtaattgttctcagtagcatcagaagcaatggaaatagacaaatacaaaatgacgccatggactaataaaaaatagaaattccagtcactcaagacaaaatatgacaagaatataccctaaaccctatatcgggtaagggccagtcttaagacaatggcctctgtctctttttcaaaaaaaaaattagagcagtcagtagtttttcgtttgcttctattcctttcttaaattgagtcaatagtaaattttaccgttgctttcctataataattacaagttgaaactacatgaaccattacattgccagaagattacaatctcaatcatggaaagattataaagtcaacatctagaagttattaaggagattaattatccaggtggggaaaattacctccagagaaggacccagcgatatattaactgcatcactattgagcataacatgctcacataattttatagctttatgtagctcccgaaggtgtccccattttgggagcctgggtaaccctgcaagtcaatttacatattatgtattaaatcgattcaagtattaaaatttcaaatcgataatgtgagaatcatgtaatgattaccatattcgtcaatcggtgcttcatagtcgtaactagtagtaataaaaggtccaccagcagtgcgaccaaaatttgtcccaccatgatactaaaccacaaatgaatataagttaggaacatcgataccataaacagaatgtgggtaaaataacaatgatgacatgaaatatagaatgcatgagataaaagtt

SEQ ID NO: 23088 - DNA, 2196 bp, Cannabis sativa
aaaatttgtgaataatgtcattgtcgttgttgctacccaagtcgaccacaaacacaaatgagtaaagaccaaagggccctccaacacgtgtccaactcaatcatgttccttttcttttgtagctacactctcgtgacactctcctttttaaacccaacccttttttattttttactttaaagttgaaaattaatattaatatatgaaaataggtaatatgtgtgatctatagtttcttcgaaaaattaaggggttcctaaccacttgagctagaggcatacagagagtaatcaggctcatcttgaaatttaatatatatattttaaagtttttatttaaaaaaaaaattaatatttttcaaaatcagtaaaaaaaattatataattttaaaataattttttttttgtcctctctattaagtgggttctaagtacagacctaacttacttatgcagcgagcctcaatgtaatttgggtataattaaaagcatatttatattataatttttgaattacatacttagaattcaatctcaaaaataaatatgttcttatcaaaaaataaataaaaaaacaaagggttcctttagaaaattgttgtgtaattaaaaaggatattagcagcaaaatcacataaattatatattttttaacacttaactataaaaactgaaattttgacggtaaaacctactaaaactaagaaatttaaattcagagattttaacggttaaaattttaattttgtagttaaatattaaaaaatataaaatttacatatttttgctatcaatattcctaattaaaattgaatacaatttaaaataattacaagatttgatgtgttgttcaaccaattaattgcagagtaactattttattacaagtaattaaatgatctcaattacactttataattctcaggattctataaaaattgagtataattataaattattactattttaaaaaattaatattatctttctatatataattactacataataattatttaataattaggaaattatttccaaatcccatctaattataaacagaggacattgatttatttattttctcccgttgtttacatcatcacgagtacaatgtgaactattaaataccttttatatatcaatataaagatatgtttatttattttctttataggttagtagttagaacaattcacacaatgcatgacactattgaattgactaatcacaacttttgctcttattattattattattatttttaagaaatataatatttatctttttaataataataataataataataataaaaagattatacgtacgtatatatcaatgtcacatcacataagaaaatcataccatataaatataatcaagtgttacgttacgacgtggaacaatattttctgttgatttttaaaacattattatcaagtaataataattttgtatttgtatactctcattaatcctatgttttctttcttatctatatatctcatgatagtgataagttttattttaataataattaattagtacaatcgaagaaaaattaaaaacaatatatatatataaaataagaaaaagaaatccatggattaatggactggttctttggattatagtggaaaatgccggttcatgtatagttagggattgatttttcaatttacttaacaaactttggacattatatctacacaatgtcactaacataataattaaatattaattgagaacttgattcattgcttgctttggctactattttcttatgattcccaaaagttcaaacaaagtggcatttttcttttttctctctctcttttaatcttgacattatataataataagaaaaatgctaataaatacttaatattaccataccaaacactataagaaataacatactatttaatgtcacatgtacattttgatttaataaataatatggatagctgctaaccaactataagttaacacatcaacaagttcagtcttagacataaacgagttaaacatgtgcttagggcctaagaacaaaaaaaaaattctctttttaaaaatgtaatttttttattgatattaaaaatatgccacatttctttttatataaaggatttgatttttttttatgactcgctcaaattatgggctgcccctgcacattggtatagttagacta

SEQ ID NO: 23089 - DNA, 3213 bp, Cannabis sativa
ttatcgactgctaataagaagaataaagagattccatatctcttatttgtgtaagatatcaataagtgaaaaaactcctaatagtcataatgtttatagaaatttttcccaatcgtttgtttgtcggtttggtgttttctatgtttgtcagtttgtccatttgttgtcaaactgtcattttctctgtttgtcattttgttggtttgtccttttgttgtcaaattgtccttctgtatgtttgtttgcttgtaagaaatttttaggaagttttctattttgtatcctacctcatgtaaatggctatatatagagccatccttttcattgtaaggacatcagaaaagctttctactaaataaatttctagtgttcttctctcaaaatggtcttccaaattttctttaagagatttctgaagtagtgatagtgtgcatcatgggtcgtactgaatagatattactgttatgagttaggcatcactcaagtgtaggtaactaagcaatctatccttcataatcgtaagtcacgctgcagagtcgtaagtcgtgctgattcttgtgaaaacattgcttaagttgtctttagatttgatgatgcttaccttatagcaggaatcctaatagtattagagcaatgtatatatcttatacatgttagttatttgttagaaaagttaataatcttatgatacaaaatttgtatataatatagaatactataatatatataataattagataataattaagtttgtgttctatagcaattattacaatttaataatataatattatcaactaagttttcattttatttgattattaaaagtatataattgtaattagacaatatgtgtatttatagaattaaggaggtgacttagcttcataactctacttagactgaatttgcttatcaaatgcttcaattaactagaaaatcacacacttctgcttcaactcgactttatctacacagattctaagctcattaattattgatcactagtgatgtgggttaacaaaataaaaaattattcaatttatttatagcgttgtctttatatatctcttagatagatatgtcaaggttggttggagaagctcttacatgtcaatataataccttaatactttaattatgatagaacatattattttgtgactttttctttagagtttcttaatacaacttttcttgagaaatgtattaataaaagatgtactatcaacaaagtgaaatgatcaatatccagtcgcctaactttttttttactgggtagtgtttgatttgagaattattattatgaaattggggttcaaacccgacaataatttaaatgtttggagcgactgtttagtataattttatgttctatgcccatcttctactagttgaacataaactactctacaaactgtgttgagaagggagaatttattgaatgatttggatgataaaattgaacaaaataaataagaatggtaagctatcatgttccagctaagtttcatgtaaacattgcaaggatgaggatgacattctcatttatttggcaagatgttgttcttgttgagagacattggtaaaaaaaaaactttaaaagattgtgggggcctttctttgggtggatatacattacaatcatttgtgagtaaaattgtaatgaagtttgaagaacatgggtttggaatatgaacatcttatttcatttcaacatcactatctacaatcgaaacaaatagaaataacccaggtggtaccaaactaaagtttcaagacaaacaagatttactaaattgagggcaaatgtgtcattgagttggatagtacagcaggacaatggactcaaaagtatacaatataaatacacaatacagacatagatctagtttggtaaagttgtaaatagacaaaagaatagtggcatttttcacattcaatctttatataaaggccaattgccacattctcaagtattcagaccaaaaacttcaaaatttcaacttcaacaaagacagcaacaaccaaccatggctatggcttttaagatggtacctttttctttataactctttaaaaatcttttttttttcttgggtattttgaatttttaagttgtgtaatatgggttttgctgatctaattgttctgtatatatatttaccatgatgatggttttaaccttaggcgacaactggaatgtgggtaaccgatgagtgcaagaactcattcatggagatgaaatggaagaaggtacacaggtacatagtgttcaagatcgaagagaaatcaaggctcgtcaccgtcgacaaggtgggtggtccaggcgagagctacgatgacttagctgcatctttgcctaccgatgactgtagatatgccgtgtttgacttcgattttgtaactgtcgacaattgccggaagagcaaaatcttctttattgcttggtatgttctctcactacttttttttcaaatatcttatctccaacatgtggtacttgtcagggcttcttaattttgtacagattttgaaaaccatgattgtttaccgtgctttccaattgcgtttggtgatgtgtgggtatctcaaattatgctcaattcactttttatagaacaaatatagaatcgttgagtaatattatgttggcttgtttggattctcaggtctccaacagcttcaaggattagagcaaaaatgctctatgcaacctctaaagctgggctgagaagagctctagatggagtccactatgaagttcaggctactgatcccactgagatggcaatggatgtgattcaggacagggcaaactagattgaaattatacaaagcttataatcttatgttgcttcttacctctgcttaattaataattccatacaagggctatgcttttatccatttttcttgttacttttgtacccttttcaaagagttttggtactaatgtaagttaatttctctaatcttgtaataagaagtaaattatcatgcttaagtgtgctttatgtaattactaattacaaagcacctttttcatgtaactatctctttgacactaacacgtgaattagtgtaaacttttatgcttcttaaaaagatatatagtttcagccatttctattcatcttgaactcattccaattcagttgtgacttgtgattagtcaagctcttggagttatctaagctttttcagagatga

SEQ ID NO: 23090 - DNA, 5298 bp, Cannabis sativa
attgtaccttaatagtaatatgtgtaaaaataactgttagacctctgtaaaccaactttatatcaactaatttagtacatcagtaaaaataaatatgttatataagcttttttaagagctttgtattttattgatgatatgaaacacttacaaatatgataaaatccattgtatcgttgtcaatttgtaataattgacgtgtcaagtttcagagagttagcaaaatatttatgcaactataatgtaactattatgaaacataaaaaatcagaacagtatttacacgtacgtgactttatctacatgtgaatttactaccctattcgcgatttagtatgaacaaattcaccattagaaatctagaaaacaacgaaaatacatcggaataaatatttaactataatattgatgcaattttttgttttagattatacttgagttagattttttaggaactccagttcaacattttgagatctgcatttcattaaactagatttatggttgaattttagttttgtagtagtttttataaattcaaaacaattgtcattttgattgattctggtcgtcttctcaggtgaagttaccggaattaatggtggttctcttttagttagattttttttcggttgtattgggttactttcagagtcaaccaaccagagcttttcaaatttgaatatgctcctcctttttgttggtgtatcggcaattaagttacaagaaaaagttgcagaaatggtacgatggtttgagtggtagtagtctaaatgttcaactgttggcatgtgaaaatgagactcccattggttgttgaaaaacaccaatctaagcattctttgattgtgtgcaaagtcgtacaatttttaatccatgtgaaatgatcaccattataaggtccctcttgcatgaaacatttaatcaatgttgttctaaaggcttccatttgggactcacattgaagtcctccactcgatttgccattgttagaaaggatttcattgaagtctccaatagcaagccaagattagagtggagcaacatcaccaaaacgttgaaaaagagtccaagaggcagacctattggcaatatccggagccccgtaaaaaccaatgaaatgaaaacttgggctgccattaaatatcatatagcaatcgaaaaaatttgggctgaaattcagtaaggtaacatcaacatcttctgtccacaagagcatgagaccacaactaaatcctacccgaggagattcaagcccattagagaaatgtagtaattgacgaatacgagtaattaaattaatagcaagttttgtttccatgagaaacaaaacatagggagattattgttgaacaagcaatcatagatgtctgaatgcactcgggttccctaaaccccgtgcattctagcttaagattttcatgatgaggtgtggggttgcaaagcaacctccgcagttgagtcatttgagagaataaaatccattccagtagaaacttgactctccgaaccatcttctgttgactgaggggaagaggttgatccattgaaaccacgacacctcttaagcatcttcctcatagaataagtgtcatttggccttttaggagtgaggtttggtggggcgttctccttgttaccatcaaggacagtgactgagcattgggaaaaaccagtagagataaacatttttgctggtgtgtaagttctttggggacatgagggaatgtgagaaataagagattttgtgggtggggtcataggaagggatttagcatttggaggataggttgcaaagcagtttgaagatggtgatgaagtccctacatttggtatgtagatgtgtgtgagatctgttatggtggaaaaagcactcgtaggtgttagtaagtgttgggcaggggttatatgtggttgtgttgcgatgttgggaggggcattagtcgttgttagtgatgctaaaacaaatgaattaaagcaggtaataagggcgacgggcagtgattgtgtggcaaggttgttggcgatggtaatatttgaaggatcactatgtagatatggcataggagatgaagatggtgcaaatgtgtgactgttgttggaagtatgtaaaaatggtatgttgttcagcttggtatggtggtgatttgttctggttaaagtttgatgaggagttgaatgttcacctttaaagagcgggtcgggattggcagaaattcttgaagacaacagtggcaaactagttgttaaagtcttccaagccatccttgtgataaaagaccaagcatttcccttactgaaatccgttcggtaacgatcataattatttgtaggaagcctagcacctttgagccatgggccataagaaagatcgtcatcattccgtttgtcaatgctgtccataaaagagatgcattgttcaaatggatgcccaagacacccacattcaaagcaaaattcaagaagtccttcatagcgatactcaatctaaaattcacccattacttttggtaaacgaatcatttgtcctcaaggtagtggtttagcaacagaaagtttgacacgaacacgcaaaaaagaatcccatccttcattagttgagtctctcgtatgttgatataaaaaatgtattgtataggtaaagattgcaagattacgttttctaataattttctaattatacatatatttaaaaattattaatgtcttttaaacgtttttaattctcttcttgtcttattatgataaaaatataaaaatttcatcatacaatatattattttcctcatatttgaaaaataaacacttcaaaatgaaatattttttttattttactattatttttcattatgttactctaaaaagagaatctttcacaaagttttaattccgccaccatcctcatgtatgtgcctcagcaaagtcttccttttcacttctgtaaagtgtcaaccaagcctcaatgtgtgacaattccatttgtaaaaataaaactgcctttttagccgttgtttaggtatttttatatttttttttataaaaaatagaaaaaaaaaaccaaaaaaatatatcaaatagcaaaaagaaagctttccaaaaaaaaaaaaagaaatattaaatttttttaatacaactatgaaaattagtaaatagtttcagtatttagatacattaacatatttaaatagcattatataatcagatgtatgtatatacaataatatatacgtatatataatgaaaagatcaaaactaataatgtatatatataaaagaaaattcatggtctgtagttgaaactaaaattttcaaatgaaacattttattttattcatatgacactattgtttataatataatttgtattaaactattagtaataatattaatataaaaagaataataacgataaatggaaaagtagtaatataaagcatctcaattctcaaaatattatcgtgccaagagtgagtaaaagaatttacctcaaaagtaagtaattttatgatgagagtcttgcattacatattcttcatacacattaattttcaattttaagaccctcaacctctaaggttaaattactttaaattagtatgaaatatatagcacaattaaatttggaaaaaaaaaaaaaatacaatcaacaatttaaagaataattaactttttatttctcaattctagtttgactaatttatagtacatgtattaaatgaatttaagtatattgtcaataatttttattttaatattttttagttttatgatggttagaaagttaatagtgtattaattaatactaattattaaacaacatggtatgtttctatgtaaatattaactattaaaaataatatacattgcttacttttttaataattatgttataagtgaaagaaaaatataaaataattatattaatctaatattacctacatgatatatcatatatatatacaaatatatgaaaattatttcaatagttacatattagtagaagatgccacttaattcgaacatcaataattatctgtaaaaaattatggcaatattttttcaatgtccaaaaaaattacacgaatagaatataaaaaacacaattaacttgattcaagtgtataatattttctttaattttacgaagttttttagcaatacatataatgcttcttaatatataagaaaagaggaaaaaaaaccaaaacatacaattttcacatggaaaaataaatataattgggctatagtacaaaatacaaaataactattctcatatagaaaatggattgtactagaaacgataaaggctactgtctttgccatcgtaactgtaacatatgcttcccccacaagccagtttgtgaagtggctaagagcacgtatcttttgcccctgcagctcgggaaagctctcctacaatatccattccccatttagcaaaagaccattgaactataatggtgtttagggtttgagctagtctgtggatggctggagcatgcctttgactcttatcacatcgttttcattgaaagtagcatttgccaccatgtacgaccaataataccttgttgttaatgctttcagtcatctttcttgaattattaccacacatttcttcattgatatcaatcaacaggcaatataatttcccagccaaaattacatatctgcatgctttaatccttagcttcctggatttttctttatcctttgggagctctcttttatgaaggtaagcaaatattggatttatccataaaggttttggttcttttatttgaaaagcttgataaggttgcaacttctttttaaggtcccttgagaccttcgtatgtatacccaccatcctttcagtgtatacgagtgaagctttcatctgccctttgattcatctctcttggcaccccttgtattttactccaaaaatttgtcttgcaaatctgtagcaagctcaatgtattttctcattacagagcctttagcatcaaactttcctcccatctaatggacaaccaacatgttgtctgtgtgcatttgaattctcttaattcccattgcgagagctaattctaagtcgtaaataaatgctttgtattcagcttcattattggtacatgtgtcaactattgggatgtattcttcaatctttaggcctgagggagcttccagtattactttgagcctaactttttgttgggttttatgccctaaataaaactccagttcaatgtaatctattttattcaacatcaataaagaaacagaagtatttttttcattcatttgtgtatg

SEQ ID NO: 23091 - DNA, 3121 bp, Cannabis sativa
cgacactacccattatttacatggtatgtggtgggccaatagatttaaaaattggtctaggtgtacgcttgaggcacaccttaaggcaaggcgattttttaaaaaacgtatccgaggctatgcctcatctgctgtcattgaggcatacacctcacactgatgaggcgatgtgtaccgaggcgcatgaggcgattcttttctcttttatgttaatcatctttctatgcaacatgtcatggtttagattgtaccattagggtgagcttcatgttttcatttataagttgtgcctcgtgtttgctaccactggtagcaattataattatgtaccaaggccattctacctttacatgggctgagccgtctgccctatgtgctatcacataaatgcatatcccaccttgcattatgtgtgtgggttaggtcggtccaatcagccctactacagtgtcacgccaggggtgatccatcttggcactgtaacaagatgggggttggcctaagtccacatgtgcatctctaggtttaggagatcaggccacgtacaattttaaatggttttacctttctcttctttttcattttgctttatattgtgactcactttttttcaatttctttgttctatattctctaggcatctgtcagtgaaagctatggaggtaacttacgctttggttagtgcttgaatgtgatgcattaacatccaaagtggagatggttttaaagggattttgcaatgaaattctcacacttaaggttgggttagtccctttgagataattttcttgtatttttctttagctttaagagtgcttgatatggtttatcatcaggatataggaaatacatttagaaaattgtagaaacaaattttctttatttgttacttaccgcttttggagtcgtttgattttttattcagagctatattctgaactctgaagttgatatggccaacaggattagagcacaagagttagacgaaaatggctcccaaaacggcatcatttgaggtattttatggttggaaatcctctgcaaatacatcatacatccttggaaattgagcagcgcagcagttgatcattcgttgagggatatagactcaatgttacgccttctaaaggttagcttttatatgttggtattagagtttagatcttcctatggcagagaagaagaacggtgagtcagagatgaatcttttatgaagaaagtagagctgatgagagagaaattgtagaaattagaacatccttgaaacgagttcaagaaatgcagcaaaagtttagagaaacttaaagggtcctgcctgaatccttgactcaactgatcaagaacttggcagtagttccaacagaaggtgcggtgtcaggacagatcagaccagagtgacagttgagaaggtggcatgatgctggtgtaaggcaagggtgtcactcgcgggtgtgaaatggggacttcagtagctacattgagggtggtgcttgtgtaggattggttgacaacgacgatgacaaacagtgtgacaagaagtgtaaaggggcccttaaaggtgatgctgctgagcttaagtgatcaaagatatggtaacttttctggatttatttttgttcttgttttctattattggtgtatgccatttatattgttgttgatggaacaaattttgctaatttgatacttgttcttgttctctttgaatattttaagttcattgatattgatatttgaatttactagaattgggtgtttgaagtgacaatgatgagagactttttttatgtgaatacaatagctagtaacttcagtaaatattcaattttattgtgaaagttaaaacataagagaaaaactggaaaattagaagtgcaaagtgtgttgtatgttgtgtcttgcaaaacattcacctaagccagactattattattaaagcattaccataaggaaaggaatcctatatagggtgtccaatattttaggacgtgatacattatttttaatgaaatattaatttaaatttaaacatataatactcaaaaaacaggttgtcccattcatatgcccaacagtacaaagtttacactatctttccacataaagtttaagtggtagtaatatagatcctataataagttattttaaaaaaaatttaaatcacaaaaataaaaagtaaaattttaactttttatttttgaaatgcaaaaatatattacataaatttgtatttgtattttttgtttctttcatttaagtgaccactaagaatgtgaggtgaagtaggtcgaagccgagatccaaattaggggcaggagttggggtagggagtcatggtaaggggttgtggtccaggtttggagataaaggcaagagattggattcgagagttgaggtctgatatgaggtcgagggctgtagttcagtcctggagccgaaggttggattcgagctggggtttagggttcgacatggggtcggaattcaattaagtaagacgtctaaaatattgattaaaaagaatacaaattatattataattaaaaaagatatgtaaatatatattttgaaagtaacttctttttaaaatgttcaaaattttaattttcataaagataaatttacaaaatatgtttttttttttttaaaaaaaaaatccttattttgaataataattacagaacagacccataggtatgtttatgcacagtttgattgttttattcccaattttatctatgatgagattcatttgtagttatacatcaaaagttgattaataatttctcacacatgtattaaaaaagtgacattacttaaactcaatattgtaaaatattaagaattattcttggaaaatattaaagtcactataagtagtagtacaataaaaagcataagctgcatgtgatttatttatttattatatattagtttttttggtagtgtcatgtttggaagattgaatttgaggaaagatgagctaaaagttttaacatatatattaaaagtaagttacatagttaatttgaaattttagcttggttactgaaaattgtttagagaaggaattgttaataaaatggggtcatgtgtgtgtggtgttttcttttttcttcat

SEQ ID NO: 23092 - DNA, 2018 bp, Cannabis sativa
caattgaggataactgactcgccgtttccgttgagtgaagccgatgaggacagccgacaagtggatgaggcagctgaggagttcattaaaaggttttacaaggatttgaggcgtcagaagtgaaattaaggtttctatatcagagagataattaaccggcaagtcaagctcatggccatatatatttctactagatgactttgttaatgcgttgttgataaacaataagttcgtgcatatgaattttcttttggtttttattttgttttttaagacatcatgatttgtatcttgaaagatcaaatttaattacatgtaatgtccaataactaaaaaaaaaaagagaagaagatgaagtagatcaagcctgtaatgatgatctaatgagagttctgtatacagcgattccaaaatttttgcctatatataattaatggatatatttaatatagtcttataaataattattaatttgttctagttaataaatatctctactttatatatatgtgcagttatttggtattatattaaattaattaataatttcagtacgtgagattattatttatatgtacatcaaaatagaatcaaattgcactgaaaatttatatactaacttttagattcggtaagaagaagaccagtaggtatagtaaagaaaggtatatatattatttatatatatattagtattaccaaccaaccacactgcaggtactatttctccacttgattgaaaattaaacttttaacaatttttttagaggaaagtggtgatctagaatccatggttacgtagtactaaaatgaaactagggtttctttgttaaattaattttatttcttatttgcatgcagtatgtatataattagaggatatatacttttatattctattctaaatttattatattttggtgtgacttggttactgttgtttcttagttgtttccattattcctccaattggcaaggaaatcagtttaagtagctaggttgacatgcatatatacatgattataacatgtgtatgtaggtaagaaataattgaaatgaaaaggatcaataaggaaagtacggaattgcccttgttactgatcattaaattattaatatttttttattgaatgattaattttagcttttacagcctcggtaccacttccattaacatgtcgggacgtgcttttcccactatctcaaaaaagacttgaaagtgaacccaaatagctggcccctctccaaaatataataattttttttctaactttttttctttcttcttttcattataataattcattaatctttattataaacgtatatttttggttcaagtaggtaattgggtaacagagatatgcatacatgtattatagtattatacccacatattatatagctagtgtatctccgacccgacccgatatcgaattataatatatagtaaaatatattaattaggaagggtcctattcatcgtgttgtaagggttttgcaaaagcaaatccacttgtttaccaaaaagggattactatacaacggagcagatatgattatgtctataatccaacaagtattataattgtaatttacaataatattaatccaacaagttgtataattgtaatttacaatattaatccaaacagttgtcatatatatcatgatcatgataataaagctgctgtatgtacatatcaaaatatatatcgatcctaaactactatactttaggcccccttctgatcagtaataataacatttattaacaatactctatatactttttatttattaattaatactttataaatattaattattgttaaaactttatttaattcatactcttctctgtaaaatgtattataccctataatattttacgtacgtagttgatttaacaagttaattgtggattaggtcgtatgtcatatatcaaatgtatattagatatctaaaactaataaattaaactaagctatgctagatatttgggcatattatatata

SEQ ID NO: 23093 - DNA, 2189 bp, Cannabis sativa
catacttgttagcaaatctagatcttggtaaaatattcccaacagaaacctgtttgaattaatattgggtgaacaattcatggtttgtttgataaaacatgggattgaaattgacgtatcattgaacactgcactgaccgatatgcatatgaaatgtggcgatgaagcaacagtaatgaatctatttgagagttattctaataaggaataatgtgatctcataaaatgccataattgctaaccttgagaaataaccaaggtgagaaatctcatttacttttcatccatatgctaagaagtggaacctaacaatgtcacgattatgaacatgtttcttcatttgcacatcttgtgactctaactcaaggacaatgattgcatgcttatgcaatgaggagaaaactctctttttacaacaattgtctcttgcaaatgtatttgcgacagtgcatgaaagatgcatgaatttaccaagaaaaaatatcatcacatgtaatgccttgatagacaagattctatgcatttttaaagatgatagaaaatggtttgagcccgaatgttctaacttttactacttgatgttttttcatacaatagttaatgatttctagataaatttggagcttgttgactatggttttatggttgatctttcccgttgaggttggttaaacgaagctatacaatttattgagtccattcctatcgaagcagatgcgtcgttgtggaaggctttgctcagtgcttgtcaacttgattctgatataaagttagctgctactatatttgagaaacttgttgaattagaacccatgaatgatggaaattacatattgttatctaatatcgatgttgcagcagctcttatgctaaaagtaagaaagataaggtcgttgctccaagaaaaaaggattgaagaagtcccccagtcaagttcgattgttgtttataattaagtacattcttttgtgggataagttgaaaaatctcttttttgtatccattaatgaaaaataccctcatattatatttcattaaaatatactcacttttgtgagtgggttgcccaatgtattatcgctttctacttaagtctaatacataatttacattaatctaaagagtataatgaagacatcatctataaaagtgggtatatctaaaagaatataaaaataaaagtaaaaattaaaacagataaaataaactaggtatataatgtaattttttctttttttttttttctttttttttgcagctggcaagacatcatattctcttccaaaaaaatatctatgccaatttgtgttctttaactacttaatcagagaaaattgatatacatttgattccatatggcttttatatgaaggagaggattagttttggtttcaaaaaaaaaaaaaaaaaaaagagagaactagtttttaaattggttttatatgaagatattagagaatcccacattgctaatgtgtgaaaagataatagaatatataagagaaatggactactcctcccgttaccccattcagcttattcctaaattctaacaaaaagaagaggaggattagttttaacaatctctattacgcctctcaaagactgaagcaaataagaatattagactaaaacatttctccgtgtttaagattccatgtgtaagaaataagatacaactctcccaaagtttccataccaatgaggataaacataaggtgaactgggtattaccagaagttggtttcaaactccacacgtgtctaattaacttcaataaataggaccatcaaattcaaagatatcaccaaacatattttgattagtccccgtatatttaataggaaaatttacattccagtactttaatttcattctttttacaaaaatatggtgttgtcatttttatatcaaagtgtaccgttttgggtatcgttttcaatttaattcacttttttaaaaaaaaaaattaaaaaaaaaaaaaactgactgggacgtgtgtgatgtgtgctgacgtcatcacatcacgtccttcacgtctttcattttttgcagacttcaactgttcacgcgccttattgtttgcatttgtaattcaaattgcagtcggttttaaaggtttataatcattattttcttttatttttatattatattttaccatttttatggttttttaagtgtttgta

SEQ ID NO: 23094 - DNA, 1922 bp, Cannabis sativa
  modified_base (136)..(136): a, c, t, g, unknown or other
tttactgtttcagtaattgtttatgtactaaaccatggtccctagactttgatatttaccaaatcatgcccctcaaactttaatatgtattaaatcatgtcattcagctttcatccatgttagaattttttactanaattagacaaaagtccttaatctaacaatatcaatagttcaagaaaatttttaacggtcaaaaaagctcaaagatatgattttgtacatgtttaactttggagagaaaaaatcctaattagccattaaattatattgaactcaattattagctagattagtaatgttctttaacatttctataaaaaaaaattactatttaaaataattaaaatattctcctcaatactaaaataattaggactctaccaaaaactctttatataatatacacttactcgttattttaaatggttaataattttttctataatcgttaaatttatagttttaaaatttaaaaaattttccttttcaaaaaaataaaaaaattctaaagtggtaggaacgggaactatattataggtgacctattacatgtaatgagaaacaggaatacgacgtcgtttatggacttttgtgagttgattgtgattgggagcaaataattttatttttatgttttttatttatttttgtttgaacaatgaacattgtttatgtttatgttgttgtcgttttgttgtgagttgtgagtatggaatatttactgtggtttattggttagttcgtactaaaatttaataattgtgttttcgttttgttctgattatatcaacctgtactattaactttgctgcagaaaaaaatatattgtactatgaacttgtcccccaagggaaatatagccccaagtgggaaaaaatcacactaaatataggtatatttgaattttattggtttggcatgtctattcaaattatttattttaaaaattaatcctctctcatttgtgcattacttttactattttactattactattatactattactttttatttttttattttttttttagaaaagtttcactactataggtgatatgcgtcctattactttcttaatgtctcttataaaattgtggccaaagttcttgcaaataggatgagaaacatgattgatcttattatctcttccacccaaagtgcctttatccctaatagactcatatctgacaatattatggttgcttttgaagtcatgcattatttaaaacggaaaagaagaggtaaaaaagattttatggtcttgaaactcgacatgagtaaggcatatgatcaagttgagtgggactacttgaaagctgtcatggctaaaatgggttttgctagcaaatggatcaatctcattatgaagtgtgtcacctctgtcatatactctgtggttcatagcggtcatattttaggtcccattactcattctcatgggattcgtcagggtgatccactatcaacatacttgtttatcatctgcgcagaaggcttttcagctttaatcaaaagttatgaggctgacaaaatcatacaaggctgccgtgtggccaatggggcaccttctattacgcatatactttttgctgacgacagttatcttttctggcaagccacatctgatactgttgggagcatgaatagacttctccatacttttgagcttgcttctggacaacgtgtcaatgctaccaaatcctccattttttttcagtctcaatactgagatttcggtcaaggagaaaatttgttctactcttggaatgcccgaaactactgatggctctctctctatctggggttacctaatatcattagaaggaaaaaaaatggtgattcttggctttcttaagaacaagattattaaccgaattaacagttgggatggtaaattcctttctcgtgctgggaaag

SEQ ID NO: 23095 - DNA, 4564 bp, Cannabis sativa
gaggttctactgtatttataataatatatatatataatatattacaattttaatcttaaatattatatttatttaataaataataaataaatattatattataaaagagagtatgttctggcttttccacttcaatcgaccctccttctctaccgtcggcagccgccacctcgaacaccacctggtcatcgtcatctttatcaacatcaccgcctgcatctccagttgaaccgtccctatcttctctctcacagtccgacatcacacgattgtccaggttagcctctctcaagttttctccctctatctgttcttcatctccatcttttttcccttctccttcagttacatccccatcgccaaacaccttttcattatcaaagtcttgataccaacatgtattaaaccatccatggaatctgtagcttaaatcgttaagcttgaagagctttagttcataattcctattatcgtggtaaagagataaggtttcaggtatgaaaccaaactcatcatccatcaattggagtcttaagtgagataaaaaagttgcttcagccgtatccttgtccacatccattaaaccaccacacatatctccaattttcctgaaaattctcatatgccaaaggttctgagggagaccttgaacaccaatccaagatcctttgcattccacctttacattattcttttggttatcctaactccaaagagagaaagtaacatatgattgagcccctggaacatacattctttgcaccttgactaactcttctttttccatctcatccttacaccaaaatgatacatctatcatgaaataattgacaaactattagctttctctctaactctcttgaaagattaaagaagatagtgctccactccacatgaatgttgtccctagcaaggaaaattggcaaactccaatctctaggctgagctttggatcgcatatattcatagaatttaggttgatagaatctcttcccagggtatagatttcttggtttgaaaccgagattgatttctggatataattctctccattcaacttttcctctgtttctaaccgcagcatttacataagatttctccttgttgtgttaatttttaactgctggtttcgccaactgtttcaccacattcccacccattggtttagtaacatgctgccccaatcttttggcgttattagcccatgattgagagttcttcctgcattctcctatcttcacttctttttgctgttttactccatcttgagcattttctggcttccttttaagtacaccaaggagacaatcatttagatcagaccaccctttagcttctgcttcttctggaataatcaccattctgactttgttattcttcaaggttgaaatcttcaggaaagctccattagagttagcaaagcattccataaaataacttccactactgtttctgaagaatcttttgaaggcatccctttgctgtccaattttctttttcagttcctccagaattccactcatccagtccgctgcatcgattgttacccctatctcgtacccaaaaagtctttttctctcacaaattctaaccgagcctccatcatttgacaaggtgaccataaacaccttgtgtttagtatgaaaactccaatatttatggagtttctgatcactaataggaccagagaaattttcccagtcaacaccagcagggtgaaggccttttttcttcccaaaaccccgggttttggtgttttccatggcccttctggccatggaaacccccagtatgcatgaccaagattctcagaaagaggagagagaagagagcataggggagtcaaagagtttatggaaaaaatattcagcacgagcagccatattatattatgtaataaataatataacaataacaatacttaattatcttatcttattaattatcaatattggtcagtccaatgtaataaaatactttcaatcatatctacttggtcactgtcctctcctgggtaagacatcacattagatgtgtaagtagattatatcatagattaccgaatcaacaaaaatatccagtttggtgatttagttttaggacgaaagtgttttgaacatataattacaattatattttaccgtgaccttactatatgttcggaattttataaatagttgtattaataataattaatcatgtaataaaatatgtaaacaacacaattgacagaacaaaaatgatttctacttctttattgataaatgaattccacaagaaatgtggttttataagagtatttctaatagaatgctaaataagtggtgcaatgctatattttatactttatgtaaaaactccttcagtggtgtgtcaaatttgacacatgttaaaagttggaccaaattttgcacaataataaacatttttatttacattattgttatttaacattaatgagttactttcatacattttttttattacaatattgttatttttttaaaaaaatattatatttaatttattgattattattaatgataattatcaatttgtatattaagttgcttttatgtattggaacacatttgcaaaaaaaaaaatatatacagtatttattaattttttgtgtcaaatttatcgtatttttaccccatatattggtgatggtctaagggttttagacagcattctatatctcatgatgaactaatccacaagtttcttttaagggactaatctgaagtttgagtagtgatacattattatttaattttcagtcattttgagggtttatatgaccattcaatggatcatgtgggaaaaacctgtgatgtatgaggcacatacacataatttatgcttggcttatgccccttggcaaataataaatttgttgcttaacattcttatatgttatccgaaccacaaaattctaattgaacacatgtgaaacaggattcacttctaattttttaatagttttttttttactactttcttttcaagcaattaaaataattgaacatgtggtctattagtaggtacaggagaaaacaagtcatcaaggactgaggtggaggggtcttctgattctgaggatggtcttcccccactcgaaaggaatatgaatcatttgaactttgaggatactgacgaagaaagtgattgaaaggaatatgaatcatttgaactttgaggatactgacgaagaaagtgattgaaagaaggattatagttatttgacttatttctacttcaccgtagctctcctatataaattttggtaggttggtttctaatttatttttgacgaattcgtcctcaaaattaaagtatatattgtttggcaaattaatcaacttttagtttaagtccaatagtggtagttttgttatattttactttctttaatttatttttatattaatttcaaatatttttctttttttgtttcatttaaattaaaatgcattttccccaatatttataaatatatataattttttttctaaaattctttttttggatttgactggtattactctcattgcatgataaatgtctaatttaaattatagcatagaagatgcataaggaattattctcatctcatcttcctcttcaggagtctgtggagactactttttagaaagattaatttaacgtcgggatgacaaacatcttttcttagaattttccttagagaaacacacaagccccttatcgatgtaggcagtttgagatggagaaaaagttttgttctttttattcctcaaaatttggataccaagaacatgacttgcttcactcaaatctttcatatgaaattgcattctcaactgtttttttatgcctaataatttcttgacaatgtttcaaatgagctagatatcatctacataataaaatcaagaataccatagtattgttttccttaagatggtaaacaaaggttcattgacattttgctcaaaattgtatgttttaatgatttcattaaaccttagatttagaatatgaacatgaagcttgcttaagttcatatgttttacctaatttttgaaaaataaaaaaaaaagtcaacttttagactttcatcaagaagcgagaagactagaggaagatcaaaattgaccgacgaaccaaatggcattatgtttgagtatcatgtggctctcaaagggtaatatgcgactaggggttcataaaatagccaatccattcaaatctgcatgatctaattcaattcgtaaagtgcggatatccacacttgtgcagattggattggattagaaaaatcaaaattcatacttgtacggattgaattttaattgacttgtaaaagtaaccaatccaatccaatccacacatatttatataaattttgaaaaagttatatataactaatattttatgtaaacaaaatagtaatttaaaaatctaacacataatacaaatatatttcaaatttaatagatcaaatgtttattctatttatatatatgaaacacttcttaatgggtattacatgaatggttactaaacaaatttaactata

SEQ ID NO: 23096 - DNA, 1404 bp, Cannabis sativa
ctacattgttaaaggcacaacacaagttttgtggtgcgaaagccttcttttcgttatcggttatgagtatgtaaatcatttataatttcaatattttttgttatgacaatgtttattgttgttatagaatgttattttacaattcttttaaaaaattaagaaaatttacggtgtcgaaaatagggatcaaaatgttatgactacaatgaacaccattaaaaaaagactttcccaccatagactctcttataattatatatagattagtattttttatttgtatatatatataatggtgggtcatggtcaaattgaagcacatctaatttattctttctcctaaatttcttttttgtaagcatgttcacatatatgttcacacagtcaaagcagaacaatgtaaatttgtaacaatgttcacacagtcaaagcagaacttttgtagattttcaaagaaaaatcagataagtcatgtttgttaaaagtctttattactcaactattaataagaatctcacacaaaagtcttacaattacaagtgagaaaggaattaatttggtggttgcatatgtcaaaacaaggatggcctacctgagttgaaaaggatggcatgtgaatatgataagcttttatcatcactcatattcctctcattgctctcatatgttttctaatccattcatacatttccattgctgtaagctactgatctggattggaacatggctgaacttgtgatcagcgctgttatctctgcttcttttgattttttgctgaaaagggtggcatctccttacttgaaggagttcctcaaagaaaatgaaagttctgttgtttctgagagacttttcaagttgaagtcaatgttaaactgtctagctgcagttcgtttcgaagtggagaacaagaaaatcaaaaatcctgctgtggagaagtggctggacgatcttctggatgctatcgatgatgctgaagacttctttggtgatattgaatacgatgctatgaaacccaacaatgttgatgagtcaaagaaagctagaggaaaggcaagtaagttactctctcgtttctctaaaccttttaactcagctgatcataaaaggaacactaacataagaaagattctaaagaggttagagtacttagctaatcaaattggaaacttgaatcttgaaaagaatgttgatgaggcgaaaccatccgaaggttcacgtgtgaagacttctctgccagatgaacctgaactttatggtagaaaggctgatgaagatgttttgatgaagttgttgatgtctgatgatgtaggtagttcaaagatatgtgtcgttccaatattgggaatgggcggggttggaaaaaccacccttgctcaaacccttttcaacaatgaaggagtgaca

SEQ ID NO: 23097 - DNA, 1840 bp, Cannabis sativa
tttatattattttataacaattggttgtttttttatgcataattatttagttgttgctaaataataaacgattttttttgatgaattagattatgtattggcttaaaaacaagtgtttacaaattaatagcacccatcaagggtcttagtaatcatctatacatgtaattcccaaaaatactttctattctatacaattacattattcacaaacttaaaaaccatcgcttatcctcctctgaaattttccttggccaaaacaattcaattcggtgtgttacttcagctttgagttcctggatcatcacattagttttggtgtttctttttcccaaaagcacctgtttctcaacctccagatgttgtatatcaagctagaagtttttttttatccgatagaaaacgaaattaatttatttgacatgaaattctactatgtattaattatgactgtagtttaaatggaaagttcattttcatttactaaaattacaattaaatatataatatagaagctccagtaaaattgtgaattattatattagctgaccatttaataaaaatagtaaaaatttattcaaaaaaaaaataataaaaatagtaaaaatatttttcaaaagaacaaataatattttacaacctttaataatatgtccaaataaaataatcataaaaaaagagcttgcaaagcttacactaacacaaagataatcagattcaaaaaccataagttgtcattgtttatctttgatccaattcaatgcctcacgaatttacattgcttcagccaattccaatttcatattgccttgtaaaagagtggtaggcttttcaattaaaaatccattcgcatctcgagctaccattccaaaactaaaactatgatcaatgtcaaacaaaacagcatcaacattgaccttgatactattgttagtggtaaaatccaatgctccacccatcacctgcatgtgcaccaggccatggttacgctacttgagagtcttgagcatatctccattgattaaggtatctttctgcaaatgcaacaatatcacccgccctcttaaccttcttattccaaaccaaatcactctatgctccccaaatgacccaacaaagagtgaccaaaatacatgctctatatctaaagtcttgaacactggtataccaatcaagaaagttggtactagacatcaaatgagtccttataccaactttgttccaacacaactgagcttcaggtagggccgccctaggcataggcgggctaggtccgtgcttagaacccacactttttgggagcccaaaattaaaaaaaaaaatcattagacttttattagagcaaaattaaatgtattctaaacaacaaatattcatagcttagttagttgagatgtatgatatattatacaatgtcatgagttcaaatctcataacactcttttttaatattttttatatatatttctgaaggtcccaaattctaattcgccttaagcctatatattctcagaactgacttgccttcaggacaagttacaagcccatggagaatagattcctcatccatatggcaaacaggacacaaaggactcacctgactggagaatagattcctcaacatgttcggtagcaattggatacaactatgactatattttagagcataaaaaagtggtgtattagtatattttagcacacttaataataaattattctaatagtattttaaaaagtatgctaaataaaatttaacccaagatataacattgtgttaaattatgattcattaacttttattaaattttacattttttatttactataatactattattta

SEQ ID NO: 23098 - DNA, 1760 bp, Cannabis sativa
  modified_base (512)..(513): a, c, t, g, unknown or other
aaagaagtgtcatagccgcttctaccaagcccacaagcttgagtcttcaaccaagactcgttgttcacttgccaattgcatcaccaactggtcaagtgctcaacctgagtttaatttttataaaaaataaaatttaataataatctgacctaaaagaagtatagtgattatatatatataattttttttttcatctattcatattataaaaaatggttttaggttggttattatgttaaaaaatattgacaaaatcaaagtcaagatattatatttttgtaccaaaaaaaatatacaaaatcttacatattatttaacaaaactaaggtacaaaataatatttttcaatattaatttcctaagtcatcgatcgatcatcatctaataatagcattattaattgtgattttatatatatatatatagatatgattttgttccgggattactttcacggaatgtattttgtagtacattagatgggtctcagggtacattaaatgagtgtcagnntacgcttctactttttaaccctaattacccttagatcaatctcagcaatcagatcaaatagctcactcatctgacggctgccgtacatcacagattacaatccatgaaagtacaataacggaacaaaatcatatttatatatatatatatatatataaacattattatttttgagagatggtaaatcatgagtatgaaattgatgatgattttgaactacgacctctcattcaagcatgctcaaaatgccctgacatgcacgtacttgttcccacgtgatatatatatatatatataaactccattataatatattatatattatatatatataagtggggatgttacatcgatgttgacgtgtcatttgggtatatgtaatatatatataatcacatcctaaggttaagaattaatgtatttaataaatatgaagcgtgagaccattcccagctttttggaaaccctctttggctatacacaaacaaataaatgttgaaataaaattaagaataattattaattgtatttgtatatgtttgaaagaaagtaaaatatttactagtaatttcagttggtcaaagatttttcgatagaaattaagtaataacacttttattattttaatttagaataaaaaaaaattaataactaaataatgttcaatcatgacgcgataacaatagtaataaataatcacacagtaaatcatgaagcaataaaaatatgagaatttccaaatttgaccttggacaagatagttatataattaataacataaattgaaccaattaaaatactctcaacgtcctaaaaataaacaagataatgaacaaagtcctactaccaagatagtcttagagaccaaaaatagttatagcttaatttttttaaaaaaaatataatcaataatctaatcataatatatatacctttaattaagtcagattatattattattaaatttaattttttaataattaatttatatcatttaaaaacatacagggtccgaattatatttgccctaacattggtcacaacacaaaaaactttataaactcatgatcacaatataaccagacgagctagggttaacagaaactcatggccactgaattatatatatatatatattatatatatatattgaccttgtctttggcaaaatagtactatacagcatgattgttcttgcaagttgatcgtgaaaatatttatatatatatataacagatatatatata

SEQ ID NO: 23099 - DNA, 2454 bp, Cannabis sativa
aaaaaagaagaaaatataagattatttaattaattggtactcacgtagaaggcaacacaaattccagcggtgtaatcggatggcaactttatgttggcgctaaaaaatccatggttgtaatgacttgacgagatgaaaccagacccttttattcaaattaatataaaaaataaataaaaagaaattggccaaacataacaatcaaataatattcggacataaatatatatatatacctgtgaaacggttgaggagaagacgaacggctctaccgtcgggggaacgaacgagattcccgtcgccgaagagagggctgtagccttcgtcgaagggaatggttgcgagattaaaagctgctgcggcgccggtaagagtgtagaaaacgacacttaagagacccaacgacgttaatattattcccctccggctactactactactaatacaaagctttttcccacaagaacgtacctcatccataatttgttgtttttttttaattattaaaattaaaaaaaagaattaagaagagtttctaattttgatgattaggggtttctctctcttctttctggctttctctgcaagttaatatatgtatatactatatacaatgaagacgatatggagttgagaagagagagaaagagagagtagcggagagagaaatatggagaatggtctgttttggtctcttcagttggctgctgcggattatattaaataacaaatttactataatgcccttatggaaattgcctattttatttttatgaaattatggaaatcaaatccgtgtttttgtatattttatatttttagtgttttttcaaaattttaagcaatttttgaattttttcttggataaagttttatttttggatataccgtgttaggcaatcttgcgggataattttcaatttttatttcattaatgagaagatcaattgatgttaaatgataattgaaaagataacacgtggatcctatataatttgactatagtgaagaaccaaattgattgatttggtgatagtaacaagatttatatatatacacacataaaaaaaaaatagggaaattgatagttggattcttttttgtttgtttgtttttttcttacaaaaggagggactgatattaggagtaataattggatattatctattaagaagctgcaattttgtgaacaataataataataaactatatgcatcagccaaatcaaatacatgtcagctagtgcaagaaagtcaatggcagatcatgacaaactaaactgaaatgatgaaggttcatcagacacacacacattcccatacatatttttgtatgcatatttgtgtgttttggggttgtaaaataaatagtacctcacagctatagagttccatgcaaaataaataaacaaacaaacacggtttattaattacctatatatgttatgttcaaaaaaaaaaaaattacctatatatgtatattatcaaactcataaataaaatacagataaaagatcgtatggtacaactagcaaatggtttcattccttgctagtgattaaactaatataaagtatatattctttataaattgatgacaacggtgggctatatatatatatatatatgtatacataatacaaacgaaacaaaccaatcattaaggccatattcttgttgtcaatatgagatcaaaacaaatatgttaatttaaatttatttaaagattggtttggtggccccagaatattaatttgtaataaaatacaaatggctccacaacactcactcttgcgtgtaagcgcaaatatgactagataattaggatagcttcacaactaagtatattaattacacttaaaataccattatatttaatattttttttttaaaggtaatttaatcatgggattttttaacatgttagtggttcaggttagaagagtttgttgaccagacttagatacgattttggagaataaatacactacaaaatattaaataattggattgatgaaatattccaataattttcatttgtttaaacaataggaagttcaatttcaaaataacaatagcatcgatttgagggttataaatattcagcaaagaaacatgaaaaaaaaaaaaaaataatttatagcaaatcatctccaattataggacaatattagtaaatatttttattttaaaatttgtagaaaaataatccttttagactatttattatttatattgtcttttactatattttttatatatattttttagaattaaaatcaaattacttaaaaaattatgatatatctataatattagttttttaaaattttttttatttaaaagttatgtcgattttttttaattttgtatgtttttttttttttaaaaaaaaagtcaaatgtaataagttagttaataaaaattataaaaatacatttattacatatttttt

SEQ ID NO: 23100 - DNA, 2141 bp, Cannabis sativa
  modified_base (2085)..(2114): a, c, t, g, unknown or other
catttgagaactagatcgaaattcgttgattagaaaatctccacgaatgcctaaatgaggaagagttaatttacactgtactctttttcttttgaccaaaatttttcagcaagtttttattgatgcaattattatggacatccaagggagagtattatgtaatattatttatggatgtccaaattacaaaatcaattatcaccattaatgtttgattgtattttccttacattaatttagtttctcattcctttagtcaatacttttgtataaataggggttcaccccattgaaataaacaactgaaaaattgtcattcagtttctctttctctcttcatcttcttttcttcttatcttttttatattattttataacagtttttaggttctttaagttttgaaataaaataaatgggaaagatttttcaggtataatgttgaattattaggataaaatggtatcaattaattaagaaagtaatttttgtaatagagacttttttttatgaatagtaaatgaaactttactaaccatataattcaatgaatgggcttattgtaatttaattatttaatattattaattctaaataaattctctgtttaacgatcgaagtttattagtagagcatccaatgttcaaaattaggtaatcatatgtttttttataaaaatcaataaagtaattatatgtgagataactaatttgatttaaatcaaatttacatcgttgttttctgttcttttgtttatttccttcgaaatgcttgttgtgagaatagaacaaactgatttattatataagcactagaatataacgtactactttataatggagtatcgacagagcaactgtattgaagttgtgtttttgcaccacaaataatatattataatttataataaagaaagaaatgggtaaattaaaatctgaggaatatttgaaaacaaaagaataggtacatacaagatacaacctatacatctagtacttctagaaatgaaaaacatggtggtactgtggtatataatatatatcaaatatgatatcgaatgtacagtacagtgagtcagggggagtaacgaggaagcatattttaataagcacacacatattccaattttcatctatgataattaattaaatggagtttcccctgtgaaaagaataaataataatagtagtaattggttgggagtgagagatagttaaagtagtagagcaattataataaattccctcaaataaaaaataaatagggagttgagttgagttgagctgcatttgagtgagtggtggagcgtagggtagggaacgtgggggtgtgggaagtgaaagagaaagtgaggatggcatgacgtggcgacaacgatttgagaatcagttcgccgcatacggacggcggtcctttcaagtttcaacacaagaatggtgcctagtgggtgggtggatcccacatattctctcttttcaaatttgttactttctttttactatttaccatctcaacttaccatctcaactttcaagtctatgtaattattatttattaaattaaaatatgtgaaattaataaataatgagataatatatatatatttttttaatgtttgacatcttaaactgtcacatagtgtttctccattttattggttgaacatgagcttaatgtgtcttggtttataccttgaatttgaatttcgagtttgaatgcattaaaaagtcttgagcctgtgtagaatagtactaaattttcttgattttagatctagagtttagtgcaatattctatattattataggtagtattaaattaatattacgtacagtatacataattatatttttagtttttattttagttgtagatatttttagttataaaattaatttttataggaatattagcggctaaaccatttaaattttacggtttgtaacagttaaccacaaaaatcaaaattttggcggcataactacttaaaccttggttccgttgtacaccttcgtccaaaaattaaagtgaagtgccacggtagactggtcacatgtacacccttgtacacgtggcaaatttttagnnnnnnnnnnnnnnnnnnnnnnnnnnnnnnattataaatatttaaaaaaaaataaaa

SEQ ID NO: 23101 - DNA, 2191 bp, Cannabis sativa
  modified_base (1719)..(1724): a, c, t, g, unknown or other
aatgtcttaaataagaataatttacatgccatgagaaaaaatttaactaaaaaattatttcggatactaaaacagatagagatgtatcggtgtatcccttttaaggaatacattatataatttctcataattatattataaataagttattttgaattgttgatataaattatataaaataaaatatgtctatttatttagtgagatatttaatgttaatataagtaaaaaattatacgccgaccaaattagtgtaaattctgcaccagattagtatagctatttgagaggtctcgagatacagtttgagttgatcatagaagagcaaaaatacgaggtacggatcaagccaaatatcagttttgggtgactttattaactgtattaaaggtttcatgatcaatttttcccttagttaatttgtatagaattgctattcatatgaacatatccaatggcattgtctcatcatttccaggattaaatgctttgccacttgatcaaaatttcaaatgattactaggactaaatcagtgcactaccacaaagttagtcatttttttacacgcgaaatggaaactttttacactcacaatggaaagaattcattagttggtggaggcagtacttgagattgtgaatcctgttcttatggcatgctggaatggctcccaatctcatgaagtcatctgactatcatcaccatttacaacctcatacaagactcagaaattgttaacagtggccagctttttcctgcaaactgaacatgaaatattctcttgttaatctgtggaaagggaattacggttatgtcattggtctttcctctttcttttcggggctgatgatgagttctcgggggtggaatccatatccaaacccagacacttgagaaatgcacttcgtgcgagcctaaaatagtggcatggatgtaaatatatattgattcctgtagaaggctcttctccgtctcggttgtcttcccctctcaatactcttccgctagttccaggtgttatctccccttttatactgtgtctttccctaacctgatgaaaataatccaatttgttatacatataaatacatgttatagaacatcattgactcattttacaagatattctaccttcaaaacatgattggattaggtgactgcttatcacataatcaaattactgtgcaaatcttaaacaagtaaccttttaaaacatgttctagtagtactttttttcacatcctaatatcttcagacagattgaagtagattgtaatttcattgattttcacagacaaagcaaagactgagcaaaattcatagcatttcaaccaaggtgaccatattaaaataaataaacatagaaagcagaattttttaaagttgaatcttgaaacaaattagatcataataagaaacatagtggcaaagagaattttcaaattttatatcttgtaggagaatcatctgaccattaattttataagaataataaaataattaatacagacaaatgcagccaatgtttccaaaacattatccaaagccataaatcttgccatctttcatctatttgtttgcttatcattttttatttatatggttaactcaactgaagctcaaaaataggggtcaggcagtatgtgagccaaataaaagggaagttggtaaccgttgagaaaagccccaaatacgagaataataataataataataannnnnntaataataataataaataaaaatgtagataaacataagaaacggttataatatatgttgcagacaaagaatagaataaacaggtagctaaattgtaatatatgaattattttaggtcattgtgaagtggcatggcaacaaggaaatgatagagtttcgttttacaatggaatttcttatgcaactattgagatatccaattggccatgattggtttcttatgcacaaaattaaaagatgtgattcaattatttaggattaagacccacagaaaggccaatattttattgatataaaatcaaacgttatcgcctggcctgatgtatatgttttaattcttaaatactcacaaaaatatagattgagctgtgctcatgtttgtgaatatctcaatcaagacaactgtaaagatctagatttcactttattcaactcaaacagaagaaatatttatattcataattctaa

SEQ ID NO: 23102 - DNA, 1071 bp, Cannabis sativa
aagtgttccttgttgtatcgtacgatgatatttggttatgtgagaattataattggatctacaaagcaaatagcagcttggttatcgtacgatggtgtttggttattaattagccttttttataacaaaaaaaactcatcatcatttggtttttctaataaagtgaatttcttttgtcttttttctttttaataaattcaattacacaaacaatgtatataccaattaaagtgaattagttgaataaaaattagtgggattcataccaaagtatcattgaatctattttagtggagaagaaagaaaaatgtaacgccccaacttgcatttctagatacaccccatcttaacttgttcaatggatttgtcaaaaatttatggattataatatatatcttactattattaattatatttaaataattattaaaaaattatatttatatacaaaaaatggtataatataaattcacacaattattcataataatgttaaaaattaatataaatatatcataagttatatttttttattaaatatagtacaatttttacatatttcatttccattaaagatattcttacaaacttatatataataacaacaaaaaaactaaaattctaatggaaattaataaaaatatgtacatatcgaacacattaaggtacaaagcaccacaaaaataacatattattattggtgcattttaatatgagttctcataaattttaatttaatatgatttagaaaaatactaacaaattattgtgtatgtgaattagtagtatggtattgagcattttaagatgtcacataacaataatagtacaaaaaactatttataaaaaaaatactacaaagatcattcataaaaaaataaaaaataaaataaaacacaaaagaaaaaagacaaaaaaaattactaaccaattattggatatcacaccggtataacattgaacaccttaaagtgtcaataacaagtacaaaaaattatttacaaaaatatagtatataaaaaaaaaggttaattaagatttttgccccatgaactttgacatataccaaat

SEQ ID NO: 23103 - DNA, 4831 bp, Cannabis sativa
aaatattatagccaaaaccttggcatttgttgtatcaataatgtaaggttgccggctggaatgagaaaaaagcaatatagaaaagtaaatatcaaaatctacaagacatgcaaaaataaatgatcacattaagaatcatcattattggatttggataaagataagactaataccatgaaaaatacatcaacggactttaagcttctttcctcgttatcctgtcagatagatcacaatgaaatataattaaaactaaagtttttttttattattattattattattattattccttaaatttatgtagtaaattctctcacctgaagcaacaaattcccaaggctgtggtgatttcatgaattactgatgtggcaaagtgcaaatagagcacaactgagtacagaaaataatggatttgtcagtgaaacatataataaaatgaacaaggtatctggtataaatatacagtatacatctaaatagatgcagtagtaacaaatcagtaaagacttgcagacaaagacataattcagagattgtttagaaaacagagtaatgtagcatatgcataataataaacaccatacgtgtgaataagaagtatccaacaagaaccaagctttcatcaaagaaaggaacactgcaagaaagaaaggaaaaaatctttgtcatcaggaattgtaagagatgtagagaaagcaaaatgaaagaagcaaactacaacatacccatcattcaatctggctgtgagcgcatttgcaatggcgatagggatatacaatagtgactgcagaaaatattcaagtcagcaaaaatagtcaggcttccgtaacggaatccacaaaaaggtttactttaatatgatttagtggattaagagtcagcttatatttgaaccttaaaaaatcagaaagattactccttgtttatcataatagtaatttacaaacaatcacagaattcttgcaacataccatgcacattccagttttcaagccctttggttcgtcacacagatgagccagtaccaatctcccctgccagccacataaaggattgcatcagcccaaaagaaggatgaaaatttgataagaactaaagatcacataatagaataaatttgcaaggactcttttctaacaataatgtaggtttgacacaatattacacatatattgagataaatcagaagataaggtcacggagaaaaagatatcttaccacaaggaaaccgaaagcaagtccagttccaagtacaactaaatgtggatagctccttataatatcagatggagacaaataatccctacatgaatatagtttaagcaaaaaataagaaataataatcaacatgcataactatctttaaagaaatgagaaaaagaggttacgggtgtttgagaaataccaagcaaggactccgaatagaaggacagtaaaaggataaagctgacagaaaattcaaaaatggttaagagacaagttcattcataagtgagcagggaagcaaggcaagttcaagataattataaaataaccattgccagcgccagtagcaagcttcctttccttgcttgaaccaccttacaaacattgtacacgctgcatcaacaatgaaacgcaagttatggttttcttcacattttgagatctaattagctcaataccaatatcaactaagccatattaggcagagagattatatacatatatataatgcaattgttaagtgagtcctgcaaagttcaatagtatattaagagagaaatacatacttgaatgcaattgttggtataacagcaaaggctaccatgaagaacaacacaagtctggatgttgggatttctgaggtaaacaaaataaaaataaagtgagagcatgtcaaaagccacagcaaaacagtaccaaaattatgtatcataagcccatatcgaaaaaaaaaatcatgtatcataagcaagagcaacgatattaagtataaagtcagcaaggtttgttacacagaaatttttgggttgtcaacgtacaagaatcttaccactaataaatggaacccaacttaaaaagggtacagacttgccaaattgttgagcccaccattcagcacctggcaaacaaagaatgaataaattttccactcatgctagatatggatagggataaaaaactacggtacatatataccaactttaaatataatcaaaattgaattgcatgtgcataagaatctcacaaagagtcaagacattacccacaatagctgtgaagaaatgaccaacgtatatcagcatgagaccctctgtaggtccattaataatggggagagtaagggtatttgtgaagtaactggatcagaaaattttcaaacataacaattaataaagtttactaataaaaaacgatgaaactagtcctaataaggtaatttctgaaaaagaaataaataattgttcaaacagtacaagcatgcattaataaaagaggatcaaagtcccccgtctccaaggctccaagccaaggacaacgcaaaatgacattcttttcagctggttaaattaaccaattcctacttcatttcctcaagaaatatgcgaagaattaaatgcttttattacagcaaagagtcaaactatataacttactgttcccatgtagcaccataaaatggaacagctgagatcacccagaaccagaaagtatctcttccacacatggaagtgctaccaaaagccactgcctcaagctacagccattaacaaaatagcacagaatattgtaagcaaatgcaagtttatattttagagctgcaaaatgccaagttgcgcaaaagacataccgcacaagcaagtgcatcacatcctgcaacacaaataatacaaggaaaaggtttaatgaatcattaaacagttattattcatctacaaaatataaataagatatacttagagagagagagattgtaacaaaaaattaccatgatcgaaaagttcccccaatggacttgatgaatttgtccgccttgcttgcttcccgtctacagcatcaaaggtcttgcaatgcgtaccgaatgaaatcattaaaaagatgttttgaatatgcacatatgtgtcggtgaaacaatccaggaaataggatggacaacataaaagatccaaatttaatcaaattgtctttagactgtaaagcaaacaaaattatcactatagactggaaattattgcattttcattggagataaaaagatgatttaacaataaaaaagatggaaataaaaactattcatcaaataatagggtggtacatactacacatactaaatgataatttatggaaatcaaagtgaatatacaattctttaagccaaaaaagatggatatacaatgtgctatgcaacaaaagaaggatgaacatacacttcagtgataactatatcattatcaagctatctaactttcaagctagtgacacattctacacatgagatatttgaaaagaaaagaaaaaattatgacgaccatacaattctgtgttaactatattatcaagctatctagctttctgcaaaatgtgtccttcttcaagtacatattatcatcacacgttatgaatatacagtggacaatttgatatttcttgaataaatttcaccaaacctgatataagaaaagtagtaatccatgggcaaaatgaacccatcttggaggaggtgaatccaactgaggtgaataaatctgaacataaaacatataaatataaattaaattaacacaaagaagtaggaggaaagatgaagtctctattacatttaatacatagcaccatttgtgttagtcagtgtacgtatggagagaaatgtttttgccgatccttatcccacactgaataaacctatattacaatatacaaagaccaagcatttcttgaatacttcgaagaaaaaacaccacaccccacacaagacagcttaaagtaccagcagaatttgtgtttctgccaatcccaatcccatactgtataaatccatcacaaaatacagcaaccaaacattccttgaatacattgaagaaagtacacacaagacagagttaaagtgccaaactaccaacagattccagtcttaatggtgcgggaaaataaagaaaagtgtagagccgagaattaaagaatgagtatgaacataagtgagataagataagcattgtaagagaatagagaaaaaatttaatagagaaactttcacttacaatgccaagcattgcagacgtgagtaagaacatgaatcctattagagtaatctggacaaaaaacaaagcatgtcccattagaaaacttgcaaatagccacagatgaatattacaagaaagaagagtttataaaaaggcacaaagatgttaagagcggagaatattatgacataccacgttcggactgaagaaaccagaatccaacatgcgtacaggaaggaaaagttagtatatcaatagaaagataataatgtaccaaactaaatttaacatcgagaaataagtgaaacactttagaaaaaaaaaaaaagctaaagctcttagttgtaatttaaaaattagaatgactaaagatattccattcgctaagtcgacaataaactgcatctgcaactattaataagtgaacatttatataaagaaaaaaaaacaccatactatttcagctaagttataaacaggaattccacggactttcgaattaccttccgaaaaaatggattatcaaaaaaaaaaaaaaggccgaatcccacatccaaattttaaagaagacagaatcaaaatgtttcacttcacgtttagaggct

SEQ ID NO: 23104 - DNA, 3564 bp, Cannabis sativa
cccctcttgtcagaactgaatttttatatatacacacaacatcatactctataatgtttaaggatgagaatcaataattcatttctgcccaccgtttttggggttctggtatttgatgttgtgtgaaataataccaacaattcttccaaattatgaggggctaaaaaaatcaactttgtaaaattttgtataaatcaacttcacaaataaatatatatatttcataaataattctttatttataaacaattcattatattttttacaaaatatgttgatgctgaaaattatctcaaaaataaatttgtatttgcaattcgaattctttacacaatttctcctaaattggcgatgattttctctctgagcagtgtttgcaaactcgtatacacttttggagatgtaatttagtagagctttgactaggctaatgtgattaagaattgttccctttttgaatgttggagtctcctatttataggcagtgccgcacaattttcttcctatttccccgtgtgccttctcttctactatacttatcgagctctattctctatctggttctgaactcaattctgctcttctgattttctcttattttttaaataaaacgatgtgtttctgaccactattgttgtttctgtcacatcaattaattacttctcgtgttttaatcatagtgaaatcgtcatttgttaagtttgagctcatatgttgtggaatcggttatccaaaatcattatgcacatgtcttttcaagatgcacaggtacaacaatcatttcaaattttagggaattatccttaccttttcaatttaccctaatcacttaatttaaaatttaaattgacgatatttaattgaaaaagatctcatcaatattagaaactttcgcaatattttagcttttcgccctttctgatcttccccattctctccttcgatgggtttcctcctttgttttcactttttcccttttcctgatcacgacttccaagaataccaaaggcaaatcaaaattttttactgaaaaaggcttcacccttaaatgacatgagctttatatgaccgaatatgaagttgcttatgtgataaaatctatgtaaaggtatcatgttcctgctggcattactttccgaatgttgacaaaacttgaattaatcgaaaacttgggaggccttgagatgggcgagggtgaaaatcttggtcagcaaaaaatatatggaactaatactttttcaaatcctcctctattggcgtacatcctttgcatcattgtgaccatgacccagctgcttccaaatttcgttcagacggtcctgctgctctttgtgctcataagggaatggtacttctcacgtttgagttcttcgtctgtttaagcagaacaacttgcacttcttgttttattgcttgatacatttcccccaagggtttcaattacaaacatggctaggggtttgccaacataacaagcgatgggattttttttgcttttataattggtggggggttggcatcccaaagttgtttattccgaggtgttttttgtggcaaaccgtttagttgagaaaatttattagcctgttggaaccctaaccgaagagtgtaagcatatccttaccaacttgggcattattcaacacttgaaagaaagatatgtcccatcacattgactcatcctaatcaaaaggttttcctgtcttccaaacctccatgaaatctcttcagttaacgtttctacacttacaattttagcatacatgaaacaaattctattggcagagatatttgtgagctatcgagaatacttgacccaggtgcccataaatgaagacccctgggttttaacaaagattcatgttgcccatatattgctcctttggtcgaaggtcgacaaagaagaccgtgaacactcttagttgaagagggtattttggttccaagaaatgtggttccatctgttgctcaagatcaccaaagcatttttccttccaattctgctttgcctagttattcgatcccatcagttgaactgcttttatctactagtgcaatttcttttgtcactatagttcctttatccacaaacccaatttctttagtcattcatttgggggaaagtcgctcgttataaataaagaagaaaaagattatgtgaagcccaaaagaaccaagctccttgggagggcaaaaaacttaggaggccaccgtatttagcaggtgcgagtcttctttagaaaattatcgagtggcttcttctatgcttgtgagttcaactgcccctagttcttcgtcctgctctgtggaacttgttaccccaccctctggagtagttcctcctttttcgcatcaagctgagctgagcaagattgtttatagcctgacccctattcagtttatgccataatctcagtgacaattcacattgagagtcagattagtgacgttgactatgggatttattgggcctaacttggtgacatcgagcgctgaagctctttagaaacaccttcaaggtggagtaatggattcccctactttcatgccttcggagattgatcacagcatttcgattttcactatgctctataattttctcgagctccatgctctccatgtctcttcaatttttacttgtacgtttgacgttccttttagtttgcatattattcctaaaacaaagtctttcgaccttccaatgagttcttctatttcttgctctatctctatcatttccctttactcctcaagactgtttccactacctttactgttatgggcaatcccattgcccctaattcactttgctctcccaagatttcgacttctggagctgaacaaaccacaactcatacttctatcatcccttcttcttattctcctcacctatctgctacttctgaactaattagaatttccattcttttgaagccaaatctttatgtgcagtgccttcttgaagttgaaaatgagaagtggctccaacttcagaaggatgtcgaacatagcctcatggctctattcgacttaggtcttgctaccactcaaaagttgtattcctctctctatcccctattcttcttctgagcatgaagcatgctgcaaggaacttgatgtggttgtggaatcaagctatgcactgagtagagctcgagaacgacgagaagaagctgctttgtcttctgttgtcaagaatgagctcgatgttgaaaaaaagtcttataaggattcttgttctcaaatagaagctttgaaaaaagatttaaagaaaaagtataaggtcttgaagaacaaagaagaacaacttttgaataaggaaaaagggatttccacatagatttaggtgttgtaacataatagagtgggcaatgttacaaccaatgtgtggttcgaaaatgagagagagagagactttataatataggaaaaaaggcaatcttttctaaaattttgaattctaaagaagagtgtgtagaacactctcttatttccttcttcttatatgcaagtaaatagttattttctttcattaattaaatacaaaataaaaagaaaatacaa

SEQ ID NO: 23105 - DNA, 5237 bp, Cannabis sativa
taataagtaagtctgattatattgaaatgagttttaattaaggcataaaacccaacaataagttgggatggtaagacaaaaatatggagctcgttctagtaccaaggtattggaatggggaacatttgaggaaatactaccaataattgtacaaggtctgatgacaacttcaagtacacaatgctagaacatttactcttaagtaaatggccttctgggaaaatctcgcacaaaggttgagataaaataactagtactcaggtcggatgaccatcttcaaagtacagttttaaaagtgcaattgttttatgtttaaaatagctaaagattaattagatcaggtaatagcttccataattcaataaatgtaagttactacggtaacaaaattattcaaactaataaatgaataaagatattaattattattctaattctatcaattatttttatagcaactcatgaatttaccattaaaatatgtacaaagggtgagctcgaacccaaaagccaaacagacaaaaattgaacttgtgaaatgtaagtgaccaagagtcataagtctgctcggtcacttggggggcaactatacccgtacaaagcattggtaaataacaagctcaaaaaaacataagagtttgcatgtgtaattactaaaacaagggaaaatattcatttaaaagaaaagatgataaagcacagtataaacccaggatcaaaggtgctcggttagctagttgtcttaaaataaaatgaagtattaccaagtttaaagatcgcttcgttggccatattatatttaaaaaaggcccatgggccgaacaaaaaagaagaagaaaggttcacacagcaggagtaccaggttccttgtacggattagtttggtcattagaggctggagtctcagtgttttgatcggtcagagctgtggagttagctacctcacagttttccttatctttttggcccgcacagtaactaagatatgcctctttggtatcactgaggtaatcaaagtttccttctaggttggccttccaaaatttgtagaaaacttccagggtggtagactccaaactctcgacctccttcaaaagctcttcctcccttgtctgcctggatttgacatcctcttccaatttcctcttatctgtagttaaagtggcaagaagagtccagagattttccctctcgtccttcaaactattgacctcgttggatagaacctcgacatccgcctcaagctgggcggtagatggcatctctagcatctccttcttcatctcctcaactcgattattggtggccagaagttgtttgttcacctcgcccaactcttcccttacgacctcgacctccttcttggccacatccacctctttctatagattggtagtggtggtgatagttttcacggcagtagacttggctcgggagtaagtgacgaccatcttcaaattgagccgcataggaaaaggttaaaacctacacggataaagggataagataaaaaccaaaggaaaaaatacttactcaggttgactccttcaggagcccgcccatcagaagctccacgaacatctcgtcctcttcgaatagttggtcgtttacctcaggaagtagccgatccttgtagtgctctccttgcccttcttggtctcagggtttagcatgataggagtgtttcagggcttgggcagaccagacccatctgtgctacctcccttggcacccttggacttgaaggccttcttagttggtggctccacctcagacaccacctcctcagagacatcgataggagactcgaccaagcctttctccttaggcagtatttcatcaccctttattcgtttgggcagaggggtctggccggagctgtcacctgacctcttctttagagcctagaacacattttgagacatggcttcacatggacataataagaaggttaaaaaaaagtatgatataagccaaaacagataaaaattaaatatgagttaaaataccctacacgtaggcaggactgttctcccgaacaagtaaagatggaggctgatcatctgaagagtcttcttgttcctgctctatcagaacaaatttttcctttccctccattggggcagattgccgatcaggtcttccaagctcttccctgatcctgatagaccgctcaacaagtgtttggctacttggagaatccttctgtttcctcttcttgcttggagtttcttgtctgggcacagcctcctttgctgtctcacagccttggtacaaaatcagcctagaaaagtttatacttgacaaaattggccttggaagtcaagagggagacgttccgtgtgacaggaggcagttgaagaatcttttgtgccttcttcctaagctccagtgtgaacagagggtagcaataggacggcacctgctggaagctgctgtgaacggtgcccattcctttgacgaagtagtattcgtccacaaagccccttatcttggtcacctcgttggtcgtggtgcccgtcaaccatttctttttaatctgggaaacatagaagaatcccgacatgttatgcttgggacttgacttcagatcaaagagccaattggtatcatgcagggacggctcaccccatccttgtatggcgtaaaggatgaacagggcagacaaatacttgaggccctttggggtgaattgggtcagacttatatggtaatagtcggcaatcctctttaagtatgggagcatgggcaacatcgcaccctacttggtatggactcccgactaggcatagtaaccttcccctgggctagtcgccagttggtaaggggagggaaggaatcattcgacactccctaggtaaccatggttgagaaaattcttcatcttttccatggtcaccacggatggagtagagacccatcgatctcctagtgcaccttgcctcctcagggggatggcctcgatgtactcttcaataacaaagccttcactgacctccaaaacctccctagcctcagacacgggtttcccttcttcgttgaagccatcgaatggcagcacctgagctactccctcttcttcatctccttttgcctcaggaggagtagcaggatggacctcgccttggtcctccatctcttggacttcaacgtccccaattgtgtcctcctcttcagtagtaggccgacccttttttgccttaggaaaggtggcgagacgggcgatgtgtgggtcagacaatgaagatttctgtacattttgcttggtttgcgccatcattctacacctggacagaattttgtttgtgtgcctagcgatagtttcagcaaaagtggcaacaggtttacctccaacgacagggtttggacggccctcgggcaaagtgtcaacgatgtcgagacggactatgtatgtccagtaggatggaagatagtgtctccacccctttttgagttcccgaatagagcgatcgtatcctggaccttggatctggctgggataaaaatggtgttgcagctcgggttctggggaaggcgtgtgttcactacttacttcccaatcttcaaagatagagttagagaggttatcactggacaaagatgggctggcacagagatgaggatgatcctcgtataatagttgaagcagatcctggtccatatggtgtttgcctccccaaaactcaccagggttcatctaaaaaaggtaggagacaagaagatgggaattggttggggcaatgaataaaaaacaggttggatataccgaccaggtctgattgaggagtcaaaaataaaattttcattcagaaatggaactttcagcccaaaagttcaaaactttgaattggagtctgattctcactaaaccccaaatggataagtgaaggtgaatatcatggggttaaaattagatcgaacttagaatcaaatgtcgtggttaagcaaagtcgagatttcaaaatcttaaacctagaatttctatggttatcctagaaaacgttcaagaacaatcaagattcgtagacaaaaaccaagaaaattaagcatgaaaatgtataaaagaaataaataaagaacttactcactaatttgaagcttttgatctactcgaatggtgctggcaagtttcctagaaattcttcgaagaatttgagagaggaaaatttctttgctctggtttttcaagaataaaaatgtctaaaatgattaattagggttttcaatcctattcataggcagatcgaaagaaagaagtaatcatctcaaaatttaaatgtctcaaattccccccaaaagtgtacgttatgtactcattgctggcaaaataaccgtcttcatgcacgaacattaaaatgcaatttgaggcaaaattgtcaatcagcattaatgagctgaaattgaagagacccgtggtcagggtcacgtcagttcttcaatcgacgcctaggacacgcgtcacccgtccgtacaagactccagattgagtaaagtccacgtgcgaccgggaaggtcccgcgcagacttgggggcaaatgtgattcagttttctacacattgacgtggcaagatgatcgagcgacatatgtctcacatttttgatacctgggtagaggtaaatgtccctagcagcctacacataattcgtcaacatctatgattgtcaattacctgagtagagttgtaaagaagacatctgacgaggtagaagactattatgccaagccacttacaagagataattacttcagaatgatcttcttatgtacagacacgaagacaatccctacaatcgtgggattgggttagagaaatatggcaacctattctagtttcctattttgtgtattataatcatgtaatcattgtaatttcatattttatgcattgtaagcaaaagagaaaccatccgtcatgcattaagcctctataaataatgacctagcctcactatgaaagggatcaaaataattacttcagagagagagattctagagagaaaatagtgatctaagagaattactcagagatcaattgtaagagctttcaaagaggaagaatactttgttccttctcttaagttaatacaatccaaggggagtaggctattaccacgctcacggggctgaacctctttaaaatctgttgttctttttattttatcgttttggttctcttttaattgtattattcaattgcttagtccttgactcattgtcgttggctaaaagcgaagt

SEQ ID NO: 23106 - DNA, 2745 bp, Cannabis sativa
gaacactgctagtccacgggacaacgcccagagaatgaaatcaattaataaagtatcaacaacaattgacttaaacaagtttagactccctctaaatctttgtcccaattctttgtaatgcatatcatgaatctgatttcagaaccaccttcaaacagcgaactcccttcgtctttgaagtgggagtgcttacttcctcccgaagtaaggcttgcacaagtcttctcccgaagacctttctcttgttcaatcaagatgttctaaccaaccctaagaccaatataaaataaatagctcctccaagtgtctagattctagatgggccctacaaatcaaaatgaatataagctagtgtttcactagaagtgtgtatacttatgttgaacttttttatgtttttatgtagcttttaccaaacacacatttctcacaaaaaaagttgaccactagctttctttcagaactccttgattttctagctcattcattctcctttcactaacatgaccacaactttggtgctataagcttgcctaatcttgagcctttgtacagtttaaacctgatgttacaacatttgatattgtagagattcaacaccagtgattgtctctcctagcaagtagtaaaagtcatttcaaaattcacccttcatgataactagggaccctttcatgagttttaaacaagctatcatcaatcttacccgtaaaacctttagtagttagtgtaccaatagaaagtaaatttctttctagttcgggaatgtactttccattggtgagtgtactctaaatgttgccatgtattttaatgattacagacccagttccttgaactttataagccttattttcaccaagcaatatagttacacgcgtcttttcttcaaattgactgaataggttcttatcagaatgcatatgaaatgtgcaccctgagtgcaagatccattcttaacttgtttgatctacactatatgcaattaaaacatcagtatcagagataatgctggattcacctctctcctttgtcattcttatccttattattttccctattctgtttgttcatcagaaaataacacccatccttgttagtgttatctcttttatagtaattgcataatttaccattcttagaccttgattttgatctatttcctccatggcctcgattcccgttcccattttgattgtcataatgtactttgttcttgttgttggagctctcatggcctcttgaacatattttatcagtttttcctctgtatatttcttttgagtctcttttgaatttagtgtttccttaatttctgacatagtcaaaatttctttgtcatatagcattgtatcaaaaaagtgctcatagggtttagccaaagagttgagtaaaataatttcttggtcttcttcttcaatcacaacaccaatgttcttcaattttaagatgactttattgaattcatccatgtgctttttgggttccttattttcttctattctaagagtatgcaatctcttcttcaagtacagattattttccaaggtcttcttgaagtagattgatctcagttcctgccataatgcactagcaatttcttcatctgcagcttgtcaaagcacttcatccctaagactgaataatatggcactgtgagagccatggtttcaatctattcattcttcttcttttctttagtcaggctcacaagttttccaacatcattggcttcgggtaacccttgttgcatcagtagaaccttcatttcaatcctccgtggactgaaatctttctccccaataaacttctcaacttcaaactttttagaattcatttttgataaatctttaacctttgaatgtcattcttgaatccacaatcatcttagctctaataccatttgttgtgatccaaaatacaaataataatgatagatcaattttaatacatacacaaaattaaaaatgaataaatttcaacaaagattaaaacttaaaattgacaaaaataaacacttagttttacaagattcgatcaataaatatggtgtccaacatttactcctctaggaaaaacaatcattgatggctttggcatctttattgcttattttgatatgtaattatagagtttgtattacaaagattaataatatatggcaccaatgatacaaatcagttcttcacctggacttttgctccaagagccttgttttagaaagagagatcagttttatatgttgtgtcatccaattctagtgtcttaaccctcgacttccttatatatagcttcgtacatataggagttgtgtttgagagcaatggtattaactaccattaagctgatgtggcatgcctatactagacttacggaacttgaaccaatcatgcaccacacaaaagtcatgtaatatacatgggcacctaattgatattagagtattaccaaagagcatttcacatagtgcaagtataatataaaatctctaatcacttgtaaagatcaatcacctccttattatgtggtattgaatttcttgtgagatatataataaaaatgagtcaagggtaatttggcaaatttttagtccaattacataaaatgaacaaatttttggtccaattagataaaatgaaataattaccacttgattccccgtttatttcttattgtaatccaaatcttgtcaatggcaagcatgtcatgctaacacccttcacgttttttgttttgttttgtttt

SEQ ID NO: 23107 - DNA, 2141 bp, Cannabis sativa
  modified_base (419)..(439): a, c, t, g, unknown or other
tggaaaatgttcagtttgagactgactatcttaatatggttaatatgattaacaataatatttctttggactcgccttcaagcttagtttttcgtgacatttattgtaatataactctctttaataatgcgagttattcattgtgttaagacagttaatgttattgcttacaatcttgctaagtatactttatttgtagaaactaataaaatttggtggcttggatatctggattgttcatctttaatcatggctgatgacatgaaattttaacaatatctttctcttttttcttttttagagttatggagttttaaaattttcttctaaaaaaaatcttccattccattaatactgaggtaagatactcaatatttaataataagaattgggtacctttttttatttatttatttatnnnnnnnnnnnnnnnnnnnnnattattattattattaattaaattgttagataacagcataatagttaacaaataaaaaattatttgaaaattcatatattataattgtaaagttgtttattgtacttttcataattttagatattcaaattttttataattaattattgaatttattaatacattttatcatttcaaaaattagcatttaataaagaagtgtatacaatcaaaactaatataaaaatatagactgtaatttataaataaatatattttctcatttataaaatatattgtaggaataattatagttctcctaaaataaacatcaaatggccaaattaaaatgtaagttttttaaaaattaggtagagagagtctcaacaagttgatgttatacaatagagtattatgatatattaatattattaaattcggaggtaggcaaggcaagggagtttgttttgttgaagacttttctttttctgataattttttgttaaagcgaaattgctgcattttttctttctttctttcttttctatttttgctaattttctactataaagccaactaggtcaaaccctagagagtcatgacaagtcaatttatgaatcaaagtatttgtgtcttggtcgtgcttattcatatagaactattattagatgtgtttagcgtgaccatattttataaaattattatattaaatagatattaggaataatacttctttttttttttagcagaacaatacttcttgatttatataatttgtgacatttaattttattttttagtagtaaaaccctctaaatctacatttatttttaatattcacttttctatgtaaaatgctttgttaaataccaagtacaatactacttgatagttttgacctatataatttgtgatatttaactccacaaaactgatattttagtagtaaaattctctaaactcacatttattttttatattcacttttttatgcaaaatgctttgttaaataccaagtaggacaattgacatgtaaaaaaatatacacgcgtgaggttcttagggaaaataattaaaataatagatattttttttttctttttttcccttctctttctttttcaatttttcgctgtaaccttaattttccaattaataaactaaatattagcattattcaagtagtaagttacttattatttttgttattattattattatttttttttttgcttgggattggctagctaaattttttaaacatataaaataaaatgtaggcttagtgcctgcattcaacttgtccttacctatttaatttatttttatttttaaaaattctgattagctcaataggaggtaaacttgtattaaagatgttctaacttatgttgttgcttaatactgttctaaaagcagtaacaagtaaaaattattggtcaatcatgtttgtgtattttaggactaagtgtcggtcagtttggtcgattttttctatataaaaatctaaaattcatttttcgatttggatgggtgcaatccgaaaactgaccgaccaatctaaaacctatcttaaaactgaccgttttgaacctcggtttggttagtttaaacagcctaaattaattttttttaatattttaaaatatgatttaatttattctatgaatacattattctatattttacaactacaaatatataaattaattgttcaaaaact

SEQ ID NO: 23108 - DNA, 2751 bp, Cannabis sativa
taaattagtttataaaatcacacacgtgacgtccctatagattagggcgttacacccttcttggggactgaaagtagttcgtaaaaatataaaatttctgcaagacaaggcggaccccagttcctcgctacgtaaaaaataaataagcctgacaataggcgataggcttgtgcaatcaattggtagggtgaaagcccgacaaaaataaggaagttaatgaaataatcttggaggggaagcatagctcctaacatcagatgagtctgactccaagccccaaagccattgtagttgtgatttggcgtctcctcatctatgggaagacggtggtaaactccagaaccggagaatttgatcccaacaacagtgacaatcttctctagttgataggtgcaagtcaaggttgaatacagttcgtcagcctcccaaccgttagaatagcacacaaacttcttgtatataattgggccctctataacctcctccaaggtgtcgtggttctttggcccctttttttggaggatttagcttcagtagtcgcggaggtggacatggaattggtctggtgaagattaagaatttcttggtcgaacccaaagaaaccgtgtgtgtgaagatcgcgaaggacttcactcatttgaaacaacaacaagaaatctagcagttagcccccacatcaaatcctaagtcaaaaaaggggaatgggggcccttccggatggttgtcaaaaggaatccaacgattcacaaagatagacatcgtgtgcaaaatatccaagcaacaaaggaaaggaaaggaaaggaaatatgggagtacgataaccacttcggaccaccaaaaaagggcgtacgaaaaaccctcattctcaaccctcttcctagaaaaaagaaaaacaatgcatacacaacgaaactagcagataaaataaaatatattgcaacaaaagacacaagtcatcggacgcccgtcaaagggggcatcacaccagcgacgaccatggccgtcatttcgaaaaaaagccaagcaaattagataaatacacactttattatcactacttggcctagcagatgaaagaaatgtataaacaaaaaacttacacaaagacaacaaggcagaggtcgaagtcttctggtggtggtaatactttgcctgacaacggctgaggaagagcagaagaaaatcaggggcgtctggaattttgttgaatgggtttgaaatttggaaactaaatggcagtagaaatgacccagttggggaaagtattggcttttatagaccatttggggtgtgaggcaatgtcgatcaaataccatcgtacggttagggttcacaacagttcagattcctcgatccaatgaatgtgatgaatgggtatgatgatgagagagggcggttgaaacgcttaagtacctttttgacaccgacattgatggaggggactgtcaataagcgggaaacgaatcattgcctgtaaaagcaacaaaggccaatgatgaagatcataaatattccccacatgcttgaggcacgtgtcattgcatttattggtgccggaggcgactcacaagtctcatttacctacgactaaaaaagacttagggggtaaatgctgctcccgtttattccgaatatacgtggcaactgatgtgtgtgacatgtggctggcatggacatgtcaactggagaagagtcaaagacttaataaaaccacctgaagaaaaaaaatgaacgagtcgaagtgccaactcccggacatgagcaaaaggtctatcttcttctccgggagccaaggcacggacaagctgctgcaggttataaaggctgggggttgaacaatcattttgcatttaatgcggcatgggaaaaatgtctggccacacccataagaggacgtgtcagacgtcataaacttgatttagggcgattacacgataatcaaggaagctagcgacgactccattatgaagaatcacatcaatcaagaatctcacctaacacctacgcaacctactgcgtaggttatgcatgctctgttttgtactttctgggaacttgttatgcatgccctattttgtgcatcaatcaagaatctcaatcaagaatctcacctaacacctactacaagttactcattttcttctacccaccaatcgctataaataaccctcacaaaaattatgaaggggacatagaaaaatggacacaaaaatattctctgtaagaaatactctctcattaataacagagactcatggactacggttcattaatgccaaaatcacgtaaaaaactacctgcattaattatccctaagctctcattattacattattcatttggttgccaacacctcgatcaataaatgtcattttataaaattaattaaataatacaaaaaataaaatgtctgaccttatatctaaaagtatgataaaataatcaaattttaaaaataagataaccaattaagtaaaaaaaaaaaatagattttatccatttttcagattcaaaatctactaatatctaaaattaactaattttattctgatgattagatttgagatttgaaaaataaaaatctaaatacaaaattacacaaaatattcaaaagtgattccatgataaaacatgaaaaaaaatgaaaaattaattttttttgcattgggtgcgtatgggagttcatagctgaggattctcggcgtgggggctgcatgcagcctctccgcgcacgggatgggccttcagaca

SEQ ID NO: 23109 - DNA, 2207 bp, Cannabis sativa
ggctcaccaattctttgtcatgtctctctagtatagtatcgaggatgaggtccagttactatgcttgggggtgtttccccatgggtccttcattcaatgggaggcacttgcagagggtcttctcttggaggtaaaggctgattcttcagacccatcaggatgtttgtgtcaacctggccagctgtagtggccagatttgtggtgtctgtcgagatgcagaattgaccacatctgcagtgttcatgaaaattccagtcgtggctgaatatggtcatcaggatctgcactcaaagaatcttgagggagatccaatgatgcagaaggtgtagccaaaagtttcctttgtttaaacatggcatttgattatatacgatatcaacccgctctcaataaaagtacgaaactgttgacctaagatttggccaaccgtcagtagagtcatattcaatgttgatgcttgtccccttttgttagcgggtaatgacctactctcttttttgttgtattgatactaagagataatactactcagaccaatatacagtgaaatctttactaatgaaacaatcaaatttgaatgcaaaaatatctttcataattttgagaagcatatttgtgtttttactgactttacctctcgaaacgagtctaaggtaaaaattctttgtgtaaaaaataaattcaaattatcactaacataagacaaaagcaatctttgtatcttgtgtttggttgataacaaaacagaacaaagcaagagaagaatttcatttttgcaattttaaaatgtcatatgtcattttcttttaattttatgtctattatttaaattaaaaattactaatttttttaaaattaataagatcactttattaaaatttaccaactattaattattaataaattattatattaaattaagataatagtttcacttattattttagtttgtcaattattaatttaatattattttaactatcaattactttttatttaaatttacaattgagattaatatatagattcaaattatttctcttactaactgttaaatttaagtaaataatttgttaatttaatttatattgctaatgtacatgtttcatttctaattattacgtaatacatttttttttaaattaaaagttacttattataattaaaattaataaattactaaatttttattttgaattattcataattatttggttttgattaaacttcaaactagtaatgacctttatttaaaaaaaattaggattagttataataatttaactaattaataataatcatcatcaatatatataaaagagtgtttttaagagttgatgtggcagcctaattgtgattattttgtaatctcttatctcctaattttttgatttattcttattttttttaatttatttgtttaaactcattaattgactttaatgagatggcttttgatggtagcattttaatttacatacttatctataatcactcaaacatattctatctttattcatattttcctttaatatatcataaaatccaaacttttcaactttacatattctatctttttcatatttgccaaattaataatgtgaattttataaaaagtgatatggcacatcatcatatatgagagtttttcaattttttaacttttttcaattttttttttaatttttcttatatttagagattttattgttacttaaaacaaaattttataactaaaaaattattcgtattttttgtataactcctatatttatgtttatatattaagtctaattaattattaaaactattcatattcttttattaaaagaaaactttttgtattctaactcttattcttttgtctatatatatatatatatatataaattaaaattttgtagacattcataattttgaagttcttcttatgtttgttttttgctttgtaactttttatgctttatttttatattccttaacatggctattaatttttttaagattttgttatgtttttttttttcatcttctttctaattcttaatgttctatttttaggttatttattggcaaatctctcaaatagatattttgcaccaaaaactatgtaattttttttcttgctttgaaagattatcactaatctttattgtttttattttcatcatatatctctctttctactatttttttttcgctccatt

SEQ ID NO: 23110 - DNA, 1852 bp, Cannabis sativa
aaatcccccaaaattattatttcatatacatgaaattccaaatcacacattttgtagtattgtgacctgtgagtgagtgacccatacaaataatggacaattaattaattaatataacactgtttagcaagttttaattgagatagattcaatgcttatccagcattcaccaaccaaaaacaacaaactaaaaaaagttaattgaaaggaacaagaagaaacagtaattggggtgttgctttttcctttttttattctactatttttagcataattattgaatttgatataaagtattcgaattaaactcattatgctaataattaacagcataagcttagaatttgtttgctaatttttcaatgacttaaatacaaaaatataaaacccaaggaccacttttatcaactcaagataccaaatattcaatatatacgacacaaatgaaaaaagcacaattggaaatggggccatgaagtgatatttttcaaccctttctttagtgacccctaagacccatcaatacccaaaaacaaacacctttgctgactcactcactaactcactcttctttactcttctcactatgggctcctacaattaatgtcgttttgacaattggctccaacaataattgtcgtttaataattagtaaacatagaaaagcaaagcacatataaagaaaaatgacttaagctttcatttattctcatcttaattgtaattaattataataattaccataataataatgataatctacgtacaaattgtcaacaaattacagaacaaaattacagctttaaaaataaaataaaaagaaaaagaaagaaaaagtacatgtgcttacattaagatctgccaaactatcttccttcctatatttctggtacgaataactgaacaaaggcacagaagtaacccaactatagtttaaacaagaagggtatttccgtaatttcacctcgaagcttcttctctctttctttctttcccaacttttccaatcgtgtttttctttttagatctgcgaatctgccacattattctaatatatatatataatttataaatataaattttccttcaaaacaaacagcgaccaacaaagataacagtagcagtaatgagaagagaaattatgggagcagagttgaaggtactgttattcgccgacggcggcggagggctataatagtaaaaaggaaagtaaggaacgatcggattcggaggcggtggagttggataattcttgtcgtttggcggtggatagtaataccctcctcctccgccgttatttccgccgccgccttcttgggtcgccggagggggaggggagtagtagtaagttccgccggaactaggctgagagggaggcggaggacagttggaggaggaagaagatggcgacggcggcggaggagagggaggtggcggcgattgggttggtgtgccgcatgggttttcgcaagcggtgcacattgtgcattctttctgttctttagatgtggtattgattgtggtggttggtccaggcgtggccatggcagtgagaagaagtagattgagtgtcaggaattgagagaagaaacgggttttttccattttgggtatatgataaccgatcatcaaagaagaaagaagatgaaagaggtgaagagtggtaatgggtttctgggagtatttatttctgtacagacagatagagagagagagaagagagcgtgttgtttatatatatataaaaatatatgagaaaattgaaagagagtgaattgagttgatggtttatatatgaaatgaataatgaaacgtagtccttttctttttatttgtttattttattttatat

SEQ ID NO: 23111 - DNA, 2679 bp, Cannabis sativa
ttcacttttcttcatgcattctcagctgaattatggtcatggttacggttgtggggagtggctcttgctggagaagcagggcacgtgcaacagagctatctacaaaaggctcaactcaactacattgcaagtagtagtgtttgcacgtgctccccttctccaacatgagtttctcgtccaattatttggcgtattacaaacaacaattggagcttccagagtttaattcttatgttaggtaaagctgtttttttctttctttttttttaccactctttttaacatatacattttgtttgtatgtatggatattgtttggtccgctttctctcaaacaggcatgaaaaaagtggcatttctcggcaaggaaccaaaaagaacggttgggttatatatagatgcataatgaacgagaaatcctacttctctcaaatttacagtttagctttgtattgtaccaactcattttttggaatgaagagaaaatttaaaatgaactactaattattatcatgcatttgcattgttcctcaaaaatttcttcatatcacttcccttttaagtatcaagatgtttacaaagaaactatattcaccaataaagaaattttggaagtggtctggatatgcaagcataataaccttttgaaattgttcaaaatctagaagtggctctacagttgccccacaatagaggaaaagaaaaagttaaaatagtcaaataaaaatgagtagcccaaagaaggttggtgtagtcatcatttaactgcaatagacaataaaaagtaagaaaaacagcattagttttgagtcttttgaccaataccaatgatgcaatagctgtacttattaggtttgcataatattagtctccggctatgtagtacggacaatgcactataggtggaacgagctgctgtggcaacaacacataaaaagggtttaaacctgagccagatggcgtaagaatgtagttgatccaagccaaaactttgaacctatgcctaagaaggtgggggacatttagtagttaggtgatccccacccaattttttgttcccttttttctttttctttttttagtttctctctctttttattttttgagcataggggtgttggaaattgaagtgaagaagggagacaaggaaaaaaaataaaacaaaaagcagagctgctggctggctggctgctggtgctggtgctggtgatgctgctacttactgctgccgctgccacattgaaggtgaaccttaaattgcaagcaaggccttaaaactctagtataggaacgaaggtaaagagagggaaaaagaaagagaaaaaatataaaggaatatataagaaagttccacacgcaatgcacatccatcgagggttgaaaaaacaaatttttttttttataatttatttgtgtatatgttatatgtatcaatgattatgtcatgctccaggttatttatacctcggcctaccctcgttggtccacatgacaggccaagaaagtaagcatgcccatcagtgagctaaaaactacctaaaaaaaaaatgaaaaaaatagcttaagtatataaaattttacatccatcagatgagtaaataataagtaaaatagagcaccgaattttttaggcatatgagcaatacaatttttctaatcatttaatatgtttgttttcaattattttattaataaaaagtttaaagatgtataatttaaaagatttattgaaaattttaaagaatttaatgtatagtgtaatataaatgtgtaaagtaaaatagataaatttaaaattttaatgaagtattttaaatgatagaataaaaataacttctggaggttagatggtcattattcattagttcttgtggttttttttttaagcaaattagttcttgtagtttatgttaacatattttcatgagaagagaacagaaaactctgataaacacggtagaattcttgacttttagatagtaaaacttcgttatacaaactaattttgtaagagtgactaatattatgatgttaataatttgctaagtaacgtcacttgacacttgccaagcctgatttgaactcaaattatgtttttcctttttatgggtttttttttctttgaaaggtgggttttattttattttgaattttgatgatgtaccttcttcagtagatgtggccatcttgttcagccaattttaatggggttggtgtattgttaagagaaattgagaatcattttctgatccatcttaaatgatttggtagaaattttggaaatatatctaaagagaaaggcctgcttttatgagctgtgtgtttgtgcacttgtgatgttgaaagagccagttcatgcatgttcagtttcatgaattggctacttcattgatatggaaaagaacagatgcaagtagtgctttccaaaatgcaagtacattcctaatagatgcttatgccatgaagcggagaaacataaatgcaaaagctgctaaacaaagggagaagtatggagagagttgcataatgagtcatccttactgaaaaacacaatttaatgtattgtttcaaaactgatcccaatatcagtaccaaaagtagctagctactctatcattggtaggaaaactaataaattctttagcatagtttattatcagcttcccaaacttcacagct

SEQ ID NO: 23112 - DNA, 3366 bp, Cannabis sativa
gttgaaattttaaatattttcaaagattataattttattttataaaaaatacgaattatcaattcatattgtttatactgaaattagctcaacaattaatttgtatttgcacttcgaattctttacactaagatcgtcctaatcgaaaattacaactctgcttaattacataattcctcctaaatgatcggtggttctctctctaacgacagtctcgaactcgagtgtgtttttggagatgcaattcaaaagagttttgactaggctagtgtggttaagaatctatccccccgtatctaaaaaaaataaaagataaaaaaaataaaaataaaaagtgtcttcctttagaatgttggggtctgctatttataagcaggaatttggtatcacacaatcttctttctctcttctaattggtccatgtggctttgttctcatatttcctcacatgccttctcttctgctctgcttatcgagctccgttctccaagttgttccgaaattggttctgctccaagttttcctcttctttcttaagtgaaacagtgtgtgttatgttcttcctgtcatatcaatttattagctttcatggttttatttgttggtttttatagtccaaatcagagtagaaagcggaagcagatttataaaattgaatagtttttttataatttgaaccataagtcccaagatttcaacgtatttacaagtattaaatctacactaagagtttaagaataatacatcttttagaacaatcagggcatcctcgtatctttacgtataattatcgaacatccaatccatattataatgattgttatgccaattttcgcacggggtgatgtggcattcaataagtgtgacacgtggagagcatttccaaagcctggacgggtggttttccttcaattgtatgtccagatagttttatgtgaacttgattaagtttaaaccttcagcaggtattgttcggacaaaatctgcatgtgactgtccgagtaagtcctcaccatctagtgaagccaaatcctccaagaaggataacacggctgaaaaagatctttaaggatattttccataaatatattaattagatttatggggttgacacacgttaagagaaaatagtataggaaattaacttagtttccccttttatttctaattgttttgggaaacttgattcatgtatatttccctataaatagtggaatcatttcatgatttggggatccaaaatgatatattcttaagatcaattatgctataaaaataattgtaagcttttccaaaggattgttgacaaactcacttggtcaactccctgtgttattgataattatgtgaagtaatacaagtaaaaggggagtagcttattaccataatcacgggattgaaccattataaatcctggtgctcttattgcttaattttatttaataattatctgatattctatcgctttaaaaactcaacgtcgttagctaaaagcgaggtcaacattttggtactttcaatgagagcgtgtttacaccaaaagtggccttgatgacgtggacataaatgtttgacatgtggcaagaaaaaataccccagagttgagtagccccagatcatagcaagttgacttgggaggggtccttggccctacactgaggttgacttcaggaactccgaaatgggtgtttggatcctatcaggttgtttttgactcgctatcttttagtattttgtaccatgaagcatccaagtcaaggtcccgggagctgaaaatacatgaatcagcacctcgaaaatcaaccttggcacttagggtttcacccagcacccaagttgacaaccctaactagggtttcagtttctgggactatcttagtgcaaatgggtcaaactttgtattgagacatgaactagacataccacaaatatatttgaagcatctgaattagattcagagaaatttccattttgagcacccaaacacccaatgtccgagcaccccaacgcccaagttgacaatctatcaacctaggccatttccaagcatatcaaaaatttgactcatgcatcttctctgtcttcatcaaaaaaggggaaacaagttctttcggggaagaaacagcccatcctgtgtgtcaaaacaagggactagtgcccaagttgacattttgtcaaccttgggcgattctaaggagtttttttcgaagaatcttccggacatattcttcattatcatcaaagattaagattcaactatctccagagatcaaatagaacttctagatggcctgaaactggatccagcgcccaggttgacacttgttactaggcctagcgcccaggttgacatattgtcaacctggataatttccaatcagtttcttgaaaaagtgttccaggaattgtttccatcattagaaataacaaagatacaattaaacttggggagaaaactataagcccgagcgctttaaagttgagcccagcacccaggttgacctagtactgggcctagcacccaaattgacaatcaacctgatgcactggtttgtttcgatcgatcattcaaatgccaatcaattctactataagcattctctcaaaaatagttaaaaatggggtaggagacctcatccccaagttcaagaacctttgaagtgcaaaacgacatcccgaaagctctgaaataaggaccaagcacctaggttgacaaatggcctggtgcgtgaggttctgcttatccgattctgattctgtcttgaccgatcgtctagtttttcatagtaactgagaggcatgaagtcagaagagtcaaatttacaacttcatattttcacttttccaacaagttaattacttggaaattgggtagtttcgagtctcccgttttcattgaatagcaacatctccgagaactagtgactagcttttccagaatagagaaacagtctaagtaatgtccaaatattacttaagaatcaaaaagtacatccctggcacgttttctaactcacccagcgtgcgctggatgtcaacatgggcgctgggatgtcaacctgggtgttgggcccaaaagccttcagtaaaatagccataactcactcaatactactctaattgacgtgataaaacttgcatttcaaagttgtttcaattctctatcaagtcatgtctcacacttcaatcacaattataaagttatcgactccaaatttcacccccaagagagttacaaatttaagctaaaacttacccgaagcaattcctacagacgcaactctagctccaaaattgatgaccgaccttcggagtcaatttcacagttagatcatcatttacggctgttgaccgaggttttcggca

SEQ ID NO: 23113 - DNA, 1790 bp, Cannabis sativa
catcaatacaactttcataactttcatcaattttttaaaattctttaaaacataaatacgtagaaaaaaaaacgaggacacttactgtatgccatgccggagccttcaccggcgaaaacgaagatcagcattgagataaactcagccaaagccgccttgagtgagtcggcttggctgatctcagccggactacctattgcgattctacccatttcctttgtttataataatttttaaagaaaaagaaaatttagcgctgataacttgagctcttcgtggtttgattagctttagttagtggcagttatatagtgatgacgctgatgagtataaacgaattatctgaccggattagccggtttggacccattattaaggttaaaatgaacgacaaaaagttaagaccggtcaaataatgttcgtggttgccacctgtcaatgtccggagagccaaataggggggcctccaaattgttttcgtagcgccacgtgtacgatctgatgacttgttatagagtggggtgatgattgaatggaaaaagtttcgattggagactgtcggctatgaaagtggggtccatgggtggataaatgattggtttatggtatttgcttcaccgaccattcgatttgtttatggttccactgacgtggaccgccacggttagccggtcccattatcatggactaatccactatttatgtaattaattaattttttttattattattagtagagttggtgaatgggtaatgaataactccaaagtatttatataaataatatttattataaaatattataattttttgaaaaaataaatagggaagagagaaaattttgggtgatgccctatttacatacatatgagagttaaagattgagaattaagaaaaatagaatattatatacaactacgggtaataaataaacatttgaacatccatatatttattaatatttataacacttcctatttgatgcccataataattgtctcattaaaaatctggctgagaaaacactattagaaaattgagttttagtgacacacattgagtaattctaaaagtgtatagtgacacttcaacatgcgtcactaatgagagtggctggaaagacaatttttagtgacacttcacacgtgtcactgaaaccttttgcattcattttctgcgtgtcactataggcatatagagtcaagttttgttagactgaaaaggtaacagccacacacatgaagtgtcactatatcattttttttttccttttttattaatattttttgagatctagtgacacacaaaaagtgccactatatcaaatatttttctaaaaaaaataatatttaatttaatttaatatagatctgtattaagaatttaaatgggtatacttatcaatttaaattacaaattatataaatacattcagattttatttaagtaatataaatacatttagattaattaccaaaaaaatacacaaaataattataattataattaataacattaatactaatgagtggttttaaagaaaaaaataactaatataaactaaataaaaataaaaataaaaaatcatatacaaatcaatatatgactacaaactcaaaaattgatataaaaaaatcaaaaattgattgataattaaaaaatccagaaacgggtaatgacttctagtaaaaaaatccaaaaaccatagcttcttcaatcataagccatgaaccacgaacccttagaacctcaaacaactaccatcattgtcaacttgcaaacaagaaaat

SEQ ID NO: 23114 - DNA, 1246 bp, Cannabis sativa
acatccatgagttcctgtctccagaaagagaaaacaactaatttcatcgctcgaaatataggaatggcaaggaagaagatgtctaatattttactttcgctgtatcaaccacaaacctgaaagaatgctgttgcaataatcacatcggaatcttctttgaaccgcattgggaatattgctatgattttctgtggctgtaaaagacatcaaaactctgtacttaactggtgtatcatacatcagtagtctgtgaatgttctgttgttgatatcaaattccatatgtattggctttttatattgaaaacaattttgagattaatgcaggagaagggtagaagattgtatcagacatgtataagaaagttgtataaactcaaactatcaaaagattacaagtgttctatgacatgtgaaaatgtttatggtactaacttttgggcttctgaagctctaaaagcatttttgcgtgggtaaacagtgagtttcgacattagtaactttctcaagaagagcttcctgagaagctgaagcctggccaaactggggacgaaaagttcatcgtggacgttttactaaaattattatgatgcttcggaagggaatagagaaatttgaacttacctgtttaatgacaaagaaaggttctcttgggtgatatattagttttatgggtttgtacattccttgatatgaatcctgggagttgacattctgcaacatctccttcaactgagaacttattattactgcttgcaccgccgaaatcttttcaattatcttttcagaatctggaacagtaagaacatccatcaagacacagttatacaacatgtctttcatgattttcaactcttagaagaacattgattaaccattattaactcacatgtttctcttcccaaacatttcaaatgcaaatcttcccttgaaaacatacaaaagataagaactttttgcttttctaatatgtttgtccatacttgatacaggtgactaaaactatagaaggattatcaaaccttttttatttggaattttggaaaagtcaagtcttaaagtaagttggtatccttgttttgcaggttcaaaaatctccacaacatcagaacagattccctctaccatctgtatggtataatgtgaaagcccaaatgattgtaacactccctgggacagtagcggcgtcgatattgacaagtaagtaagctgtggatctgatactgaacactgcttataaacaaagt

SEQ ID NO: 23115 - DNA, 4504 bp, Cannabis sativa
  modified_base (4229)..(4232): a, c, t, g, unknown or other
ctgcgaaagtgtgttctgacatgtctggcgcatcactgtatcatagtaatatatttaattattattaaataaatttagtatcatgatatagtgacgcgctaggcaagttgggacatgtgtacccagtcatgcctcgcgcgtcactatatgttaataaaaaatacagattattaatttctttaataaattattaattttatttttttaagtaaataaaaaatacagcatattaatttaattttgtaagtaaataaataaacgtgacataaaaaggacattatgaaaccctaaagccccaaacctatcctcttctcttattcgatactctctctctctctctctctctctctctgtgtgttgtacccaccccgatggcacccttcaccaaaccaattttttttttccaagccgaaggaaaaccccatgaacaccgccgctctctctcaccatcacaacaatcatagcaagggatggtcaatggccagcgacagtcgttctccatcgtctctcagcctcacagcagcccatcaaaatatctctcaacttctctcttccacagttgtagcaacccctagtcttcacctttctcttggtaatgctaacctacaacttttaatctcaatattacaaagaataataaatgatgaaatcaaccaagtaattgatatctaagccaactgctgatgtgcaatatttgtaaaaaggatgaaaattgaatataaatcatccctaaaaattgagccacgaagccaccgctactgttcagcctccgtgaagaagcacttcggagttgcgagtgcatggccgtgaggaaccttcgacgatacgctttctagatctgctcctacgaaatgtttttttattatttttttgtatttttgtaattttttttgcatttgaataatttgtaagaattatgtgtaaatttatgtaatttttctgtataaattttttagtgttaattataatttttttacaaatagtttgatccacctaacaaattattaattttattggttgaattttataattatatcatcaattaaattattattataaatttataatatataatttgaattaaaaataaataatattaattatttttataaataaaaaaccaaatatataaggacacattttgagattagctgttacttttatagtatgtcaagatttgactctaaaatcctatagtgacgcgcgatgagggaagctaaaatggtttagtgacccaccctgaagggtcactaaatatttcttttctagtcacctttattagtgacacgcaacgaagtgtcactaaatgattttagagtcactcaatacgggtcactaaaacaaatttttgtagtagtgaggccacgaggctgaccttgcggcactcgaaccaggaggcaggagataactcaggaggaacctcaaaacggttagaaagaacaaccgggggagactgaggatgcccttgatgatgagaaaccaaatgaccaggctcgtcgtcaagaagagcctcgaagaccttgaggatgcacaacccaggggaatggaaattgtgatttaacagaactcaaactagggaacgggaaatcgctcgtggcaacgagaaaaatcttgggactcaacctaggtcaggtgggttgcccccaagacatcgtcaacgtccttctcgcactgatggggaaggggcacatactaaccccagcagggggcatgtatcaactcgttctcaaaagagaaggtcaatacgtgacgaggccagttttagctctggacgtacgaggactcgtagtcgatccacgggaggaggggatagaacccgtcgcagtacagatggagaaagtacaagcacatctaaaactgaaagctactaaaggagaggtttgtgagtagctataatcaataacaaccgaccagaaaaaacctgaccatcgtcaatacctcaatcaaaagcaagacaatactatccaattgcgaattaacaagttggaggacaagttaaaaaggtaccaagatggggaattcagaaaactgcctggctatgactcggacaaggagcctgagcctttccaccaaaatataatgagtgctgcattcccttagggattaaagaaccctcacatctcgtcatacgatgggactacagattcggtcgcacagttgaataattttaacactatcatgtaagcaagcaatgttacgaataatctaggatgtattttattccctactcactagttggggaagcgagtagctggttcaacaaatttacccatcattcaatcacctcttgggaacagctgtctaaacactttaagaagcagttccaggcagcaagagacagacgacccgaatcgtcttctcttactaatataaaatagtagccaagtgagacacttaaggcctacctaagtcatttcagtacagctgttgcaagagtgagaaatttgaacgacagtatctagcttactgccctccagacagggatctcgactgatcccttaactgcgggaggcaggctttgggatgacatacagggttgcctagtgaagaacattagtgagttcaatgagagggctcaagtgtttgtttgaaaaaaggaagcaagaaaagagatgaagttgttaaagactagctcgcgaagtaaacccagcactatctcgacaagtaccgtgtcgacaaaagctgacaatctaggaggctctaagaggaaagatgactccaagatatcaaccaaggacaagaagaaacagaagaggcacgacaagtacgtgccaatctacaccatttataccgagcttaataatactcaggaaaatatctatctcgcacatgagcagagggtcgcattttgtaaacctgagcccatgaggcatgcgagacacaaaagagatgcaactaaattttgtaagtatcacaaggacatcaggcatacgacagatgaatgtcttcagctaaaagacgagatagaaagtcttatagcacgaggacacttctggcaatatgtgaaacgataaggtgatggaaataaccagccaaatctgcctaataacccaggcaactagggattacaacctcttcctctcaagggagaggatattctagttatctctagagggccacatatttctggggaaagtaacaatgcccagaaaaggtatgtaaaggaggttaagaacatgaagtctgcttttgctctggaaccttctaagaaagcaaggactgacgaacctccaattgtgttctcgaaggaggatgcaaagcacatgaggtatcctcccatcaacccaatagtaattaccatccagcttgccaacaaaagaataaaaagggtgctggtggacaacagaagttcagtaaatatcctttataaggatacattgaagaaaatgggacttgagaaagctaagttaaaatcttgcacggtaaatctttgtggatttataggcgacagtgtcgccagtcaaggaataattgagctcccaattactgtgggtgaagagcctttatccaccacaataatgcaggactttcttgttattgacttgccatcaacctacaatatactgctgggtcgaccaacattaattggactatgtccaattagttaattaagcacttatccctaaatttttagacaccggcaagtgtgggagtagtgcgaggtgaccaaatgctggctcgcgaatgctaccgcatagagctgcggaatagaaaggccagtaactagctaatggcagtcatgactgaggaaggcaagaagaaggatgaagatcttgatacttaaattcaagatgaaaggaatttattgaaaccgatcaagtaattggaagaggttgttctagatccaagaaatcccataaagtgtgtattcatcatgaagaacctggatgaacaattgaaatagcaactaataagttttttgggggtggaaggatcagtttgcctggagccacgaatatatgatagggattgaccctatgattatctgccaccacttgaatgtcgacccatatcactcagccaagagacagaagagacgacccttggattttgagagacaatgggcattcaaacaggaagtggataagttgttggttaacgacatcatacgggaggcattttatccctcgtggatatccaaccctgttttggtcccaaaaccaaatggaactttgagaacttgtattgacatttcaaacttaaataaggcgtgtccaaaggattgcttnnnnctaccaaggattgaccagttagtggacggaactgctggacacgagcttatgtcattcatggatgcatattctggatataaccagataaaaatgcatgtccctgacaaagaacatacaagcttcgtaaccaacatgggactttattgttataaagtcatgccgtttcgtttgaaaatgttgaggctacatatcagcgacttgtgaatgaaatatttgtgagacaaataggaagaaacatggaagtctatgttgatgatgttggaatttatttt

SEQ ID NO: 23116 - DNA, 2109 bp, Cannabis sativa
agatctggttttcttgcagttactgggctttttatggtttatcgatggtttctcgatagtatgtcgagatattgtcaataataagtaagtcgaggtttgtgaacaccattatcgatagtttctaaatagtttatcgataatttgccaaaattagcttttagcatgaattgtcgattgtatatcgattgtagattaattatcaataatatcgatggtttgtcgattgaatgttgatagttttgtctaattttcaatttctcaacttcacaattatttatcgattagatatcgatggcatatcaattgtttatcaatatatgcctctcccttaaaaaaaataatgacacgagtaaaaactttaaaacataaataaagacaaaacgatcaggataacaattataaattttaaaagtaacccctaaacattaaatttaacaatctcaagagttagagtgattcatgcaatacataaacataaaatttaaaagtcttcaaagtcagggtgatacatgcaatacatgcacaatgacccatgcatcactagttcatctctaaccacggtcattttgcaacgacagcaccattcgaggaaccctagaagagaaaagagaacaccatctcttcggttgcgttccaacctcctctcgtttgccaccctttcatattcaaattattcctcacattctacattctctttgctctttttttttgaatgcgatgatattatctcctacatttttctctcaattggatgacgctacattcaacatcgataagaacacgaaaagggatcttatttgcttcattggcatataagtcttcaagtcagtcttcgtcagatagtgaactcctctctggcctagcccaataatgatgcattattctacaaacctactcttcgtggctttgtctgttacgcatattgaaagtatgaggatactttggagatcaagctcccacatcagaatcaaactcatccctactagaggaaaataggagcaaagaactaaaatcattagacatatataacttagaagagaaaaatactctagaaacttaggaaataaattttgcttttatagacctgaaaagttgttgggaaggtggagtaataaatatctaacattaattagcattaaattcccaactaaaaatatgttaatgcatgcaaaatgtatttatcaatagtatgtcgatagtgtatcgatgatttttataacttattcttagtctgttgtttgacattatgtggacatgtttttgatagtttggagatagtttatcgataattaaaaataatttgtttcttccatgtgtttaacgcttatatcgatggtatgtcgatggttcgtcgacatgttatcattgatgttctaaaatcgtccaattaattattgcttgaatttattgattgtttgtcgacattttatcaatgattttatggaacttttcaattaatttcttcgtataatttatcgattgtttgtcacttgttaatcgatgatatatatgtttgtcgccttttagtgtttttgatattttttttgttttttcttaactaacctacttttttggtacgaaattgtagtatcgactgtgtttcttgttatatcatacgatagtgtttaaggtgttgggtgttttaattgagtttataaagccaaagacagtttgctgttgacgataaaattgatatacaaccatacatgaagagttgaaggttgatccgttggcgtatgatttgaaatatgagatttgttccttatacataaaggggcaaatggttctgccaaaggttattaagaaagaacgccaactaagaacatttttttagtgacgacaacaatgtcaaacatagattttatgctattatttgtgaccaaagtaacaaaagttgagaattaggagcctaccctacctactaatcctttccctcaaagtgtggtagggtctttcgttcctgaaacatatgttggtgttggtgtgaatgaggaggttcctaccaatgtagatcaataacaagaaagcgacaggatttagtcattttgaggagtttgatgctcccttctacaataatgatcctattatagatttgaatatggacgatga

SEQ ID NO: 23117 - DNA, 1976 bp, Cannabis sativa
tattgaccaaagttaagaaaaaaaatataatgtattgaccaaatgttgatatttatatatatcgacatagcacagagtgtaaaaacttaaaaataattaaaaatcctatactactgtgtaatctcaaaactgattatctgtatatgtcgacgaaatatcaattttttgtttttgggttttcttgtttttttgtttttttgtgttttgtgtggtttttcgattattttttgtttaatgataataaattaattagtatatagttgttatttataagcaaaatctgtacaaaacaggtcattattatatgtataagattaagttgcacctttctagtgcatactcaatctatcaactgtcttagcagacatattttattcatgatatagatatagcaaacgtgtagaaaacaaataaaaaagtatgcattttttgttgctttaatttaaaaactggttattatctgtatatatacagtattaatagttcaaaaaggcatcgttgaccaaagtttaaaattaagcaataacaattaattaatgtaatgtatgtataaataagtttgtttttttctacacatgactatgatctgtagtattagtcaaaagtaagaattcgagtaacacaatgttttaattattaataagatttagataacgcaatgtgtaaaaatacttgttatatattttatatatgatcatgtgagaaattcaaccattataaaatcaaagagtctcgcatatttttactttcatttttcttgttttttctttttgggggtgaatgagatgaatattattgcccaaaaacacaaattttacaatttttttttctaatttttattaatgaaagattatatatcgttaaatgccttgtaatattatcccaatgtaatacgtgtatgttatataatgtgaatatgattgagaaaataaggtaaattataacatgtttaattagtaatgtaaattaatgataaagtagtcattcttttatagtatgtacatattttattaaaattaagagagaacttaaatatgagataaaaaaaaatggaaatatttcttccactatttatcattattaaagggtaataatttttatttattttattttttaatattaaatatataattttttattttttttgaaaaaatatcttatgatataattattatatattatagtttaactcaaaataataattgaattcatttaaaatatgaaattttattttaaatttaattagtagtgaattaaatagtccataattaagcatgtttttgaaattaaattttacaaagactaatttagtcggtttctaatattccgacttgcgaatgggttagttctgaggtcaattatttgaaattcaatattttgtcaaaactttgacagccgatttcatatgctttatgttttaaacagatctgactttaataattaacattattatgtacttataatttaattattattattattattataccattagagtaaagattaacaaaataagataagagagagaagaatatatttagaaaggtaagaattaagggaaagaagaattagagaaaacgtaaatacatgaccaacaacaatatataacaaatcaaatataccaaatttggaactgttagaaaaagaagatctttacttgatcaaagaaattaatatacccagttgaaatatgtttagctaataataaacaacatataattgagtttcatctgaagttgtttttcagccattaattaattaatttgtaaacataaacattgctaattaattattccttgcctgtgtgaagaatagtgtcgataatggccggtaatatggactttataagttacatttgaaaagagctatttcaccaacatttttttttgaatgcactatttcaccaaactttaattagtttgcagcagctcatattaattggtaattaaaaaccaactttgtagtatttatgattt

SEQ ID NO: 23118 - DNA, 8156 bp, Cannabis sativa
  modified_base (7522)..(7528): a, c, t, g, unknown or other
gttgttttgtttgcttcatgtattcttgtagaaatttgttttgagaacacatcttttctaaggctctcatcaccatttaaaataactctctagaagttgtgttatgtagtgttctcttgtttgctgaaaagagtatgaatgtttcttctcttaatgattctagtatagacggaaggagcacttgtataaggtttggatcatcgacactaccgattagataaaattgtttagtcattctttggaagtgtaattccaaatcctcttaattcattgagcagcacttcattttaaaaaatttggccctgaaacgttcgaccacttgagagttttatccgcaaaattcaatgtagaagtgatttagtgccacttcaatagactacttgtagaaattgaagtttcctatattatccaaggctttactactaatcttgtaagattcccatgaatcttgatactaactacaacaagatgtctcttatttctacccatggtttttgtgctctaaaggggtctatactctgaattcttggaagcgcgatctccattaattcagaggaagatcatcaaacatgaatgtgttggacttgccaataaactggtgcttaggggagttatggctttcttttgaagaaacttcttctcctatgatcgacttattttggttagagttttgttctctttctactcccaaagttgttcttgtatggttagttgtcatgaattgaggcgaaattgtttcatcatcactgctgctttggtcatcagtttcctaatcatcgaattgggaagaagatgatgacagatcgtcgtcatctgagttttctatctcttccttgagattgttttgtgggagattatttagacagtgctggtgattgatttttatgatgtcatttctctttttgaccatgagttgagtactgcattggcctttatatttttattttttttttcttttaagttgattttcttcatctagaattctctctagatgaaggatttggtctcccaattttaaaggtgatgctagcaactgcgcagattttggtaatattgaaaatatccatgtgtagagtccaacctagagtgagaggcaatctttctttatattgagtgtgagtttgcatagagacgtattggctctttagaccctttagctctgcttccttcgtgagaaaaatctcttggggaacttgcttagatttggtcagtagtagtttttcatgcacttacgaaattttgtattagagtctagtcataatggtgtcaaattttgaaaattctttgttgatctttgtaactttgtgggtagaccgtagaaagtttctcgtctatcaattagagggtcttgctttgggctagcatgttctctgtctgccagttgaggacaacctcagttggagtgattttctttaacgtaccatcagcttctcaaatatttgagttgaggacttttggctggtgagtgatttttcctatttcatccgtaaagctaaaaggaagtggaaatctatcattgctaccttttagcatgaagagatgtgaagcatttggtttgaatttctttagtttgtaacatgggagtaatggcttatgttcgtcatcttcacattcccatcctgcctgctgaatgtcctggtgaaccagtagtttatatgaatatttgactaggtagtcaaattttcttaagggttttccaagtgagccaatatctttttggtcgttcctatttttcttttagcttctttgtcgcgcttttcattttaggtgcctcttcttgctcatcagtgtggtgtaatccagacagttgtaaatgtcccagtacttaaggaggatttgtaagcataaataggggaaccattcttatcaaaggataatatttctgcagaaattgggatgattgacgacattatgtattgagttgagaaaatccttgaagttacttcattctttggaaaagatatttcgattgaaccatccttttagacatgaaaacaggatgagtggactgctagtaatgtcctatgggtcttttcatagttggagatccacaaagtcaaaaatatttattggagttcttccattgtgatctaacgaggaatgtgagtgcatgtcagtacatagtttgtatcgacaattatcattagcgcacctgaacttctcgctactaagatgtcaatggcatggttttgcaccatgtaggccatttgatagtatatgttgattatatgtagatcctaaggaattgggatcttgatcgatgcccacaatttgtagttgaaccttcaaggcatctagtaatcgtttataccttaatgacatgcaaaaattgggatagaatataacaatgactatgtctgcattaagtgttgcttctatggtgtctatagaggcatgttggaactttctcattcttgtataaagcaacgttattcttgcacagattggtaagtctttcctcccgtgatgggttaaggcgactctgattgccctaaaatggatgtgagttagaacttggtctattcattgttgtggaaactcatgagagatttggagagtgattaattgttcttactctatagcaggatggttacattgatcaaatttggtggattgaacatattctttgaaagtttttggggtttgtttaatgagagtttttattgatctagtaaaaaggctttgtggtttggagaaagcttgatatgaatttattaagggaatgtttgatagtacaatttttctgtcattagaaaaatacaaacttcatacaaagcatggagtttgctagcaaaaaatcgtcgcaatgttgggcttgttgcaaaaggcatatatactagtgtggaatgtgttgagtgttggctagaagaggcaataatatcgaaaaaatattgtcatggtgtatgactgggatttctcagaagcaaggaaaaagttatcgaggctctaataccattatttttttttaatgtagtttaaatttttattgtttgaactttggtaaaaatataagttagtttaagcattaactaacattcacctactatttccctaaaaagacattcacatactatgtacacatatttgtaatatatttgtgtgagtaatagaatgaaagtttgtttttaaaaattatatataatatacatacttttataccatattatttattaaattttgagttaattattttgtataataatttaatatcattgtttcgtttaaacacttgttatgaaatttatgcatgaattatatataaaattttattataatgttttaatattttttaccaaaaaaaaaaaaatagtcagtgattagtataaacagccacatttcccagcagcacgccacatttttgtgatgtttatagggtgtgcttgaaaaattactcgaaccacttgtgtggtatagttcgaaaacttggtcgaaaaccgcacaagcgaactgcaaacacaaagttctactagtgactgctatagaagcatatataccattatggaaacatagtattttctaagaaatggattaccattttgagagattaatatttctttaatatttgctgtcttgtcctcacgctccttgaagaatctagtttcatcaccatccaatttatgttacaacttacaggagaaagaaaagattttgaaagcaaacgacaggttttttttaacaacaacaatagataaaaggtagaatattcagaataaacgaaaataaacaatgataacgacagtaatttctatatcaaacgacgataactaggtaaaacgacaacatggcaaatgctaaaacaaaacatcctttcctactcaggaaataaaacgacaacattctagaacttctcaaataaggggaagcatatcagtcagagaaaaaaaaacttaaaaccagtagcagtaattggaaagtagtaattaataccttcataaacatgatcagctctgtttcaagtcttttcacaattggtggcaaagattttgaacatttgatattagttgagagagaaaaaggagcagaacaaaagtaaaacaggaaagactattgtttatttcaatagaagacagcagactaaataccagtctacacgtttggtggtggccaaatcttcccgaataattcctcaactcgcctcgcctgattaacataaccatccagtccccttgccagaagctccacagctgcaggccccatagctgaagcaaggctcaactggtcccactttgtgagctggattgatattcaaaggagataatgtcaatcaactataatgcaaagaaaagatagagcataacttaaatcagacatgcatttgcaaattttggaagaacacagacttcttcttcactaaaactgtagcgggcagcattctctggagatagcctcctcacgaaggagtacttgtcaccaggagtagtggcggattcttttagagattgcagtaccttcagcggtgcaatgatgtagtcaaccctgggaaacaagtacaaattaagatgagtgatcaggaatttctagttacaacagactatctgaggtcaggcgtatgtatttaccctacgatactaaataaatcctgcttatttcgaaccgctgcagccatcaactttgatttatgtccatatttgtggatatagttataagtttttgtcacctgaaagacaaaataataccaaggaatgaaaaattgttcactagatcaattgatcaaacaagcgatttcatgtttgctgttgacgaaactacgttcatcactcatgtgagaaactaatcaccaaatgaactgagatcagaaaatttactacatcagtctcttaaagctttttattaccaagatgcactgggcatggataatgaataatatccaagtcaaatgaactcaaacaacatggccagaggatagaaaggaggggcatagaacagtagctatatagaagagttgctaatttgcctagtatagattttaaacaaggaaaataaataatgacctacattagtaaataaatagccaagatgcaaatatattgagctaagcataagccataatcaagtttactagcaatttaaacagaattccatgtaagtgtaactatgaaattgacatatcaaaactgttatgactaaccaaagctatcccagggtcctctcctcttttgagagcagcatctacctcagggtcaccagaatgattacgagcccaatcctgaacaagaaatacatatgcatatcaatgacatgaattgaactgagaagaacaagatcattataaaactcaaggtagaagattaccctgattcgaccaacaaatatctgaataacagacgcaccagcttgagctgcagccgcagcttgggcaaaactaaggaaacatgaggaagctatcaccatttataagaaagtaataaaatgaaactaataagaagtaatggcagaagacaaacaaagataatttatttaaatgatgagtgcccacgacaaagctatgcaagagaaaggaatgtacttaaccattaattagaacaaatataaaacctgtatacaaaagtcaaatgagtttgtatgccctcagattccagtaatcttgcagcctctataccctaagtggagatgcaattaattaggggaaataaaaggatggcaaaacttatgagcattcatgaaaacattccctatcagagaacctaaagataaaggaattgaaatgctttctcattaaacttacttgccaagttgaaggaattttgaacagcaaacgctcaggagggacaccaatttcattgtaaagcttcaacaaatcatgaacctgcattattgataaagtacttaatagcaagtaatgcactggctggcatcagagggataagaatcataagatcttagacaagcacaattatactacaaagacgtgaagcagattcattatgcattcccttatctcattccatgccttatgtacagtttacagttccaatgagatttcatagaaacagaatgcacattatgtcaatgtcatcttcaaaaagcatttcttatggctatcacaataaagaatcgtcaatacgactacaagaaaccaaaatgagaattacaaaagacacatcaatacctttctaatgatgccatgtgtgtcatatgcaagtcgcgcatccacttctgtcgaaactcgaccagggacaagttttgccaaatcaccaccaacattcactagagcctacaacataaaacaaattagtaatatgctttcctaatggttggagcaccattttttttttctgctaaaagtttgtatatgctaacaagaactaaattttacagaaaactgacggctggaaggggaagatgacattttcatatacgcaacgtctgctttggttataaccagccattagatttctcaatccagacacaccaagtgatttcatctacttgtattcttagtattagctcttatatctgtgtccttgagagaaaagtgtagttgggaagctctaggagtgtaataaggactgtggtgttaggctactccactctctgtggatttggaaacaaagtcccacattggtgaagcaagtaaataagaatgactttacaaagggttaggctacgacactaaaatgttctagtcttttgagattgtacctttgttccaatactaacattgtaaaagtatgattaagtcacttttttcttttttaatctaaaatgatataaccaattttgacagagaaacaggagaacactaacaataaaggacatgattaaaccaaccttgttagaaaaacaagacagcctcagctcagaattttccagtttacaacactcagaatctgccaaagccatatccacagcattctatacaaaaataaatacataaaatcagttcactttgatccatttctcatatttattgaaattaaaatagttaccctaaaaatggtgtcaggaagaccgcaaattcccaagaggagggaagaactgactgtagcagcagttggagggaacctgtaacaaaaataaccagcaaataaaaatcgatgaaaaggctcatcttcatccttaactaaacaccaacgttgaaagaaagttactaaaagggattttcaatatacttctcaaaatcatcgaaaattacagtgtccggaacaatctcactgaaagtagagatggcttccaactcactacccgagcctaacaaagaaaacgattcaaaggaccaaaaatgtgaacttttccaaacaaacagaacaaggaattcaaaaattcatcacaaatgataaaaaataagtaaacgatggcaaaccagtgtcgatcgaggaagaagagccagaagaagctcgaataacagggaattgtttgggaagtttgtagcagatcaccaaattagaaggtctggatccatctgagaagctcaatcttcttccctgtccatgtatcgatcagctcaaaccactcaaatttgctgaactctacacacatgcatttatatatatatatatataaatagagagagagagagagnnnnnnngagagagagagagagagtacctggatagaagaagatgagagcgcagaagaaggcggaggttgcaaggagagggacatttgagagagaactcagttgaatttggtgagactaactctgtatgtatgtatgtatgtatgtactactactcgagctaaaattggatcaccaacttatttatatttattctcatgaaaaacaaaataataaagaaaaacttatttatatttatcactattatacatatataatccattcaaaaaaatattcatgttcatgtgtttttcgcttaagctattattcaatttataaacttttttctttcttcgttggtttgttgtgtcactatattttcaataatcaaattgtataatagtttatatttacaaataaataggtatgtcaaaaaaaaaaaacaaataatttaattattttttattttactaataagttattggattttgagccaaatttataattttattgccaattagaattttttataaaaatactattttttttataaaacaactctagaataacaaaacataacaattaaaaataacagtaaaacaactaaaaaaataatcataaaacaacagtaaaaacttgtgaaaattacatgaaatat

SEQ ID NO: 23119 - DNA, 2190 bp, Cannabis sativa
ctcaatagttcagggatatttttaacgatcttaaaagttcaatagacataatttgatacatatcaaagttcaagggtaaaaattctaattagctaacatataatttagttcttcatgtttttttttttctttgtttatttgataactttgatgttttttttttttgttcttccatgttttaaaaacaaatctttttattaaattagctctaaaaaatgttaaatttgatattttgctttctttctttctttcttttttaaacaaatcggaattaactaaatattaatgttcctttaaagaaaaaaaaaacttccataaacatatatgtgacgcatattttcttaatgcgctattttagctcaatctttattagtattatttgacaaagttttgtatttataaaaaaaggtttttttttttccttctaattaactacacaaaaaaagatcttaaaataagttaaaaaaacgcattttttattttaagagtatttacatcataaattaatttgagtttatacacttatgtatactatttctttttacaaattaagtcggtaaagttgcatttttgaaacttatgttatactatcagtcttaatattgattggatttgttatattgtcacgtgttattttttattagtcaatttcatattaattttaaaaaaaatgcttaaaaaattattaaaaacaaaaaaataataataagtttttaattataaaaagtgattaaacttaaaaataaaattaattagtttttttttttttttaaatataatagtaacaaatctataatcaaaattaaaccggacaataaattattatattatatagatatttatttgcctcttttcgtgtagcatcattattcttgaaaaaacattcatacaaaaaatataagcactaaaaaaacctcaaattaaaaacaattacaaagcctttgatcattagatttcttttcttttaataaaaaaatcagcattaaaagaaaacacctaaagtaaatctaattaaaaaaaaactaaaccttagttataaattaagataattttttgattcttaaagctaaaagtaacttaaaataagcttacctgtacatgtttttttttttaaaataaaaaataaaatagtcaggataagttatcaaaagaaaaatttacataatttataataagttaaaaaaaaaaaaaatcattctatgataataagttatacttggtaattataattaaaaaaaaaagttgggttttagtattggtggaagtctgagatgttcatatggaatgtatggattaaattattatttacttatcctacatgtgattttgatcaatggtggagctaggactttcatctagtgggagcaagagtaaatgatcaaaattaacattgataactatttttgaagaataaggcatgcagttctgtggtgggaaattcaaatggaagccttattgaagttaggacttgttacaaagaagttagaactggctgaggtaattgggggtcagctcttagataataccaaaacaattggacataattattatggagagtgaccacttgctattagaagtaaatgaaaatggtgtcattatttggcctacttgttaattaaagtaggttattactatcaagtttttctaatgtatcttttggtttttgttaaacaatttaccaacatggttgttcactttttgctagagaatctagtttaaattctgatcttattagtagaggggatatattgttagaaagatttattctacttaatcacaatatttttcttttttgtgtatcaatcttggacatgtgcctaatgaaattttatgatacttccattacaaagaaatagatacttatcaagtaccacaataagctatattaggacaatttgttaggagttagttaaaatgttagttgttaggtttggtcagcttccaactattcataagttggttaagttcagttaggtgttagttgctttcaatccattgtcatatgtataaagcacattgtaactaatgctaaatcaatataaagcttctttttgtcctatctctttctctctttctctctttctctcctttgtttctctatgttacaatacctccatcatggtatcagagccatggccgccgttgctggcaaacatggctaccatttgtcctagaaactcaagttctcaa

SEQ ID NO: 23120 - DNA, 6915 bp, Cannabis sativa
taatcattctaccaattttacccatatcttttcacgatagtctctatttttttctaaccaaatttttgccctaactttcccataaataacctactgttccatctctaaagaacacaatctattatatttgaaattgtattttagttatgtgagggtgtgaggataatttgggtacaaaactcataaaaggaggtatatttgaattaaattttatttggaggtaaattttgttaatgtataaaaaaaggtattcttcaacttctcccagtgtagggtgacatataaaggctcatgttaattttgtttgattattttattggttaaaataattcaaattaaattaattaattatcttttaattattaaattaaatatattatttaataatttatttaattaaaatataataataaaaaaaaaacaatttaactgatttctattaatcagttattagatatttatatttatatttgaatttgaattctcaattcaaatcaaattacatattttttttattttaataaaagattaaaaggttttatttataacaatatatatgatatatagtatcataaataaataatagatacaacaatcaagtacaagagaaacaataaagtaacaagagaggaaatatgaattcatttttctattcctctatctctctctctctctctcctcatctcacacgcccaacaccatctaaggtggtgtgagattatgatcaacactatcttaattacagtgtctcatgggttgagaatacactgtgatacataaatttgttcatcctataggagttaatagcccactctattcctgagtgttgaggctggcttagaagattgcggtgtgaattcttcaacaatagttcttggatttaattatcgtacttatactaaaagatagcgatgatctcctgatagactacaagaggtattgtcttcttttcattagtctagatttaatctatatatatcatgttgatatcatttggcttatggttcatattggataaaaactatgtttatcaaatctgcttctgcttttccaaccttgatataaaccataaaaactaacatatgtaaacttgcaaaagctgctttacctttcaataaaagtacaacttgttctgttgcaccatttgttttagtacactgatgtgtggggaccctctcatgttgttacaaaagaggattctcgatactatgtttcttttattattgatcacttatttttgttgggtttttcttatgaaatatcgttctgacttttatagtatttatgatcgttttcaagcttatgtaaaaactcaatatggtgttgttattaaatatattagatgtgatcaaggtggtgagtatactttaaataaatttattaattcacttgccttagatggcactgtctatcaaactttttgtactaatacactcgaacaaaatggtgtggctgaaagaaagcataggcacattgttgaaaccgctcattctcttttgttgttatcttctattctgaatcagttttgggaggaggtagttctaactgcagttcacctaattaatatgattttgtcttctgtcattttatgtttgtctctttttgataaactatatggttgtattactgactattcttctttaagagtctttagttctacttattttgtgttgcatcctagtgtagagtgtacagagttatcgtcagtctctactctttgtgtgttaatttcttggttatggggaagggaaaaaaaggttatcgttgttttgatccagtttctcaaaaattgtatgtatcttgtcatgatttttttatttagcatataccttcctttactattcctgacactcctcataatttaacaaaattagatctttttcacattgacccattctttgagtctgaactagaatcatccactactcttcagttgcttttcctattcattactctcgcatgcatcgtgttgaaaggtctcaagaatcagatactggtactttgtaacctaaaattgctcctccattagatactggtacttcgaaacctgaaatcactcctccccctcctcctgcttctgttccagatcctcatgagattgtggaccctcctcctcgctatccttaatgcattcgtaagtctactcgccaaccaaattttacatactcttttaaatctgcttcttttactttgtttttagcatctattcattatctttttgagcctctatcctataaagaggaagttattgactccctttgccagcgtgctatgaatgaggaactctttgctttgcaaaagactcatacttgggatttggtacttttgcctcctcgtaaacatgctattggttctcgttggatgtataaaatcaagactaagtctgatgggtctattgaacggtacaaggctcgattagtggctaagggtttttcacaacagtatggtgtggactatgaggagacttttcctctttttgcaaaaatgactactgtttgtattcttatagccagtggcatcaatttttcaatgggctatatctcaaatagatgttaagaatgtctttctgaatggtgacttacatgaagaattctatatggttcttcctcctggtgttcatcataagcaatgcgaagtttgcaagctaaaataggccttatatggtcttaaacaagctctccgaacatggttttagaagttctctactattattttgtctcttggtttttttcaagtgatcatgatttatctttatttttcaacttcacatctgcaggttgtattctgctttccttgtatgttgatgatatgattattacaggggatgatttaccgagaattgaaatgtcaaagtcaaaattagcttctcactttaagatgaaggatttggattttttgcgctattttctgggtattgaagttgctttttctccaaaaaattatcttctttctcagtcaaagtacactactgatattattgagcgtgctcaccttattgatgctagagttgttgacactccctctgagttgaatgtttagtattctccttctgatggctctcctttggaagatttgtatcgcaccattgttgatagtttggtttatctcactattacccatctgtatattacatatattgttcatattgttagtcagtttgttgcttctcctactactgttcactaggctgttctacccatctacgatatctttcgggtaccatctttcagagcctactactgccttccacctcctctctggagttgcaagcttattgtgatgcagatcatgatcgtgatcgcacagaccaaaaatttgtcattggtttttgtatctttttaggagattcccttatttcatggaagagcaagaagcagtttgttatttctcaatcttctacgaaagctgagtatcgtaccatggcgtctaccactaaagagattgttcgattgagattgttacttacagatatgggtgttactcactcttatcctactcttatgtattgtgacaattaaagtgccattcagattgctcacaacttaatttttcatgaacgcaccaagcatattgagattgattgccattttactcatcactatcttaagttgggcaccattattactttgccttttattctttcttcgttgtagcttggtgacctttttactaagtcgcatacgatttctcgttttccttttttttttaggcaaactctcggtgcttcttgcagcagcatcgtgagtttaagaaagagtgttaaatagttatttaagatttttttagtcatttattttgttttagtcttttatgttagttttttgtataagacttttttattagttgtattcttttacttttgattttgtaattaaatgaaattctaatttctttgcatctcttttttattaattatttttttctttataaataaatatcatttatataatcttaatattaatttatagaatttagctgtaagtggcaattaattaatactcatgtaatctcagtctccaccaaaaatagaggagactctatataattgtattaagataaatcttaagtacgtggtggtcctagactaatccaagcacttgattatacatgctgataattcttaaacaaataaaacaacaacttcctcgaaaaaagaaaaagaaaaatgtatatatattttcattaattatgatatatatacaaaattatagatataatatttatagacataatattaattttagtataatatttaaattaaattatatatataataaaaattaagagcttaaatcccaccaaaaacattttgtatttttatttttaaatttacttttgtccttatcttaaaaaaaaaaaaaaacactctccttactttaaattttaaatctgctactacatacatagaacgtaaaaaatgtattgtcttatatttgtttttgatgatatatgtataatgtaattatataagtacttttcgtgttactcgtattatacacatgaaaataggccaaaaaggaggaggagaagaggtcattaattataatgtcatgtaatacttttcaaaaccctatcattttttatatatacacacatataaatatatgtatgtatttatgtataatagtttttttttttttttgaggggattatgtataatagttgtacgttgaagtttgtgagtgatagatgcagaccgaaattaaaagccccaccggagacaacaaacgcttcttctgttgcacggctcgcaccagcagcaacgcgtccacctccataaccacaccagtaggcacacccccctcaacccacctacccttcacccaatcgagtgcctccttcaacgccatagcttcagccaaaaatgggtcgggctgaccataagttttaactaccagcgcatcaatgaatgaaccatattatgatcccgagaaatccaccccaaaccgagaatattgtcatcttcaaagacagcagcatcacaattaaccttaatctcaccaaaacaaggtttagcccattgctcacacccgaaagtattcggaccagaaattggcaacacacctctactctctagctgagcattcttccaagaatcaaggtaagtaattgcaaaattcaccaccctctctaccgacaaagccttattattccaaaccaagtcattacgagctccccaaactccccatagaagcatagcaagcctctcaatacgatccataggttgcaccttacaaacattatcaaactagctgccaaacactacagcttcactccccccaaccgttcctcccagccccctccatacaactcttagtaaaagcataactaaccaataaatgaaaaattgtctcattctcccgatgacacatcagacacaatccactcacgtggacccttctagactgcagagacacaagagtagggagacaattggtaagaccccgctaaagaaaattcttcaccttaggcggcaacttcaagttccaaaacatcctccaaaaatttgaattgtcttgagtattccacctaccattgctaacttgtaaggcatgataaacttatacctattgagtctccaatctaaaatctatctttttgtgccgattgatcatgatcattattattttgtgatcagaacaatatgattcctaatcccaagtgtacgttcaaaaatcactcatatgggttaatcgtcctataatatttatagtgaaggagattttgataaagtaggtcctcatcttgggatttacggtaaagagtttgagaatttaaattttaaaagacgattaaccctaatctttggatttaaactaagtaccgagtgtttgtttatatttacataatgacatctattttctctgttaattaaatttgacaaaaaagttaacattcaaaaatttatataattttcatttttaaatacatataataatattataaaattaataaaaaatattttgttaagtaattaagataatattctgttaaacttgtagaaaaccaaaaaacatatttatatagaatagatatatactaggcgtgtggaggacgcgccacaaacacgtaacccccgtcaaaacttagttataatcatatatcttacttttattaattatatttaaatatttgttaaaaaaattatttttaaacaaagacatagtatgatgtaaattcacttattaaagacaagatcaccagtcgttatatctaaatgttgtaatttgctttactattacctactaataattaaagtttataagaaaaatgttagagtcctacattgctaatgtgtggaaagataatagaatatataagaggaatgggctactcctcccattaccaattggttttgagatggaacccattcatcttatcttcaaattctaacaaaaaataaaataataatttacaaaaattaataaaaaaaaataacaacacaaaaaatattaatatcatatatatgcttgtatagtcttctatactattatatatttactaataaacaaatatgaagaaacattaaaaaaaaaaaattgaaaaaaaatacatgagagaaaatatggtaagaaaatgtagaaaagattgaaaaaatatattttaaaaaagaaatagtgtaaaaaatatgagatttttttgaaaaatagaaaaaaatgtgagttttaaaaaaaataaaaatattaataattagtacaaacaaaacaaaagacacaattctaaacatgacaaaaaagccacaaattacgaagaattttatttagtttgagaaaatacaacagagcaaagaccataggaaaatctcacctaacctgtgtgcaacaagtaaaaaaaacatacaaagttatgtataattggaaaaaaaaatttaaattctaactaaagtgaatgaagatatatacatattaaatatta

SEQ ID NO: 23121 - DNA, 3427 bp, Cannabis sativa
ggtttatacaaacatgttagtatttgtgcaagttaacttattgatcaaagagaaatgttttgctttgctttgctttcttgtcttttgtctatgttgtttactttagtgtatggatagtaagtatccatctgtatatcattttgtcattgtgaagttaatcagttaaattattgatgattatggtctatagacattcaaatttgctttctttaaactaatactattgaccaagaccaattttaatatatgttgttgacaaatttgctaaacaccaaaaggaattgaaaaggaattagataaattaatataaaaggaatgagacccaagcttcacaagcaccaagggaatacatagcacaaaagtttgtccaaggacccccctaaactactaaagtcaagctctcacatggcctttacatcatacctacacactgaatacagtaaaactttttttttttctttttttaatgaggtagacttgagctttgaaagtatgtgatccttaatgtattggaagtcatcatatgcaacatagttcttgccaaccaagatgaaaaatcaaagtcaacaatgttttcatgggaattttagtggcttctgttagagctaacattgaaaagctacattgcagcagtacttgtatgcaaagatattagaagaccacttttttaatcatggagtttaagacacaaaacatgtcttgttgttttcttgttataagtttcagcagtaggtgcggttttggtgttctttttggaaagaagctcaacaatatattgctccattttcaactcctacacctacctcaatccagggcagttgagttctttctttgtctctttagcaactttcctctctccaatcacattcatttctccaccattatcgttctcaccatataatttttctcatttttgttgcatttagttctcaaaagttttcataaatatttctcaaagtaagacaatcccatatcaagtaccactctagtgagttagatagatagatacagagagacagagacctaagtatctgtatgcagtcaatcaagcttcaaaagatcttttgcaataacaaatcttctgtcatgttaggcattgtcagaagaaaaattaagcttctctgctctaggattcggcggctaatatgggggcgaccgaggcctaaagttgtcatcaagaggcttggaaagtggaacttagaaggtcaacctaaaagaaacaacaatgccaaagttgttaaaaatgttcaactggggttgggccattctttctcaaaaagaccaatacgcatagccacattcaatgttgctatgttttctcttgcacctgccatttcaaaggctgataacttatcagccactaataatcatgaacatgatgattacaccttaaggaactcatcaatgattggtatgcaggccaagtctgcaaatgatcctccaaagagcatactaaaatcgccactgagcaccacaccggctagtcctgaatgtctttctaagcaaagaaatcacagtagatcaaacttgaaagtctccatcaacctccctgataatgagattacattggcaaacaataagctgcttactctcatggaagctgacaaggaattttcctcgaacactagtacgaatggccatgttcgtaggagctcggttccagtgagatcacctctatgctttcctgccagtatggcctcacactgcatgaattggtgcaatgatattgatggactccaaagcaacagaagcatattggaagtgctgagagaagttgatgcagatatattggctcttcaagatgtaaaagctgaggaagagaaaggtatgaagcctctttctgatttggctgcagctttggggatgaaatatgtctttgctgagagctgggctcctgagtatggcaatgccatattatccaaatggccaattaaaagatggaaggttcagaagattgctaatagtgatgatttcaggtgcttaattttgttctctcctcatttttcttaacacacaagttaatgactaaacttctagcaaactctgagactgtgtaagtaagtttgcttctgaatcgattttgtgctgatttcaggaacgttctcaaggcgacaatcaacgtgccatgggctggtgaagtgaacttttactgcacccaacttgatcatctggatgaaaactggaggatgaaacagataggagctctttttcaagcaaatgatcctccacatatcttggcaggaggattaaattctctgagtggatcagattactcctcagagagatggacagacatagttaaggtagttaaggaatcaattttcatttcattcctttatctagttgactcatattgaaactttattccattctgaatttctctattaaactcacagtactatgaggacatgggaaagccaacaccaaaggtagaagtaatgaagtttctaaagggaaaagggtatacagatgcaaaagactatgcaggggaatgtgaaccagtggtgatcattgccaaaggccaaagtactacaaacacttttgtccataaccactttttcacttacatctattcatttatattgaaactaattgaactatgaaaattttcttacagatgtacaaggcacatgtaagtatgggacaagggttgattatgttatgtcatcttcagaatctccatacaagtacatccctggatcttactctgtggtttcatcaaagggtacttctgatcatcacttggttaaggtagacattgtaaaagaaagcaagtcatgtgttgaggagaatatcattaaacgacaacacaagttaattcagaagctggtaagtgtcacaagaagtagttgttcttcaaaaggtttgtggagaatataggcacataatttttagtgtcttcttttccatgtttggacttcaaacaattatctctctatgcccatggaaagtagacttagaaaataaattgttataaatatatataggtaaatgcaatcaattttgtctcttttttaaaagaagaaattgaatgtatccattagatgcttccaattttaatgtagtataaatttagtttgatatacttctaataattaaaaaacctttaaagaaacttaattatttgatctaaccatggtagggtattcttgatgggttatttttattaaggatacttatagcaataatattcattttttttattgttgtgctttaatactcaattttttttctctttttgttgcaaaatatacaaaatgttaatattttttttttgaaatgttaatacaaaatattcaaaatgttaatcttttagtgcactttaatacccaaatattttttttttgggtaataataccccccaaaaaaaaataatattttgctataattaagtacaaacggctaaactttttcaaaaaaaaaaaaa

SEQ ID NO: 23122 - DNA, 2112 bp, Cannabis sativa
cctaaattaatgtgtatttgatactcagcatttattattaaaatatgtaatatatattagcaaagaagttaacagaatgaatatctagaaattaagttaaagttttactattaatttattaatgacatggagtattttaattgggtggacagcaaaatggacaggaatcctagacagaggatccacttcccctaaacatcttgatacaagcaaatgcaatctgaaaaaatttagactttgttatgcacttaaatgaagaagttaagaggaagcaataaaccttgcaccaatcattaattttgccatgaaagatccaaaagagttcgttgtggcagtgtcaatattgagcccaaaaccaatccttgtttgtttgtaacacaactctattttatattttggtgtcactttaaatacacgcttacattcacataaagttaggtctcatctgaaaagtataagacgaaattattagagcatcactaatgttgtcaggagaattgtttgtcaatgtggtcgagtcaagttagtgaagtagagggatttatttctgaaataacaacataaccagtagttattattattgatgttcttaatagtaccttttacttgaacatccttaaatcgagctaaaaataaaaaattaaagtgatttttcccttataacgaattgaaaaattaaagtaagagagacagaatgaaaaataagaaagttgagagatagagagaatatcaacattttgtgatccaaacgacgtgtagtttctttatctcagtaatattttgtgatctaaccgacacgtagtttattttgttttgggtaaaacattttgtgaacaaaacgacgtgtagttaatatttaaatcttctaaaagaaaagggcaacaaacaacactatggaaaaccctagagcagggcttagggttttacatgtatatataagacgccgtattcgcttcagaaatcttagggttgaggttgaggttgaggttgagctagggcttctcatattctaagcatccacttcctctagatcttcattgaggttcatattctgtttactttcattctgcttctgattttaatatgtgtttacatatgaatactgagatttctatgataatctttagttttgaccatttggtgtgactgatgtagattccagtgagtagtgaaatgtaactactgctattggacactattattggtgattttggttagtgtaatgcttgattgagagctcattcttcttaatttcgtttttctttaatctggatttttttttctatattatttatgatttttttagtggattttagctagaaattatgttaattcatgataatttagactgatttttgcacatttaacttggatacatttgagaaagatggtggtttgatgcctctttgagtagtcaaatgaatattaacagtttcatatctgacttagttaaggggcaaagattaattcaataaaaaagaggccgtactggtctcttttttccttatctgaggcattttgaggagtcctgcaaattttctttgcagttctctcaagcatcctcggacatttttcactttctcatttgcatatttgtgttttattcactttttttctgtatttattgcaaaattctcattagttgtaattgccctcgaataactggaaggtggtctttttttaaacccacatttggttcagacaggggcatatatcatctcgaagcggtttgaggggaaggaatagtttgttatccttttcctaggatcttttttataagatcagcttcaaacattgtcttcattttgctgacattgttttgtgaactcttctgttgtgttcgttggttaaggtttgatgttcgagtccttaggtagctacgagcaattgtaaatattgcaaggtttaggccaagttcatagttatcatcaaatttattgttcgaaagagagttggaagtgatgattttttccccagatgatcgaagctgattatactgagcgctattatttagtttatcattcatttgatattccaagccagaattctgatccactcttttatcaaactaagttgtttttgtattgtttttatgaaacttaattatggaat

SEQ ID NO: 23123 - DNA, 4171 bp, Cannabis sativa
gactctcgatggtgatcgcagatgcggttgtcgacctctagagattttattgttaaaataataaatatctactgaatattatttaatgaaaaattcaataaaattttaaactgattaattttatataaagatatgaaaaagaaaatatttaaaaaaaaaaagtcacccaataatttttcataaagcaagaattcggttatatagccacattttatatagaatagatataaaaataaaaaatatgtattttttttttaatttgataaggtatatcaatataaaaagatttaaaattaatacaaaactaaataattaaataagtaaaatacatcatttaatagtgaggactttatgtttttaagaaaataaaaatttgaggaccaatttgttaaaaaatattaaaatttaaagaccaatttattaaaatttatatagtttagaaagtaatttactaaaaaagaaaatttaggtccaactttatataatttaagaatatggagtataaataaataagcctattacttattacaaacctttggtacaaatgattattgtattattagtaatctaataaagataaataacttattttcttttgtttctgagaaaaaattaacgttgcttttagttttgtaggggaaaattagtatgtggattggattccatccttggtggtgtgaattctcccctttataccacaaactgataatgacacacaccatccattctcccattgggaacgttctattaaatatttaatatttcttttttctttcttctttcttcttttttttttaataaaaaaattaaaattaaagaaatgaaaatgtgtatgcgtggcctaagcatacccagtagccagaaaagaagccctctttaagcatagctagaaactttcccaaaaaaaaaaaaaacatagctagcaactagtattactagtagcacccatgtcaatttagacccacatcaggtaaacgacaaagttggtgactttcaccatttttctttaccttcattcactgtattattttttctttattattttttttgttgagaaaagctaaaaagtactatctagcactactccctactttaatctttaatatgttatatagccattgaaagaattaattattagattccacttaatttagtttagtacatatttagtcatttgtgagacagtatcttttaagagaaatggtaaaagatatctttataacatattctattgtacaatttaatatggatttctatttatttaactttaattatgattattaaaaaacaactataatttatttatttaactttaattatgattataaaaaaacaactataatttatagacgctatctaataataataataataatagatatcatgataacaacaatgctgtaaacaaataaatagaatagtattttttagtatttttattggtagtttggtattaaggtgtctagcattattaccagtatcattcaatatttggttatctacaatcttttactaaaataaaataagtagaattaattattaaattatactaataatttttttaacacccctaatgtatttttaataatatatgcttttccaatttttttttttttttttgggatagaattgctcctctatttgattgaacgtttcagttactcaaaataaaaatctctctttctctttctctttctcttcttttctttttccgctagctattattgtcttctagctctgtactactactactacgtgtgtttaggccaaccccttgattttgccaactgggtttttggttggtattgttttctatacatttaggcaattaaagtaagctttagtctttgaaaactctttcactgcattcattaactggttaagagtttttctctagtaaagtttgaagctttttgccattattgaggggccatatggcttcagtcacaggcttcaggttaccacattttttggagttgaactcacagagtagtagacctttgtatcgatttcgagtccataattcagctggtactggtagggatccagctgtgttgtcttctgatctgactgtggttaatggggactctaactctggagttaggaaaagagagcttcaaattaatcatgggaatggaaggttaaagcctgaagttgaggataagaaaaagaatactaagcttgtgaaggatgatgttgaagaaagtttggaaccgtcttgggatgatggttatgggactgagactgtgaaagactactttgatgctgtagaggatatgattaagcctgatggtggtccaccacggtggtttagtcccatttcatgtgggcgccctttaaaagatgccccaattcttctgtttttgcctggtattagtttcctcaccatggatgattatgaactcttagttgattctaagtttacttttttacatacacagataaggggtgtttgcaagtggccatattctgggaaataagtctgaaaacgtagctatatcgtatgaaattactacttctaccttttaaaattttcattttaacatatgttcacaggaatggatggtactgggatgggactcaccttgcatcacaaagctcttggaaagtaagttacttttactgttatctttattctttagtaggctctagaataatggatcttctgtgattgtttaggtaaacaacttttgaaatgtcatatgagatatggtaaacccaaagtttggtataattagcataagtggcatcctcagagcttacaataaattttttaacatagtgaaaccttaagaacatattcaaaacttccctccagtgtttaagaatattctttcataaaaatgagtgatttgttttccatggcatggtcatggactcatggtcctaccttttatcactttctttttcttttgtcatccacgtccaagttttcataatgatttttctatgggaattattctgttgttgctcaaagtggggtagataattccaattgtggggaatcatttccctgtttgaaattcatttttgacactcagatttgctgtcgttatatgaaactattaaaggattctgatgttcctatattataatgcaggttttttgaagttcggtgtcttcatattcctgtttatgatcgaacaccatttgaaggttttaatcttctctatgcctgtgatttgctatcttggtttctttacgatcttgtccttattttgattcttaatactgataccaggaatcgcttttcatgtttgttttaatatgtagttgcgacttgtgactaacttgttaaggattttcttctgaagcattcctggattaatgcagaactctttattcctcagctcaaaaacaaagtgttttaatattgtacataataaaagaatggagagtaagaaaaaaaaaactttgattatgtcaacattgaagtcaaatgattcatcttgtatacatttttgtgttctcaaattttccaatggattattagatagtttaatcctcaatcaactcaagcttcttatgtttgttgcttgcttgtgcaagccctcaatagtgacttactctaaagcaagcaatgattttttttttccctttgttttacagataatgttactactgatattttaacttgaggggtttctttgtatgtagaactggtgaaattcgttgaagaaactgtgaggcttgagcatgcttcctctccaaagaaacccatttacttggttggagattcatttgggggatgcttatctcttgctgttgcttctagaaatcgttccatcgatctagtactaatactagtcaatccaggtaggttttttgacatgctgtgttatctcttcattatacattaacagagtttagacatgcagttcaacatacctcatgaacttctttcacttttggtgttttgtgttagccacgtcattcggtcggtctcagctacagcccttcttccccattttggaggcaatgcctgatgcattacatcctacggttccctaccttcttggctacattatgggtatatacaatttgtttatgtagatcttaagctctttatcatatcttacaaaaattaatgataagaactattcaaatgaatatatgctgccaaactaaaatcatagaaaatttcttacccttatttctttggtttaaaatc

SEQ ID NO: 23124 - DNA, 2609 bp, Cannabis sativa
  modified_base (49)..(61): a, c, t, g, unknown or other
aaaatggccccttatgtaattatttttttcttattggtatatttaaatnnnnnnnnnnnnnaaaaataaaaatttaatgacgtagaccaatcaggaattgtcagtggtaatttacttgacacttaatagccaagtacttatagaagttctaaaattataacttaagtagtattaccgttaaaaattaaacttaattattaatttacaactcaaaattaaatttaagtatttatcctacagattatttttattataatatattgccacacaaaaaatatatataaaaattattataagtgtaagagtagtcttttgttctatgttgcccataatgtcgctaagtaggtttttacccaccagaggtttggctgtattctggtctcctccttgccggagaacctgctttgtaataatcgtgaggtctaattatgtttctttatctaatgcaattcgacgctaattttttatttttttttttaaaaaaaagagtagtcttttgtttgccatgcaaaaattcaaattaattaattaaataaataaataacgataagaaataaaataacacatgcatgaatgtccttgacatgcaaaaattggaatggtccaagtcccagttcccacttcagtacgtttgttttgttcttaagtgttattgtaacataaatattaaatatattgttgaaaggtacttcccaccaaacttaataaaactaaaatcccatttttttctttcaaatatatatatatattaaaataaaaaattgaggcaattaatttctaattttcctaatgcacacataatggttttattctattaactacatttttttcattaatcattttttattaaaatcaatttatttgtaggatagtggaagtcctttaaaatttccctttaaatgcaagcaagtagtcatctaacttaattaaactcttctatttataattattaaatcacttttaatgatctcaacaatacatatatgatatgaatgaaaataaataaataaataaaaagtaaataaatgttatatatgttacatgtatgtacaaacaacttttacagctcaccaagcaagataattgtggaatttaacaatttttggttcacttttcttgaagtccacatccatattatgttggcataatgaaaggctctagaagtagttttaatcttgtttgggtaatatgtgagtttcagctttagctccaaaaaattctttttatgaatgcccactttagtaattttatcagtataaagttaaaagtagaagtagcctagccaaacatggccatagtacaaacacaataagagcttcaacaatggagttgcttgaggtgtgactttttatatagctgagtgtaaatgagatgagatgagatggatgagaaaaaaaattaaaatagagtccaactagctacaactttaaccatagtttgagcccagatggaattggggccgcccgcactagatgcacagcggcatgagaaggaaatttgattgtatatccactttactttacttgttttaatttttacctttatttttatatcctttaaaatatatccacttttatagatgatatccctattataccctttgagtttatataaattatgtgctaaacttaagtggagggtgaggatatattggacacattactcacaaaagtgagttgaatgaaatataatatgaagatatttttgattaatagatacaaaaaaaaaagtattcttcaactttttcctgagtgaccaaaagcctgcaaaacaaaatgtggtttcactcaagtggtgtcacttgacttggactacatacaaatagcattatcactcattatttgaatgttttaattagaaaatttaatttttcatgcatatattaagctaaaattttgaacttaaaacttaaatttaacactataggtaatgtaggctaattttttatttttaatctaaaaatacccctcctatttcaagactcgcccaaaactcatgtccctcattttctgtcttgtctctttccctccttctcgtctccacccaaacttgtgtccccttccattatggcagcatcactgtcacccaccaaagaaaaagccactgagattgagacccataaaccgaagaaaccaccaagattctttttcgctattgttgtttagatgttcgatatgtgattttttttttttgtgtttttggcttattatttttaataaaaaaaccaagttttggtgaaatttgtgttttctgggttctctgtgttttttttttttgtatatggtacgatagggtatgatagggtatgatagggtacgatagtggtgtaatatggaggttagagatgaaggttcgatagagtacgatagtagatatagagtacgatatggtacaatagtgttctgatagttgcttaaaatttatgccatgatccctaaaatttatggcatgatcatatagaggttatggtacgatatagtgtaatatgaaggttagggatgaaggttcaataaagtacgatagttgataaagttatgatagtacaatatggtacgaataatgatacgataggtgcttaaaatttatgtcataataaaatttatggcata

SEQ ID NO: 23125 - DNA, 9116 bp, Cannabis sativa
  modified_base (926)..(935): a, c, t, g, unknown or other
  modified_base (1070)..(1073): a, c, t, g, unknown or other
  modified_base (1456)..(1461): a, c, t, g, unknown or other
  modified_base (1531)..(1536): a, c, t, g, unknown or other
  modified_base (9076)..(9090): a, c, t, g, unknown or other
tgaatttctatgtagaatttcgtataaatgcaaagaaaattattttgaagtataaaaataaaaaaacccctaaaaaatatatgtttctcacatattaaaatgaccatcttaaaaaataagacccaataatactacttatgagaaacaaatgagtattctttctttagaatcttattaaaattactctataaaaaaagtttatattttagttacttttaaatataaattaacacattattttataataacttatcaaactaaatggtatattaaattttattttacattgaagtttgattattattttcttaaataaatataaaagaaactaaaaaattacttcagcaaataaatctatacttcacacacattaaaataattattttcagaaaatgtatagctttagtgcactttttaagtccaagcaatcattaatatagttggaattttttcttaaaattttgtagaaaagaaaaaaaataagagagagaaaaatatacattataataatagtttatctttttatgtgaagaaaaataatattaaaaaaaagaagaagaagggaagaagggaagcaaattaatgagaaaaagtataaatatttagctgtcaagaaaataggtacttgtaccgaacattgaaacacacccattttatattgatgatattaaaatgttcaagcctattactaaaaatattttgaaaatttcgtcagttattgtaattttctttattttaaattagttactttttaatattaaattatttaagatttacgaaaaaaaatattttttttctatataacttgcaacaaaataaaataaattatagttattttatgtgttcaacaataaattaaaataataaaataataaataacaaattcaaaagaagaaaaaattgtatgtataaagaaatatttaatnnnnnnnnnnattgtatgtagaaaaaaaattatatgtaagaatagaatatacatttgatctattaaattttaaattataattgtattatttgtattacacttttaaattattattttctttacattaaaatgttatttgtatatnnnnttttttaatttttttataaataagtgtggattggattgaatctgttacttttacatgtcaatcaacatccaatccgcacaagtgtggttgaaattttcaatccagtggagtgggcttctctctattaggactgagcataaaatctagaaaactaaaaaaaatcgttcaaagcgacctgccaaacactgttggaaccgaaactgatggaactgaaaactgaaaaaatcgctaacggttaaaactgccattgaacggtcagtttttttttttggtaataaactgaccgaaaaacgaaaaccaagtgttatacatacatattaatttatgaagtttttttttgctttatgtatagtagttactaataatatattattattttattnnnnnnaaagttaaaagaataagataattagtttttgaaccattaatttgtatgtttgtagttgtaaaatgtagannnnnntgtttatagaataaattggatcatattttaaagaaaaaaaaaagaagttcagtttgagcggttaaactggccaaaccgagattcaaaatggtcggtttatagataggtttctggattggtcggtcggttttcgaattgcaccaatccagatttaaaactgaattcttgatttttatatagaaataaactgaccaaacagatcgatactcagccctactctctatcgtggtcccaaagcctcataaaggaagttttcttctttaattcagcagctgtcaagtgtcaaaaaaaattcaaagttgctatcttttcatctagttaaggcccaacttgtggcaccaactcacaaaagccaccaataagcaagtgacatgtggcactccaattttaactcttggataattacatttttactatatgtaatttgtaataagttttaaattaggcattagtccttttacctttctataaatagaagtttaagattttaaaattcaatacagttttagatagaaaaatctcgagaaaacgttctaagcactcagtgttagtttatcgctttttttagttaatttttttttatagatttctaagtttccttattattaaggtggacgataaaaactagtgtatttaattaagtatttatttttattttgattttcagtacaatatatgcttatgatttttgattctttaaataatttctttcatctttaatatcacatatttttaatagttagaagttattaatgcttcgttttatattttattaaaaataatattatttaattttatatatttacattaaattatttcaaatttaatgtttaaagcgaagaaaaattgattttgttagaaaataattagtttgattactaattaaaatatgagaatcaatataattataaatattttttttatttacacttgggtagattttgaaattttaataatttctccaaataccattaaaaatatctattactgtcatttttacggctaaatattttattttatttgttactaaaaatctcatcattttcgaaactaggttagggtttaataatttagattaaataagaattttcttcgatctcatacaattcccatggactcgacttcattctttacaatctctacactacaataataattcgtgcgcttgcaagttgataaatataaaacgtaccattttggtaccaacaagtggcgatgatttgttgggccttgtggcgtgcttgtaatgggttaatttgccaaggtaagagttctgttgctaatgaagttgtttcatctactattgcttatcttaatcaatggaaggatactcaaaaagatgaccctaatgtaggcgagactacttcttcctttgttcttagtagcgagtattggattttacctgttaaaattatgattaagatcaatgtggatgcttctgttgttagtgggattggtagctttgagattggttgggtagcgcctgacagtagaggaaatgtcattgaagtcgattcaaagttgttgcctggttgtgtacaactgactatggcagaagctgtgggagtcaaaaaggttcttagctagatcaaacatcataatctttctcacgttgttcttgaaactgattgtcaagtagttgttcatgtaatctgtcatactctccaaatattttctccatttaggctaattatttcttattgtaaacgtctacttttttgtttaaacgatgtctcttatctttcttaaatgatttgcaaacaaggcgaccaattgtttggctcgtgctgcttgttctttgttaggtcgttgatttagtgggagatttgtcccggctagtctttatgctattttattagcagatttgtaatttagtaataatacaacaaacttttagccaagaaaaaaatatttatttattagataatagtatatatatttttgaaagtagattcaaaattgtgaaaactgttgtatataatactagctgaatatatatgtatacatatatctatgatcacataacttcttgcatattttatttttataacatatattatagttaaatatatattagataaaatgtgattaacaatgagtacttttattggtgtgacttattcctcttgttcctattgtcaagctatgtgggttctcatcattgtctctatttcttttagttttcttttttgaagatcctaaggcacggtaatttttattttcaagaaatcttgttcttgaaactaatatataccaataatttgttatttatctttataaaaggattgtgaataattatctaatgaaatatggaaagcttaatttttaaatttatttggatctgttttttattatacgaccctccttattaattgatgattaagacaaaccttaccctctaaactttaaagaacgtttataaaacattccatataaaatgtaccttagtttagctataaaggttaaaataacaatcctaaaatctctcccactaacaaaattcacaaccttaaatacttttgatcacctcacattttctaacgtattacatgtttcacacttttctttttaaacgcatttcttttctatataatcatattaattttatttctactgagagtttggcaagtctcttaacccaaactcaaattcctcctttcttgttcatggattttcaagctcttctcattctcattgttctcttcattataagttcatttgtcatcgtcgaatcaacagaactctctcttgcctattatcgcaaaacatgtccggaatttgagaaaatcattcatgacaacattgaatcaaaacaattattacatccccttaatgcaccagccactctccgtctcttcttccatgattgcatggtcgagggttgtgatgcctctatactaatatctccaaatcaagccaaggacactgaacgtgatgctgacattaaccattccctcgtaagtgatgcatttgatgttgttgctagtgccaagactactcttgagaaatcttgccctggcattgtctcttgtgctgacatccttgctcagacaactagggaccttgtcaccatggttggtggccctttttataaggtataatactatactatagtctagctacacaattaatatttgtgtacacaaataataagtctaaaaatacatgcaaataaatctaaatgttattataattaagaatattagcggtaaagctatctaaactttataattagtgacacttaactacataaatcgatttttttagtagtaaaatcttccaaacttcacttcttttagctatttacctcttctgtttaatagactctgttaagtgacaatgtacataccacagtgtacacaagtatataagtggccatttttagtaagggatattggcggcaaaactacataaactctattattagtgacacttaaccacataaattgatttttttagtggtaaaccttctaaacctcactcatgttacctatttaccccttccgttcaaaaagctctgttaagtgctctgcgactggaaccatcagatctccccttctctcgttccttcttcttcttttacgatgaacccaccagaccacaatgaacttacggacgaaccatcgaacccctccaactgtagtggtattaatgaagagttgcgggagagggagaatcagatccagcgaggtcaatgcaaggcaagaaagagaaacttcaaagaagggttgggtcttgggtcttagatcgagggaggctgaagggttgggtttgtaagctcaaaagttaattttggggttcgtttaggttgaaggtggtcggaggtgactttccagtactgtgcgagaaggagaacggaaaagagagggcgtgtgggtggaaattagggttacagggagaaaaatgtaaaacaaagagaagaagtgaacaaaaaaagaaaaagaaaaaaagaaaaaaaattatttttaaaaatatttaatcaattaaaattatgtggaccactaaaaatttttcacgtgtacacttgtgtacattaatgtgacatgtccaccgtgacacttaacagaatcttttggacggaatggataaatagctaacaaaaatgaggtttggagagttttaccaccaaaaattaatttatataattaagtattcttaatcataaaatttaaatcgttttgccgcaaatatcctttataattatataaaatattggattgtgaataaatatgttatttgcgttaaacatgacctatgtattatttgtattacaaaagtgcatatcaactcaaaaatatttattaaaacaaatgtatattatttcaaattttagtcattatcatattattcaataataataataaataaataataacctaggtataatcattttgattgtatgttatatagtagttattgattttttcttttagaaaatactaatgattatttatatcattaaatatagattctactaccaatattattcgtatcaatttttagtcattatcatattattaaaaaaaaattacctatcttatacctggtatatatacaattttacatgtgtaatactaattagtaattattgattatatctttaaattaatataggtcctacttggacgtaaggatagcctagtgtctaaagcttcgagtgtagaaggaaacattccaaggccgaatcaaagtatggaccaactcatcaaaatttttgcaaggaaaggtcttacaatctacgacatggtggcattaaatggtgcccacaccattggattctcgcattgcaaagagttctccgaccgattgttccatttcaacaaaaccactcccaccgatcctgatcttaaccccttattcgcaagcgcattgaaggttacatgcgaaaaaattgtagacctaggagtctcagttgttaatgatctggaatcaccaacaacgtttgacaatgtgtactacaaaagcttgagcaaaggtttggggcttttaaagtccgataatgctttgttaaaggatccaaggacaaaaccaattgtcttatcatttgcagctgatcaaacattgttctttcgtgcattttctagagcaatggagaagttaagtatctataatgtcaagactggccaacagggacagatcaggagagtttgtgatgcttttaactaataattattatcaaagctttaaagcaacaagttctgaatttaagattaatattgtttgattgttggctttttatgagtgactttatgtattcatgtatattgtccgtagtagtgggtttgatatatttgagagaattcaaatatatgtaaagttattatttatttttgttataataataattgttttgatcaaaggaatagcgttatatagctttggtaaaaaaaattaaaatataatacgcaattgatgatttcagtttataaattctcaattctcaaagccttaaactctataataaagttttagtcttaggacattgctatatttgactttttaaaaaaaaaaatcttaatttaaggattcaaagtggtatttatgattcctttgatgaatagtaatgattgatgactttaaaatttaaaataaaaaaagacatattttatgatccatttttaatatataatgagattgggatcttaaaatttattaatttgtaaaaattacaaatcgaattctaaaaaaaatcataaaaagcacgtatttgatcatctaattattattattgaacgtaaaatttaaattacttgttatgaaaaagtgtcacgtataattaaaatataatcaagttattttttcaataacattgagaatggagtggaaaattagtgatgaatgttctttcattcatgtttcgcctttgtttacttttgtttggtttgtgtaagaacgtaagagcaaaaacagagcatagagaagaagaagcagagcaaggcaaaagcacatgactatgtaagagattgatttattcatagtattgggttgttacaaattgtacaaaagagaagaactaacaacttttttaactaatagcagtagcactaactaattaactaatctgttaactgagtacaactaattctcatggttaacatcccccttagacaaaaatgagtgatagccattgaaatttgtacttgaggtattagaattttgcactagacaaagactcagtaagtgcatttggcacttgatcaagtgcaggaacatattgaacagaaagtggtttctccattatatggtctcgaacaaaatgaagatcaatctcaatatgcttggatcgagcatgaaaaactggattatctgcaagggctgtagcactttgattgtccatccaaattattggtggttgaacaagtggaacttgaagttctgttaggagagaagtaatccatttgacctctgctgcattggctaaagccttgaattcaccttttgtgctagatcaagccaccagtatttctcctatcatcaacacaacttgcccaatcaacattcaagtagcattctaaagtgattccaacaacaggtttaagaagtaatcctttagaaattgtgcctttcagataccacagaagcttcttccaggcttctcaatgtattattgtaggagatttgaaaaattgactaagcttattgacaatgaaagcaaaatttggtcttattagacttagatactgtaaagcgcccaaaaggcttatgtacagtgtaatgtcttcaaaaggatctccttctgtaaggtgtagtttggttgtggaactactaagattagaacagggtttagcgccttccatttttagtttgactagaagatcaatgatgtccttggattgagacaagtacattcctgttgagttccttacgatttcaactcccaaaaaataatatcacacaagtcttttaaagaaaaaaattgattgaggtcttgtattagttgagatatgagtttctaatttggaccagtgactagtgtatcatcaacatatacaaggagaacaatttgagttggacctgatttatgaataaacagagaagtattaactctcgatgcttgaaaactccattaaagtaaactgtgttttagcttcgaattccatgctctaggatccttttttaacccatagattgcctcgtgtaacgaacacacatgatttggatttgtatcatcttcaaaccctgtaggttgttgcatgtacgcagtctcatttaaagtaccattgaggaaggaattactgacatcaaactgtttaattttccagctatttgaaatagatagcgaaagaaaagttctcactttgacatgttgagaaactggtgagaatgtttcatcatagtcaatacttggagtttgcaaataacccttagcaacaagcctttatttgcacctttccaatgtaccatctgtatttagtttgaccttgtaaacccatttgttgctgataacatgcatatttcgcaatctaggtatcaaagtctagattttagccttcttaagagccttgttttctgtatctatagtgttggaaatattttaccnnnnnnnnnnnnnnntaccatgtatgtttcattaacatcct

SEQ ID NO: 23126 - DNA, 1487 bp, Cannabis sativa
ataaagtaacacaaaacaacacacaattagcacaatacaaactaaaaatgacacataatagaataatataaattaaattaggtattaggaaactccctctactcagagtcctcgtgggcctcctccagattcgaagctgatgccccagcccacgggttgagtactagctgagggaacggtgggaacacgagcttaaatcgtggcgtgaacttcttgacgctcgacatttttcttctttttcaattgcacactaaagaaccacaacacatcccccctcttcttttctctttgaacgctgctccttaacaccccctaattcaaccaatacactactatatccttactccaatcttgctcaaaaatcaccactctttccaaaccacaccaaatcaaattcaaagcattcacaccaaattctttcaccctcggcagccacaagaattgctccctgcttttacttctcttttttcaattttttttttagtttgaactactcaaacaacaacaacaaagcttctaacaataatctgtccaagagccacaacacttccaatactacaccaaatttaaattcaaatcaaatagttacaaccaagcagttcattgttcaaaaccacatcaaaattccaatatcacaccaacagttgcaaagccacaccaccacttatgaactacacaaataattttcaaaaccatttcaacacttccaacgatcaattttatccacattaaagtatccacacaccaaactaacacttctactcacaccaaacttctaatttctcacaaagacaatcagattattaatagaaataaactaagtcactcacacatccaacagatacttggctgccacagagaaattaaaatccaaataatagtaaagcttgaccaacaaaccagagaaaattgagtgagggttcgattgagctagtggagtcgacgaaagtgttgctggttgtgattcgatgcttggagtggtctcagaattagatgtagattcaactgaaggttgctgaagtgggtttcgatgtgtgcgtgttagcagctgggttgttgtttgagtgaacgagggtggtttgaatgggggtttttgggttaggatgggtggctacagtggtgaactgaatggaaatgggtgctggtgtgagctctagtgtgcgattaaggagatggatgatcgggctgtgtgttggtcgactggagcttgatagtgtgaaggtggttcggagatgggcgtgagtggtaaacggctgagcattggaagggaaatgaagatgatgatgatggatgtaatggagggttgagtattgggctgagaggtaagtgggctgggtacttagtgtaggggggcccagttgactaaagactaaaggattaaagccccaatgattaactcatgtttgctttattttgtatttttgagtacattggtcaactgaagtactttagcccaaatgattggactgagtgaaaaaattttaccc

SEQ ID NO: 23127 - DNA, 2589 bp, Cannabis sativa
ttccaactatgaactcaatccccgttctggtcaaatccttagccaactttggtgagatcttcttcaattcatagacttaccttggacccttttaacttagaacatattctaccatattactttttcaagatgaaaaaggatctcttaaccataacctgttaccaattccaaccattgtcactgtcaattttacatcatgtgtaggacatcgctgtttataatccttcagttgcttagatacataggcaacaacttccccaaactacatcaaaatgcaatctaaccctgtttagaaacatcacaataaatcacaaatttctcatcactgattgagaagttaaacactggcacaataattaacatctacttcaattcttagaagttacagtcgcacttgtcaatccaaacaaactttcaattctttcaacgtaattttgttaagggtgtagaaatcttagtaaactcttcaacaaattttttgcagtattccgctgatccaggaaacttctaacctcagttgcagacctaggttgaggttgattccgaactactttttttttcattgaatctaccaagattctgtcttttttcacctcatgctctaagaaacttgcttggagcagctacaactcgtgtttcttaaatttagcataaagcttatgctcccagaggcattgcaacacaatccatagatgtctctcatatgcctcctctcgaatcctcaacttgtaataaatagatcaaagatcaatcttagaaaagatgctctttctctgtaattgaacattcaacttcttttttttaacttaacaagtaccatccgattcaaaatttaagatacaagttctgccccaggtaccagatcaatttaaaagtcattctcccactttggtagtaaccccaataactcccctggaaaacattcagaaattctcagaccactggaacgtgttccggtcccatgggtatttttcataacatctacctcactagctaagaaaccgacacatgcatcccacaacaaatatcttggattaaatattgaggtcaatggaattcaggatccttgaaccttgcccacaagcatgaatgggtcctctccatctggttcaaaagttaccattatcctttttccatcgatggttacattacatatttttttgcaagaagtataacatcaaaatcctctaaattcaatcaaatcaattgataaccccattcccttcataaacaccaaaagggacctaacccacctgctggaggtaacaaattttttagtaggcattaaggtaccaaaacttctttgtaaagcatctctaggtctatgcagatttccaatcaatattctcgacacatataaatacgttgcaccaaaagcatgaactaaagtattatctctcttttgttctagtcgctgaagctatagacaatttcttttcaaatagtcaactaccccactccagaagcaggctctagtttagcattcaccctgacaacaactcttgcacctcaagaattctagataaattctccaattttttttcacctagttggaaaccttgattactttagaatctctaattaagacccataactgatggattgttaggccttcttttacgatcattcgggtcaacatctttactataatcaacaccaagtgattgtttccaagaatctctcctcaaaccgttcctctttcaaatttgatcctctacaccctcagctgcgagagcaactcaattacctaagcataagtgcagacaacccttagttctttggcaactacaattatatctcgagcgatattttcttccaatactcgaataaacttggtctctctagcagccttagtggccattttatccaaagcaatctttgttaaccaaataaattttgtggcatactctgtcactgccacacttccttgggttaatcgtataagttctctgctttaacaacctaaataaatttgttataataattttcatggaacaaagcctagaaagtatctcaggtcttgttatttagattataactatatgatacaatttcccccactagacgcgggcatcattacgcaacatgttaatgacatatctaacccaatcattactcatccattactccgccttgagtggatcagcaccactctcttacactggcagattctactttctgaatcgcttgaataatggcttcagagaatttgcttgcatcctatagcactaccaaatgtgccagttgagcgcgctgctccctcaattcacaactctgatcacctactgccagttggcctcctacatcacggcataaatcacgacctccagatggtagaaatccacctaggcaaagcatccggacatcaaagtacaattatgatcctctattgcaacccccaacgcatacgtttatcccatccaccacaggtcaaatgtctagggacagcactgaactgcatccactacctccagcacctttcacacttcttgtcaagcccttgcaattgatggaaagggacgaagctcgcctggaagtagtggataaattttaccaaaagagccatggttgtgagattgaggagatgaa

SEQ ID NO: 23128 - DNA, 1867 bp, Cannabis sativa
ctaatcccatagattatttagataaatttaatacaattatggaagtagatcagttaccacaactagcgaagtatcgtatgctcacggcaaccctgaagaataacgctcacgattggttcagctaactactcgaagcctccatatcaacttgttcattattttaatttcatattttaaattatttagttataattttattatttcaaaagttagggtaaattttttttaagatatttaaattttatatgcttatttgtattaatatatattttttaaatttagtatgataatatatttattaatatattaaataataatatatgatattataattataatatttttaacgaataatataatactatattattaaaatatttttaaaaataatgtgttagataaaattaaaaaaatatatattatagtatcatagttaaaaaattagtcttagcatttcactttttgaaaaagcaaaccacgttgaatagtgatttgtcctgatatttttggtagctgtgaccaaacgccagagattttttaacatatatttgtcagttctgttcaataatagttattcattttctttttatcaactattccttttgatctgaactattcctttttttttttttaattaggggtttgaaaatcgttcgtttcaaaagaaattcttcatttgctttgccaactttttatttattttcgtttgattaatacgaatacaaatatacaatacccactctcctctcatccatcgctcgatcttctctaccattcaaagaggtaaagctttatatatttatatatatatacattttactttactcgaatgtagatccatgtcctccattacatatttcatcatctcttctgtccgtttaaggttttctatcaatattggtatttattaattttcttaattttgagacgtttctagcatagcccaaatgctcaaacttgaatatattctattatattctatactatttgaaaatgattgcattgctgttacattaaattatttcaatctgcttattgtgcaggtggttttgttgagacttgaattgggttcttttctttttgttttcgaagctagttaaagttttggctttggaaaagaagaaggaatgaggtatattggagcacatggtatagctgcactgcacaagcacaagtacagtggtgtagacaattcgttgctagccaaatatgtcttgcaacccttctggagtcgcttcgttttaatctttcccctttggatgccgtaagctctcttttcatttttaaattatgataaatgaaacaaaataataacaaagagtattgtgttactaatgcctttcctgttcttagtttttggtattcttgcatgttatacttgaccaattggtatttacttatatgcgtgagctatggggcttgttggggctatgtaacttgtttaatccttagttgctggttgtagtttggtctaattgtttgcctttacctttgccactatgaaccaactttgcaagatgtcaacaaaagaaagcaagtgcccctgattggcattgtttttggaaatgagaatatagaacaccttttgttgttttaaaaaatcaaaaggtgtttgtggttaatgttttctaattaattttttagcttttctatttttaatttaaaatatttgaatgaaaaattaataaatatattaatatggagacaatttttaaaagtttgtaatctgaagaggaaagtgatgaaaaaagaaaaagagagaaagaaaaatgagaaaagatagagagaaagtgatgtgagaaactaaaaagataattttgtaaagtcttctcaaaattttctgttttttttttttctcagaaaatgg

SEQ ID NO: 23129 - DNA, 1479 bp, Cannabis sativa
gatggcgtcgataaccactctcgaatcattctccacaataacaaacttgtagccggaatccaaagcaattgacacagccaagcagcaagtcgcggtttcaccacaaagagcatctgagaactcctcccgagctgtatgaactctaatcactctaccaagatgatctctagcaacaacagcaatacacatactctccaaaccaactttcacatcacaattgagcttaacccagtccagaggaggaggggaccaggcattcggtaaaacaggagtcggactggaaagcaaggtatcatacatatcatacatgtcaagcaaatataatgtatagtgtttggcacactttgcaaatgtgtactacattttagtaattgaatcaccataatatttagctataacatcattataccttttatagtaattgtaattttatattttcaaaatattaaaagggtattaattaaatattaaattttacaattgtgcattaaaaatgctaaaaataaaaacaaatttttgggagatggtcttactaacacattaaaggcttgtttggtacattgtattaggtagaagcaaagggaagggggaaggggggacatgtggagtcatttgctcccccctcagttttttatttatataaattttgtatataattttttaggtattttatattttgatcccataaaaataattttttttatttttaaccatacatatttttatatttatccccataaaatttatatttttcacttttattctcccatatatttatttttattctcatagaatttacattttctttaataaaaattatattttttattaatgtttcaaaaaaaaaaaattttgcccccactaaaacgttgggctggctccgccactggtattaggtcgatgtaacagctgaaaaatagaatatgaataacaatagcaaaatggtccttaaaaaaagttctcttcccttaaaaggaaaatgagaagacagtaaagaaaaaagtataaggaaacagttccttggagaaagagtaggcaaccaacaccactgaaaaatacaacataagaatagcagaaaaaatggtctaagatgagataaattccaggagaaataagtttgtacgtttgtgatggtacatttacactaggttggggttttccccaaataaaccaaaatcgctgcactatgcaggattgtttgaacaaaatgtttataccaaatttcacaaattagaaaagagacctaggtggaagtaccatggaaaattagacccccacactgaaaattcacacttaatcccacatccatctccccatcaccttttagactttgaagctttaaatatattctctttgaagtatttgagttccatgatgctttccctgatatcatccattgctctgtgtttactttctttaattggggctttcctttgatctgcataaccaaaataaatcgatccgatgattaactcataa

SEQ ID NO: 23130 - DNA, 2176 bp, Cannabis sativa
aagctttactaggagtataaggccaaggtttaacaggacaataagtcaatgttggatcagttcaatcccaagtatcttctcttcagaaaaaatttctctaagtgataggggaaagagacagcaggggagctcaattgatgtcccaaggtgaggctctacaaataaaactctgagaggtcaataacttaaaaaataaaatcaatgagaaatacttggtaaaccaaggcttatcaagtgatattgataatttaaattgacagctcgaggttcagaagaaggccaaagactcattgagtgttaagtatgatcaataggttctggtcttgtaggccttgaaaccattgagaagatgaataaggaagccttatatcaactgaccaacgataagaaagcatttttagccttggcagcaatgcaaggagctagggagaccaccgtgtaatccatccaatatgttgtaaaggtggaagataaggatgaaaggcttcgaattcgatccatggaaatgtcatactcgcttcttcttcaaaacccttggaagaaagacccttctatcctcaagcatttcagagaagatcaagaagaatatactcagagggtgctcattgttgatgatgaaacttatctcgagaagtataacccccatgaatatagtgaggagcctgacgatgaatcaactgaggacttgtagcctcaacattctactaaagtggtagtttctttgaggaatgttgcccaagacctctaggacccttccaaagacaaacctataggccttctagcttcaacccaatatgttcctccagcccaaatccagaaccagactaaagagtcatccatagtgctagatcaagatcaaattccagacccagtccatgagcaatttatatttcatatctttttcctttctttattactttaaaaatagtttttttgcgaagacaatttaactatgccttaactataaggcttcatgtaatagattagaagaatgttgttgtagtttatgtatgtttgctttattttccatgcttgtgcttactttattttccgctactatttgttttcttggtcatttgatagactatcataggacttttcaatgtttttggttccaatggccaaaacttgacacccttagacttattgactttgagatcatttatcgaatctttgaagtatgcccgctacaaattctttagatgtcaaccttgccaatgtccttgttaatggcacttcacttatacaaagggattgtaagcttattcccaaacttctataggagtcgcaaagcataactcctatctacgtgtttctcaattagctgccctaagcagaatacaatagcaaatttgtgtcatttagatttagtgagggaagagggtcgagtgtgtaatagactctaggaaaagttcctcacagggagacagggttggatacatattaacacttaggtcatccttcctcattctaaagtaacaaagtttgtttagaatttcaataggttttcccaaacttgtgataaaagagctgttggaaaggcgagggacttccagacgtgcttcttttatctcactctttgtaggaaacctatcaatgtggttaacggaccaaagcaactgcaatagtattcatgcaatgttcctttttcagggagaaaggctgaaaacgtattggttgtgctttttgtgggaaccaagtttggtatgcaatagactttaagtgattcttctttcaggaaggagggttaaagacgtttcaaaatccaagtaatattcccactttaagactaaaagtgaaaaccaagtttaatatgcaatagacttcaagcgattcctccttctaggaagggaaggttgaagacgtatcgaaattcaaccgatatttttgaccattagtttgaaattttaaaattaaactacaagtaggaaattatgtgggaataaaaattaaatacaaagaataagtaggacactacgtgtttttgagggcacatagctaagtatactacccccaagtgagctaggaagtttggacgtctccaaattcttggtcacttatttaaaacatagcttgtgcaggagacaaaaatgtgaattcttgtgtaaatttattctattttcatttcattacacacaaaggtttatattaagatagaatttacaaagaattacat

SEQ ID NO: 23131 - DNA, 3760 bp, Cannabis sativa
atatatatatataataagtcggcagagttactatatgacatcttcacttgtctttttgtctctcataattaatcatgcatcaaaaccttcttatatatatatatatttatatttttgtataattaaagatcacagtgacgaggttgtgaatcggaagaaaaagatggaagctatatgtgtatatatatatattatatatatatatacttaatttgtaagtttatatatgtgtgtgtaacatgtcaaaaagagataatatatatgaatgtaactcgtcaactaccttttttccttgatcttttcttttttaaaaaagaaaccatacatattatgccaaattctttgatttaatatatccaaatcaaatagatactttttttttgtatgaaaaaatagagatattatctatatatgtatagtttagtttgactagattgaaatctacatatatatacaagtatcatatttgtggatcaagttttaattagctccctcaaaaactaattttaattagttcatgaaaacattcatattgtaatagaattaacctatctatacacaatatggtataacatatattcacactatttttaattagttcatgaaaacattcatattaattgtaatagaattagtattagtattagtcatatagtataacatatattcacactttttataagtgacaccttataatttggtaacgatattttttaaacacacatcaatagtgatataacacaaaaagaaaaaaatgttagtactaatattacttttagcaagctcctatcaataacaattttaaaaaatatatatttattttagcattaatctaaccacaatattaattactccaattacgatgacacataattatctttattctctctcttccacctcgtctcatttggacccatttatgataagcatctctttgtggtaaatgctcttatatagtaatgaaatttatgatagtaattaattaaccaaactatacatgatgatattaatataactttgtagtttgtatagtattaaataatacaaatttaattggtctctatgttgaaagttattatgcatgcatgtgcatgttgggttcaccaatggtagcctatatatgtaataaaatgataattatgctttgagtaccaaatgagtataatattaaacaaaattttgaatatttattgtacatcactatgggaaacatcatcatcatcatcatacattcatactttaaaattctaaattaaattatatatatatactcatcaagttccaatgttttaattgataaagatctaacttctttaataaggaaaagggaaaaaaaaaacaacccacatgggatccaaaatcaacatctattagattatccaaatcccatgaaaatgatattgattaaatatacactaattaattagagaaatgttaaaaagtttcctcaatgtcatattattattaatataattaagtatcaaatatcatataagaaaataatttttagagaatatcactaactaattgtaaggtgtcacctataaaaggtattggatactactggtgtccaatagtaatgctcaattaattattttgttatgagtattgatattaggcatcagtagtgcctatcaccttctagacgtataatatttttcaattagttaacgatatactctttagaaattaatacattaatttatatgagacttaataattaattacactaatatagatattaatatgtatgagaataataagcaccaataatgccttaaataaataaagtcttgctgacacaactatgcactttgccaagtcacaaccctcaaccctaaaccctcttttgattattaacaaattaaatcaaacattaattatagctataacatcctcaaattaagctttaagtaaataattagtgtagatattattaaattgagaaaaaatatcaataatattggtcaatatacatgcatgccaatgtggtacttaataaagttatcaacttttttcttcaaaggattcctatagatcaaagtggcttaagttctcattcaatattgcctagccacacaactctatataaagccatgaaaataatccattaccacaatgacaatacaaaaacctagctaataacaagaactagaagagtgaattttcaaatattgattttttatatgctataattactagttgagaaattataatattagatatatttatatatattatggcaaatttgcaaatagttccagcttacaaaaataatgtggaggctcagtatgtggagatgatggtgccactttattcttatggatgtgagaggaaaattaagaagtctttatctcatctcaaaggtatttttttctttctcataataacttattatgattaaaataatttttaatatgtacatatatacttttgaatgatcatatatatatgatgccaaaaaaaaaaaaaaatctaaattttatatattttgtgtcaattctactactacatttttattatgaaaattacactacttatgcttttttttttatcacttaagttttttcatgggaattatattaatttacatttttttttattgtttctctatgcctttttcttcaatttgagaattttcatacattattattttattaagcttgatgagtaaaagaatatgatttttcagaaattaaatttgaaaattttaggtatgattaaactgtattttaatatattaaaaaaagcatcatatttttaaaaagatccattttttttttctatatcttcccttgttttagtcagtttgtaaatcaaggctttttttatttttctgattattgatcttgatgaataggcctaacatgtaaaatgagacccttaaagagtagaactatattgggccaaaagaaaaagttttttgatttatccactttttaatgtatataattggtttataccataattattttcttttatcattttataagatttattactaataaaccacaccaccatatatttcatagaaaagttggtataataaacttttaattataaatctattggtatgattcatagtttaaaaataaatggcatttatgagattgaattattttttatttaattaataattaatattaatgatgacaggaatatactcagtgaatgtggattatcatcaacagaaagtaactgtttggggaatatgtaacaaatatgatgtgttaacaactgtaaagagcaagagaaaagatgcaagattttggaaccctagcgaaaacattgacttttcggaagagtcaaagttggaaccaatttcttcacaatctccttcttcaaataatcatgactacatctctactatttcaatgtccaaaccttctttggctctcactagggttaaatcttttagttggaaagcaatgaagaaagttttcacaagatctcactccttttaatcataatagtaatttaagtgttgtttaatgacaaaagagagtttttcaaagactaagaaatgagtgtaaatttggcctattaatggacttcatctcaatcttagtttgtacatattttgtctcaattcaagtattaatttatagcgagttttgtcaggcattttgttacaaaatgtattgtaagctttgttttatgtaatttggtttttatttactctattttctatttatgaaatgtaacgttcctgattcaagtctccattgagtccttacacccacggaatgaatgactctta

SEQ ID NO: 23132 - DNA, 3276 bp, Cannabis sativa
  modified_base (2713)..(2716): a, c, t, g, unknown or other
aattgtggatgggatccttttgctttatatatcgagctgttggcgaaggtcaggtttcttctgattcaagtgctctagcagatccggttaggagtaattggtgacagtcctcgtcttactcacagatcacgtcgtactcatagactttgtctttgagtgactcgcagatttactggttcccatactttctcgatcattagctcactgagtagtttctcctctttgagttgatctactgtggattcttgaccgcctcgaggttacacttgcttcttcacgctatgttctttccccttgagtgtagttttttgtatttccgacattagggtctgtacgagtcctcgctatatgggtttgggaagaacgttggtgatttctcgtaggtgacctacgttatcccggttgagtcccaagatcttcctcattatattatcatgaagaatttcatttctcttctcattccattcatcagttttcggttgcctcccatcctcatatcggtgagagggttctcgctaatcatttttattttccggggtatctcattttccctgggtttttcttcctgggcattttcttgtctcctggtgagccacgaggtctgcctcgtggtcttgtcattccaggtttaggttgattttgagcattcttcccctgtgccgccctggccccggctacatcacattctaatttagtgttttgtcgctgcgcctcttctagacgacatcttaggcggtggttttctgtttcataagtaccttctcccataggctgggcacctccacgattgggctcttcatcccttgtcccagggttttggccattcccacgctgagttctcctcgagcgcattgttagcgtactaggaccaacgtcaggttgagtcctccgggaacgtgtggtccatgtgctggggccacccgcaggttgagtcctcttggaacgggtggtccgtctggaccgtgggttggtagaccttctagagcccatgggctccttcccaagatgatgatgagtttcctcatgtggggtattaacatcttctgggttttcaaccatgaaggaggtggtttttcttcaaaagaaagaagggtttttttatgagcttttccacagagactctcaatgaaagcaccaaactgctaacacagattttcgttaaccaaaattgagcctaactgtgataatcccacatagaaaaaataaaagctataaaataaaagtatgaacacagggttttttacgtggctttgtagttaaattgtgcatagtccacgagtcaatcttatgcacatctctgattgttttctcagggcctctcttgtatgagtttttttggtcccttgtttgatctttcttaccactatttataattacatagtgggtagttaattacaaagttgactgtaatctatttacaacgatcatcccctaaaatcatggggtttgattatatatcacgtagtgcaaatacggttacgatttgaaaatcatatagctgtgattttcccgcttttaccgggtcaaaatgatcgtgtatttaaacacatctttaattgttgtacccaagaatgtctcgacagaagcttgattctagtgatcataatcgcgagctggggccattttcccttctgaggtcgacgatgcacctcttgctgcttctttgtaatgattgcggttcttgtttacaaagagttctttgaggctcgtttgaatattagcttctgactcgtcaggattgtaagcttcactaagaaaatgtctaaagtttgatgggtaaggttacaggaagtcttcccatagcgagataggcacctcgtttacttggtctctccgactatcacacttagtttgcacattatacgctgaaggccttcgagtcgacaagtgtcgttttcgtcttcctatatataatgtacttgatgccttgctatttgcattcagcgacatatggtttctcgctaatatattaaggaacattttgtatattgattccttgcataagaccttacagtcagcaggtcaaaagtatactctgatacttacgtaatcaatgagttattccataaaaaatgattgcatcgatccatatttcttttatcctgacatttgtcccccactgaaatggtagtcgaatttgcagtcagcaggtcacaaatataccctgatacttacgtaattaataagttattccataaaaaccaattgcagcgatccatattccttttatcctgacacttgtcccccactaacaatatgtttgatttaattttttttaattaagtaattttttttaatttttgaaatgggtttgagattttgatctttaggaatttttttcgctattgctataatggtgtgtcatttgaatgtgtttatatatatgtatattttttaaattttttaattttttttaattaggtaacatatctaataatgcacatatattataatttaccacaactaaaacgaaaaacaatcaattccttattacaacaattttaatttaaaatataaaataaataataataaattaaaaatatttataatattttaaatttaatttttttatataaaatatctatatagtttttttttattttaattccaagtcaaactaataaatttaaaaatatgactaaaaatatctataatgttttaagtattttaaattttaatttaaatttcattatataaaatatctatataattnnnntttttaaatatatataatattattataaaattaataaaaaatattctattaagtaatagaaagttctgttaaagttaacataaaaactcaaaaagaatcgttgaactaaaaattttgtcacatagacgaaaagtgatgtaatttataatttagaatgaatatatatatagataattgttttctaatttttttaagagtttggtagaagatttttttaaaagaaataataaaataattagtaaataaatttttatacggtagtaatttttttttaaaaaaataataaaataattagaaaataatttaaaaaaaaaaagccaacacgcaagtcataagaaaattaaaaaaactaataaataaaataatttttagagttatcatttaaaaaaaaaaataaataaaaaacaatgaatgaattaaggagtgaataaatatattttatattaattaatatttacgaagttaataaaaaattaaagaaaagaaagaataaagaagataacaaataatactcattagagagatcatagagtgttaagttactacttcatacctccttt

SEQ ID NO: 23133 - DNA, 4063 bp, Cannabis sativa
ggcataaaacccaacataaacctcttcatagtggtatgaacgtccgttttaagaaactcgccattaccaagtggctaaagtttctttatgaaggaatacagactaagtgtaagagtttccttcgtcattgtgacacccactcttacctccctcctttgagttacaaggatgcgcttagagcccctgccaaatcgatctacaataagagcattttcgagctttcgaattcaatcccgtttgaggaataaccaaatctctctaatgtctctagccaaggccttcaagaggctgttgatcaattactcatccaaagcattgccaataccacacttgctaatgtccctgtcgcttttcctcccacaaccctagtccatgataccaccactacaccatcttccacacctaatattgtccttaacaaccccttttccactcaggttacctgtcccataccttccaatcccattagtgtacccattgttgttacttcctcatccaaagataaagctcctatgttccctaaagttttcaggaatctttccatcaacccccagccagctcagccaagagctcccacaagcactgccaccaccaagaatacgagatcttacacccgtcacacctgccaggtgggctcttctgttaggagcatgctaaagcgagctagggcttctaattccgactttgctgtggtccctaccatgtcttacaatagcaaccccgcctagaaaaatgagtatcataagttggaatgctcgcggattagggagttcccgagcattccataatttctcacttcttgccaagtatcacaacctcaggtcttttttgttatagaaactaagttagctggtaattctagtttcttaactaaggctagacaatattttgttaatgtctttgaggtgccaagaaatggtttaggggtggtttgttacttttttggaatgatgtcgtcaatgtccatactttgtcatactctatgcatcatattgattgtaatatttccattaatagcaatataaattatcagttgtcttgaaactatggatccccttatattaacgacaaaaatgcttcatggacccttttggaccgattgtttgatgttgctcctttcagcccttggttcattttgggagatttcaatgactacctggggtacaatgattgtaatagtaattgcttacccctttccatgctattcataatttccaacactttgtttctaagtacaatctttcacctttaccttttgcaggtaaccgattcacgtggaaacatgaatcccttatagagcatttggattggggtattaacaaggcttgggataccctttaccctcatgctactcttcagcatcttcccttttatggttcagatcatagggcaatcaaacttattcatggtggtaatcccccttttccaaaaaaaaagtaacccaagatttcattttgagaaccattcacggagcctgatttctgtaatttggttcagaacacttggacttttgctaggaaccacaacaataccacctctcctcttgccatttttctaaataaacaaaataattgcattaacaacatgatctcttgggggaaggataaaaacaattttaataacagtattcagactctacaagtgaacattgataaaatttactcctaatcctccatttcttcgagtgatgtcaaagtttccaaccaactccaagcctctctcgataaacttttgtataaagaggaagtttttcggaaacaaatgtcacatgctaattggcttcaagatggtgacaagaatacgaaatactttcacaatcgggcttctgcacgaaaaagaaacaacttcattaaggcgctcaccttggattacaattcttctatcactagcctcagagatattactaacacctttgttcaattctattctgatctcttcacttccaaaggcatcgatcaggagtccattaacactgttcttaagggtgtcaccaagcatgttactagccaacagtatgattacctggcccatacttttgattttgctaaggtcaaacgggctcttttttatctcgcgggggataaagctcctggtcttgatgggctaaatcccttcttctatcaaaataattggcatactattggtaaatatctttgcaatgctgttcttcacattcttaactctgatgccaacatcgttcccatcaacgtcactatctttgttcttattcctaagattaaggaggcctccagagttaaggacttctggcccattaacttctgttccaccatatataaagtggtttctaaaatggtggctaacagacttaaaaatgttctgaatgaactcatctctcataaccaagccgcttttctccataatcgtattattttttatcacatctatccttgttcttattcctaagattaaggaggcctccagagttaagaacttctggcccattagcctctgttccaccatatacaaagtggtttctgaaatggtggctaacagacttaaaaatgttctgaatgaactcatctcataaccaagccgcttttctccataatcgtattatttttgatcacattatcattgccaatgaaattattcatgctatcactactaggaagtctggaaaggtgggttgggctgctcttaaattagatatggagaaagcctttgacaaagttaaatggggcttcattagtcaaatcatgcactagttaggttttcctcccaagctcatatctctgattcttagatgcatttcctctgtttcatttcagctctgcattaacaataatctgtctaaccctatccaaccttccaaaggaattagacaaggcgaccctctttcgcccaaccttttcctcttggtggctgaaggtctttcggctatcatcaaccacaaaacccaccataacttgttccatggcctttccattttccattctgcttcatccatttcccacctcctcttcgtggatgatagcttgcttttcactcaggtcaaagcttagaactgtgccaccatcaaggacattctccttctctataataaggccacgggccaaactgttaacttcactaaatcctccatactcttctccccaaacataagtccttctagcaaatcccatttcctcacgtctctcaacatggaggtcaaaccgttcattgataaatatctgagttttcctcaatgcctttcccactctaaaaattccccttccttttttattcttcagaaagctagcaacaagttgtctgtcttgaaccaaaagcttttctcctaagttggcaaagaagttctactcaaatcggttatccaagctattccctcttatgccatgtcctgttaccgacttcctatttctaccagtaagcactttagcagtctcatggctaatttctggtggggatccttggaaaataggcagaaagttcattggaaaagatgggatcaactgtgtaggtcaaaattctataggggtcttgggtttcgtcaaataagcaccataatcaagctatgttggccaagcaggcttggtgcatctttaccaaccctgattccttggttgcttctcttttaagagaaagatatttgaaacacaatgacttttttcaagcttctactggtcataacccttccttttgttggagaagtctcctttggggtagaaaccttctttccaaaggtctggtctggaaaattggagatggtaagtcagtcgacatcactaactcgaattggttatcaaatagtagggaattatcttttaaaaatggctgaaatccacctaaaaatactgttgcatttttttatcaaggaggatagacaatgtgatacgaataagcctaaccatttcttggatgatagctttattcaatccgttcttaatgtccccattgatcctttcaacggggactttctcatttggagacatgacccctctagtagcataaccgtcaactccgcttatcaccttacaaatttttacaacccttaccacagtgtctcaaactcgatttcctttaagccttggtggaaggctgtttg

SEQ ID NO: 23134 - DNA, 3366 bp, Cannabis sativa
ggcttgctggactatttgaccccactcggcacaattaagagcatcctgttgtaaagcttggataatagtctgattatcagagcagatttttactctggaaatagaccatcttagagctaacttcaggccaagaacaattgcagcagcttcggccagcagaacagagctgcaactgggagtgaaatcagcttccgccaccacaagcgacccctccgagtctcttattactgcacttaaactaaccccaggttgtccaaccaccagcgaagcatcggtattgacaataaagaaatttgttggaggaggaatccattgtagatctggtttagcagcaggagttacttgggttgtctggtttgatcccaggtgcaaatctaacaaatctgaagcccaattaatccacaaatgatcagtcattgttttatgttggaagatgaaggaattccttctttgccaaatcaaccaagtgaatccaataaacctgaaaaaaaggtcttttggaatgtgatccttgatccaccaaataaaatctgtagcattattaattcggggcgggaacagatgtgaaaaaccgaggtgcttccaaatctttatagtctttggacaaagccaaagtgcatggcaaatatcttcaacctgctggttacaaagatcacaacaagtttcaagagccattccacgttttaaaagctcagttttcgttgggagccaattatggaacattcgccataaaaaattcttcatttttggagtaagaatggatccccaaacaaatttccaccaagctttaattggggaattatttgaactttcagcagtggtaggattagaaaatcgaagcttgtagccactagcaaccgaatatttaccattaggagtagagtgccaagtgatccaatccgatttatccatgggaggtttaatgcctaagatccaaggaatatcatcttggtggaaccaactaaccacttcattagttttccaatttccattaggataaagtaaagaactaattgtcacttcttttggaacttgaacttttgttcggagggtgaaaggaggacctctaggcagccaacaatcttcattaattcggatcaaacaaccatctccaacacaccatctagagccttttaggaggagctctctaccccaaatgatactactccaaattgaggacccgtagtgccccaagtttgcttcaaagaaatgctttgaggggaaataaagggcttttaaaactttagatagtaaacaatccggatgagtaattaatttccaaccttgcttagccaagatagcttggttgaagtcttctaaatttcgaaatcccattccgccttgttccttcaatttacaaagtttttgccaattaccccaatgtaacttgtgttgattcttggatgatccccaccaaaaccgagctattagactttcaatgtcacggagaatccctttggttattctaaagcaactcataacatagcaaggaagagcttgaataaccgctttaatcaacacttctttcccggcttgagagaaaagacccatcttccaaccttggagctttgcttcgactttgtcccttatcttcccaaaaacttgttttttgtttcttcccacaaaggttggcatacccagatatttggtgtggttttgaacaagggatacacccaaattagaggctaaggcagcagcctttgattcatcgatcttacaccccacacacatctcagttttctcaaagttgatacactgaccagataatttttcataagtgaccagcacctcttttagagtagaacattcctccatagttgcatctaggaaaacaaggctatcatccgcaaagagaaggtgagacaatcgttgatccatatcaccaaaccttaatccatgtatttgtccagctctttcggcttcaaataacaaacaagaaaggccttcagaacataaaagaaatagaaaaggagataacggatcaccttggcgaagacctctttcgggagtgaaaaatcctttgattgagccattgataaggatggagaaagaaactgatctaacgcagttcattattttagcaatccaactaagatcatagcccaaggaaatcatcattgcttctaagaaatcccattcgactctgtcataagccttggacatgtctagcttgactgccatttttttcccattcccaaagcgaccttttctcatacaatggagactttcaaagccaattatggcgttgtcttgaataattctatcaccaatgaaagcactttgatttgctgaaatgactgtactcaaagttagtttcaatcgattagcgagacatttcgaaaccaccttataaatcacgttacaaaggcttatcgggcgaaattcagccatttttgttggcttcggcactttcggaataaggcagattaaggtttcatttaaaggcctacaatcagcattgttatttaaaatgtcaagacaagcagagatgacttccgtacctacaatgtcccagtttttatggaagaaaagccccggtagaccatcttttccgggggctttcaatggatgaatttggaacatggctgttttgatctcatcacaagagaatggctccatcaatctcctattgtctgcagcacttaatctgttaggcacacatctattaagaatcggctgaatctcatttccaacattagctttagaaaatagctttttaaagtaatttatggcaatactctcaatatcttcctcctttgttttccattgctggttattgtcaaatagaccttcaattgtgttttttttccttctattggaggctttgtaatggaaaaatttggtgtttctatccccatgttttaaccaaagggcgcgacttctttgcttccaatagatttcttttttttcctccacacaattaaggtccatctgaagccggtttttgataacccaatcttccatctttgttgaatccgcaagcctttcaatcttctctttaagctcctttgatctagcacccatctcatgtttttgttttttattccagcgatccagatttttgccacatttatgcagcagcctgtgtagagtttgaaccggctggagcatttctcgttgaccccaaacttcctcaattattttgtggcaatcttccttctccgcccaagcttgttcaaagtggaatcgactcccccatctttttttgaattcggttccattagttccttgttgagcttggagtagtaaaggtctatggtccgagttccaccaatttagaagtgacaccttgttcttcttgaagttctttttccaatcagcattacacaaaacccggtccaatttttcaaaaataaggttggaagc

SEQ ID NO: 23135 - DNA, 2477 bp, Cannabis sativa
  modified_base (43)..(43): a, c, t, g, unknown or other
taggatgttaatgaaacatactaggtagtaaatctagatcctngtaaaatatttccaacacaatgtacataaaattgtggactttgtcccacagaaaataaatagtagagtattgagcaatgtataagaacataggctagtccactcatgaccaattagttttgagatagaatcccataattctgaacatggtatcagagccatatcctttgcgagaaagtatcctatctgatccgcacctatacagatagtgaccgtccactctaatacggttcaagattggtgagaaaaaaaatggccaccatattgagggggaatattgtagacattggaataaatgatagagtattgagccatatataaaaatataggctactccactcatcaccaattggttttgagatggaaccccatgattctaaacacataacactatcaactatatcttttgaaataacattcagaatctaactaataattaattatatttttacatctaaaccaagggagaacaatcgtcaagattaagacaaggagagttactatcgatgaagctcaacatgttcttagccaccaaatccaatgtcatatattgcacgatttaaagagttaatatagttgtttccagtaaagtttggaggtaaggacaactgcaggttgatcattgcttccgagatggaaaggattgaaagattcattgacaccaacttgaacgacattcttagtagttgtaacaaattgattgtcaccatcgtgactagaagaaatagttggaccactagtcatgacgaccggagaagaagaataatgattttaaaaaaaatgacaaatctaaacagagccttgataccatattagtagagaaaatatgcatttaaggaaagaataaacgaaagagaaagaaaaaaatttgaattctcaattctactactaataatagtatttattaagcacaagacaccacaaaatgagctcaaatttaatacaactgttaatattgtgtaattgatttattaactttacatactagccaattatttcaaatttaatggtacttttttatcaaatacataattatgtccatttaatatatatacaattgacaaaatatgtatttactgctttaacttaacatttttacctaattaaataggtacatgtttgtgggctttcactatgtaagttacacaattaggctttactagtcattaaattagaattgttatttttgtatgaacaacaaaatccattaacattttgttatactttcaaaaataaaaaattattttataatcatctatgtgaaatgatttatttattattgtattaaataaagataaaataaaaaaaaaatgtttacttatacaagtataagtatatatgatattaatttaaaaaaatatatatctataaaaagtgagaatatttttaggattccactaattgaattatataattagtcgtcaatatataagtatatatgatattaatttaaaaaaatatatatctataaaaagtgagaatatttttaggattccactaattgaattatataattagccttcaatacatattaaattataaaaaaaattaaactagctaattgataaaacaagtactaaattgcactaaactacttattaaggtcaatgctaaataagcttgccctcccaatttagagttctgcaagttcacttttttcgaaatatttatctacaatagggtgtccgacgcataaccgcctgtagagattgagagggaatttgaaaatcggagagattgagaaggagaaagctgagaatttgagaggaaggttcgatcaaattcttcttttttttgtgggaatggaggcgatcaaatcaaataaattctaagaaaaattgggtagacaacacggtacagttttaacgtttgaagacccattaaaactaattaatgtgtttaaataataccaattaaaatgaaaaaatagaataaaaattaagatacggtacaattttaacgtttgaatgaagacccggtaaaaccaattaatgtgtttaaataataccaattaaaatgcaaaacataataaaaactgagataaattaaaaaattaggaataaattagagaagagagattaaaaaataatgacaattatgctgccacgtcaactcctaaaaacactcctttatatattgatatattgattgtttggatttctctcacaaataattaataatgaatggataattatttataatgtttgatatataaagaaattttagttctcatttatataaagtattatttagtcaaaatgttatttttaatttttttaatatatttgaaattaattgatatataggattattcaaaaaaaaaaaaaaaacaaataatctatgtataagttaggggtgttcactaagtatccgatccaatccaatccaatccgcaaaatacaaatatctgcacttgcgcggattggattggattg

SEQ ID NO: 23136 - DNA, 2201 bp, Cannabis sativa
attttacaaatgaacatcatacatacaaacgataacatatcatctccacaccaatcaatgcaaacatataacttaattgattaaactaacaatgatgaccattcacttacatgttttcacaagtaccttctgatatattattactcgaatattcatcttcaggcgtgggtggaaaaagaggaggaatactctgttcgtgcctgaagaaattttcagggtcaacatcagtcttcaccctcaccaatctgtagaaattattacacttgaaataccttgttccccaagaaattgcttctatgaaacttgaacagttgttagtattaactccaagatcaagatctctatagttcacataagcttcccttggaaatctagacacatatggacccatgtaatcgtaaagcctttgaatccacttcacgtgttttgctgaactttttgggcttccatcgaaccaagccgtaaggtattgaatcatgaaaatgactccttttctgtgtggaaatgggatttgggtctctggaattctgctcatcattcccccatatggtgtccaaatcgttaaaggagtatcttcttccaaaaaccttttccaaaccccttctagtgttgtttctggtattgggtcagtcacaaaatcagattttgctttgaagtaaacttttgatgtcgttttcccttggagcaaaatctcaggtggggttccacttgggtatgttccagagatgtaaaccacagattcaatccaactcatttcaacacaatcttttcttgtcaaacccaattcaggaaaactcttacgcataacatcaaggagtctgttagtgtctccaagaaacagagcttggtaagaagtggaaatagtcttttgagttgtgttcttgcctttattaaccgattgtataatcactcttatgaatagatcttcattaagtttatcaacaacttgttgccacctatgaagaagcttagttgctccttgttccaacgttttactaactgtaaaaactgtcaccttggctggaacttgtactagctctatcttccaccataatatgatgccgaaactagctccaccaccacctcttatggcccaaaacaggtcttctcccatggcttttctgtcaagtaatcttccctttgcatcaacaattttagcatcaacaacattatcagctcccaaaccaaattttctcatcatggagccataggcgccaccggttatgtgacctccaacgcctagagtggtgcagagtccagcagggtagccatggactctgctcttctgataaattctgtaataaacctcgccgatggtggcaccggcctgaatccatgccgccttgttcttgatgtccacttcgactgttctgaggtttgcaaggtctagaaggaaaaaaggggtttcaatttgcgaaacgtaggagagaccctcgtaatcatggcctccacttcggactctgaggtataatttgagctgttttgagcaaataacagctgcttggacatgggaatcgtgtaaaggtgtgaagatgaactgaggttttgggagttgaggagttaagtatctgaggttttgagctgaagattgaaggactgaagtgtagagagaagtgtttggagcaaagaatagtatgtttgagagtggtaacactgaaaaatctgaattaattgagacacattggatgaagttttctagtgttgaagtagctgattctgccaatggatttaactgtacaagtacaagaaaaaatattatggctaatttgagaagtttcatttttctttttctttgggtgtgcgtttagtttgctcttttaggtttcttttgagcatagatatataaatcctttatcttttataatatatatatatatatatatacatatttatataatgatgaaatctttgagaagaggttagtgttggcatcaattgggtcatcggtctctaaaacttagtcatgaataacttggcgatggctccattttaatgttgacttataaacttaggagaaccacgtgaatttccacttatataatgtgtagttatatatagagatggaaattggttggttaatgtacgggaaatgtaatttccgcccccatccccactacctatttatacccccatccccgctccatccccgtctaataaccaacggattcggggtaggagaatacccatcagttatggggaac

SEQ ID NO: 23137 - DNA, 2594 bp, Cannabis sativa
agaaaagataggatttgtctttttaattattattattattatttattcttttctgttttttttattattatttttccactttccataaattcttttgcatatgttgactctataatattatccaataatatgtgtttatatgtatgaagagagatgttattgtcactatggcaatagcaccttcggtaatttatttattgccaaaaagaaaattatttattaacttgtgaaagtcgatcacaaaaaattgtgtcctatatatattcggtattccttcaaagaaagacaaattaataattaatcaataaaaaattacttctgcctagacttttgtagtagcagctatatttatacatatataaatatagtttatgttttatccaatatattgatcgttaactttcgagggcagattctaaaattcaataagcaaatccaagtggatatctatagatccaatcaataatataaaaattttgtacgtatattgaaaaaatattgttcattattattgcccatatgatatgacctatatatgtttgttaactatttgtcccacactttgatcacttgcattattaatatatttaattgtcccattttaattaacacctatatgattttatacatatattcatgaaaagggtattattttatatttatatgtggtactgcaatatgtccaaaaagttggaacttctcaaaattattaataaattttttttaaaaaaaaatcagagtcttagtgtgtataataaaatgagtctcatgagatatgagttcttatttacaagatataccaaatgtaattttggcgacgacagggttccaaaagacactaatttttgtgcgaataggtaaggactaggagacacacttgaccaccacacacatgtgtatcgttggaccgagagttggctgatgtaacacttttattttttgagaaatctatttattaaattattatttttatttagttaattaaaatagtttttaacatgtttaattaattggtaaagagaaacatgttatcctccttattttcaacatcgttcttatgatcccacttaacgttcccatgatcaacgacttttttcttattacaatattttgtacattttttatataagcattagaaccaaacgaaaaaatacatctttctcaaatcagaaaaaagtcatttatagtttattatttacgattatattatatatatagtccgagcagtagatgtttttgagctgatgtggtgttttgacggttctctattgtgtagtatagagctctgatacagtgttatttcgactaggtcgttttatcctgagacgatcggtaatttatgactacttgcatataccagggaagtgtcgcgaacgtcttaaaaagagcgatctataataactcgcgactcaacctaaaaattttatttagtaatatcattttagtagcagtttactcaatacaaggtgtgtagaatatcaaagaatgcgaaagaaaattatgtagaaaggaaaaaaaaaacataaaaattaaaatgttgaatcagattaggtagaaagtaaaaaagaaaaagagaaaaaaaaagtagaaatatttttcaaaactgacatattattattaggatatctttttaaaaaaaagggtaggaaatgatttcaaatttaaatcatatttttcttttttaaatggaaatgtttttaggatttaagtaaccgtccatatctaaagttggtgatgtgtttaatttgactattttctttttcttgctgagtttagtttgactattgtggtgagtttcacctctcatcgtcacaatgaataataaaagtaattataagacttgtgaaattataatatttaagtgagagtgatgaaggaaacttacattaattaaaaggaaaaaaagagtatattataaatgaatgaaatgagttcatagatgtcacacaaatagttattgagacaacgtaattgtaacgcccgtactagaaattgctaaactcaaaagctaataattttttttatatattataattaattaaacatataggtcgagatcccaagttataaaacacagtaaaaactatatttgttattacaaaatcccttgaacatttttttttctttcaaacaaatgacagtcaacacaaaatacaactcaaaatattgaaagaccgaaaccctctaagttgcactgccgcaatatgtgcaatcactgtcgagctccatctcactgttcctccagcttagcttttcccttacctacacaaggtagcaaactgatgagtcaacaaacttagtaagatatgggatacatatatatataagcaatgctagaccggctttatgcttaagccgccctgagctcaacaaccgagcccaccaaatggttaagaacgttcttaagggaagtacgaccactataccaaatgcactaaagtaccaaccctgtactcgtgttggtagagccattatcgtacccccgaaagttactaagggttgtaccacatgcacgacgtacccttggtactcgtgttggtaacactgtaactactttaaaactctacactatactaacactctttaaatcacat

SEQ ID NO: 23138 - DNA, 2554 bp, Cannabis sativa
  modified_base (2493)..(2517): a, c, t, g, unknown or other
caaatatgtcttccagattcaaaggttttggaggtggaacttcagacaagcctttgggtcacctgagggccaaggtgacccggaccacctattctagggatgctgtagggtcatcccttcctcctcctcctcctcctgggcatgtgccgttttgggagcccatgagtgttgaccctctattcaggaggtatcggtcttcaagcaagggcaatcagaagcctagtagatgagtgtgtttagccatgggcaagagagccatggaggtagcctgcaggcatctcgacaaaggcttcctactatggataattagctttaggagcttggtgacagcaagccagagaggctcccttctgtcgggcttcaagagtttggctcaataagttcacatttaacttttctcacttttttcttttattgtaggctttccagccctagggcctattgtatgaagctggtcaaccattgttgtgtctttgagaggctgccaagtcttggtagcaccatagaggggctggctggctaacgttgttttctggcactaatcctgaccacgttttatttttaggcgtttataaagcttagcttttcgcatggcaactcttgagggtcctctttggaacacatgaataccctagaggttgagctcctggcaaggggtaaggttatgactaacttagagatttttttccaacataattaggacatgatttctacttttgagctcatgctcaatgctaggaatcaagagaatactttgctcactactgaaaactccaggttagtgactgaactcaagaggagtgatgagaagcggaaggctacccttgatggccaataggccataaattacgactatgttggcttgtctttggagctcatttatagttcaagttatgcaactccatagctaatcttgcctacatggggtatgcttctttccttgagagcacattggcctaagggaaagcattgtataagagcaggatggaggtagacaaaatcaccatccagattgagcgatcaacatcgggatagtcgacaagaccatggcttgccaaactattgaagaggtggctgaccaacctacagaggctatggctggcccacccttcggcaaatcagacattacaacttctaattcagctgcacctgcacctgcacacatgtagcttcaatttattagtatttcaactttataatttcattagcgtagacattttatttcattttctgtatgccctactggccttttacttttgaacactacttatttttagcattagggctttcacgtttgtacttttggcctataggcaatttttttccaacattactactacttagccctgaatcattttattatggatgtctgactgaccaggcaatctttaatcttgactaacttcctattgccttgacatgtaagtatctgaattaattttttttcaggcaaagtagaagtatgcctacacttgtcttaaaggcaagttaagtagcttatactaagacttaaaatttctctgcatatgttctctatgctagtttgatgcattgtacagtgtgggtgcccccatgtgagcatgtaggcttacggtctcttggtcacttgcaattcaccatgtttcatagaccatgcttgggaattttctaggggtgctacctgttgtacgcatgtgtaactgaaatagaataactttaagaagttaatctcattagcaagtggtttagatataacatatttgaacataaacattgttttttattaattaattggtctttgttgctgtgcaacttacataaatttaatctacaagcttacataataaaaatttgcttctagatatcaaatggatacctttgcttgaaatgcaaagcagaggccatggttgaagaatgatgggacaccacgcctaaaggccgtgggtactagctcttttttactgtaatgatatgttggtagaactactactgttgagtagatattgtaagctggccactactagtacttgagaaggtgttctcatttcaaatatcttttaggagaacaactccatgttctctttgtaccttcgcagcttgtaggctcccatgcttgttatctttgtaacttggtaggggccttcccagtttggtctgaacactgctactgttgaatctttggtgttcatgaatactctttggagcaccgggccttctatgatgaatttctcgtccttgacttatttattgaagtgtcttgtgaccttttacttgtacgcctgtagctttaggttggcttgatgtcttctttcttctatttcgttaaagggattctgtgagcaaaatattggtttggtatcctagtcataggttgtcctcttgtgagacggtggcaccaactctacaagaaatattgccttatagtagccatataagcgctagagcaaatggagttttcccaatggtcggcttctcggtagtcatgtgtgaccatattgttggaaattattttannnnnnnnnnnnnnnnnnnnnnnnntatgttgattaacaccctaaataagatcggaagagcg

SEQ ID NO: 23139 - DNA, 3140 bp, Cannabis sativa
cgagaagcatcaaagtctcaaaggtacctgctccataactgagattgaggaggatgtgcctcctagaaacaatgatgagaaggggaaaaacaagcaggattttcaattcggggctatggagacttgcccgaaaaagtctccacgatcgccatgaaaatatttgcttggaactgtcgtggtctcgggagcaccgcgacagttcgtcaattggcggccctaacccgtcaacataaacccgaattgatgatactctccgaagctcgcctcacaacggaaaaattcaacagtatctgtaataaactacactatgataactatcactatgtggcacctttgggtcgatcaggtggccttggcctctgctggaaaaaagaaattaagtgtgacattgaattctcatccaagtacatcatctctgcagtagtggaattcgaacctaagggcctcaaatggtctttgcttggtatatatggaccgccccatcgccaagacaaagaagctttttggatccaagttggggatattgtcgatcactccttgagaccaacccttctcattggagacatgaatggaactctcaaggactctgagtgctttcactatgcaaaacaaggcaactccaccaaatatgcatttgactttcgtcgaatggttcaaagagtgggtctcatcgatctgggattccaaggcccttgcttcacttgggccaaggatagaaatactgctactaatggagggtcaaccaagagagctaggctggatcggggactggcaaaccccgattggcgaatccttttcccgaatgcaattatcaagcatctctcctcaactggctcggaccatagacccctccttctcgattctaccgggggagttcgttgtaagagtcgtctgtttcgatatgagaacatgtgggcgagagacccgagatgcgtttggattgtcaaagaggcttgggcacaacatttacatgaccaccctatgattaactttcataggaaggttaaaagaacaggacaaatgcttacaagatggaataaaagccaatttcgacatgttaaaagacaagtggatgaggccaccaagactttaaatgatgctgaacttcacagacccgatgaccatatactcattcactcggctaaaggacaactggcagaggcattgctacgggaggagatccattggaagcagaaatcgcgagtccaatggctccatgaaggagacaaatgcactaagttcttcatggcttcagcaactataagaagaaggaggaattatatccaatgcataaagaaagccccccaagaccattggattgaagactactctgacatcacacgatgcttcctatctaaatttgaggaacttttccaaaaaaattcccactgtacaacggaagctcttgaggaaattctaacaccaagccttgatgaccatgatatggaatgccttcaactcctccctgggaatgaagaaatatctgcagccctgttcgagatggggaaagataaggccccgggcccggatggccttcccacaagcttttattcgcaccattgggggacagtggaaccagatttattggcgatggtcttgcacttcttcaggacctcggaattactgaaagtaataaatgacacctccattgttctagtaccgaagaaagaatctccagtcctagttactgactacagaccgatagcactttgcaatgtatcctataaggtaatatccaaagttatcgccaatagactgcgctacatccttgacaagattatctcgcccaaccaagctgcgtttgtgaaaggaagacatatagcagaaaactctatgatcgcaagggaaatcgttcactccatgtctaagaagaagggtaagcgaggcttcatgatgataaaactcgacatggaaaaggcatatgacaagatggagtgggacttcatcctctcggtactacaatgtttaggcttccccaacatcttcatcaaatggataagctcctgcatcatggttaatgagattaaactattacttaatggttcggtggcgggtcgtttcaaacccgaaagggggctgaggcaaggagatcctctgtccccggctctatttattctcggggcggatgtgttgtctagattaattattgacaaggtggataaggggttgataaaaggttttcgcatgggacgtaatggtgtcgccgtaagccatcttctttttgctgatgacatcattctgcttggacaagcttccactcgtgaagcagcctccttcatggactgcctcgacaaatactgcaagctatctggccaaaccgtcaatattagcaaatcctcggtctatttctctaagaaagtccctgcaacaactaggcactcaatctctcagctgctgggcatgaagaggatgtctaagaaggcatcttacttagggattccattgtttcgctccctcaagcgtacggaagataccaagttccttgctgaacgtgtgctccaccgggttcaaggctggaaagccaagctgttatcttatgttggcaaggcttgcctcattaagtccgttggatcctctctagcgacttacgtagcatcatccgatgtcattccagccgctacgacgaagaaaattgacaaactcctccgagacttctggtggggcgactctgaacagaacagaagactacatacaatcccatgggaaactcttcgccgcccaaaagtcaatggaggccttggatttaagacaagcgatgcaatcaacaaagccttcctctcaaaatgggcttggaaagtcctaacggataaggatagcctttggcgaaaactcatggaggctaagtatatcaaaaatgaaagcttccttgacagagatatgaagccaacggattccattctttggaaggcaattttaagggctagaacaaccttggagaaggggctctgttgcaaaattggagatggtaagctaacctccatctggttcgactcctgggtaccggggggcacgctccaacctttacctaagtttgacgcatcagcaggaatgagcatggttagtaacttcatctcccaaggctgctggaatgaacctctagtccgacaatggttccaggaagatgatgctaaacgcatact

SEQ ID NO: 23140 - DNA, 1653 bp, Cannabis sativa
acatttcagggctggggcccattactgaaactggccttacccagttgtgctgctgtttgtttggagtggtggtggtatgagataatgatgttcttatgtggtattttaaaaaatcctcaagctagtttggcatctatgggaattttgatccaaaccactggacttttatatgtatttcctatttcattaagtgctggcttaacaactcgtgttgggcatgctttgggctcaggtcaacctgttcgggcccaatggactgccattcttgggctagcttttgcatttggatttgggcttttggctttggttttaatgataatggttcgatcttggtgggggagattgtacactgatgagcctcaagttcttgatttgctttcaaaagctttaccaatacttgggctttgtgagcttgggaatacacctcaaactgcagcttgtggggttttgaatggtatggcccggcccaatttaggtgctaggataaatttgtgtgctttttatggtgttggattacctgttgctgttttagttacttttaaatttaggtatgggtttttgggcttatggattgggcttctttcggcccaaatatcttgtttgggtatgatggtttatgttttggtccaaacagattggaaacatcagagtaaacgggctgaagaaatggtttcgggtacagatgaggaaaatcagaagaatcctgaaaaataacaagaatttattacatagtatttttttaaaattattattattattttttatttttggaagagagttttcagggaagaaaaaaaaaaggttataatatctaactgagtcgaaatttgcaccattttttttaaaataatttctttgcagtgttgaaaaagaaaaaagaaaaaaaaaaggaatttctaattagtattttttcttttttgaatttgacttgttataatgtagttttgttaatatatcacctcctctaggcagtaaattataatctatatccttggttttgttttgttcttatattattttttttcttatttaatattattaacctcaaatatgtcacttcttgtatattgtttaacatttatatcacttgatttgaagaataattgttggtcacacacaccacaaaaaaaaaaaaaaaatatattattttacattttaaaaatgtctcatttttttttaaatgttattatgttacctattaattattttctttaacaataaatatattttaatttcttgaataatgtttgtaaacaccacatcttacaaaaatgttttatagaagtagagttaagccaatacatgggattaattatctcaacaaaagaactcaaatataggctaattaagccattaatgaaagagattaattaatatttctacacaaattggtgatttcaattttcttacttatgacactatggtgggtcagccaacaatacatactacaaatttataaaacctaaaccgaaccatatctataaataaaagataaatatcaaatataaaaaatgaaaggtgtacatacaatcttgatcaagacctcaatagaaacttaaatttaagggtttgatttggtacgaaagattacattggattagattagaaaagattagactaagatcgaacaagataaatttatactaaatctgg

SEQ ID NO: 23141 - DNA, 1620 bp, Cannabis sativa
  modified_base (1573)..(1583): a, c, t, g, unknown or other
ttaagaatttgagagagagtaataaaattatcaatattgattagtgtttgtcttgggagaagaagtgattgatggtgggcatgacttctgggggccttgttcgaaggaacctcctcagactatgctctgcatatttctctccttcctctttgttatccagtactcccatacttctattagctttattcaccctgaaaatacacacgtgatatatatttataacaatatcatatgtcgtcacatcaaaattttcattgacaaatttagaatatgtgcactcataatattttgtattattattacttgatgtaaattaatgaaatcactgttgaatttataaattaaaaatgtacctgacatcagggttcataaacacattcctcgtaagctgaaatacgcacatgcttgtgacgaaggtcattgcagccattaatggataaacctatagcaaaatgaaacaatatttagaggggaaaaaaaagagagcattaaattaaataaatggttattcgttacctctggtctaacccaacgccccatgatcagcaacagcagcaaagtatatattattactttgattgattttgaaccttaattttgtctcttttatatatatcttataaaccgttacactgaaattctttgcatattatgtatatatagataatataaggagctagcgtattagaataataacgacctgtaaattgaattacagtgggctgcatgcgtttagcaattgactaataaaaatatgaaaccaggggcttagccacttgttttctcacccaaactatatctgattgcccaatggccttgcctttttagatttggaatgttctttggtacttgtgacttctgtacagtacgtaaagaatgacttgactctttaggatttgactttttttcctttttaaaatatataaaatgttgttatttctaatccgactttgttgtaaaaaccaaaaaagtttaagcatatcgtgtaacttttgttgtcttggtcaattaatgcatagtttgaatttgtaaaaaaaaaatctatacatacttaaaaatgtatagtataaacttaataaaagattcaaatttggataagtatgtaatattgacatatgattagatgataaacaatctctttaacttggtaagtaatttaaaaaatggatttttcttttcatctatgctataaatactaataaaatacaatatgatatatatagagacacgttcaatggatacaagttttctacacaatttttgacatcatattttgaccatcgagatcaaactaaattaagggctatgattaaaacatgtaattaaaaatagtaaatataataagaaacaaagtcaatctcatttcatttaatttgcacgactttctttcttcattgatattgattaatagaaaatcccctatatatatgtttatataatgaatgacctttaattattttaaaaaatctaattagaatgtttgtccctcaaactttgatatgtactaaattgtatctcttgaactgtaaaggtcattaaaattacccctcaactattaagattgttagatttnnnnnnnnnnntctaattttagtaaaaaaaaaagtaacatggataaaa

SEQ ID NO: 23142 - DNA, 2425 bp, Cannabis sativa
gtttaggtagtttagccaccaaaaattcggtttttgtggttaagtgttacaaaccgtaaaattcaagtgatttagccgcccatatcccttcaattttcacctatttttcaactttttattaaattttttctataaaataataaaaaaaaacatatttttacccaaataatataaaatctcataatttatacgagtcaaactaatttacagtacacaagtctttattggtagtgtgtgttttgtcaattgtgaataatttacgtacgaccattcactgacaaatgagacacactacgaataaaaagagataaaagctctaatgatttctgtcaacaattcaaagaatccatcacaattcacaacctaaacacactccaaacaaaagtacaaacaaacatttttatcactatatatacctatctatactcaaacacacactaataactgctaacttgtactaattatccatcttattattctttctttcaccaaaaacataaaactattagtgtgcaaaaagaaaaataaaaactcctcaccaaattaagagctctcattattttatgtgtaatttatgatataaatacttaaatataactctcagttattaatatatatttaagtttaactttggcagtaataatatttaagttataattttagaatttatgtagtacctaactggtagatgttaagtaaattaccacgggcaattcctgcttaactcaagttacaaaattttttatttttttaaaaaaattaatttaaatataccaataaaaaaatatcacgtgataatgataaaatatctacggagttccaaaaatatataatgtttgcatattttttttccatttatttttgaatatataggcattgttattagacatagtaatatctaatatcttttataggagaccgtttataattggttagaaatattttttaaaaattatttttttaagttatatgagactcgatacttaattatactataagatggtcctatacaccaataatactttttatatatattagttaattgggtgtgtccataatttggacaaccacacaatacattagttccaaaacaagcccgtggctatacacaagagagtacagacatgcttggttttttttcgtttgtataaataaaaatgtgggacccaccatgaatagaagaaccaaatgtgggacccaccttgggaatcccctgtgcagcaacctcacatgctactactcactcactcactcaatcaaaccaaaattttcagtaaagtcaacaacattagacatggattcattcaattccattccattccatcaaaaaatgttccccaaaatccattattgcatttttgtgtttctttcttcaatttattccatttatcatcaaattcatattacactttgccagtaatagtgataaaaggtttgtttgagttgaaataaattgaaacactatacaaaatattagtgagtattgtatttaatgagtaaagtataccaaatccaatccttgttaaagttcactagagagtagagaggaattgggggtccccttgtatcgagttgatgtgctatcaaattatacaaatttagaaaccagttatgaatatgaattcaatagggtccatttcaattgaaaaaaaaaaaatacctcaatatttatttaataataaaaccaataaaattaatataaatttttttttataatgcactttggatgtcctttatttattttggtatgtgaaataatattttagtcaatttatttttcatggtgacgtatctttagaaaattttaataccttgaaaatataattcaaatagtgtattacaattactttattttatacgtgtgtgaaataaatagtttgaacattgttctctatattataaattattctaaatttcttaaaattttataagatattttaaataattataacgtattgtatatacaaaaaatttcgatagaaagtggaagtggtgcattgtaaaaataaccaataacatataataaaaatgagagttatttgtagcataaatatttaagtttaactctcagttataaataaataactaagtttaatttttggcgataataatacctaagttataattatagaatttctcttacctaactgttaagcgttaaataaattacccacatagcaatcggttgaagtcattaaaattttttaattcctcaaaaatattagtttttaaatatatgaattgacatgtaaatagatactggagttgtagaaatataacttaagtattattgcccaaaaaaaattaaattgagattttgatttgaacacaatatttatgccacaaattaataaaaaaaataaaaacagtttcttcaacctcaagcacaggttctttcttgcttgaactctcactctctctctct

SEQ ID NO: 23143 - DNA, 3222 bp, Cannabis sativa
gattgcaggcaagttaatctattatcaccatctctatattattattatttttattaatttgtgatcccaaaatttgattgcttagaataattattaataaacttattggtaaaataaatttgccaaaattgatgtccttattacgttaccagctttgttcttagttttctagcatatttataatgtacttttctttgatcatcaatatggttacttattattttatttaactactaactatccccacttttgagaagtacattcttacaattattataatcaaattagttttaatcggaatgaatatcaaatatcatccataaattaaagaataataactatttgggcaagaactttgctattaaaactaactttacgatactatatatgtgttattgcgaaattagttcgggcaatcgatttagtccccagattgtcaggagagcttaaatgtgaacaaagtggtcactgtccttgacaagtcaaaaattatgattgatttatttgtttgttctcttttaatgaattcattattatttttaataaaagagactattaagattagttctataactactcaagttgagttagttaagtttgtttgctatgttctgttttgtctatttcagtttaatgtgtacggttatagttagttttgttagttgttttcggttgttaactaactcgattgtacttttgtgagctttagcactatataaggctcactcactctcattcatgattaatgaattttgatttttcattctcctctgcttttcttctttctttcctctggtttttctagtttgttcttattttgtaaattggtatcagagctacgatttgcgtgacctcttcttcgtctgctttttcttgattgtccctttggttcatggctcgtggtgttaatactcgaagttcgaacaatcaaggaaatcaatctcaggagactaatagattctctgttttggaaacaaacgatcgaccaccaggaaaagatcctcgaagtccttacttcatctctaatggagatcagtcaactgtccatcttgttcccaagattttgattggctgcgagaattacagttcatggagaagatccatgattgtagcacttgcagtcagaaacaaaataaaatttgttgatggtcgacagcctgaaccagatgtcgatgatgagctttatgatgtctggttttgttgtaacagtcttgttatatcatggattttacatgctatttcaagtgaaatagctgatagtgttatgtatcttgacaatgctgccaagatttggacagaactgcaagaaatatatcatcagaaaaatgccccaagagtttttgaagccaaaaggtctatgcaagctcttgttcaacgatccaattctgtcactacttacttcactcgactgaaatccttctgggatttaatccaagaattcagacctcaactagtctgcacttgtgaagccttgaaaaccatacaagaatatcaagacaaggatcgggttcttgaattcttgattaggttaaatgagtcttatgcttgagctagatcacagattttgatgtaggatcccttccccaacatcaataaagcttttgcctctgttctccaagaagaaagacaaagaggaatagtcactaacagcaatgaaattgacaaaattgctcttgctacatcttctaactctggccaatttgctggaagtgttcagcctaataactccaaaacagtttgtcatcactgtagtgttccagggcatataatggcaaagtgttatcgatttcatgggtatccaccaggacacaagctgcatagtaagtttcctaacaaaaatgcacctgggtatgaaaaaccacctgctgccaatctctctgatgcccaaaaaaatggtgaaaatatttggagagggaaaagcattgaacaagattttatggctacctttgctcaatgccaaagattgatgagcttgttatctcagaaagggcaggaacacataggaaatgaacaacaaaaccagcctactgtgtaaaaattttctggtatgaacattaccaaaaactcttttacttggattcttgacactagtgctactcaccatgtgtgtcacaacttgccccattttgaaaacacttattctagttctaaaatttcatgtgttaatctgcctaatggaaacactgttaaagttttttgcctaggaactattgttctttcccctgatttgatactccaagatgttctatatgtgcatgattttcatcttaacttggtttccattacttcacttcttgaatctagaaattgtatatttaccttttatcctaatcattgtgttattcgggacactttgaagacacaacagattgggatggctaaaatgcatggaaaattgttctaccttaagcaacctattcattcattgaataaagatttacaatttcaaaatcaaccttgtcctaactttcattgctctatttgtcattatgctaaacaaaaaaaaattgccctttgtttcaaatcacaacattgctaaataatgttttgatttaatccacatagatatttggggaccttttaatactctcactatggaaggacataagtattttattacaattgtggatgaccattctagatatacttgagttcattttatcgaaagtaaagttgaagcacaaactgacattcctaactttatccaactcattaaaactcagtacaataaaaccattaaatgtgtgaggtctgataatgctaaggaattgcaatttgttgatttgtttaatagtcttgggattcttcataatcattcttgcatccataggccacaacaaaactctgttgtggaaagaaagcatcaatatttgcttaatgttgctagagctctcctatttcaatcttgcattcccttagtttattggaatgaatgtgtttctactgctgcctatcttattaataggacaactacccccaatcttaaaaatatttcaccttttcaggttctaaattctaaaccacctaactatagtcacttaaaggcctttggatgcttagcctatgcttcaaatttgaatgttaatagatccaaattttctccccgagctgcaccttgtattttcttaggctatcccattgggatgaaagcctataagttgttagatctcaataccaacaaatttttttgttccccaaatgtgcacttccatgaaaccatct

SEQ ID NO: 23144 - DNA, 3233 bp, Cannabis sativa
attaaataataccatcacagaaaacgtcaattaatccgtcttctaatttctaaatcgttttacaagaaaaattataataaaatcaaataaaaaaaattacagtatcacagttaatattaaaaacacgtatattcaatttactctaccgctcagaagacataacagtatatctgttgtagcaggttcattcaaccccttagcttgagcactcaactattgtgcaatatacgtaactgcactactaacaaccctttcagctataaagaatttgttatcactattaggtattagtttatgttatttttgagtcatatttttaagtatttttaatgagtttagttttatttagtgttattttacgctctattgagtgaataaagaagaaagcgaataagttgaagaaaaatgcttggaaatcaaagatttaattgtaattttatcgctagcctactaaaagtggagtcattagaatatttaagaagttttggtacaattgaagccattgaagttcaagaattcaagaagtcagagtagcgtcatgacataaaaattcaatgccagtgcgttgatttggaaaaaatagacattgacattgagttttagaggcaaaaggtgcgttaaggcattggtgtgaaccatgtcgaagcattaggagagagaaagtttactgcccaaaagtgcctactgcctacccatgcctcaacatggtccagaccatgtcgtagcccactcccaaaaattcatttttttaggatttcataaattggacagggttgtggtgtgggttttaccatgtcgtggcccgcatgcttaaaaattgactcgattagggtttttaaaccctattttgaaaattctaaggggattttttgattggaacggatgaaaatagagagttgaagtgaccttggaggctacaatcattgatcttcaaagagtttctctcttctatcttcaatttcatgtttctaattagttttaatcaattgttgacaatgacaatgagtagctaaatttctaattagggtgttaatagatattgtttgatatttctctatggttttaatgcaattttagttattccccaattttgtatgtgcatttatttatgtctaatgcttataactgtttgatcactaattatttatttataatttcaatgaaaaatctaaaaagtgagtattgattatgttatagtaaaataaacatagatttctatattggatgaatatacttatatgatttgtgtaacaattataatttctatgcttaatgcaaactatattataatttataacataagtgtaggattttaacatataatttaaattttatatatcttaataagaatatagattgaagtagttaatcccccatcacatgaaattaaaataggaattaaaattatatcaagccacaagaaattgatacaattggaattaattgccttaaactttgatcattgttatttacttattcttttattgctttcaatttagttttaatttcaaatctcctttaaaaattattgtcaccaaatagaactagaaatttaattatttagtatttaacaacaattcttgtggattcaatctaacttccgtaagtatattacttgtagtgatacaaacacttgcgtaataaaatataacaaaatcatgtgatagagacaagactaatcgcaataatctaaacaaaaaatatacaaaatcatgtgacgaaaacaagactaattacaataacaaaaacttaatcatagtagcaaaacaatagaccccgactaagccacgcctaaacaccggaaggatggacaggtctggccgaagaaaaaaaaataacctcacgtggctaaggatttaggaagagaaactctaaaaaaaccatatacactcttttattttaagttttttgtgttaatatttaaaatatattttatttttattttatatattcaatataaattgaaaaatatattttatacaaaatagaaaaaattggtgcaaatataatttctttgtacattgatataaattgagatggtatattaaaatgcatattgtcttttctttctttttaacaactgtttcactttttctttttaattgtttatcacttggtttggtcacatttgtatatgacaaatttacattcatgccaagatggtgtatatatttaattacttagattagataaacaaatcattagagaggatgaaagtaaaaaattgaatgaaaagaaatagtaatcaatgagatagagaaagaatgttgttaaaattgcctccttaaggatgtgtatctttctcaacatatcccaacaaaacagagaactttcttttgtacattttgaatataagcaacaaagatcaacttcatcacgattaggaggaaccacgtctaatctcatcatgccatacataattgggaccaacaacatcatctattgtagcctcttcccatgtatatacatatatatatatatatgcatgcacattctcaccttgtgtctctttgctcctacttgaatctctggacgccgtacttctccatatcatcttcttcactccacatgtcatttcgagccatgattcgaattctagtgtcacaatgctcaactcccttatgctttcttctacactactgtctttaccaaatccaccaactctttgcttcttttggttccctgcatcagagttgaaaacagttgagtctgagtttttatcggtttttactgattcgaagtctacgattcttccttcaatggaataaataggtctctttcttctttttgtggggtacttttcgaggtcaaggtcaagactattggaactttgtgaaattttacaaaatcagaagtgaagtgtgtaagttaatggagttttatatgggatagaaacactttattaaaatgtatataatgtgcaaatttagaaatcaccgaaccaccacacacgcgctgccattaccgtccgtcggactgtaacgagctggctggtgtggtgtcactttatgttttagggaagatttatttatttaattaaatatgtttaattaattggtaaacagttttttctccaaacatgtttggaacttcccgaacatgaccaactcagcaatacccaaaaagaaggctaattaggatttttgtccactaaactttgacatgtaccaaatcatgtcccctgaacttttaaggccattgaaaaatggtcctgaattattgagattgttgga

SEQ ID NO: 23145 - DNA, 2607 bp, Cannabis sativa
aaaaaattcgtaattgagtagttctgagtcatagcagtcaacttagtaggggtccctagtcttgcgtccaagttgactccaggaactcttgaaggcatgaagcaaccaagttcaggcccccagagctgaaaatatacaagttggcaaccctaacaagggtttcagtttacgggcccgtcttagtgcgaatgggtcatattttgcattgggacataaactagacataccacgaacatatttgaggcatcaaaattaaatttggagaacttttgtttttgagcactcggacacccaaacacttaggcaccccagtgcccaggttgacagatttgtcaacttgggccacttccaagcatcgaatcgaaaatttgactcttgcatgttcttcgtgttcatcaaaaatgggaaacacaagtgctttcaggaaggagacaacctatcctggtgccagaataaggggccaacacccaggttgacaccttggcctagcccagcgctcatgttgacattttgacaacctgggccaattctgaggagttttttttgaaaagtcttccgagcatattctcttttttcatcaaaaattagaatttaactatttttagagaccaaacgaaactttcaggaggcctaaaactggacccagtacctaggttgacacttggcactcggcccagcgcacatgtttacatattgtcaacttgggctatttttattgagaattctgaaaaagtgttttgggtattttttctgtcattagaaattacaaagatacaagtaaaattagagagaaaaatacaattgcaagggcctcaaaattgagcctagcacccaggttgacaatcctgatgcaatggtttcgatcattcaaatacaaattatgcttcgagcattctctctgaaataatcaaaaaaagggtaggagaccacattctcaaattctagaaccttgaaagtattaaaacatccagtaagctccgaaataagcacccagtgcccaagttgacaaatggcttggtgtgttgagttctgcttatccgattttgattttgtcttgaccgtttgactagtttttcataataactaagagccatgaactcagaagagtcaaattcacaacttcatatttttacttttttcgacagggtgaattactcgaaaacttagtagttttgagtctctcgtttccgcagaagagcaacatttctgagaactagtgaccaattttgctataacacataaatggactaagtgatgtgaaaatattacttaggcatcaaaaaatacatccccgatgcattttctcactcaccgacctgggcgctggacctaaacaaccttcactaaaatggccataactcactcaatattgatctgatggacgcgatctaattctaacttgcacttcgaagctatttcaatattctatcaagtcatgtctcacacttcaatcaaaattatgatgtcatcgactccaaatttcaccacaagtgagttataaatttaagttgcaacttacccagagcgggtgttgccagtgcgactcaagctttaaaaattgaaaatcaacctctaaagttaatttttaccgtcaaatcaacatctacggtcaaaattgagctccaacctttaaatgtatattttttcatatttttttggattatttattcttatttaataggatctcgtccacttataaaagaagagctccactagtccattttttaagctcagaaaagcaggcataaggtcagaacatctctttctaaaaattaggattttagatttagctatttgtctgtaatctatctcgtgaaaaataaaactcgtaatagacgtaactccattactgtcaccatacacggagtgaactactataaattcattgcgtctctcatatatatatatacatacttaacttataatttattctcgccaatctagcaagcagatgtagctgaaaaatctgtgtccaacatcatcaattacatttcctagcaccagtctatttattatgcttttttttttttgtgaaatggaatttatgatgcattctcaaatatgaatattgcatcataaaaatattaaatgaaaaaagattaggcaatataattttatttgaattttaaaaccgtatccaatcagataattgtaaatggttcagattaatcaaactattagcacccaactcaattggtcaaaattagtcgtagtttgaaactatatattccagattgtatgaactgcatgattctaatgaattgttgaagaaaaaataaaataaaaaaagaaaatagtatcagttaccaattaatatacagtaaatatacaatatatcttatagttaccagattctcgtagaatgtaaaagagtagttactcgtaattagtgcaattaataataatcattgatattgaaccatgcttagcgattatctttatttctcatctttgaagaataaaacaagaaagaggctataaacaatgttatcttataaagcaaaatattgtgtacatgtatatggatctaccaagctcaaatattctcatattgtagtttgactgcctcgttattgttacttatttaaattaagttattaaggtatt

SEQ ID NO: 23146 - DNA, 3004 bp, Cannabis sativa
attttattattattttaataagacctccttccctataaaaagagagctcatttagtttatttttcacatttagaaaagtacccgtaaggtcagagcatgtctctacttagctatttttttgtaatcattctcgtgagaataaaaactcaaagtaaatgtaactctatcactgtcgcaacacaagaagtgaactattataaattcttatgtgtgctctctatttcacttaattgcttttaactttcatctcatctatacatactcatctatacatacgaacaaattggctaaatttctgcatcaataataaataataacatttataccgtaaaaggctaataacaaaagcactaattctagttagaaagttagttagctttagttaatcagttagtttgttgtttaaagaattgtttctgttgcgtttgtacactgtaactcaagcatataaatacaataaaacctcagctcaatagccaaggtttttccacaattcaattcttgtcaacttttttaaagcttcctcataaaattctcttaacatcttcaaaggcaaatatatttgtccattacctgtaaattagtgtacgaatatacaaaaacaaaagctctagtttctcactgtttatatatcttcagcattttgttcaaaactatattatatctataacaattttcgccatttggttggttgctcgtattttttttttaattattattattatttttttgacataaaaacatagccaaaaaattacattaagattcccaacaaacataactactgaaattctcaactctcctctccttactgtgcgtgagtgtgcctctttatattttgttccgctcgcattcaagacagatgagaaataaaattattaacagcagcctgcagaagtaaagccaaaccactcatatgcaaggggagaaagaacaaagaactgggcagtagctggtccaattagatacatttgcatttaaaaagaagagagaatttgcaaaatgatacaaaatgaatgcactggaatctaccaaaaccagcctcagattctgaaaaagatttcaaaggctatactaaatgcttgcaactttatgcagggcgagatggagactattttaccaagggaaaaaaaatgtcacagaaacctgcatctctatgctccaaaatattactcggctggtgcagggttctcatccgctgcaactcctgcatcttaagtagaaaataaaaagttggtcaacaatagaatgtaccaagctcataaaataacaccatttctcctagataatgtaattatgttcataatgacactaccttaaaatagtatgcgagtctttatctcatatataggaacaaagagtatattaagtttaggaagtttatcaaatttaaaaagcaaccaaaacagaaatctggaatatacataatcgcaatcaagaatgaagtcaatctaaatcaaaccaatgccatcccatctatgagaaccatgaatctaagtttttaaatgctaaataatatatccaattagtatattaagcaagtaaatgactgtaattttaggcaacaaactaatccattactcaacaatgcttgcaattatcacatttttccctcaccttcttctactagttcaacttcaccaccaccagcttcttcttcatctccttcctcgtcctcagcctcaaaatcaacaccgtaccgaccattcaagtaatcaaccgcatcttgagtcaacacaagcttgtccgcatttaatatatcaaacaggttaagggttctcggagtcaacatcttcagtgtcccaatattccgactcgaaagaaccacattctcactcagttccataaccaaaaacatagatttctgcttcgggtcgataccccatctcttcaacgcttcaatgaaatctttcgtcttcggcttctcgaacttatccccaaaatcctccaccacaatcgtgttcacagcggcactagccaccgccgtcgaaatggccaacctcttctccttcttgttgatcttgatgctccaatccctgggcttgggcccaaacacgacccctccaccgggccgtagaggagttcttgtggacccttgtcgggcccggcccgttttcttctgaggataaggcttcctacctccacccctaacctcagctcgggtgagggttgaggcggtaccacgacgcttgttctggaggtccgtaatgattcctcggtgaacgacagcgcgtgctgtctccggtggtgctgccttgacatcaaggtaggtctcaccaattttttcaccagtgaaggagaggattggtagagtggcgagctcggagctgatggccagaggcctggcggtgggcgttttgagggaattgggcttgaaggccacgagggatttgaggttttggcgttgggaggaggtgaagaagactgaagaatagaaaaaagagagggaaggtggtgttgttacagaagtcgccattggaaatcggaataattactgttctcttcttcttcttcttagattgttgttgttttatccactcctatccggtttgcgggagatgatgtcaacactcatgtaagtatacagcatgtcgttcgctgaaacgaatgtcgttttcttatgaccaagaaaactacaagtcgttcaaactaaaaaggctcttaaactcaaaataagtagttttctttttagagagaaacctcaagaacaccaccttacaaacagagatggacccagcatttttacattataattactattgctatatttatttaattttgtggggcttttttactattttaatgtataattatcaaattaaaaaaaattacatttaattttttaaaatgcagtatttttattagtgggggccatattaatgagtagatttgtccctgcttacaaagcaacatgctctaaagaaaggggttggcgaaaccgctcatctcaaagcaagagcttctgcaatttcaagattaaaaattcctttaacacaccaagctg

SEQ ID NO: 23147 - DNA, 4230 bp, Cannabis sativa
  modified_base (4163)..(4169): a, c, t, g, unknown or other
aaaaaaaaaaaaaaaagttgaaacaaaatcaaaacaattacaaaatttaatagaaagtaaaataaaaattaaaaaagatggcttttgtatatacaacgaatattgatgagtgctttaaggtccaacaaattaggttgatttaagaagatttccttagaaactacacataactgacggatcttcgacttagataactcaacctgcttctcaagttggctttgaacttcaagtatataaacacgaccgaaaagtcaacgacttaattctgcgtgactgcaagacaagacctcaaaagaaaaagattaggtgtagagaaaaacatgctttttacaacaatattttgttaaccttttaaaaaaaaaaaattatgtttcacaactatgtgattttaataaatgatctttaatttttttttttaattttttatataatatttaaaaaataaataaatttaaataaaaatttatctaaaaataagattaatgatgtgaaccaattactcaaatatcttcattaaaaataattaattattcaataaaattagtttagaaggagtagaagtttaatttttgttaaaaaaaaaatagagtttcaatgcaaatattataattaaatgttttaaaagttataaaaactataatgaggacttaaatataaaaagaaaattatttatatatagtaattgcttaaaaatgtctaattaaaaatgatttttttaagcacataggtaattatatttatattaattctaaaagaggaatttttacctattagttacctgttattacaggtaaaaagaaaatgtaaccatcgtggttacaataaaaatgtaaccattaagtagtcacccatatattattatatatacaatcacgtgacatacacatatatatacacacatatacacatatatacacaaatttatacattaacacaaatatacttatctatacatatatatatacatatttaaagtaaaaaaaattataaaaagtaaaacaattaatataaatatatatacatatttaacatcacatatatatacaaaattaattattcccatataaaaatttaaaataaaataaagatttaataaaaaaattaaaacttaccttgactgagaaaacaagaggcgacgattggaatggctcgggcattggtggtggtcgaaggtccctttggtggccgcaggtgatctctttcaatcactactacaatatgggaatttagcttcctttttttcaacccattttataaaaagggaagctaaagggtgtaaaaacacccatctaattcaaaattgacatttagaggtagttttttggtaaaaaaactgtaggtgtatatattaataaatactatgccgtcggttgaaaatcgggaaattttaagagtttttgttaaaccctatgtcgtcagttcctagcgaagaatcgacgggatagaatcacactttattgacacatgtgcacctatgtcgtcgattctttgctacgaaccgacaacatagggtttaaaaaaaacccttataccgtcttcttcttccttacgataactagcagccacaccagacccctaaaaacccacaaaaccctcgccaaccaccactaaaaactaccctatctccctcatttcttcaccatttcatcccatttttgtcttaaaattttttaatttcaatatctaatctcatacactaaaaaagttttatttttcacccatttgcactgtacccgaacctattttaaaaaaaggtggtggtataactctggccaccgattttagcagagaaaacgttgaatctcaacgtccattaaggtataaatatattttctattcattttattaatgtacattggtatcatttcatttttgtaaattttttttgggattttttaattttattaatattatattatgtgtgttataggtggcaagatttttatcgcactttattgccggattgcgattataaggtaaatatttattaacttgatatataatatatatgtatatattttgtgttttattattgaatatgtgtttatatatattgtgtgtatatatatattgtgtatatactatttgtgtattttgtgtaattgtattgtatatgtatttgttgtgaatgagaaagaggtagtaggaatttaattagtttagaattaaagtttttaaaattatgtttgtgtgatacataattgattatatatgtatatgtatatgttatttttaaaaaaattaactatagaatttagtaactagtaacttgttacattttttattaactagtaagtaatttaatcattaaaattctaatttggttgtatattgcattatattataggttgtgagctaatatttgaggttcgacatatttcagtgttgatcggatttgcaattggtatatccattccctaactttttgttattataattaattctcaatgcatgcttagttgagtttgaatatcttaaatatccatctgtagtgaagtagattctgcgaatacatgtcctcggtcggatgggtggagaaattttgtatatttatgttattttgtttgttctgtattatttttttttttttgtttgtttgttactttagacacttttaaaatttttaggaacatccaattacagccgttatgctgtcgaaattttagtagaattagtagcttgatatatagcttactttacattgtgtttgtttatgctgaatacataatgtttgtttatgcatttaatattttgtatagattacttgttatgtatatagctaacttaaaattttgtttgtaaatggtgtagatatggccaactcgggtttaggattagattcaaacccagaggcaaagtgttctaggtcgctgcctacacgaggagctactcaaatgaatgaaatatccaagctgatggatcaaggcaaaagagtggccctcgaggtgaatgacaaaggacaatattatggtaaaagctactccaagctcgtatcgactttaggagttagatgcaattagaagatagggttgtcctataaaaattggatagaagtcaaccctacactgaaaaataaagtttggacagatatacaggtaagaagttatttgttagaatttttatttgttttttattaattcagatgttaactctaatcgtaattgattaatttagatgttaactctaatcgtgtttgttttccttcaaattctagtcaaattattgtaagacactaactcttaacaattttttgggcaggcacatctgggagagcatcaacggtttgagaaaatttttcaagttttacgaccctgagcttctcgcagtgaatggtaaaaataatgaagaaaagagtcagtcttttgacaatgcggcaagacgattggctgcttggttatcatcgatgaataacaaccaccaaatgttctttgttccttaaaatatcgtgtaaacactatttaattctttattactaattgttcatttctatattataacttcaaattatttttatactatcttacttatatcccaatataattttctagttcgcattggatgctagaggtcgttacgccaaagaaaattattcatatttagaccctatacgtggccaccaagttcctgaacaaattaatcaaatgttgggaaggtaataatttaatgactatttatgtaacaaagtttaattaactaatgaattgaaatgctaatataatttttcaaaccgtgcattcgaatatataggggaaacacatgagtatcttggcccgtggcaaggaatttcaatagaaaattgtccaagacaacttaaaaaccaagaatttagtttttatgttttgaaatacatgactgacatcgtcacacgtgcaaaccccaatcattacgtacaagatcaaaaagctgtaagttttaattattgattatagtatttattataataacaaataatatacatatatataaactactaatataaatttttactttttttaacagtttggggataagcaataatacaatccaaaaaataaattgttaccaatacagcgagagtggatagaacagtggatggcggtgattcacgatgacgattgatgctgaaacgcctaagaatttttcttccatgagttattttttaggttaacttgtagttagatttnnnnnnntgttaatacttggactaattttacaatatttgtgtaatatttaattacttctataaaataa

SEQ ID NO: 23148 - DNA, 4591 bp, Cannabis sativa
  modified_base (1036)..(1043): a, c, t, g, unknown or other
taccaaacggcacctaaataactacaagatctcgtatgtttcgttaagattttatgtgttgaataatattaaacatattttaatttttatgatttgcaaattgtttgaaaaattaaaaatttaaggtgcatattttttaaattgttctggagcactgagtgccaaatatatttttgtacaaatatttatacaggttataatttttgggtttaatcaaaatgcagtcgttatgctaccgcatttttaaaaaaataaaaagggaatatgtctaatgttattcaacgtatataaaatcaagtccaataatcaagttgagtccctacttctgccaagtcgttaaactttgttcaaaaaacaatcctaagctctcaaatcctgagctccaatcttagatatcactctcacttataccattaaatggctaaataattatcaccattgcattctacattaaaaaccgagtccaacgacatataatatgactagatttaaaatttgaagttctaaaatctcacataagcggtgcacattaactatcggtggcaaaagaaattagtgtaccggaagcatcaccgaaaatagggatagtatatatcaaaacgactatcgcgacaagtagatcacacccaaactaaacatttgtcaaaacggtacacgatatcaccggagattcatcaaaaagggggcagagctacaaaaagtcaccaaaaaaagtagtgagttaggcaaaatggcttagtgtagattgttctcctcgacgagctgagtctagtagtgaagatgactcgatcgtcaaacagacacaggaggtggccaaaaaatctgttcaaagtttgaacttccaaactttgacttgcgatcctaggctaaaaacggcaaaaggggcggtgtcgcttaggggttgaggttaccgacgcatgcggatttaaatggtccggcttatggggttggacggtggtcagaaagtggtcgttggagttacgctagtgatatggtttgtgagtttccttttgtggtagagagagagagagagagnnnnnnnnagagagagagagagagagattctttttattatatatacatatttatttatttatcattttattttattttatttcttttccttttgacatggtcaaaactgggtctttatagataatcacttagggatgcatgcattttggtgttgcgaagtagtgtcttttaatgtccaatgttggcacgattgagagaggtgtagtactcgtggaggttgatctagatctgagtagcagagtctgatccaaccatttttgtgagaagtactttctcagacatagacgaaagcaaccaagatacaaggatgcactacaaaaaactttagtttgtcacaaaaaagttattattaataacttaatattcctatgatgtgattaaaagatccatagaaaattgtattagttataaaaatcgcaattttttgtgactaaatgtatttttagtcacaatacttgctgttgctaaagctaaattagtgacagtttatatctaaatactatattttagccataagtaactttttgttgtgactaatagtcatatttaatcataaaaaattaatgttgtgagtaaaaggttgtcactaaaggtaacatttattttttgtagtgatgttatcttgttgttcccaatcctcaaactctagactaactttcttagcatgtcgatcttcttatgtgagaaaacgaggcaaagtggtttggatcaaggagtttctacagttgactccctttgatcgccgctagaacttggtgcttccatagcatgtaattgaactcgtccaaacgattagaaagtgagtgagagaaggaaacaattagagttaggtagactatttgttgagacaaacttaggggaatcgacgaacctcaattgttgattgcggatgaatactccatgatggggacgatcaaagctctaataccatgttggtttttgagaaaatgataaaacaaaaatgaagaaacgaaagtgaagaaaatgctctctgatttcattagattgaaaagtgtgattacaacatatacacaatatattgacgagcataagagctctgttaacaaactaaccgaaagttagttagagagataacaaaaccaatcctaactatgttaactgattctaactaacaactaattgtctaggtattcttaacacactcaattattaattgtgcaacgtacgtaacactactaacaaccccttcagttgcaaagaacttgttatttctaaccacaaacaacgatttgatagcgagccatcgaagaacaagaagaaccacaataaaataaaactaaattaagccatgcatgtcacacagacaaaactaatattctcaaaatcatatcacgggaataagattaaaacactcaaaactatatcacagatgtaaaactattctcaaaatcatgtcatagagacaaaattaatcgtagtaccaaaaatacaacctactgtagctataaatttaagaaccaaaaatcctattttggatatattttatcacataacaattatcaaaattctaatgagtttttgtactattttagtttataactatcaaattaaaaaatatatatttaatgttttaaaatgtaatattttttaatgctatagcctcacataactataaatgggtccgtccctgcttttatataaattgaaaaaagagacagatcagtcgatcgataaactatatatgatcgtttgtactttaatgtgttaggtttttctagctaggcaaatcgatcaattatatataaagagaacctgaccaaaagaaaagaattatatatagatatataaatgtatatagtacagcacccgacatgtacatttgagtttctttatatttcttcactgaatggtaggaaacacgtgccatgcatgcatttttttttatatatataaagctattgaactatatcacattaaaccaaacttttctttattattctcgaagcaattcttacgtatattaatataataaaaatcaaagaatttattctatattccctttttaactccactataaaatgattctagaaaatttggtggtgacgattaagaagctccaattgatcgttttaatatatattcgatctttttcaaattaaatggcacaatatgctagcatgctagcttcggcttcatctttatgtaaagtgaatattggaaataacgtattaataattagctcaagcaaaagatccaattcttaatctatctagtaattatcacaaaataccaaatgataatgacaagtgacaaacctgcaaatcttgcatattttatacaatatctttctcaactttcatctctgttaattttttaaaaaaaatttcttaatattttatgtaacaatcacttttgtatagatgataaattatgttgaagttgtcttatctacaaggtctattttttaatctttgtaatgactgtcttgttatatagtgatgttggaactattaagtgtggagtttcaatttggtttagttgggaaccttattagctgatctgtttggttgtttagctactgattcagctattgcattctcaacgagatcttgattgaagagtcaagtgaattgattcttaggtttcaagagggagttaaaactgttattacttgagtggatacttaagtaattgggtaataaattgtattccttatgaatgtaacatgttgaattatagaattggaatttgtaatatttaacattgatttcatattggaagttattcagcagcctatataatgtatttttaaggcaggtgaagcatgtaaattttgtgtgtgaatttacattgctttcgattgattaattgttctaaaaatttaagaagatattaggtataacactttcagtttagagaatatatatcaacaataaaatccctcatatttcaattaattagactactaaaatatgagatttctgacaattgtaaataatcaggttttgtattaatgtcgtcaatctctaagatggatgcctattccacccactatttcactgttgcaaaaccgagtgaaaaatagtagataaatgatacttcaaaatcgtattattgactgatttatatattatatatacggaataattacgttcaatattgactagatatctcaaaaactgaccatcaaatttcaaaacaacacaaatctaatctaaataatcaatatccttaattgatcaattcgactttgcgaatgaagtcccaaaaaattacatcaaaaagcaacatggaaacttacaatttcataattaagctacaacatcgtcattttcatattttacaatccctaattgttagggattctagctagtaaaagctcaatgaagaaatctacaatagccaataacgaaagatcaacggtgaatagtccaaaaatgaaatgagcaaacaaccgaaattctatgaatatttagaattctgaattttttaggcggagaaactaagctcggaacaatgatgtgccctaagacccattttgttgcaataaagaaaaaaaattatagatagtgaaaataaagagagagagagagag

SEQ ID NO: 23149 - DNA, 1492 bp, Cannabis sativa
  modified_base (40)..(79): a, c, t, g, unknown or other
cgacgctcttccgatctgttttagaaagttcatatttagnnnnnnnnnnnnnnnnnnnnnnnnnnnnnnnnnnnnnnnngtaaaataaattccaacagtttgaccttttgaatttgttcttgactagtttttcttgtatccattagaattattctaatttcccttctgttctttcttgggatatttttctttcataattagtaaaccctttccgctactttctcctttctcaccaccttttttcttctgaatttccttggagttaaagacaaccttcatttctgtcatggtcaggttgtccttcccacacagaattgtatctacaaaatgttcatacattttaggaagtgagctgagatggcatggtcttcatcatcaatcttgacaccaagattgttaagatccaatatgatcttattgaaatcatttatttctcagttctctagtttcatccattcgaagagtgtataatctcttcttgagatacaatttattggctaaggatctcttcatatcaatggaagatattttgttccatagcccgagtgccttttcttcattaaacactttccttagcacttcatctctaagactaagaagaatggaactatgttggcttaaacttcttcttcttgtcttctactaggttcatggcttcctcatctttagcttcatagattcctcgatgcacaaggaatactcacatctttattctccatagtctgaagtcattattgccattgaacttgtccaccttgaatattgaagattccatctggttcttatagttcttgattgtttgaatatgaatcttgaaggtttgaatgcaaatcttgaaacctcttcttggaatcttggctctgataccatttgtagtgaatcaatcactataaaaaaatactattgttatgaattaacagtgaaataagatcacatatgaataatgaacacaaaataaaattaaaaacttaaaccataaaacataaactagagcaatcaacttagcttgatttgatgacaaaattaatagttttattgaattggatcaataatgtaaagttggagtacacaactctactatacaagttgcaaagtgaaaaattatataattctcactcttatttcttctaatcaaatacatggaagtagttgtacacccccctcctctctctcaaagtgttttctttaatagagaacacatctaattctcgtttagaattcttttgagttgatgtcgagccaatggtgtggagtcttgtatttacaagcattggtttagagttcatctgagatgaatagagactaactaacttaactaacaccttgtcatactagatttagtaatacattatgtggacaatgagttagtgagccaaatcccaaccatgtctttagttagttatttattattattttttggggcttatttatttttacacttaaaaataatttttttttatatttttacaaaattctacgtagaaacccctat

SEQ ID NO: 23150 - DNA, 2949 bp, Cannabis sativa
tcatatgtactcgattgaagaatacattacatgacttagtagcctagaatcaagggggatttataaaatgctggtttattgctcataccattatgatttcttaggatcttgttatatattatgacaggaaattagcaaagtcaaattatatgatcaaactagatcttcaaaaggcgtatgataccatagaatggggattcatagaagaaatgctacatgcttttaacatcccactaaaatttatccagctagtcatgatttgcatacaaactcctagattctcgatcatgttcaatggttctatgcattctttgaggctaaaagaggattgagacaaggtgattccatgtcacctctaatctttgtacttgggatggaatatcttatcaggatcttgcagaagattggccttaaacaagactttggtttccatgacagatgtgaagctctaagactaaaccacttaagctttgtagatgatgttctattattctgcaaaggcgatttcaagagaatctattatatgttacaaagcctcaaactcttctcacacacttcagggcttcaaccaaataaaaaaaacaagtctgttgtgtatttcagcaggatggaagaaggggagtgtcaaagaatcatagatatttttggcttttgcaggagtgagatgccattcaagtatcttggaattccaatttgtgcaaagagaatctcaacagccgaatgcaaatctcttgttgagaagatgactgtccgagttagagcatggagtaccaggaatttatcattcatatgaggagctgtcttgatcaactcggtcttaatggaaatacacacctactagagccaaattacgatactgccaaagaagactattttagaaattgagagtatttaccgtgcttacttatcgaaaggtcatgccgcaacctccagaccaggagcagtggcctggaacacactatgtcaaaccaaatccaaggggggattggattcaaggacatttcaacatggaatacagcagcgatgatgaaatatgtttgggctatagctactaaaaaagatagcctatggcaatacaaaacaaactctcaaagcagctgaactggagaaagtggaggtcaagaacaaagtgatccaatacatggacccaatacagttcatggcacagaaataccaaattgttgatgggtataaactgttacgaccttctcaggaaaaggtgagatggtgcaaagaagtttggtgccgatataatttgcctaagcattattttattatgtggattggtgtacttaacaagttaaaaactagagagagattatatcggttccacattatagattgcctcacttgtgttctgtgtggcttacaagaagaatcggttcaacacctattctttgagtgtgactttactcgagattgcttggaccagttaaagaagtggctgcaatggaaagcttgtacaaactcattgcaaagactactaagatggattgaaaaagcaaaaatagaaagtttcaagaagaaggttctatcagcagccttagcttgcctattatataacatttggacatcaaggaatgaaaatgtgtggctggcaaaggagcaattggcagaacaactagtatatagagttagaaggataatcaaagatagagttgcttgccttggttataaaaagataaataggaaattgtttaaaatgaaacaatatggtttgaggatttgtaaaaatagggaattacattagttattcatttgtgtataaatgtagtttgagactatttatgaagtctctttagtttgtaaaaatattttttggagtaatgaaattcaactggttcatcaaaaaataaaaaattaaactgccaaaaaattaaacttatttaataggcactgacaattttattagcgtttagtaaggtgagaattaatatcttagatctaaattttttttctttaatctcatgggttaaatagatattaaatcaattaatttatttttttatataaaatatattaaatatataaaattataaatatattataaaaatatataaatataattcaatgactattggatgataattggatcgcttgtgttcggttatctattagatcgaatatcccaatcaacaaccgatccgataggattttcaaaatttacattcgatctgatctaattatgattagatatccgattctattgtatcagtcggttgtaattggattagatgattttctgcacacttctacgacactagttttcctctttcttatgcaacattgagtacttaaaggtttaactctttagtgcatgtgtgaattattttccttcaagtgccacttcccttttaaattctctttaatatgtaaccactgacattagaaaagtttcactggtcgtgtataacactttccctttgcatctgatgatgtagtcttgtcatttgtactcttttattctaaactagttaagcattgttgtcgccttgttggaattctccttggattatgggttcaaagtgaattgccatttcttgaattattgaaaagataaaccctaagggccaaacctaggtatgcaatttggttaattaggacattgatcacaatttttatgttcttttccacgtggcacttcgtttcgtcttttaaaagttggccaaagtcttctttgttggcttgtgtgtcttcaaggtgtattcctagctatcttgtataggagaatcttatttatcattattttattattttttgcgaaaattgaatataacagaactttttcttttatatataaacatgtgatttataatttttttgattaaattagtaatttcattatattatctatatatttacacaaatatattgtactaatttttttttaaaaaaaaaaaaaaaatagtatagacaaagttatttctcactattgcatgtctatatata

SEQ ID NO: 23151 - DNA, 2740 bp, Cannabis sativa
  modified_base (2149)..(2150): a, c, t, g, unknown or other
gatgaagttactattaaataaaaaattaaactgagaatattagtttatactattttaaaaaacacataatgtaaattattatttaacaaaatcatttgataaattttataaaatacataatatataataatatttaccttatatttttactttaaatcaaaatatacatagttagaggaggaatgtaatttactttcttgcaacttacaaatctatttttttttagtttagaaatttaatttattttaatatttttgaaaatagaaatttatttttttttataaaagaaatataaatgaattgacgtataaatttgataatagatcaatagtattgaaaacaaaaaaagacaaatgtgtgttttaatttagttaaaatgtaatttactttgaacagagatcactagcttcaattaacttttcaccttaacttttttttggactttcttagtcaatatcccaccttaaatatattcaatgaacatatataaagaaagcaacatacttttcacaaagagtaagatcttatttcttttttcttcatttacaagaaaaataaaatgatattgttatggttttttttttttaattattattgaaatgaggttttattttatgaaaaaattacactatatattttttttaattttatgtctacaatttttattctctttcaaaatttattatgtttacttttttgcaattattctattaattttacccatatcacttcacgataatttttaatattttttaattaaaattttgctccaattttcttacaaatctaaacatccatctacaacgaatacaaatctattatgtttgaaattatgtcttagttatgtgagtgtgtgagaataatttaagtacaatactcataaaaaaatgtatatttaaattaaattttatttaaaagtaattaattaatatataaaagaaaaaatattcttcaacttctcccatattttatcatgttatattaagtatttatagcaagcgttgccttttgtttcttttattctcatttcctattattggctaaaaataaaagtataattattctcttctcaatttgtttaagctttggatcacccttaattagtttattgaggaaaaacaattcaatgtctcctttgatatataataatggttttttaataagggaatatattatttatttggtatttgttgtttataaacaagtttgatactggtaatctttatattttgaaattaaatatatttaatattataaatttatttatagtcatatttatggtgggacagttagggcttgttcagaatccctcaactcaagaggccttctggtattttttttttttttttaagatttttttttaacattagtccataaaacctcaaaaaaaattacaagaaaaactacttgaaaagttaattgaattttatttatttttcaaataaaagacctatttttaaaattttaccccatgccccataaaaactaagatggccctaaatttattaataaaattatatgaatttgaccaaattattttgtatataattaaataattaaatttaaaactcatataattattgaagatagtttgattatgttaataaaattttattgatcaattcaaattttaaacataccaaaaaaaatattgtataaacattattgagaacacatatactaaatttgtattttaataaacacaggtatccaaataattatacacccttaaaatacatagaacaagtcaaacttaatcataattaattatgaaaactattatattagtgtgcaatttcatttagtatcccatagactaataccgcttatgctttaaaattatataaaggaaaataatatatattttatatgattgcatttgcaccctctttcaacaattggaataattaactcaaaacaaagcttgacattttgatatttttctcttcaaaaattggcatttgtcatgctgcatcttattatgcaaataattttttttttttattatttaaattgattgggaaaggggaactataataaatgttagcattgaagaatagttggatactaacactaaaggtatcaataatgtctagtattctcatatgtattaatattgttattggtctaattaagtatcgggtcccanntaatttaatataataacttttacagagtatcactaatcaattgcaaggcaacatgttcagaggtgcccactggtgcctaataacaataatgctcgttagatatttagttatatttgaatgagcattgctattggacagtatctaataccttttataggtagcgcgctacgattgattagcgatattatttaaatattattttcttaaattatataagacccaatacttaattacatttatagtagtatgataccgatgagtctgttaggcaccaatagtgtcttttaacatttctctatttagatggtattttagtttgaaaaatactaaaaaccactggtgatgcttaacactagtataatattattattgatgtaatttaatattaagtcatatttattttaatttaataaaagttataaaaaatatcgagtcatatcattaatgatattaggcagtaagcacatgcccatgttcttttagttcagatataaaaagcctcataccatacatatttagttgcctagtaatatattagcctagctagacgacttggtaagcaaattataaaacaatacaatcaaattaag

SEQ ID NO: 23152 - DNA, 1256 bp, Cannabis sativa
  modified_base (1230)..(1231): a, c, t, g, unknown or other
ttaccacattgtgtatttaaatatggaattacatatttaatttaataattattttaaaaaataattgttaaccattaacaaaacgatacctcgtcataataatattaaactctactaatatttaataataatatatcattatggttattgtctataaatgtatactcatttattgacatatcttgccctgaaatgatttgtcgagtaaggtcttagcgaacattctttaagattagaactctcttaataacatccaaaaagagggagccacactcgcgaatggcgtacctaccttaggactagagagagcaattatggcgccccctctcaaccttttttttttccataaaaaaaataatatatttttacattttagtctattttatgtaattttttccatctatactccctttttagtataatttttgtctatttttagatatatttttttagcttttactctactaaataaattttctaagtccgtcactactcacactgataactcccttctttttcttatatataaaaaaaggaaaaactaagtcttgactattaattagaatttagaaatagagtaataatgactagctaattatttcttcactcattatttagctatgtgaatactttaaggagtaatcaacggttttttaattttgcagtgcggacggtgcgatttttaaccattttttaaaattaatttacacataggttttttcaatttctcaaaccgcacccgcactacaaaattaaaaaactgcaaaaatcgcactgcaaaaaatagtgcggtgcggtgcagtttttacagtttagattatcactaaataattaaactatcacttttataacaaagcttgagcaacacttgtcaaaaataccataaagcttaaaaataaatatgaaaaaagtttcaagtttcaacaatacaataattagtgggctttgaactgagccttcacatattggacctagataaatattaaaattgatatttttataatatgtggtgcggtgcgggcacattaacaatttaaattaccgcaaactataccgtaccgcgcggtttaaaaaattttcgaaccgcgatcgcaccacaaataatttcaaactagtattttttttgcagtgcggtgcgggtagtttgagcggtttgataaacaaccataatttggactagtcagggactgccacgttgctattgactttgttgagaatcatggggttccnnctcaaaaccaattggcaatgagtgg

SEQ ID NO: 23153 - DNA, 2347 bp, Cannabis sativa
aaaaaatatcatcagtacaggctccataattcgtattggtaacgacttcaatacaagcattataacagccccttggctgccatatttgtgtcaaccgtttgtttgttcttctcatcctgggttggaaggaaaaaaggtggcaagcttaatgcatcttaaacataacagctgtgatgatgaaataattttagatttatttaatgaaagagatcgttcgtttatcttggggatacctcttagtaactctaatgttgacgattgttggagttggaataaggaggcttcaggtttttactcagttaaaagtgtctatagacttctccaacatgatgatggagatgatcaacttcatggtaatttttggaagagcttctagaaaattaaagtacctccaaagattcttcattttgggtggagagccattacaagttgcttacctaccaaaatttagatgcaaacaaagcatattaatgtcaacctcttgtgtccattatgtaatacacatgttgagtctgttattcatgtcttagtgttttgtaactttgcacgttcatgctggcacatgtctgctattagcactgggactgttaatgatagtgagtttagagaccggtttgttaatgctactcgagggcaaagactccatcgttgcagaagtgttgatggtagcttcgcaaatttagaatgcacgaaatgacttactttggaatcagagaataaattcagctgcaaatgtggtactcacaacatgatcgaaccttaatcaatggtgttgtgctcaacaaaattggatggatcctcttcttgttcacaatattcaaggattgaagatagagcattggacgaaacccttggctaacattattaaagtaagcgttgatggggctatagttgcagcatctggttgtttcggttttggttttattgcaagagactctgttggacagatcattaaagctgtctctaggtgtactccaagctatgattcatctgaagttgccgaggcaagtgggattaaagaggccctcaactggattaattaagaggaaaggctggtaggatgttactcttgaaacggatttcctgatggttgttcaagccgtcgagagcaatattcaaatgtcgtatgcattcggattgctggtgtgggattgcaaacagctcctagttgagttgagtaatgttaagtttaattttgtcaaacgttctgctaacaagatagcttattttcttgcgcgtagtgcttgctatttgtcagatcgtatttttcactttgacagttctccgtcagagttgttagatattgtaatggttgaatctttattttaataaacttctatattttcattcaaaaatataatattaataataggatatttattattttaactattgaagctaaatgatctccattggactccttcataattttgttattcctttgcctcggtaaccccaactctaaaatagtgtttcttttttgcttttactcttcaatcaagcttttttttttttttttttttttttggtgttattacttttcaccaatttcatagttaaatgtattttttttttgttttatggtatatcttttttaaagatgatatttagtccatatgttataacataatttggttgacgtgacatataatattattagatgttaaatatatttttatttttaatttttgttgtttatatacatgcttttattgtatgatgtatgtttttccttttatagtataaattatattgtataatatataatttattttagattatgtttagtttctactttattatatataaaggtggtatctaattttgtagacatggtataattattttaatggtggtatataagtttattagtatggtatatatatatttttaataatattattttttattatatttttaattgtagtggccatatatttttttattgtttgatatatatttttaatagtatatagtatactatttatttaagatgatatttaatttttattttattatatataatgattatatataaaacttttgacataatatacacatttgagtggtactggtataattttattagcttaatatactttttgagtataaatatactaattttatttgttgcccttgatttctcctaaaatatgtggacacggataaggctgacacgtggatctgtaagaaccaacgcttatggaaatcgactaagtcttagacgaaagaggagtatcctaaggaaggtgtcttccggagaagagcataagaagtatctttattcttcgggaggccagaggcatgctaaggcagttccgggaggtgtagagatctcttgaacagt

SEQ ID NO: 23154 - DNA, 2083 bp, Cannabis sativa
tggactagtttagaattttaagctgtcagtttggttggaatagttagaaataaccaaatacccctaggctttattttagacttaagtgtttatggagggacaaaatagtctttaattagtatatcatagtatttatgtctttagtgtattttctaagctgaaatagggtttagtgtttgttattattattaatttaaatgttatttagttaattgatgataaaagtcaaaaataaggaaaagaaatcacaccaaaacgtatctttctctctctcccttttgaaaacctaaggacccagctagaaccagaagctttcttcataaattcagccagttctcagctgaatcaatcaaagctaggagttattcatgctttgaggtaagctctccagttaattcctttgatttatgaggtttgggttgaattttgtttagggttttgcttgattttggggctgtgagtgttgttggagttcagagtatgtttttagggttaagttaggtttgtttaagtgtgaattggatgatttcttggctgttaagattagaattaggagaattgagtttaagaactcaatattcattcaattatggtaaatctgtgattttggggaattattgagttttgattgtttaattatgttgttttaatattatagaaccgcttcagaaggtttgaagaggttttggattagttttgatgtgtaaaaccagagttttaccatttttgcaggaaccggtcgaccgattcaataggtcactagtgaatcggtcaacctgttggccagtagggggaaatccaaattttcttcgaagttggtttttccttggggtgttgtccagttgtgaaattaggatttgtttcggagtttagttaagttgtacaccaagttttattatcgtgacataagactcgggatcgtcgagcactgttccactcaggtcggcgcgcacaccgaattattggattgaggtaagaaaaagcaattgcactacttagcatgtcaaatgagaaacgattattattgttagcgactcgattatgaacgaggtaaagatacggtaattaccgttgttgagaatgagtaattactcactttaatactgcggataggtttcttacttatcgatcggttcatcgggcaccaagagtgacatatggagctcgttggtaatgagcaggatgctttatgaagcatcaaagtcagtttgtcttatgagataaataattgtttatgtaatgtttgattaagtaccgaataagtatttaaattagatgatgaaattgttggttatgcgttgtatggtttctcgtgttatgcgatatttgtattttacttgcttttttgccgagtctttgagagtcacgtgtgtttcgtgacgcaagtaaagggaagggaaaagtggaccaaccatgagtcagaggtctcccaacgatgtacatatcaaccggtgtgcctcgacttccagtggacaggatccaccttttgatcatgttttaaaaatgtaactccattttgtaatatttttttggaacatgttgtaaaagtttataaacaaaaggatctccaaatctagcagtattttgaataaaaagctcttaatttcatcaaaagttttaattaaatcgtacattttttaaattgttaacttataattataaattaatttataaaagcacacataatatttttgtggaacagaactctacgcttagacaaaaaagattgatgaggttaaatttaataagtaaacttaattataccacactatgtttctttttaaatataatttttttgtaataattatttaaacataatagatgaaagtatatatataattggatgattaatgaatctctttgttgcctctttttcccacttcaggtgcttcacgttgtattattttagtaaaaagagttatatatctacccccactcatcactttattatagcctccatttaattatacttctttttacggtgtcctactctaacctcaaggctttaattaaattttgtcaataattaattattacgaataatttctttatcacttttgttttaatatatatgtctaaatat

SEQ ID NO: 23155 - DNA, 4226 bp, Cannabis sativa
  modified_base (525)..(526): a, c, t, g, unknown or other
  modified_base (1963)..(1963): a, c, t, g, unknown or other
tttttagtctattttttttttcattgtcgtgtatatcatagttatttaagacaacatataaaattttgaaaaattttaaaaaatttaatacgaaaacaatgtacttctttaaaagtagtgcactgattgcacattatatatagttatttaagacattctgtaaaatttcaaaaaatttaaaagaatttaacacgctgaaaaataaaattcaatctgtctattacatgtatgactcttttattagtataatttttagtattttagttgaagtagaaataatttttgacatcaaattttgtatttagtgatagtgtgacgctaaatttaattcgctatagaaatactcttagcactttcttaatattaatgaggtaggtaaagtgtcctatcacaaacaagtgggctgcctgccttttcatctgttttctcccagttattcccatccatgagaattctcctcttagaaatatccttgctttcaatgctctgtcactctataaatctataaatatataaatatatatnnatatatatatatttatatacaactccaagtgaaggagctttcaatctttaaagtccacattatcacccctccaaaggatgggtccatacgagcagtgactcttcaatcttcatggcatatattatatatatatatataaatatatttatataaattaactcccagccatggcatttatatgtcatatatgtcactgttggttttaacttttaataatataaagtttgagataggatattttacaatgcaagatatgtaataaataataattaaccttaaatcggcaccgtcttataattaggaggtgtcaattgttttcttgtcattaatatatatgtatctacagtaatttttttaatcttctaaaacgatatttacatatagtgaaattgaaacatgttgtttttcttcaagtttggtaggtacaataatgcaatttatattgtgtcttagtctattactgatgcaatttcaaagcgcgcacgtacgactggaaccaaataatgtataatatatagtcaatctgctgcaaagagggatttctttccctacatgctcttacattttttttcttttattttaatggaaaggcactttggtccacatgtttggaaaatgtataaataaatattaattgataaaatttttaccctactgtgttttttttttttttaaaaaaaaaatctcagagaaacttcattaaacagataaaatagtgatgatcacattggattcacctcccaaaacttcaaaaaactagaaaaaacattagatagactccatttggcaataatatgggcagctacattagaatctataggaaatcaatgcacgttgcagtcaacactgagctaaggaacatagacaaggaagaggcaatagaccagctcatcaacccatttagctaataataaaatctccttaggcttgtaaggaaatttctaatgttaatccttaaatataaactagctcatcaatctatttagggccagtttagtactgtaaggaaaatagagttatacctgtattgtgaggaaaaatagtgtggaaaaaaattagattgagtgtttgataaattataaaatatattataaattagtatattaatgtattataattacaatgaattattaatattttaattataatgataataataagtattttataaattaatgtattataattataaatatataaaacttatgcacaattttattttttatgttgttatttgttattgtttgtcttctaaaatatgaatttacatgtatttagtattttttaaattattattatttttttttgaaatagaaattttattactaaacaacactaggcacatctgctattaaaaaagcagcagcacaagaaggtaaactatcagtccatacttcgcacttttgagtcatacgactccacttagctaaactattngcaactttattacaatttctggtaaaaaataaaaaatgaatcgactgaaaatgggtcttcaattgaatgattgtttgcaccaaatgcccccaatcggttggagaagaagcaccattaataatagcagaaatcattgttttgctgtccgaggctacccacacatttgagatggaccatttaatggctagcttaagtcccaaaagaatagcagcagcttcggctaagttgacagccatacaaccaggtgtgtatacagtttcagcaacaattaatccgccagcttcgttacgaattatcgcacttattccacagccttcctgcccgtgaaccagtgaagcatccgtattgattatgaaaaaatccttgggagggggctgccagagaataataggctttgaaggaggagggcttggactggttttttgctgtcccaattgatgttctatggtctctatcaaggaatccaaaagttaatgtccgggtccctatgttgaaaaatgaactggtttcgtcgttgccaaatcaaccaagtataacccacaaaacggatgaactcctcctttgagagatgttcccattgccaccaaaggaaggccgaggcattaaggccaatgagatctgtaaacttggaataacccagttgcttccatattttttgaaccttaggacagccccataatgcatgaggtatatcctcctcttgttgcaagcacctgtcacagttggctaataaagacattcctctctttctcaattgcatcttagttgggatccaatggttaaacactttccaaatgaaatttttcattttcggagttaatcttgacccccaaatgaacttccaccatgcttttaatttggagttgttagaacaggccgcccactccggattaagaaatcttaacttatacccactagcgaccgagtaatgcccattgttatttaacccccatgtaatccaatccggttggtgagtagatggaatgatgccaagaacccaaggaatatcatcattatgaaaccaactactcacttcattgatcttccaatctccattagtagttagtaatgaattaagagtgacatcttggggaattggaaccttagttcttagctggaaaggaatttgtctaggcagccacgggtcttcattaattcgaattttgcgaccatctccaacacaccatctataccctttagttagaagatcacgaccccataacaaccctttccaaaccgaagacccaaagtgacccaatttggcttcaaaaaaggtttcatttggaaagtaaagggctttcaaaactcggctgaggagactttcaggttcagtaattaccttccaaccttgtttagccaaaagagattgattgaagtcttctaagtctcagaatcccatgcctccttgctccttaagtttacacagcttttgccaattcccccaatgtatcttgtgtttgttggaagttgatccccaccaaaaacgagcgattaagctttcgatttcatgaagaatgcctttagtgatccgaaaacaactcattacatagcaaggaatagcttggattaccgctttgattaaaatttctttttcggcttgagagaagagacccatcttccgaccttggagctttgcttccactttttcccttattttaccaaaaatctgttttttgtttttacccacaaaggaaggcatccctagatacttggtatggttcttgacaagggttactcctaattttgaagctatttgatttgccagagagtcattgatcttgtttcccacacacaattcggtcttctccaagttgatacattgcccagataaggaggaatacgtctcaagaatttcttttaaggtaatgctctcctctatatttgcatcaaggaagatgagactgtcatccgcgaataagaggtgagataatttctactccatggaaccaaaccgtaagccatgtattctcccaacccgttcagcttcaaaaattaagcaagaaagaccttcagaacataataggaaaagaaagggcgagagaggatcaccttgtcgtagacctctttcgggagtgaaatagcctttgatagagccgtttataagtattgaaaaggagaccgattggatacaattcataatttttgtaatccacttcttctcataccccaagcaaatcatcatagtttccaagaagtcccactcaactctatcgtacgcctttgacatgtcaagcttgacgaccattttctttccatttccaaa

SEQ ID NO: 23156 - DNA, 1238 bp, Cannabis sativa
tttttttttttttttgtagagtttgtccctttagttacttcgctatgagttttgggctatttgctcatcttgttcttagattggttcaccaacagtttggtcgtctacttgtgagatttgtgttgtctctaccacttgtagggctttgtttgtttgaacactactacgaaaagggtcttttgcttcggtttttaagtgatttaaaatttttgcatcagtttgtgtaaccgacgccataaacacaaagacaaatactattattttttgcttcacttcataattgaaactagtttttttcacttcatttaataaccaatgccaaaagtaattcacattttgtgtcgattattaaatgaagcaaaaaattttgcttcatctaataattgacgcaaactacatattaaaaaaataaaataaataaatctcaagatggtttcagatttgagacggttcgattcaccaccccaaactcgttatcctagaacccagtcgcgtgccaccaccccaaacctgaaaaaaaataccaaatattgtgcgttgagagagttgccacagagagaaagagagaagctaaaaataccttacttgtgtgatggctcccctgtggtttcgtgcgtgctccaactactccaccacctcaaacttgaaaaaaaaaaaaaagcaaaccaacatcttcaaaataagatgagaaataagagagaaaaagacccctcatttttatttgcatggagatgaagacggtggcagggtgctccgtccactgctggcgacgagctcgtgtctagcaaacatcgaaaagggtggcgccatttgttgttggcaacgagtcggtgtctagcagagagagagagagggctgacaactgtgtgtatgagttagggattttgtaaatgggcacgaaacccatgtgtttttgtaatttttttttaagtaatttagcatcggttttgcaccgatgcaaaaaactagtaaactgacactaaatggtgcatctgagcaaaaattgacgcaaaaatcaacccctcatttgtgtaattttttttttataatttcatctttagtgtcaatttttgttttagtatcgaagtaacaacttatgcaaattaattattatttgcatcggttaacaaccgaagaaacaaagtgagggttgacttttgcgttggtcaacgagtttgaccagacacgtttactgatgcacaaacccctttttatagtagcgaaaccttaaatgaaat

SEQ ID NO: 23157 - DNA, 4153 bp, Cannabis sativa
tggtggctttcaaccacaacttgctccaatcattgacacattttgcttctctccgtatatattgtgctggcatttggcacaatgcagttgtaagatatcatataacataatcgttgttttcgatttgtaagttgtttcctaacacacatgcaatgttctactttgtctctttgttcagtgctgttcactttgtggattgacattattcctcctgccttggattttatttcccttttaccaacatactggaatccctatggtacttcccttatcacacttatatctgtttttcttctatcaaaattcaaatgcccatgcttattgtgtgtttaccttaatttcctagaataggttttggctgtaccttcttcttcacctctctctggctacttatcccctggcgatcttattgtctcaatggatggtgccaccatcaaaagtccccaccaatggataaagatggctgatttcataaataaattggcgattcgtaatacgaatcattctagatatgccaaaggcattgggatagtcaatagtggaaaggggtactgtgttcctcattctctattggaagagagcatcaagatgcaactagaagatcattctggttgtcctgatgatctggctgcatttgcaactattccctgtttcgataaaaccatattcgatgaccaaattcactgcctgaatgctaagcaagttgtgaagcatggtaaatgtggtgatggttgggtgacagccaaagcagatcctaacagttgcatatgttcacaggtttgaattcttaacaaaattctattactcctattttcttatgactgaccttaatgatttctttctataggataggacttgctcaagtccaattcaaagaccaggcatgatatgggttgaagtttcatatttaaggccttattctgaggaatgcttgcaacatcagagtaaagtagttgtggattcaaggggttccgacattgtagaatctaattgtggtgggactattgtttttgttggtgatgtgatctctatggcaagctcggttcaactaacagcgtatcaacctcgttggccatattttggtgcctatcttcctaacatcctagaaaagatctttgtatgcactttccatgtctctataacacttgctcttctcaacagtctgccggtcagttttattttattgttattaccttttacataactttttcctcattaaatctgtcatacattttgttttatttcccaacaacttggcttactaatgtaaactataatgaagagattactagtaataaattgaaaaatgctagcagaagagtctatttacttcatttctcttggctttatactttgagaattgtggttaagacatattaaagctgttatacaacatgataaaatattttgttgtgattgatcacaattcaaacaagaacaagaatcagagaatgaatcaactattactaaacaagaattcaataaccaaagtaataatcgaaacagtaaagaaagaataacaccagaaatcgtgtagactaatctataaaactatgtgtttcatgatcagaactacaaagaatcgaactcactagagtagactaactagattacagatgcatctcacatgaaggaattcatttcaagaatgaacaatccctttaacaaccctgattacctagttagctttctatgaagtttgtgaacattaacatagcctgattaccctttgatggttatcttaacaccgaaaaagttacaaatctactctgttttgggtctaacttgaaactcattgtgatgtttattaggtgtattttctagatggagaatctgttttagaagggacactctgccatttcacatcgctgggttcaaacaagcggggaaaaattcttcgattgtgtttgttgggtgggacactcatctccttgcttacccttttcaggattttctttaaatttttgtagtctaaacgtaaatttgttcttccttattcataacatatacaagtttaattgactttacatctgatttagattgaattttgaattgcctaaaagctaaccggtataaatttgtgagtttacatgttcaaattggtgtaaactatacgggattcgaaaataaaaattcagttgcaataattgtatcaacatttggtataaaagtagagagacttgtaacgtaatcatattccttcattcatattatgcaattctaaaacacagtacattatgtaatgatggttaagtcaatgatttagtttgttaagacctttttcattgcagcatgcttaatgttggtgtttgtgttaacaatgaatttatcaatcaatcctttaattccatcagtgttaaaaaaagaggtgatatggatggaaagtaagatatgtctagcaaagattggtttgggaaagaatgaagatgatgagtttggtttgtctatatggaattgtggggtagtaggtttgtgttgttagctttttagattaggttacaggtggcagagattaagggaaggaatatgatacgttgctgttgctgttgattgtttatagtatttttgataagttgtatatgatgatatgaagagacagaagtgaagataaaatagtgagatgcgatttgtctatcactattattgttgttgcttgtaatgtatgaattaagagtatgtacgtagttggattgttggagttgatcaagatatgatatgataatgataaagtagtaatagtagaagtgggttgttgggtgagtgatgagtggggttggtttttgtttttgtgaaatggtattttggatatataatgggaaaaaggaaaggaaacatgtggtgtgtttgtgggttcctttgtgttgtgtgtgtatgagtcaaagtctcgtcattcgcaaagaaaaagatcggaattgtgcaatctcacgttgtttgaggaaggttaaatgtgatgattctaagacttttgtaagtatgagactacacagttgaacaacgcttaaatagattaattggtactacttatattaataagatacattttattttcggtagcccatcataaaaaaagaactataaagttaagcgtgcttgacttgaggtggttttataatgggtaatctcttaggaagttttctcatgaaacaggctagtgaggataaagtacattgaaaagctcgtgttagtttgtgaggtcagttatcatttcatgaaataaccaaaaatgacgtactcgtgtataagagttattagtctgtggaggaaaacctaataaaaacttaaaagcgggaacgttattagtgtgagtctacaactactactacaaacataggctttatgtgcatgtgcatgagcatgaaatagatgaagaagggttttatgtgttctgtgctctgttcaaagtcactcaacatagaatactaatttgtattatttacttaaagaattaattaatagtagtttattattagattagacccttaaatcacgtacatcaaacaataataataataataataataataataataaagtgatcctgtttctccaattaacttacttccattttctactcttcgtcttctccaataattctcacatcacttcaccatgttcaaatctaccaaatattaaaaacatgaaataaataataaatacatatttatatataatgatgatgagtttgtgtatatatatgtcattgtgcttttttgttttttgttgggccaaccggcagaggggaagaaattaatagaatcaaatgaaacaaacatatgctattgctattgctactgttgggcttgtgaccatttattcttgattaattatattattattaatttatatgtatgtttttcttattacagtgatgatgagtactatataatattaataatttaataatgcctgctccatttgagaccatatgcatcttctatgtatagtatatatatatataaagcaaggacatatatatgaatatggccatatatatgtatatatattcagatttattttattaattgtatgtatgaaatatacgtatgggacctgggattacataattattaatacgtacgtacacataaattcaaatgcatgcatacagaacctggtgaacagttgtatatatatttattatatgaagaagcac

SEQ ID NO: 23158 - DNA, 1175 bp, Cannabis sativa
tcaggtaatctttcatatttaaaatccaaccacttagtaaactctctacccatctttatgaagcgaatatgtattcccctcctaatggatttgttgacatctagtagatacctagccctcaggtaaggcccagttccatccttaatagtagtgttatcaacctgaatcaattcccctaccccagttgctatgagtttggccaaatcataagacttacatctaaaagggatcccatagacttgcacccaaaaaggcacataatgcagctgatcaggagtgattggaaaggaattatctgatgcagcaaaaatagtgagactttgggcaaaatgccaaggttgcccatcaaggattctacgtttatccccctcacagagaaacgtaattagaaaaagaccatcaaagtgctcagagatggtaactagaaaacgacactgagaggtccaaactggagacaaagttttaataaagggaaactcgattaaaatgcttaacaatgcatagtttaagaagcagactgatatcagtaggaggttcctcctgaacttcagccatggtgtaaaccatggtctcatcaagagttagaatcaaaggagaagcagaactagaccttaaagcattcatagtgaggctaaagaaaattttccacagagaaaaagaacaacaacagacaacacaaatgcataaactcaaatgaaaacgcgttttatagataaaaaataccatacatttcaggaagactcttggcttatccctggcagtagcttcctgagtagctcctctagacatcccactctcccagacttcatcatcaccattataccttctcgccacctcctctattagaagaagcatatcttcattaagattactgatttgatggtgaaagtaaattattagatacaatttagggtttgacaaataaggctttaaaaattgtgggaaagataaaatgcatttaattcattgaaaattttcagctgagaggatcttttgaggataataagcatcaaagatattaagatggtaattaatgcactgaacagaagaatgatgagaaaagaaaaggggaaccaagacccaattgccaccacaccaccatagagggtggactagaaatccaacataggtaccaaacggagatagagaaacatgcctcttgaaaactctagtgc

SEQ ID NO: 23159 - DNA, 3188 bp, Cannabis sativa
  modified_base (1707)..(1718): a, c, t, g, unknown or other
atattctttaattataagctctttaaattattgctataaaataacatagttattatgatattcatatttttgccttatcttttaggtatagaatcgtttactgcctctagttgtttgcattgtcaaaaacaaaagcccactcaatttattcttgcctattatatttcgatttgattaattagcactaagaaagaagtagttaatggaagaaggattttcgtgctcccctatttttatatattatagcttttgaccatctagtctcttcttcatataatatgtaatgttcaatattaatatatatgcactactagccaaattataattaaattaaatatgttgtgttgtgactagtatatgtaacttaactatacaccatatgaagcccatagtttagcagtacaactaattaaaccaacttattattttcatcaaacccatcaaccaattgttcttaatttcttctttttctttttttcctttcccacaaatgaatttcatctttgatttttttgttctctcagcaaaacaagcccgaccccagtttcactctctttcttatttctcttataattataataatatattaattattactatattttaatttaattgctcaaaatgaaatcaggtgatcatgaaatctgtttagccaataaaataaacatagaatgtagtgaaaggtaggtatatttgtaaaacgtacggatgataagcacagagagaaaataatagaaagaaaaaaaaaagagagtagtgagaaatgaggggcctagtgtgcatcaaaatcacatggggacacagccttgcgtagacaaatgctagtgggttcttagttgtcttatcccaacagtggatgctgatgatgtaacccttcgtttttgtctttttgcacactaaaccctatatctttatctttcataatatgggagttgctagaaccatattattaattattaattattactagttttgtcctaattcagtatgtattttgattctgtactgattaaatattactgctacctttatcaaataaaaaagaagaagaagtaaagagtatggttggttttcttgcatgttgatatgtgtcatattatatatcttttgttgttgtgcgtttgaagccatcaaaaagagggcttcatttaatttgaaatggaagtgggtcaattatttggagtggtgatcactgcttaattaagcaataaaatagaaagattacttgaaaagtctgctctaattattatgatgggaattgggctttgtttgatcattggatattccgatattctctgcggagtttaatagctatatacacatatatattttgagaaatttgattttgagagacggtactgtaaaacaaaagacagagtaattgggaatttttttttttttttgtatatatgcaaagtctgttaatatttttttaatcaagctttttatttttaaaattaaaaaagtaaaagatatatttttaaaattatgttctataaaattgattttactttttaattttttaattaagaatttatttttaaaaaaatttacttttaatatttttttaaatcgtttttttaattaatattttagtcttcgactctaatttagaccttggaaaccgaacccgactccgaacccggacttggaaccaccctttgtcccaatatcggatccgactttggacccgacttaaataaaatnnnnnnnnnnnnataaaaataaaatttacagaatatttttaattattttttgcttttaaaattgaaaaacataagtagttataacacatttttatttttcaaatcaaaatttttgtacttttatttttgtaattaaaaaatttaaaaataaaagtattaccaaacactatcatatatttatcaatataaagataagtctaagtaaagaattattagttctcatatacgtataaataaatgaattcctaataattttcctatgattatattagatgtgtctatataataaaattgctattttttttaaatattatatttaaattcattatatatttctcttatcttttatgaaaataaataacataaagagtattcacttcgcttttaatcaataacaataaatcaaatcaaagcgacttaagaataactaaagtaagaaatatgaataatgtaagtaaaaaaaatactaaaattatagaagttcgaccccttgatgatggtaacagcctattctctttagttgtattaacttgtgagtaaatgaacaagaaggctttgatctctctcgaaagctcttataatgatttttgagttcttacactcttaaatttagatttctcccgtgtgttttctctgaatgaatttcgtatcccccaaatagtgaaaaaatttcactatttatagggagtaattacattaattgatttttcaaaactaataggaaataaaataatgaaactatttattttctataattacaatgagcaaaatagtaaactaggaaggtttcccttttcttccttaatactgcatatccatcccatgaaattagagaaattgtcgtgtcttgcaagtatgaagatatgtgagatatctttttttgaaaatattcaaatcgcaccctctggtcggctcatgcgagctgctcacatgatggaagctggtcgggtgttctcacacaccttattcgaatgttccatcttctgcagacttcgagtacctaatctccctacacagttctcaagagtagaatcttccgtccaggtcatgaaatttgtcatgtgtcacccaagtggatgccacaccaccttgttagaaatttagataatatttgtctcccaaattcgtgtaggagctttctggtcgcacgtgtggacttatcaatcatgatctgatcggatgcgtgatgcatgcccgacttttacccttcatccaacgtgactgattgaatgtccctttgatgtctagaccatgcattaattccttgctttgaaagctatacctcgagtcacgcaatggcagctatatgatactgcacgcgtgacgtttctattaatcaataagtactaatgtttctttttgggaggaaaacctaaaatttgaattttaaattattcttttaactattttagctatttttattcttgtataaccagagcaaacatttctctttttcccctcaaatcttcaaagaaccccttg

SEQ ID NO: 23160 - DNA, 903 bp, Cannabis sativa
acaccatcggctcgagatggttacgtaatggccctgtcccaagagcagctgctgcctcatctaacgaggcaaatggtgggggtcaagagcatgttcggcggccaccagtgagggaggaggaggggttgtctgaatctgaacgtgatccgaatgaaagtggagagaatcatggtcttcaaggtggcaatcccatgaatcatggtaataagttactgattggcaatggggatactcaatcaattgtagtaaaggggccagcaatttctctccaagatgggaaaggaaagtctcaattaggagggaattctaagtcaaccaatttaattcacaagaattatatacctactgacgaaacaaaaagaaagagaatgtttatggactcttcaagtgggccaaaaggttacgaaattgggcctgggcagatttctttagaagtttttgactcacataaggggaatattgactctctacatgaggaggttgttgatgggcttgatgtaattatgtttcctattaatgaggaaaattcaaaaaacgtgaatggggcgggttctggttctcagacccgccaagcattatgaatgctttaagctggaattgccgtgggcttgggaacccgtgggcttttcaattccttaaagagatcatttctcaaaagaagcccaagatggtatttctatgtgaaactaagtgtgctaaagaaagagtagaatgggtgggaagaaatttgggctttgaaggtgtttttattgtggaggcccaagggagaagtgggggtctggcctttttatggaaagttagtcaagagggtcacgtggtgggtttctctcatcatcatatcgactttgtggtcagggaggaaggaaaggcagagtggcgtttgacaggggtgtatggtgaatc

SEQ ID NO: 23161 - DNA, 2889 bp, Cannabis sativa
acgcgaaactttcctctaagtttgcttggtccgtgccactttcctagtcttgggcaagcctttagatgaaggatattgtgcgacgttaaccgtgatctttgcttccaaagtaattttccttgaaggctttggatcacctactagcaaagtatgcggaacccttgcacggaccttgtatgtccaagaagcagactgatatcgccttaacccttaattcaattcccaaaggaatcgtctataatcttcaccaccaatacggtcagggtaatgatggtgttgtgtggtaggttttataggttttggctcctcgatcgttacttcccactcgtcaaagctagacattgaagtttcactcgatgatgaagaggcagcgtggagtctagacttgtcctcacagagtaattgaagtaagtcatcatttactcggtgcttacctccttagaagtttctcgggttcatcaataaaagaggaaaagggaggtaagaaccgaacagggtcatgaaaagaaacaacgtagatgctttgaccaatcagatttatagattggggaaggaaatttcatcctaatgacaaaaatcctagtttgaagatgctcaagaacatgggacaaactcttaattctctaggaataatgagcagggtgtgtttgagtgtttttttaatgaaaaatggtgcaatgttgtaagaaaatcaaagattatggtccgtgtgcatgcattcgacataaaattataagtcctaatctaaaaaaaatgaagaacagttcataaacccaaaatgttcatagaggtaattctaaaataaaatgcaagaaattaaagaaaatgcacaaaaagtttagggacttactcattgttgaagatcgttgagtgattcgagtagaagtggaaatgatcttgaaatttcttgaagcttcggagaaaacttataatttgagaggattagattttttactctaaagtccgagtttcaaagaagttaaaacagataaatgagatccaaaaccccttcttataggtttctattttgataattcatttcaaattttggattttccctcccaaaaggtgaaattagtacacattggggtctccaattgccatcacgcgacccgatgcacatttttcaaggtgcattaaatacttaaaaacataaaggtacaactttatttacttacattgtagtccaagcatgtgtcatcccatttacctagtacgtggatcgagcaagtccacgtaccaacagaaagttctcatgcagacttggggagcaaataatgttatcacaaattctgcacagggtggcgtgacattcatctaggtgagcgaggagcattttaagacttgatcaggtgataccatctttgacatgccatcaaaggtgggttattccttaaaaataacttatttgaagaataagttggaacatccgaacaaggtaaatgacatcgtttgaccagcatcaatcttccaacaagcccgcatacagcggatcaagaaattcaattaattacttcttctctctcaagtaatacaagtaaaaggtgataggctatttccaatatcacaggatcaaatctttgtgctcttagttcttagtttcatttaataattataatttattattatcgctttaattgactcagtgtcattggctaaaagtaaggtcaacacacatacatatataagtggtagtgctttagattattatgtagctagcatcgaactatatataatacttcatagaatgatcaaatagcatcacgctcaaatcttttgaacctcaaattaagtgcaccatatttaaaaaaaaaatatcagttagtgtcgcttatcagtgtcaattatatatgttaaattaaaactaagagatgcaatactgttaaatgaatcgagctatataacatcgataattgatatttattttgaagaagggcgttggttgttaggctatttttggcttaagtgttggattttttttatagttactttttctttgttattatttttgagacgattttacgcttatttttcttgattttaggttcccggggttttaaagtgtaaattctgtcaaaataataaaaaaaaggacgggatgagttgaaagcaaaaaaaaattataagtgaaatttcttaagctcggcacggcgagcaatactttggtcgtcaccaattatcatcgcgatgagatgaagagaggtcacgacgagcagtgttggcaaaactatggttttttcaactatacactatggtcgtgattagacctttcatggtcgcaacgagatgttctgtacgagaattatgaacaattttataatttggtcattttgaagtgtaaaattaatttttataaaagggttttgaatttttatgctcattattcagaaatagaactttagaaacgaagaaaaagacagagaaagcgagtgttcaccctctagtactttcttttccctttttaatttcttacactaaattttatttctagtttgaacatggatttgagtttagaagttattaactaatttttcaatttaaggatatgatatgtgttgattaatctttattccaattagctagtgtgatttgttaatctttctttctagatctttgtgatttatttatatttgtattaatacattttttagattggccacctttaacatgattcatataaaatttgagaagtgaatattaagaatgatctaattaaacaaacataatttttaatgtgaaacgagagtattcacatagcttgcctgaccaatagattattgcttaatgcaaactatatgttaatttcagagatgtattagataatatatagttaggaccttaatgatctaagaagagttagggttattttataatctgtcatcacttaaa

SEQ ID NO: 23162 - DNA, 2617 bp, Cannabis sativa
gtttcaaagattttggctaataggttgtctacggtgctagtaaatttgatctctccctttcaagcggcttttgtcaaagggcgtaatattgcggagaactctattattgcaaatgaaatcttccagatgaagcggcggacggatcggaatgcctttgttggaatcaaatgtgatatgtctaaagcctatgataggcttgagtggtgtttcctcttaaaggttttgaaagctttcggttttaacgagcatttttgtgagatgattatgcattgcgttacctctgtcagttttcaagtacttcttaatggagggataaccaaaaaattcttcccgaagagaggtttgaggcaaggcgatcccctctcccctcttttgttcattcttggtgcggaagtcctctccaaactcttgttagcaaaggaagaagaagggctcttaactgggttttctgtaggaagggagggcctccccataacacatctgatgtatgcggacgatttattggtttttgctaaggcagatggtgcaaatatcagcgcggttttggatgctttgaagcaatactgctgctggtctggacagcaacttaatcacagaaaatctaaagtgtttttctctaagaattgctcgggagatcgccgtcaatcgattcgaagccaactcggttttgatgagatggaaggggctgaaaagttcttagggaattcgatcttgttcaaggggagtagaagcaaagactttgattttatcattgagaaagttagtgctagattagagggttggagagcaaggcttctttcccaagccggtcgtttaactctgatcaagagcgtcttggctgcgattcctatctatacgatgtcagtgtataaactcccgaaaaaaactaccaaccgaattgatggtatgattcgaaaattttggtggacggggcaagttaaccaaggtcggtttctctctttaaaagcttgggaagttctttgtaagcccaagcaatgtggtggtttggggttgagaagagctgaagatattaacttttgcttattggctaagttgggttgggttttggcctccgataaagtgtgtttatggaaatcgattttgatggacaagtattgctctggatcgaattttggggacactattttacaatctaatgcgtctccggttgctaaaagtatttgggcgactaggaggttcattgtcgataatagtgtttggcttttgggtatcgatgctaatgtcaagattggtagccaacaatggatggggactgatggggaggtaatgaccttgggtgatttaaatcctatgattgaggaagggatgtgtgtgggagacttgattatggaagatggtaggagttggaatgagaacttggtgaattcttggtttcgtccagatgcggctgctgcaattctaaagatcacccttccttttccttatgtggagactcggttgtattggaaagacgatccatcgggttgcttctctcttaaaagtgtttattggcggttgaaccaaaatcggtttgattgtattgatgtggtttttaagagtctttggaagagtcacattcacgagcggttaaagatttttctgtggagacttggccagaatgctctcccttttggatgcaaagttgcttccatttttggttcaaatgtaggaccttgcatgctctgcggtcttgatgagatggatgtggtttctcattttgtttcgggttgcaatattactagagcagtgtggttttcatcacagtggggggttagagtggagagatgtaatcttactaatggaagggatgtgttagcttggcttgtggacccttcttctcttacccttgatagcagcgggtgtgaagatttccttctttatggtgctttgctgtaccataaattgtggcaagttaggaataatattttccataacaaagggattctggtgttggatgaagtaaaaaaatcaatagagaaagggttcagggagtttaaacagttaagattgcagggaggaattgaagatccgcagcaaggggggatctgtgcgactcgttgggggcttccgagacctgcaaggatgaaatgttttgttgattttgcttcggcttctgatgggggtgctgttgcagctgctatttatgacatttcaggcactatctttgctatagcagctgcaaaagccgtggttaagtctcctttgcatggggaacttgaagctttgcggtttggttttaatatggcggctcagctgggggttgatgtgggaacgttctactccgacaatcaaactttggtgaaggctttcattgagtgaagttctccgcattggctaatgcactttgctttcaatcggattctcactttggtcgacaatgggaatgtgggggtttgttggacttctcggataaataatatggcagctcattctcttgcgagatggggtttgtctcatgattgtaatggtttacttcagttttgggaagtgagtccccatgtgctaactaaactattagttttggtttaatgaagttttgtttttcagaaaaaaaaaaaaaaaattattagtggtacaattttaataatttaatattaaattttatatatttttattt

SEQ ID NO: 23163 - DNA, 1331 bp, Cannabis sativa
taaaaagaacaaaaggaccctatattatatatagacattacggtattacggggcctaatatcaatgatattaaatagctaattattttctataattattattgaaataaaataataaatacatggcacctcatataaaaatgttaaaccacaaagacacatgtacactgtttctttcaagtttgtcttgtttactataaacccaatatattgttaggtcgaaaactatttagaaaaatctccacaaggaaatattattttgaatcatgctaaatgataaaatgtattttttattttttaaaatagtaaaaacataattttaagtttaatttttaataattttattttttaatataactaattttaattaaaataatttctaacacgaataaatacaaaaaatatgattaattttgtagataaaattattattattaagttttattttgacaaaaaattaattcagagtcttatttgtataatttttaaaaatataatgtctattttattatttaataaaacagaaaaatctaattaataacttttgtaaaataattttgtcggtataaactctataatttatatattttcctgttttatttcttgagggtgaagaaatagtgtagtgttgtattatttgctagagatttaggtcaaattagttttgttttttagccgtgggtactgggtagtgttgtagtttctgtattaaggcaaagacttgaaagacaatgacaagaggtttggccgttatgtaattgacagtattgagccttatcactttatttggccacatatatacatagctatatagctaagtacaagtactactgctggcaccaaccattaaagggcaataatacttgtaagtaaataaggccattataccatcaaatcctttacaagtcaaatagtatcttaccatcttatatatgccccctgcgtatatatatatagtagatcctttttatgaattaatggtgatttgtctctactctttagagaatatttactttattatatatatcgtggtttgggaccaaaagagattatggagagaagactgtttaacattatatacattcacttcatgagaattttcttcactcattaaattaaaactggtccaggcgtccgatcgttttaatgaactgcgtttattggaaattaaacctaagcccaatcttttaaaatggtccatacgagttagttaattttgctgatttgtagtgaattatggtaatcttagttttctaggcccaaagttacaattacatgagccaccatctttttgtaaaaaaaatatatttttacgtttacaaaatattttta

SEQ ID NO: 23164 - DNA, 6472 bp, Cannabis sativa
tgtgcaccataaccaagctatgcttgctaagcaagcttggcgaattttcacttctcctgattctttggtggcccttttgttaaaagctaaatattttaagcgtaatgatttttggcatgctccggttggtcactctccttctttctgtcggcgcagtatcctttggggtagggaacttctggttaagggtcttatatggaaaataggggacgacacctcggtcaacatttctgaatccaattggctttctcttcgggaaagtgttattttcaaacctggcctatctcctccttctccaactgtttcttttttcattactgaggacaggcattgggatattaccaaactaaaattgtattttgacgaggggatgtgtaattccattctatctgttcttattgatccttgccataatgattgccttatttggaactatcatccttcaggttgctttactgtcaactctgcgtaccatctggctaattctaattcttctgctcttggtttctcaaatcctgctgtgtataaaccttggtggtcttctgtttggtcgtctaatataccccctaaaattaaacattttgtatggaaagcttttaatcatattctcccttcaaaccttaatcttttccatcgtaattcaatatcttcccccttttgttctatttgtctttctcaacatgattccaacacccactctctagttacgtgttctagagcaggtaagttttgaaaaaactcttcttttctcagttttattttactaacaaaaattgtgatattaagaaattcatgcttcgtggttttgaacattttgacaaggataaatttgcctgttttctgggtttgttatgggcaatatggaatagcagaaataaagccattttccaccctactcatgatcttgatttcagtttggaagtttctgtccgtagttatttgtaggagtacagggatgctcaatctctaatcagttctccgttcccgcctattcaactgatcaccacaaattcgcaggtcccaaacaatatgtttcagcttagtgtagatgcagctctttctcccacctctaccaaacatggatatggagctgttgtcactgatattcagggtaacattgttgctggtttttctgttccatcgacttcaggcctcccaccaatttttgctgaagctgaagctctcaatcgtgcgttgctttggtgtcaggcagttcagtttcccctaagatctattgtctctgactgtctgactttggttcgtcgacttcagaagcattcccttgatcgatcggctctatcgggttttattgccactattgcttcctctttgtcttcttttccaggtgcctcaattggttttatcccaagaacagagaacacaatagtccacaatcttgctagagcaactcttggaacagacgaagagatggtttggaacaacctcagttcctttttgtgaagatcatttgtaactgttttcttgtctttctttggttactaatctttgtatttcaaaaaaaaaaaatgttgttattaataaaaaggaattgcaagtttaatctattttaaataattattatgattgttttaaaaaaattaattattatgattaaggaggtacgaaaatattattgtgtggctaaaaatattttaagcactaagattaaagtcttaaacctttttgttttgtttttttttttttttgctagttcgctcgaattttaaacaaaatcaaagcgaagaacctcgaaatttccaccgtgcagcagccgcaatctaacggtagcgattggctgaaaaggatcatcaagccgattattctagaatatttgccacgtggcactacctaaccctcactctctttcttccccaaaaaccaaaaccctctctatattattacttccctctttagccttaagcttttatagcgtagctcagcttattagcttcttctcttatcttctcactatttcaccacacaacacaatacaaaactccctactttcatattatcgtttccttcccttcccaccaaacttttcttcttattcttccactcagattagggttttcttttagggcttttcccaatcttctctccgataaatcctacccatcatggcttcctctacagctcaaatcaatgttctcggagctgcagtgcctggtggctcctacaggaagcccaatttcagaaaccccaggactctcttcttgggccagggactcggaagtacggcgtcgtttggtggcttgtctcgctctgtatttttgaaattcaataccaatggtaacagagcgaggagtatcggaccccttcgggtggtgaacgagaaggtcgtgggaattgatttgggtactactaactccgccgttggggccatggagggtggtaaacccactatagttaccaacgctcagggtcagaggacgacgccgtccgtggtcgcgtataccaagaatggggataggttggttggtcagattgctaagcgccaagccgtcgtgaacccagagaacacctttttctccgtcaagaggtttattggaaggaagatgtcggaggtggacgaggagtccaagcaggtatcttacagagttgttagagatgacaatggaaatgtcaagcttgattgtcccgctattggcaagcagtttgccgccgaagaaatctcagctcaggtatatacataatctcagctcaggtatatacataaatatatatatgtatatacataaatatatatatgtatatatatatatatatatagaaattgggtggatatgttttacattttgccaggaagataagtgataaaaaccattacttgacttgccttaccttaaagttattatgcgggtggtgttaccttaaaggcccttcaacccaaataataacataagtggtttttaggtgtaccaaactttgtttttgagagtaattggttgcccaatactgatattgattgtctgaattggtttttcctgtgcaaacctacttgtttggttgtttaacatagtatgtaaacttttgctaaaaccgcatagcaagtttttgtgaaagcctctgactatctacttagtgcattaaactcagctatcgtgtttagtttcacaacaatgttgaatttcaaagccaatgcaacctgattttctgctgttcctttaataatgacgatcttcattttcgttgtggtgtaaatggtttaggttttgagaaagcttgtcgatgatgcttcaaagtttttgaatgacaaagtaacaaaagctgttgtcactgtccctgcatacttcaacgattctcaaagaacagcaacaaaagatgctggtcggattgctggtttggaagttcttcgtattataaatgagccaaccgctgcatcattagcatatggatttgaaaggaaaaacaacgagacaatcttggtttttgaccttggaggtggtacctttgatgtgtcaggtaaatgatttcttaagtaatctgctggtctaaaactttttgtgctctacttatcactttcaagaaggaattaatcttctacccgtgatgatattctgttgacccttttcttttgttccagtgttggaggttggtgatggagtatttgaagtcctgtccacttctggagatacacatttgggtggtgatgactttgacaaggtatgttactgtgtacacgtctttgagcttaaagatttttttttgtccccttcttcttcctccttagtctccttttgctgtgcattgagtatgaaaagatgattctcaattatcatgaaatctgtgcagagaattgttgattggctagctgcagacttcaaaagagacgagggaatagatttgttgaaggataaacaagctcttcagcggctaacggagacagctgagaaagcgaaaatggagctatcatctttgactcagacaaacattaggtacattgatcatgtttcaataatttttcttattgctcccttcttctcactggtccctccttcctcaaaatagattgttggtttttacttacgttatcttttttgtcttgcagtcttcccttcattactgccactgctgatggccccaaacacattgagaccacccttacaagggccaagtttgaggaattgtgctcagatttacttgacaggtatctaatgctgtttaaaactgagtgtatgagttttggtgttttaaagttttgatttttgcacataaaattttaattaagtagaaggtctctctctctctctctctttctctctctctcaagtcaaataactttaacctgaaattattttacaggcttaaaacaccagttgaaaattccttgagggatgctaaactctcctataaagacttggatgaggtaatcctagttggtgggtcaacccgtattccagctgtccaggagcttgtgaggaaattgagtgggaaggaccccaatgtcacagtcaatcctgatgaagttgtagctctaggtgctgcagttcaggtgggccttattaatgatctgtgtgatttagtttgtgattatttatcaatttctaatgcaaaatcaatggggtcatctttaacatgaattattgtttctggcccttgtttctgatgctgattgagattcctatgtttttactgtaggctggtgtgttggctggagatgtcagtgacattgttctgttggatgtaacaccattgtcactgggtttggaaaccctgggtggtgtcatgacaaagatcatcccaagaaacactactctgcccacatcaaaatcggaggtgttctccacagctgcagatgggcaaacaagtgtggagattaatgtccttcagggtgagagagaatttgtcagggacaacaagtctcttggaagcttccgattggatggtatcccacctgcgcctcgtggggttcctcagattgaggtcaagtttgacattgatgctaatggtatcctctcagtcgctgctgttgacaagggtactgggaagaagcaagacattaccattactggtgctagcactttacccagcgatgaggtatattagtcttgtcaatatttttcatagccttctattaggtttaagaaatatttgatgccttttttactttgtagtgactgaatatgaattgaaatttacaggtggagagaatggtcagtgaagcagagaaattctcgaaggaggataaggaaaagagagaagcaattgacacgaagaaccaggctgattccgttgtctaccagacagagaaacagctaaaggagctgggagacaaggttcctggtgaagtgaaggagaaggttgaggccaaattaggagaactcaaggaagccatttcaggaggatctacccaaaccattaaagatgccattgctgccctcaaccaggaagtgatgcagctgggtcagtccctatacaaccaacctggtgctggtgcaggacctggtgctgcccctggtgcagggcctacccctggcgctgaagctggcccatcagattcatcgtcccagggaccagacggagatgtcattgatgcagatttcaccgacagcaagtgagatggctttgatatagttagttgaacaatccgtagcttttttttttactctttatttgtcaagtgtttattaaagctgttttttgcggggggattggatgtggttattggcttacatttccagccatttttgcttcgtagaggattgatcttttagaaaggaaaaaaggaaaaaaaagaaaaaacagcggatgaattgaaaatgccatacatcagtagatgccccaaagattagaaatgtcttggtgttgacgtgaagatgttgaaaaaaatattattcggtcttctatttttcaaattcatttagaataaatatatgagtttcaatttgtattttaatctatattataggatgtagttttctttatctattttatgcctagcaaactctaagaatagactttggccttagactttacaccatgacagaatatttcatcataacgagttatgcaaatctcaaaggagctattctagcaagtcaaagcagcaaaatatcatgtcttgactcttgagtccgagtaaatggctaatttattccaaaatcgccttaagttcaccatcaagaagattaaaagaataatcagaaccagaataaactagcatctatgacagagccctgcatgtattgaagcacagcagcaattcccatcaaatggcatcaatataacaatatcttagagtaaaaggaacttcctatgaatttaagtttgaggcctgagcatgggctgggttgatagtatttatatgaccaatccaatgacttagagatttttttttttgatgaatcaaaaagtatattatgtgtatcattagttggaattgccgtgggcttgggaacccgtgggtttatcaattccttgtggatctagtggtccaaaagaaacccaattttcttttcctttgtgaaac

SEQ ID NO: 23165 - DNA, 6492 bp, Cannabis sativa
aacttactttcacctttacttatttttatttatttatttatttattgaaaaagaacaatatattacaacttgaagataagaaataagtactcgttacaatatatcaagatttggaacattaccattccaaatgacctctttctcaagttttaaagctgtcctaactaacttatgaggaacaacattaagattccaaaagacatgctgaacagaaacagtaggaaaattagagagaaaagatacaatttgactgatagacttatctttccacttatttttaactttacttattaaaattttataatcactctcaacaatacacaaaggaaacctaacaattgaacacgagttgagagctacaaccaacgcctttgcttcagccaaaagaggagataagttaccattcaaaggagaagagaatgctgtcacaacctcacctcaagaattcctaactgctgccgccatccctcttttacttctgctattgtccactgcagcatctacacttaatttaaaaaaacatgaagcaaaagtatgatcctctgaattcgctatacttcggccttcattctgtgctaactttgaactctgacccaaatgagcttcatcaaagtcatttaacagagcttcaatctgaaactcagctgctgaaactataggcttattcttgtaaaataaaacagtgtttcgcctattccaaatttcccaaagaatacataaaaagattcttaactcatccttagacaaagcatcaaaacccctaagaatgtattcactgatatcattacatttattatttaagtaaaaggtctcaaatctagattcactacactcaaaggaagctctagaacactctaaaagagcatgagacacagattctgaacttccagaataaaaagaacaaaaaggagaggttaggatttgccgatggaaaagattgagagcaacaggaagagtatgatggaaagccctccaaatgaaatgtttaattttctgaggaatcttaaggttccagagaaccttctaccaatgaaccaaggaatgattatcagaagaagcaggaaaggaagttgaagaattagctaaatgatatgtagaattcacagtaaagaaacctgagggatgatgctcccaaataagactatcctctagagaagaatcgccaattggaacaacaagaatggcagagattaaatcatgatcaaaaaatctaataaccaatccttacgccaacaaccattatcatcaataaaaaaaagaaactgaaggatctgggggttgaacattacctttgtaagagatgaatctccaaccaggaatccaataagaatgcacagtggagatagatttgccattacctactttccacagaagacctctcttaagaagatcacgtcccaaaagcaaactttgccaagtaaaagaagcacaatgacctttagaggcataaagagaggaattatgccgaaaatacttggctttaaacaacctggcaacaagagagtctggcataatgagaatacgccaagcttgtttagcaagcaaggcttgattgtgatgaataaaagaacgaaattccaacccaccagaaaatttttactgacacaggttcccccaagttttccaatgaattttccttttgccaccaaccgacccccaccaaaactgagccataagactttcaattttcctacaaactaaaaccggaattttaaaacaagacatagcataagagggaaaagcttggaccactgctttaagaagaacctcttttccagccttagaaaatagacgactattccaactatttaatttagaactcactttttgaataaggtagctgaactgagaacttttggacctaccaaaacattgtggaacacttaagtacttactcacaaaaggtttatcatccagacccaaattagtgtaaaagaattcagaattaacaggactggtattaggagaaaaaagaacagaagacttggaaaaattaacaagctaaccagtagctttatgataaagatcaaaagcatgtttaacagctaaacaagaatgagcagaggtcgtagaaaaaagtaaactatcatcaacaatgagaagatgagagatagaaggggcaggtcaacaaataaatataccatgaaaattattaatactctcctggtatctaatggcagcagacagaccttcagaaacaagtaaaaaaatataaggagaaagaggatctccttgtctaattcctcggctatacttaaaacaattagacacaccattaacaagcaacctaaaagaagcagtagagatacatttaataactagagaaacagaattaacagggaaatgaaaatggagcataatttcctgcacaaaattccattccacacgatcaaaagccttttccatatccaatttaattgcagcccaaccaactttaccagatttcctatgactgatagcattaaccaattcattagcaataaaaatattataaaaaatgactctattctgaataaaaacactttgattcagagaaataatattattaaggacactcttcaacctactagctaagaccgtaaacacaactttataaagagtagagcaaagactaataggcctaaaatctctatctttaatttattaggattctttttcattggaataacaacaattatagtctcattaattaacgaaagatcaacatattattcaagacagaaagcactgtaacacacaaatcaggacccaaaacaaaccaatttctttgataaaataaaacattcataccatcaatgcaaggggatttatccccaaccaattgaaagagagcatctttaacttcatcaatagtaaaaggctcctcaagcatctgaaaacaagagacaacaattcgagtactaacacaactaagaatttgatcaatagcctcaatgctagtaccctgggactcaaaaagatttttataaaagttgagaaattgagtactaatatcaacagttattacaacagaaaaaccattatcaagagtgatacaacaaataaagttgtttcgagttctagaggatgccttggaatgaaaatatttagtattcttgttcccagcttttaaccaatttaccctagagtgttgtttccaaaaaacctcctctttataaagaagagaaccaatctgagattgaatatgttgagcctcccgaatatctttatccaaaataggagacttgaaaaaaatgctatctagactacactgaagacaattaatatctctcctaaagttattattattaatgctccaatttttaatagaggtaacacaagaagactatttagagagaaatgattgaagagggtcagaaaaaatacgagaagaagcatccttccaacccaaccaaacagtatccccaaaatcagactcagcaaaccaaaaattttcacacataaaccttttgtgtctagggacactaaaagaaggatccttaaacaacacttttaaagctctatggtcagaaccataaaaccctaagtgatgcaaggtcgcttgaggataaggatttaaccatttctgattaacaatacaccaatcaaggcgctcaaaagacgtaccatgcttccaagtatatttattacctaaatagggtagaggaattaaattaaaagtgttaataaaattttgaaaattagtcatagcataatgaggagggttattcagattagatctatcattaaaagaaagataatcattgaagtcaccaaatataagccaaggcaacaaaggtgcaacatcataaagcctatttaaaagagtccaagtatgcaatttttcagaaacgtaaggagaaccataataactggaaatatgccaacttacattatcattcatattaacataacaatttatatgattagaggagtatttatttataattacatcaacaacagcattccaaaaaagtaacaaaccccccctaaactagttctaggcacctcaaaagcattctcaaaattaagcctagacttaagaaaagaactagaaccagctcctagtttagtttccataacaaaaagaaaacaaggcttatgctgcttaatcaaaagggagagatttcagaatgcccgaggactccccaaacctcgagcattccaacacataaaattcatttttctaggcgggattgctgagcaacacccaccggtacaacttgatcttcatcatcattaggaacaacatcttcattatcacttgaacgagcccgcttcaaaatgcttctgaccaaagtgccactggacacttcttgacgagtgtatgatctctttgtctctgaactaccaccaatagtaagaggcctaggtcgaataacagggacataagcaatcaggacagaaacaggagggagttgaaccccttttcctctatctgtatgaacaatggtaggggcttcagacatcataacttgagaaaccgcacagagaaggctttgtaagctactaaatagagaggaggagacaacagagttctcagcagaggtttgaataggtgatgtagtaacaggaatatcaatcctaggctgagtatccacatttccttgagctccagaaaagcttccagaaggaagaaactggttgacaacttcttgcaagtcctagttctgctgggaggatctaagattcatctcttcaaaagggatggagtttgacatatcaaacgggtcccttataaagaacgatttaggcaaagctcttatattatccttaaaaggaagagccgaaggcatacgaccttcatcacaggacttaaaaaacctcccacactcagaaaagacatactcaaatctcccacagaaataacagtaattttgcaacccttcaaacttaaagttaagccacttagtggttcttaatttccttaaaaagacttgcatacctctacggattggtttcgtgatgtcaaggaggacacggatgcgaagaaagagtcctgagatttctaaaagagttgttttatgaatatcaattagatctcctatatccttagcaacgaactgggcaagatgaggagacctaaaaccaaaaggaatagagtgaatttgaacccagaagggaacaaaccagagttgatcaggttgaagaatgtcaagcccttttggattggcaaaggccataaggcaatggtcaaagtgccaaggttgcccttctatgaccctacgcctatctccatcacacccaaaatgagctagaaaaagacccgaatgatactcagtaaagttgataggaaatgtaagagtcaaagcctcctcatagccttgtcaagccaatcaggtttgagagatttttgagtaagaatttcaaccacaaggtagcaagaatcctcaatgatattagaccctaaagagactccatcaaaatcatgaactaaagcttcctcatcattcagagcaagatgatgagaagagctacgaacagaatgagccatgaaaatggaagcaagaaaactaagagcagtagaaccagagagaaacacgaagaatatgtggataacgaagcataagacatcaaaacaaagagaagaaactgatatcgcattttaagagataaggaatatatatatagaactataagtggtatacctgagaatggagatcctctgtagatagtgaacagatgccaaatctccctccacattaatgacttcctggcgtgatctctcgagagaagaggtaatgatcacaaaaaaccctcattttcctatagaaacgacagattgaaagagaagatgaaaagagggtgaactgaaaccaaatattttctgatgcaatattaaatgcttatagaaacaacaaaaccataataaatacattaaatgcctatcgttgagagtaatgatgagaaatttttcattaattagaaaattagaagaaaatgaaattgaaatgggaataggacgcatcacaacgaatgagggactggaaagatctagagaaagagggataaaccctaagagagtgttccaaaactttttctccttggagtatttttgttgatgcctttacttattttttattataattcatttatatatattatgttttttttttagatttaccttaatttttcttgcacattcattcacatggtttaatgattaaattttaggaattattacatagaaaatataaattgatattttatttacaaaaatactttcataaggtaaagacaacatttataccttatatgttattttaattaccaaaataccacttacactatcaccacttacataattagacaatggttgcagggtggctgctgcgtggttgccatcagacgaatcaaatgatggttgcagagtggtcgctaggtggttgcccgaaggttgcatcagacgaaggcttcaatcagatgaaagtttatgggtggttggctaaagattgcatcagatgaaggtttcaatcagacaaaataacagttagcaaaatgtttaggcaactg

SEQ ID NO: 23166 - DNA, 2305 bp, Cannabis sativa
actgatttccaaaacgtggcttcttagagcattggggctctcttttgttatcactaccggaggctttggcttgttcttggaacctgggggtctgccacgtggcctgcggttgttgctgctgcttcctcctagtccgaagctttcgtggccggttgaattggggtcgtcgtcgtcgccgccgttgccactgtcttggtcgtcatctttgttgggatcttcatctgtgtttctgagctgaagcaatggaggtggtggtggtggtgaagacatggaatccactcctctcatggccacattaccagcccaccatcgatttgtagtcatattgttctgaaacaacaaattcaaagtagagttgatctctttctttagcttcttaattagcttattcttttgtcttttggactctttctctctctgtcttaagaattttcttagtgagaataatgacaagataccaaacaaggaaataataataatgataacaatagagattttcctaatctggcaagctatatctctctttgtttccttttttaattctatcttcttgtttgttttgtttgggttgatgttatttatgattgagataccaaataagaacactcccccaaatctatcataatataataaatccaaaaaatcttatcttttttctagtactctcttttcatcaaccaaaactagtcaagagtctatcttcttattatgacacaatctgacatttaaaacatgggttaccttgttttgtcatcaaaaccctaatcttctttcccaaaatccaaatactcagatcaaacaacaaaaacgccgcactaaaccaaaacaaataaaaaagaattgatatatagattagcctgttaggcactgttggtgcagttaaaattaaaagtaattttagtattatatttataaaaattattatattaaattatatatatatagattttaatatttaattacactcataataataaaatatatattaaaagtatctttaataataatatatctccacattatataaaaatataatattttattttatcttttttattagcatagaaaagaaagaaacaaaaagagaaaagaatcaactaaattgtacttcatcaaatctgaatgttacaatatgttgatagtagctgagattacaagagaaataaatacaacaacaaactaactaaccgtgattgagctaaccatctaactaactttctaactaactaatcaatgcactaatcaagcttaatactccccctcaagatggagatggactgcaaatgtctttcaatcccatcttggctttgaaagtattaaattgattaggaaagagtggcttagttaggatgtcaacaatttgatcttttgtagaaacatgaactgtcttgatgatgccttgttgtaccttctctctgaccaagtgacagtcagtttctatgtgtttggttttctcgtgaaacactggattagctgttatgtgctgggcagatttgttatcacaatataatactgcaggcctttcatgttcaactttcaattccttcaaaacagaaagaagccaaaccacttcacaagtggtgttagccattgctctgtattttgcttctgcagaagaccttgaaatagtgtgttgcttcttgttctcccatgagatgatggatgatccaacaaaaatacggaaaccagtggttgatttccttgtatctgggcaggctgcccaatctgagtcagtgtaggcatataatttgacttctgtatttgtagcaaaaaagattccttttccagggcaactcttgacatattgtagaaccctttgagcaacatgcaaatgtgtgactcgaggtgtggatagaaaatgactcagcttattcactgagtaggaattatctggtcttgtgattgttaggtactgaagtttttcaacaatctttatgtacaatgttggatcagcaagtttttctttctcatcttggacaagtttgagattggcttccattggtgtattcataggcttacttcctagatagcaaaggtctttttaacacttgtagtgcataaggtctttgagaaacaaaaattcctttatctgattttgcaacttccaaccccaagaaataccttaattttcccaaatcctttagctaaaattgagcatgcattctgacttttaatgcttcaagttcatccaagttattgttggctaggatgacatcatccacataaactagtaggaaaatgaatttgccatcaaaatagttgatgaataaggagtggtctatggctgaatgatgaaatctttctt

SEQ ID NO: 23167 - DNA, 1884 bp, Cannabis sativa
gggcataaaacccaacagttgtgtgatgtttgtaaaacttattttgattatgtaaataagtttaaaaagcaggatcgtgacctttttgtataattatatatttttaattataaaagtttaaagttaatcaaaaaatttacatttatcataatttttgataaaaccttttgattaggaaaggtgtaaattgtaattaaaaaagtcactgtagcgtgtctaatcattagggcattacaattttagtatcagaggccccaagttgtttacctaagactatcaagatatgtacaatcatcatgagagataagctcgactcactgttcagtaatttgttaatttgaaaaacataatgggaagcatgttagatgttttaatgtgttgcctaaaatccgtaaatgcggtatttagaatataatcgattgatgtctgacctacctgacttatgggttcgcaggcttagtcctataacatggatgcccatcgaaacacgagaagtcgtgatagtatggttgagagtaatggtattcggggagatcagaatcctttgaatccttgtggatgcggtagaggccatggaaggtttcgaggaggtggtcatgaaaatctaccacaagctcctcaggattgggagcaaaggtttataaaagtgcaagcccaaattaactagtaagatgaggaaattcagaggctgagacaacaggatccttctgtagtgcctccacagcaagtgccagctaccttggttccagcagtgctagcagaataacctgttgttgacaaccgtatgaagcctttttatgaaaggttttgcaaccagacgcctctagttttttttgggaggtccagatgtcatgaaggcagaacagtggctcacagtaattgaaataattttgaatttcatgggtgtcagcagaaatgactgagtgacttgtgccactttctagttccagaaagacgcactcgtgtggtgggagatggtatccctaaccccggtacgtcactactatgatttgggaagaattttgggatttatttagtgccaaatattacaatgaggttgtttgcagtgttaagagaaaatagttcattgatctggttaagggagaggccatgttagtgatagaatacactacaaagtttgaccgacttgctaagcttgctttgggtattgtgcccatggacttcagtaagaaggaaattagacatgatctggttattacaaaaaatgacataaccacctacgctgagatggttcaaaaggctctacgagctgagggactccaagtgctggtgagaccaccatgttgggattttatgccctaaataaaatccattttaatacaatcaaatttactaattaataaaagatcaaaaatcattttatgttgcatggttcacatgatttctttcatggttataagtttaatgtataaattttattaaatctagaacatatagatattcatgattttagtattgtcaacaatggaacgtaatcatgattatatatttcaaagttaatgtcccataatttgttagcacattggatttagactaacatgataatcagcgataaagccaacttacaccttggataagtgttatgtcatttcgaggacattgacaaagtatgctaggatcggatgtatggagtatacatcgaactggaccgatattaaacttggataagatatcataaatttaccgttatatctatctaaattaatattagttaaatgatcttaggttaatagatcttaatcctgatatggttaggttcgatcttaatggtattatttatgttcttagaattgttcgttaaagctgaccaatggatcgaccccatacttacatcttgggaacatggtaatttaattgagtggg

SEQ ID NO: 23168 - DNA, 2776 bp, Cannabis sativa
ttaagtgtataaaaatcaaaacataaaggggtttcgccgcaaattgctcaacaaaataaagttatatagtatatacataacatagaaatattattcatagaatgactaggttagcaatatatagagagagagagagatgtagagtggtatgtttaattaccttgaatggggaagtatttgaggccttgcttacataaaacaagtccttgaacagcaatagtagttattggaagtgtactcttattttcttgttgtggaactggtgatgctcccttgtagtttgatttggtgggaatttcttttggcttctgatcatgatacacaggttttgaaggagcataattggttttcttcttaatgccttcaggttgtgcatagtttggttttgtaggagtagattttatcttttcatctggctttggtttcccatattgttgttttgtaggggttttaagcttattaggtttaatatcataatgagcagaggcaaaaatgactaaggacaagagaagaagagaggtaatgcataagcttgaacgagccatatttgactaatttgcaaatgtaggagtgagagagagagggttaagaaggaaatcgtttgaattctacatgaaatcatcctcatctttataggaagaaaatatattgtttgtcatcatcatcattattaattatttacatataatatttggaaaaataaatataatacagaaaatggtagagactaacttgattgcatatagattaatcaatgatatttattactcttaatccatgatgacattaatgatatatttagtaggatattatcatttgtctcaatcccattttaagacgtgcgctcacataactaacaattatattgtgagtgtgtgtgacaatatggcacgttttgctttatacagttctatctatgcatgaccattaatagattttgtagaatactttgttattttgaaaaattattctatttttttttttccaataaaattcaaataggttgttgcatttagatgtgggtaatgatccaattcaatcaaattgaatattattgttctaattcaatctaattacaaaaaattagataaattaaattgaatttgacattaaaagttggattaatttttgatgagttatgaataccaatcttaaaaattaatccaattacatttatatattaaaaaaatatttatatttatttatatataataaaaatattttcaaaattaaaaatatatattttaattattattctttttaagaatatatattttaattattgttagttagtagttttttttttcttttttttttttgaatttataatacttgattgttttgtgtgtttgtacatgattttttgttttattttattttattacttgatatagtgtggttgtttaagttatttgacatgtttatggagtatttttttgaaagcaatgtttatggagtattaaacttaaataattggtaatatttagtttttacttatttttcttcatatttttaagttaatattaaaagatagctatgtaattaaatgtccaattgatgcgtgttgtgagccacaataaatttactaatatttatttcaaatacctctaattatattagtataattgtaagtaagagttgatcccacgagaactatgattaattaattattcaaaaattagtgacaaaaattagaaaagggagttttgagagtgtaaaataacataaattaaaattgagactacgatatgagaatctagttaaaggttattttcgtcaccctcaacaatcattcataattcctaatgaatgtaatttttatttccaatcacaatctctctattacatgtaatcaaggcgaatcgctcaataattaactattttacctaattaagcagtaaattcacgaagcatgcaatttatttagcttaaataaaaatttaattaagatttatagaaatagattaatcttggtaataaatcaaggaagcatataatttatttaacatagtttctattcttcatcacaattaagataccttcgacaatattaaaaataataatttatcacaaacacatagaatcttagactattaggtgaatagtaatcttaagatgatggtagattaaagtaaaatctaatctagtagtcatctaaacaagattaaaataataactatgaaattgaacatagaagaatagaagcaatttgatataatgaaactagaaattaatatttaataatgaaattaagaattcatatccggattttgaaataaccttaactaaaagaaaactactcggaactagacattataatgataatcaaaataaatagtaagagtttaagaaaaaaaaaagaactatgatgaagaacacttccaagccgcggtctctatctcttctttgctctctctctctctcactctctcaattcataattaaaagttgctaaaaacaatttctaagagtcttataaatacttctaaaaatatcttagtttaaaaaaagataaaaatttgaaatctacagaattctcactaaagttatttttacatttttacagaattccacataaaaattctcatagtaactaattgagcaacttaaatcgcaattaaaatccacatagcaacttacattgaaactatcaaaaaaactactagaacaacttaaatcttaaatcgtaaattaaaaaaaagaaataaaaaaatagtacataaaataattattattataaatatcagttttcattattttttttttaaaagaaaat

SEQ ID NO: 23169 - DNA, 2686 bp, Cannabis sativa
gaagaggatcaattagatacaaggatgaatttagaggggccaagttttttgaatccagatgactttcgatgcccgatttcgctagagctaatgacagacccggttactatctcaactggccagacctatgatcgcgcctccattcaaaagtggctcaaagcaggaaatctaacctgtccaaaaacaggggagagacttaagaacacagaattggtgcctaattctgctttgaaaagacttatacaacagttctgcgcaggtaatggcattgcacttactaaattgggaaggaacaaccgagacctgaagggcacaactgtcccctcttgtcgaatagccgtggaagccatgaaattcctctctgaatttctagtccggaggcttgttttcggcaatgagaggcagaaacacaaggctgcttacgagattcggttgctggctaactctaaaatcaacaataggtcttgtttgatcgatgctggcgcaattcctcctctgttgaatcttttgtcatcttcaagtgaagcttgttcccaagagaatgtaatttcggggttgttgaagctgtctaagcaccctaatggccgtgtattgatcgttgagtgtgggggtttacatgaaattctcgctgttcttaagcatggtttgagctttgaagcaaaacaaacagctgcggcaataatattttacatctctacggtaaaagagtaccgaaaactaataggagaaataccagaggcaatcccagctctgcttgagcttataaagggaggaacagcttgtggcaagaagaacgccatcgtcgccattttcgggcttatcttcttcccgaaaaaccagaaaaaggttattgaaaatggaacaattccaatacttattgacattttaactcactcggacaaacctgatctagtaacagactcactgtcagttctatcaaccttagctgataacgtagaaggagccaattcgattcttcaagcctctgctttgcctctattcaagaacacccttcagtcctcctcttcacgtgccgccaaagagcactgcatttcgaccttactttctctgtgcaacaattgcggagatgaagttgtttcggtcttagctaaggaccattcactaatggacctactttactacaatacggtggatggaaccccttttgcgggaaagaaagctcgttcactcatcaaaattcttcataaataccgggaaacaagaccagtcatgggttcggcagttcaacacgaacagtttgttcgagcaagttaaggtttgcctaaaattcttaaatctttgtgtaaatatttgcagactaaatttcattcagggtgtggattctttttcctttttcttttagtttagggtattttttttttttcttattattggacattagctcgagttttttcaagagctaaacagtaaacattgtcgttcgttgtgatcagtgatggtgatggtaccactgcctgccacagtgtggtgtttagattctttttagatggtatggactatggagattcaagttagggatcaataatttgtactttggaacttcctattataaaagaccaaagactcgatttaatgattaattccttcactttataggctaactttgtcgttttgccaagtacacgtcgttacaatacacggaaatattatgtcgttttcttgttttatgtttacaggattttttttccttaccaaatcatgcacctgaattaattttttgtctaattttattcaattttactttttcattgtttatgtactaaatcatgctccacaaactttgatatctaccaaatcatgctatatgtattaaatcatgacccttgaatttttatctatgttagaattttttttagacaaaagtctttaaatctaacaaattcaggagaatttttaaaaaccttaaaaattcaagaggtataatttagtacttgtaaaaattcgggagaaaaattcctaattagccttatataaataataaaacgatgccatgccaattagtccatctatttatgaattttaatatgataaattatccactttgtaccatttaagtgccttatagcattgttaactattattgaaattttacactaaatactaattttttttaaaaaaaattatatttatacttacaaagaaatttattttcgtactttctctactaaattgtttttactttttactactttttacttattaaaccttcacttttttctttctgtctcttctctttctatttctcttttttttttttaattctctctttttttttctcaaattaattattttttcttcgtatatatataaatatagaacaccttttaattggtattacatattgatgggtactaaacaaatttaactataaatattaattttaaaatattaaaccattagattttagtctaatagcgaataataaatgagaaatttaaatttttatacttaatttagctacttaattaaaaaaaatataaaaaaaatacttctttttacgttatatcaaaaatatatttatatgaaaaatatttaaatcaaattcaactttttttatcattttttttacgggaaaactttttttaattattttttttcaaatgatggaacaactctaatgtaaaaatgagaagattttctaattaaatagaaaaattaatcataa

SEQ ID NO: 23170 - DNA, 1990 bp, Cannabis sativa
tatcatctattacaaaatttagaaatagaaaataaaatacaagaagagtaaaaggtaaagagagcaaactattagcctaatctcaatctctttcatttcttgtacttcttctccatttcttcattttcttttcttcattctcttgagtttctttgaataatggctgccaagaattgtgttccccgctccaaatggtgtaatggaggctaggttatattctccctcttttttacaaaaatatctttcataaaaatctattcctcatgtgccctaggaattttctagagactttctcacaaattttcttatctaggggttggagtcactttaatttctattttatttttatatgatgttctattgatttcttcctctttattttaatgtatattatttatgcttaatgtttatgaatactttatcattatgtgcatgtttttgtaattttaatttgatattcgagagatgagagttgaatatagtcataggttacatattggaggagagtactcgtatgacttgtgtaacaaatagggcattcattcttaatgtcttttatttgttaaaatttatcacgtatatgtagaaaatttacatgtagattgaagttttataactcgaaaaagaatatgattcgttttagttaatccactattaaaataggaagaaaaaattatagaacgaatttgtaaaataaatagattgacaagtttatgaaattaatatcctaagttctatttattgatagttataatcattgtttacttactttaattttatagttaaattcttttgttagttttaataatattttctcaatctttgtttgccaaatagaaagtagaaaaaacaataattggtacttggtaatagtcttcgtaggatgatacttgtgcatacacactattattacttgaaacgagatgtatacttgcgttatgaatttttccagtcattatctcccatcgaagaggccctcatcaataagaggggggctcatcatcatacgctttgcaaggtcaagcaaatggcacgcttgctagttgagtgagagagtggagcaagtgagagtgttagcgtgtgtgagagaggggagtgaggggcatgcctcatgagggattgtgggtgcaagtgtatggcccacttgatgaggaagtaggcaacgagcctaggcatggcctcatgtaggtgtttgcttgagagcgttgctcacaaggtgagggaaggtgcagcgaggcaaggcctttcgtggtcaataggtgttgggaggtgcaacgagttaaggcctcgatggctggtaagagaaatgagcaggtccttcaggtggtgcgcaaggtgaggggaggtgacccctttctagggtcgcgtggtgatgacggggtcccatcttgggtacaaacggtctattgtgtcctttgatgacttcccttaattaatcacttcttgatttgggatgacttcataattaagcttgataaatttagacgtctactcttatcataaataggtttcttctcaaaattaacttcctgaggtgtacgtcttccattatgtatatgtacactacatgtttcacaattcacatatatagtatagggagcttctacggtgcacccaccaaaaagggatgcataagtgaactcccaactattttggcatgtaggaattttttttagtttttttctctgtacgttatagttatttaaggcatcttgaaaaatttcgagcaattcagatataaaaagaagtgttcaaaaattttattttacacacgtataaaataaaatagttacgcatgtaagagactgtttgaaccccatttttgacgtgttaaaagataaaatattgtgagcaaaagacaaattgactggcggtggagttgcggctcctgagcctgttttttttatcttttaaagtataaattctaaatcttttagtatcttatagggaactttattagcctatataaacacattattattagtgtttt

SEQ ID NO: 23171 - DNA, 2098 bp, Cannabis sativa
  modified_base (50)..(69): a, c, t, g, unknown or other
  modified_base (1080)..(1088): a, c, t, g, unknown or other
atatcttacaaaattttgagaaattctgaataatttacaatatagaaaannnnnnnnnnnnnnnnnnnnttacacgcgtataaaataaaatagccacgagtacagcacactgcttgaacgcaattttcagcgtgttaaacttttttgaatttcttaaaattttgcaagatgtcttaaataactataatttacatgaccatgagaaaaaatttgactaaaaaattatttcgtatactaaaatagatagagatgtatgtgatgtattatagaatttcccaaaaaaattaatatggccctatgttttatactttgtggtggatgacttttgaggaacgactcatttcaaccctttattatttgaactagtgcatcacgctagaaagaccactcaattaaatgaaagaccactcaattaaatggtgtaattaattgtttgaaatttaaccttttattttatttaaataaataaataatttatatatgattgagaatattggagttaagctgttgacacggccgaattgacggaaaataatgctcttactctttcattctatatggctatgaccccatcataagcaaaaagtgctttttatttgagtaagttgttttcttcaatttaaaacacataaatatcaccaatcaccgttgacttagactacaaaaaaaaaagtaatcttttactaatattatattataattagttttatgataaaaatatcttggttaaccattacaattttaattttataatttaaaaattgagagaaatttcacaaaacaaattggctacttagaattttttcaccttgaattttgacatgtactaaatcatgcctctaaactttttttgttgttaaaaattcccctgaactattgagattgttagatttaagaacttttgtctaattttagtaaaaaaaaaattctaacatggatgaaagttcaggggcatgatttagtacatatcaaattttgaggggcatgatttggtagatatcaaagtctggttagcacggtttaatacataaaataatcattgaaacagcaaaattaaatgaaattagacaaaagtctttnnnnnnnnnaatctcaatagttcaggagacatgatttggcacatgtcaaagttcggaggggaaattaattagccttcttaatcccttcactaaaaatttcatatttaattttcatttatgattataattatatatgtatgtaaattttgaagatccatattagatttattaaatattgggatgtaagtaatgcaatatttgtcatccagttatatttatacatattttagttaattagagtgaattattaacaggtttttatacatttgaaactattattaacttaccttagattactttaaattacatattgtgacttattcttataatttaataatttaggtggaatttgtattgcaatgtttttaattaattagtgtttccttaattaatgtttccattaatgttatttaaattattttggataattaacgtttttgtaatttgaaatatagataaaaaaattaaatttaaaatatgtttattttattttataaaaattaagcataaataaaggttttaaaatattagaggcatgtttgtttggattggatttggattaaatagtctaatcctatatttgcttctattttgaggttacacgtaggggtgggtttggataattttctcccttccacatttttttttctaaaatgaattctattaaacaaacgaaaactaacaaacatgcatgtccattatgaactcaacagtcgcacaatgaggcattcttccgatccaaacaacactagacttatttaccaaagcccatctagcaagagaatgaccaactttgttatacactcaggcagtggcagacctaaaatttaattggaggatgagcgtaaattttttcataaataaaaatattccaaaaaaacaagtaaatataaagaaaaatacaattcaatatttcaattaccaactaaaaagatactaaataccaagcactaaaaatcttctaatagaaaaaaaaaaaaaaagtaatctaaaacgatgttcaaaatatataacatact

SEQ ID NO: 23172 - DNA, 4225 bp, Cannabis sativa
agagcctgccggaaggattgctggacaagcctgagaaagccatggaagaactgctatctcaaacgaacaacctcaccgtactggatgaagatggatgggaaataaatgaagatggaggagttgaagtggggaagctgtgtgctataggacgcctctgttctaatcgcacaatgaatcgatccttgatcaaaacgattctgggtcgggtgtgggggttactggagaaggtctggtgtcgaaatcaaacacacttcaaagaattccatcttcttggtattctccttcaaatcgtcccaagatttgaatcgcattcttatcaagaatctatggtttttgaataatggtaccctaatcttggaccgtatgaaggaaattccatctaattgggaagcttgtctctctaggattcctttgagtggcagaattttgtccttgccccctaaatcgatcactcaaaagaacctagaaagacttgctagaatggctggtgaaatcatcgaggttcaaaaagcggatgttgctaggatttattctaagggcttcttcacgttcaaagtttggtgtgatttggacaaacccttatgtccgggcttcctctttccctatgaaggccgtaaattatggctcccattcaggtatgatcgcttaccttttatgtgttttaattgtggttgtattggacatgaaatgaaggtttgcttggaacctaccggacgagtggtggaagactcaaataatataagacaggggtttggaacatggctcaaggttgatgataagaaggacataacaaatatttttgggaaagggaaactgggttcaggttcgaattataattctggacattctgatcgtaattacaatatgaatccgattcctacaaatttgagtaaggggccagatcaggggaagttgaagaactcggttatgttatctccttctgagattgaagtggcacaagttactcatgaagctggtattgaggacatggaggtgatcttggataaggcttcatcttatattgataagtttgtgggaaaaaaggaaggactgatcaatggtgtttcacaggccccggaggaaaaaagcttgatcaaccataaaagaaatggagattggcgtgaagagctgatggggaactctttttccattttggaatccccgaactctgttgacccacaattatcgacaacaattcagaaggctagttctatagaaaccgttcaactttatgaggtgccggttaattatgagagcaattttaataaatctggtctgggtgatgggaagactaaacgaagaaagataactccgaaacgtctcaagaaggatggaaatttgaaagcgggcttggttaattcagtctttggaatggaggaagatgggagcagtgactcaaggaaaatttcaagtttgacagatttgatccttgatactactttggaagcggcgaacccaaatgttttgggtcgccgatcgcaatgaatgccctgttttggaatgtctaagggcttggaaatccttggacattatctactctcaaatcccatgtcaaggagattcatcccgggatgatcttcttgtcagaaacaagactttcaagtgcagcaatggattttattcgagtgcaacttggttacgatggctgtttttctattgatgctaaaagaaagagtggcggtttggctcttctttggtctgactctgttaaagttcagatcaaatcttttacggtttctcatatagatgctttggtggaaaatgatctggggtttacttggcgtttcactggtttctatggaagtccggattcgggaggtagaaaagaaagttagaaactactgaagcggttacaaccgatgtttaaaggtgcttgggtttgtggtggtgacttcaatgagattacaaagaattccgagaaaaaagggggaaatactaaaccggcctacctaatgtataatttcagaaaagttatttctgattgttccttgagggaaatacaatctgagggaggaatgttcacttggtgtaatggaagagctgctaaccttgtgtttgaaaagctggatagagttttttgtaacccggaatggatggatagattcaaaatgaactcggttagactcttggattggagaaactcagatcataggcctttggttctaacggctcaactcagtaattcagttcaaacgggcacgtattcaagaggctctcggtttcactatgagcaagattgggcggacaacaaagagtgtcaagagatcatccaaaaagtgtggagtaatacagtttcagccaatcctctatcaaatctaaaatctctattacaaggttgtggggagaagcttcatggttggaataaaaggcaaaaacaagacctcaacaagagaagtaaagagttaagagataagattgagtggctgtctaaatcttcttgtcaatccgattggcttaccatgaagaagttggagaatgatctcaattttgtggaagaaaaaagggagatgtattggaagcaaaggagtcgggctctttggctaagacacggggatagaaacaccaaatttttccactacaaagcctcccaaagaagaagaaaaaataatattgagggcctttatgatgatcggcttcaatggcagtctagcttggaaaaaatttctgagattgctgtcagctattttaaaaagctattctcaaagtcgaatcacaaagttgagataagagatatccttgttggttgcgttcccaatcgaattagtagtgaggagaatagactacttctcgaaccatttgatgaacaagatgtaaaatccgccatgttccaaattcatcccttgaaagctcctggaaaggacggtctgccgggtcttttcttccgaaaaaattgggacttagtgggtaaggaagttaccgtggcctgtctcgatatcctgaataaccaagccgattgtagaagcatcaatgagactcttatttgccttatcccaaagaccaaacatccaacaaaaatgtctgaattccgacccattagtttatgtaatgtggtgtacaaagtggtgtcgaaatgtctcgccaaccgaatgaagcctagcctcaataatgcaatctcatctaatcaaagcgctttcattggtggccgaatcatacatgacaatgcaattcttggtttcgaaagtcttcattgcatgaggaaatggagatttggcaatgggaaaaaaatggccctcaagcttgacatatcaaaagcatacgatagggtggaatgggatttcttggacaccatgatgtcttgcctaagctatgatgagacttggatctctaaggtaatgaactgtgtccgttttgtgtcctctttagttttaataaatggttcaattcatggtcatttcacactcgaaagggggttacggcaaggtgaccccctttccccttttctctttttattatgttctgaaggcttaacttgtttattgcatgagacgaagagagccgggaaaatacatgggctgcgttttagtagcatggagcataatctatcccatctcctctttgcggatgatagccttgtctttttgaatgccaacttcgaggaaagtaaagccctaaaagaagtgttggattgttatgcatcactctcggctcagactatcaatttagataaatctgatctttgtgtgggagggaaaattaaagacgacatgacaaattcattggctgccttccttggggttcacctagtgaataatcacacaaagtatttgggcatgccgacatttgtgggaaaaaataaaaaggaggtttttggatagattcgtgatcgagtggaagctaaacttcaaggttggaaaatggggcttttctctcaagagggaaaggagatcttaatcaaggtcgtgattcaagctttaccttgctatgtcatgagttgcttccgtatttctaaaggcattctccatgacatagaaagcatgattgctcggttttggtggggagcgacttcaaagacccataaaatccattaaggaagttgggagaaaatgtgtaaacttaaagaaaatgggagtatgggctttagagccttagaggactttaaccaagcgcttttggcgaaacaaggatggaaaatcgtgaccaatcccgattgtcttttggctagggtcatgaaagctctttacttccccaacaacaatttttttgaggccaagttgggtcatttcgg

SEQ ID NO: 23173 - DNA, 3907 bp, Cannabis sativa
atgatagactttaaaaaagagggtaaaaatgaaagaggacaacataaaaagggtatagagtgtaatttcctcttttatactcacggcgaactcatgaaattttacaaaaattgatgtaaattttaaataatcaataaatatatatacaattaaaaaattattaaaattataacactacatatttataaatcaggaatacaatatattataaatgctaaaatataaaaatttgagggtacaaaagtttcatctaggaattatataggtccaccagtgtttatgatttttttttcttattaataatatatatgattaaagtatatttcaaatattttggtaaaaaaaataaatattatattggtaattaaaaataaataaataaataaaatatattaatataattatttatcaaagtattaaaattttaaaaaataaaattatttaaatttaacacaaaaagtcaaggtaagtaaaataaataaaaaataatagttaatgttgctaataaaataaaagtttggggattaatttaataaaaaaaaaattggagataaacttgtcaaaacgtaaatagtttggggactaatttaccaaaaaaataaaatttagagaccaacctaataaaatctaaatagttttggagacttacaaataaatttattctatatttatattatttaaactaataacaacccactttcatttcaaatcaaataaaaaaataaactaattacaaatatcaaatttaaaaacaatatattttttataacaaaaaaaaacctaaaatataaatgtatttattgtaagaaaaattaaacaatgaacaataaaccaatgcctaagaacataaaagaaattcaaaaaaaatatgaaataataaattaaaaatgtttaagaaaatcgcaacacagttgtttatttaccattgatctttgagtctctttatatatagattccatgttgatttaagaaacactacccatgaacataaatgaatttcttccaaaagctataaatgagcataaacctaaatgcaacaaaagttaattctaagcttttctgcaagttatgcaatctaaatgcaaaataaagtatgccacaaaaaaatacaaaataaaataaccagcctaaacaatgtcaaaatggatggcattaatatatatgagtttttggcgactaaatcctccgaactctcaattcacttgcacttaatcatctaaattcaaattttggtggctaaacctaccaaactttagtttagttagtaaatttagttttccatccattttcattagttaaatgacaagttggaatgtttatgtgtacactaatgaactgtcaaagcagtaatatcattcaatttatgaataccagctttcttcttcctagttgcattttcatcaaaccattgatggttgtacattgccatgtcttcaattaattcataatgctcatgaatgtacctccagatgcagtatcaataatggttctagtagtaggacataaatcagtataaaagttttgaaccaccatccacactaattcataccatggtgtggatatttcctcaacagatctttaaaatgctcccaagctttatacaaagattcaccatcattttgataaaaattatttgtttcttccctcaatttattagcagcttttaaaggaggaaagaatttaaataagaacttttgagtcagatcttgccaagtgacaatagaattgggctgcagagaattcatccacctttttgctctatcctttagagagaatggaaaaggcctcagtttgatagcatcatcactcactccattgtattttaaagtaccacatagttctagaaaattagccaagtaagtgtgaggatcttcagtaggcaacccacgaaattggagaataaactgcaccatttgcaagatagttgacttgatctcaaagttgttggcctctgctactaatggtctaatattgtacccttgtaagacttgcaggctcctttcaacgttagggtgagcttgacctccttgcataactccaagaattagatcattcccttcactatgcgctatctttaaaacagattgtataaaattgaattaagagaagaagaagaggttgaacaatcacattaatccgtaaaataaactcaagtggttcacataacaatctttaaaaagaaattagctactagaagtcattataaaacaatagaaacttaactcaagatatagattaagagatagaacattattggagtcctccattggtgccttctgttccatgccctcgttctataatcggattttctctcaattttcgaatggcgtccaagtttttccttcaactctttttttttagtgcaaaatgttgagttttcccaaaacaccaaggtcgaggccttgcttgttaggccacgaccttacaagcgatttctctttggtcaaatcttcgctgattctagtagttttccagtttctatttcttccatgacgcaaaggaatgtcgcggcatttagggccaaatttttatttttcttgattttccactttaattttgaaaagtgcccattattgacccttgactacgaaattaagagtagaaatgcaatctttgactcattaaagaaaatagaaaatacatcaaaactaaaagaagttttatttcctccttatattttctcaattttgaaaaaaaaaaaaatgcttgcagaatcactaaaattacaaaaactagagatctctcaacatttctcttcttgaaagacaaataaaaacaaaaagcaagtacaaatctgaacaacaaaatagtaaaaagactaaaacacaatcttacattagacgctaaaaaatgcataaaaattaaacttaacattcacaaaaaagacttaccaataaaaatattatccatctttatataccactaattcttcccatttctaagtaagaaaaatacaaacaaacatatcaatacaaataaagggtaaaaaattagacctcagcagacgcttcatgcggaggctacaacagttgtacacgatttgctttgttgttctaagttgggtgtgttcagttcaactctgaataatataagatccatccactcttgcctgagttttgtaactttctcattgatattgtctctattatatttgcaacactgttaatgtggttatttttaagcattgtaaaagagagaataatgtattggctctctgtgatggatagttgtccttaatggtaacttcatttcttaagaaaaagaaaactacaatgttcacaatcattgagttttcactaatatagaattccctattatatctatgaggtttttataaaaaataatggattttaggtgaaaatttataattttactgttacataaatttttttataaaaatattatctttttataaaataactgtaaaacaataaaatagaacaattaaaataataataaaaacttaacacaatgtacatacagtattaaaaaaactgtcccgtaataaaaaaaaaataaaaaaattggaaatttgtaaaaaaaaccccttaattaaatggttacaaaaatactaagtttataagttcattcattgtcaaaaaaaaaaaaataataatactaagtttatagtgaagtttgaaaatatgacccattttcaaaaacaaaagaacacaaaaacgtttaaataagctcatgaatgagttcggtcagtctctgtatgggccaaatgttttggtgacccaacatttgggcccaatatctttcattactaatccacaactaatgtttgtagttttcctttgaggaaattacgtagaatatggcatttttttcttaaatttcataaatatggaaaaattagagatttacttaacttatggcttttttacaatttaagttagttgta

SEQ ID NO: 23174 - DNA, 4065 bp, Cannabis sativa
  modified_base (242)..(257): a, c, t, g, unknown or other
taatttgatacaaattcatgtaaaggagtaagtgtgagtgagtgcttacttgttgtgggtggatgtctttgtgagaaggtacaactctttaatatatttttacttagcaatataaaatctgttgaacttaacttctaaggggtatattctgttaaaaacacaacaaatagttaaatacccaacaaattttaattacataaacatttatataaaataggtaagataagatatatatatatatnnnnnnnnnnnnnnnnatatatatatatatatttgtttacttatattaaaatattttgattagggttgattgatattattataacttaattaggtaagctaccgtttgtttgttaaattactattacatgtaaatcttgtgatcatgaagtagagtgttgctcttcaacttcaactaactaattcaaagaaaacttggacagtttatggggaaaagttaaatgcaaattagaaataatgtgtgacttcctattgataacaaattgattaataatttacaataaaagattgtttgtttataaaatacatgaggaagtaactatgtaatagtacacaagataataacttacaataatagattatttatttataaaatgcatgaggaagtaactatataatagtacacaagataatatttttgtaaggggataaatattatatttttgtgtgattttatcacaaaaaaaaaaaaaaacattatgtaatggcataagaaaattaagatcatgtgctatgaataaaagagtcagcaacatgttaaagtacataatctttaatcaaaggttattagtatgatttactaatgcccgtcattcgatacaagcaatttttattcggattgttgatgtagttggacatctttgaaaatacactgttaacccaagataggttttcaagaggggtgaattaaaattttttaactaattttgaaaatttaaaaaccccaaagataatttatgcaaatattcatgtttaatgtaataacaaagataatcacaagtataaacaaatattaaacttgaaatgtaaagagtttaaggataaaaattgcaaactctcgatttttataaggttcaaataaacaacctacgtcattagtcttcaaagccatggacctaattttaagttcaactatcgagccaagtaaatgggtttcactaacccttacaactgtggaatttttcaccaaacatactacaaaatcacatttttgtgttagttctaacgtccacaaaatttaaaaactggtgcaattaaagagctggaaaatttggtgtcagttatgcactgacccaaggttagcattattttcaaggttatatgcgttaattgtgaaccgacgcaacatctaatcaaaaaaacaaaagaataaaaacacaataccggtaacaggcatcgacccatttatataaaaaaattacctaataaatctaacctatctaacccactactagaaaagtaggctttagaggcagtttttaaggccttcaccgttggtttttgcaaaattcactaccaacgctgttttgggcggcgctaaaggggtataaaataactgtcaccatagggaccctatggcatcgattattatgaaataaccaattccataaggtccctataatcgacactatatggaccctaaggagtcaatttttatgaaataaccgactccataggggcttcttatgattttttttcagctttaattaacattatttttttttacttttattaaaaatctaaatttattaataaaaattaaattgaaaaattaaataaatacaaatttacattgctctaagtatttgtatattagccatctttttattcatgttttacattttataatatgtttttttgtatttttctagtattttagtatccttttataatttcttaatttatgttttgtttaataattaatatattgaataataattatgtttagtattttaatttttatataatttaatatttttgtatatttaaattttataatatgggtttgtattttttttagtatattaatattatttttataatttaagttatgtttcgtataataattagtacattgaatgataaataatatgtgatattttaatttttatgtaatttaatatttttatacatatttttttaaaaagaattctactctaagtaaatatattacactaatgttattctaaaattactttaattatttaaggattacctaaatatggaaaaaaaaaatatattcttataaagaaacatacctcataccaaataatgatgtgtatacgagacatcaaaaaagaattttgtactgaagttttaatagaataaaaaaacaagttagaagcaatcaaatgatgaaaaaaaaaaaataagagaatgacctaaactatgtggtgctaaaaactaaattgagtagagggcagttagtaggttcgaaatggcataattttttcatttcttaaccaattatgtaatgtgaccactcaatttcatataatgttttcaagaccaatacaataaagtaataagttaaggtacaaaatgaatggataaaataagagaaagaccaaacaatacataaactttttcaaaaaatttaaacatcaataacttttgatctagttatccgtttgaggcaatttttttttttttttttgaatttgggtattttttttcgcattctatgcatcccaaatagcctatggtagtttgaccaactattttgtccaaaaaatactattttgtatactaaaatcatgttatacactattttcacctaattttttgtgttttcttttcctatttgacctgaaataaactaatataattcttatgttaagtattagaatcaatgtttatgatgtatttgttaattttactacaataaatgtgcaatactaatttccctttatatctcttttaatatttaaagaaaattataaaagttaatttatttaaaatagttatttggtatagaggtaaggacttataaatatatctttttgatcacaggtatctttttttagcttattataattatcattaacactcaataatatctaaccttatcactcagcaatataacaatataatatttatcctaactattacaatactaattactaacattgtaactaactatcactacaacaaatttcttaattagcggcgaaattattagcgacggataaaattcactcctaataatggtagtattagcgacggactccaattttcgccgctaattgggggttttttactttttttaatattatttgcggcgagctgtccgccgctagtgcccaccggtaatagtattagcagcggggtctgccgctaatgaatgggcgagaaaaattcagcccattcagttcgaatattattagccgcaggggattagcaggggaccccaccgctaataataataaaaaatatttattaactatccgccattaatgcttctataattacctcatctgaccctcttctcccatttttttccatttttttcctctaaccctaattcccttcagcctcttccccatccgaccctcttccaccaccaccacgacacaccacgcgggaccacaacgacgtacctccaccaccaccgaataccggcacactatttcatgtaagtattttttttttttgttttatatttctgattttattttagttgaaaaattttaacgatataaattgtttttaggttttaaatttatatataatgtgtatttatatatatatttatttatataattaagtttgggtatatatataaatctgtgtataaatatatatatatagattattttagggtgtgtacagatttatttattatatatttttaccgtatatatttttgatttgtgtatatatgtatttttgatctgtgtatatatatatatatattttatctgtgtatattttttatatgtataatatatctatagtgtagtatatgtgtattatagatatattgattatttaaatgtatatatataatatatatgctttttttatttatatatctttatatat

SEQ ID NO: 23175 - DNA, 3065 bp, Cannabis sativa
aattttgttaagtcctaaatatatatatttctgcatgattatagtgttatcacactactacaaaaagtacaatttccgtcagtttctaagtatcatttaaagaatttacgttggtttagaaaatcgacgtatatgccatagtcgcaaatagttttttattagcgtcatttttaaaatgacgcaaaaaactattatcttcatttaaaaaccgtcacaaaatgtacactctctttttttatcttctacgtcggtttggtaatgatgcaaaattgtatgtggcattttcaaaccgtcacaaaaaacttataccgtcggttcaaaaacgacgtataaaatgttgaaatacattttttttcttattgcgttggttataaaatgaaacataaatgtaaggaaaaattgcaaattttcatgaaatttacaattaaaaagatgcaaaattgcaattaaactcccaacaaattataaatcaaatgatacgcataatctaaattggctttgtggagatagattagcctgggagacgtactaaaatgaatccacttattagatcctttaccccatagtcattgatcactttttctaagaataatgtttctttttcatttttttctttccaaatttttttctcactgcacaagtcattgatgcagagtataaccgacataatccaagtaccttaagggtcccgcagctggggtatgcccattacaacgcttgtttgttatatattaattagatatcaacactacaaagatatgtaaagaaattactcgaaaggtcccccttaggaattaaaaccatagacccgaccatcaacatagcctcatagatgcaacaaacaaaattagaagactttaccttttatgctgaatttcaagaagaaatgaattaatgaagaatttacagtcatagaggactgtaatatgttaacagatacatatacatctacataccatgttgtaattccctccagtattagttagcattcccagtatcagtttatacatcaatttttaagtaacatatcttacaaacaaaaattaaatgatgtagtgggtacctcaaaatatgaaggatgtacctcatatgaaacattgcctccagacatggatggctgacgaagagtagcattacaaactgccccatttgccgagagaatacaaactgtgcggcgtccttcctctgaaagtgatataacctttgatgctacatcctgcagaacaatagcccaactcaatcagaagcacatctatttataataaatccttatgtaggttaaggatattatgacataatacaaattatgcttaagcaaaaatgaaagaggtcccagccaaacccgaattggctgatctgattttgaatgctatctattcagctactctctaccaattgttgagcaatagaaatgattgtctctttaacactatttgtcactcagcttcctttcttagtaaagagattaaatgtatggttaaggctagagttgttgggtttcattgtatcaatgctaagggaaaagattgttatatttaaagggtagtgaatagttggtagctgcccttccccttgtgtggcggttggtttttgcctccggtctttgttttgtatcttgtttgttcttttgaataaaaagtttcctttggttcaaaaaaaacaaaaaaaaaatgaaagaggtgaacaattttccttgcattttttttaaaaaaataagaactattttattggggaagaggggttttacgaccaaaagatggtctggtatagtcattgtttacaagaaaaaaaaagtctaactcccaactaaatctgaaaataaacaattcttcgaaattttagaatcataatcaaaacagacgcacatgaccgtgtcccaaatagaatttaaatccacacgactcgccaacttcaaagatttttcctattccttttgaaccaaagagaccagcagatagccagaataacacattgtcacatttacttggccagacacaagaaactttcacttagaaaaattattttattatatatacatatttttttttaaaaaaaaaaaaacaaagaaaaaaagaaaaaactcattagatggataatcgaatgagctgaaaagtatgtacaagcaatgttttagttcactgactagtgaccataatccttaaggcactacatattttgtcatgcataacactgaagttccaaatttactttaccatgctccatgatataagcaaatcaaagtagtataatgatcatcctttactcacaccctcaaagtgataactatcaattacacccagaacatagaaaatataatgtttcaatcaattatatgaggtaaaaacactacacatgatgttaaaatttaaaagaaattactaaaacacatatgcaggtacacacataatagctgtctctaataagtacattgttggaatttttaaaccaaaatgcttttgttttgtccaacacactttaaagaaacaaaattaatataaaatgcaaaagtggaatttttcaaaatttactttttttttatgggtccagaaaataaaatggtaattttataactaacacaattcgtaagctttgtttcagtccaatattaagagcccaacaagaaatgcagcccaagaggaaaccaattcaatcaagagtcaaagactctttctctctccaatcaatccttcggtcaagggagtcaaaaccccttttctttctttgtttagttcggtcaaagcaaaagagtcaaacaagactctctctttcacttaccaatccggcccaataacaatataaaccagcccaagagaaatcaacaaactctaatgaaataataaaagggaattttttagttttatacggatattgtaaaataattatacaaatagtatcagccaaaataatacacatttaggaaggcatttttaccgaaccataaaataaaagcccaccaaatcattgataactcaccctccctttttagttgggaaatttacatatatactgttttttgaccaaaactttacaaaaatactggaacacggcaaaaacaacttttttac

SEQ ID NO: 23176 - DNA, 3502 bp, Cannabis sativa
caagtcaataccaaacataatattatatattaaataatactaattaatataaaacaatacaattcaacacatataatacaataaaatacaacacggtataccacacaaaccctatacattacaattatcttgagagaatacttcatcctgtataaagaaaaatacaaatatatattaatggttgtgacatataaaatttacatataatttttttaatcaggaaatttctcgaaatatacactttggaatacatataataatccatttaaaaaaaaaagaatacatataataattgtttaaattttagatgtgaaaatatgcctctaacatcactcaatgaaaaaataatatactgagaataatggtgtcctgcgttaaataaatttcctcctaataagttatactatatatttcctttgcaagcaatccaaacatattctccatcctattggtattaattaaatataggaaattaatttgtaacttgtgttataagtaatcttccaaaaagacattttctaagtaaaactgttttccacaataattttgcaagaatttttcttttaaatcatcgcagtgttttttttttttttttttaatacatgttttagtaaatttcattacttataatattggtgtatatgtaggaaaaaatttctatgtaattcacttagttacacttaaatctttatatatattttttggaggtaaaaattcttatttatgtagcttattttattgcacttaaattcctatataattttttgatagtaaaaattcttatgtagttcatctttgacaacaaaattcacaatgtaccgttacacatttgatgcaacattaatctctaaaatgataacaaaaaataaactaacaacaaaatgagtacatagcaatttttaccactaaaaaattacatagaaatttaagtgcaaccaaaattactatttaaggatttttgctactaggattttagatacaacaatgaaaactacaaaaatatttataccgcaaataatatccctatgtataatactagttagctagtgtatttaaattttgttctctcaaaaaaaaaattgtgcttataatttcactactttgtagttttattaatataaaggttaatcgaagggtagcatacccatattaatattagagaattgctaaaaagtattacgggagcctagcaactttttaattaagtatctggtctcatataacttaaaaaaaaattatttttatggaatatcactaactaattatggaacgctacttataaaaagtcttaaacactaaatattactggtgtccaatagcaacattgttaatattattttacaaaagagagagtcttaattattaagactttattataaattaatgatcagaaattgtggatattaaattatatttaaaaagatgcatagtttcattaagaatacccacttactactcttccttttttctatttaagtaactgctaataaatcgaatcaaacacaagcagagtagcacaagcaaacacacacacacaactcatactcatgagctaactttctcatatctttctctctctttctctgtctgtctttctataaatatatatataacattcatgtattttgttaatttgaaaatggcatacttagatgaagtgtgtatgaagagattattagtagtggtgtgggttttgttggtgggattattttcatgctcagctttgggtcacgaccaaataaatcttaatgcggatcagccactctctaaaattgccattctcaactgcaagcttgctcttaataacaactcctcttctatttatgctaaaactattgatcttcaacccaaaaaggtatttctaaatattatatatttttatacaaaaattgttgagttttcattgtttgtagtcactacatatttttaaatatgtcaaaattagaacccgagtttgttttgactatattcgtacgtgcgtactaattacttataataattattactttattaacgaataactcacaaaaacaagtaattatccatttaattatcaaaaccagtaattaacatgctttttaagaatttaaatttccaattttcaagtcccgattttccttgaaatttctaatacaaaaattagtatatatcataattttacaaaaaaaaaaaaatcagaattttgaataaactgtttgaatttaaattattcaaatttttttataaataagaaaaattgcaacttgttcactgacactaaaaacaaaatatgcatatattataggtagtaattacatattaaatacttctatagcggtactctatgtatgtaatattaattaatcaattaattaatgttgtgggtatatatactgcataattagggtaaaaataataatggtattgaagaagatgcaaaatgggtgagtgtgactcttaagaattcaaaaccagccaacgatgattgggttggtgttttctctccggcaaaatttgagtaagtctattcataatattctaatgaattgtgtcgttttttaattagtagtaccttttgcttttaatatataagtcatcataattgatcgaggcataaatgacttgatgataataaatgaaattaaatgatcatttttaatatatgtataatttttatgtgagaaatgctaaagggtaggtgcttaacactctcttatgtgttaatatcgttattggtccaattaagtatcaggtcgcatataatttaatataataatttttagtgggtattgctagccaatcacaatgtgacatgttgagaatgtgctaaacaccactgatgtctaataacaatgctcaatatttatgaagatgatgatgaaattatgtatatgcagctcctcaacatgcccaccaaatggagctaaggatagcgaagtggaaaaaccatacatatgctctgctcctattaaggtttgtgttttgtattacttttttcttttttttacacattttgtctctatttcaattattctttttttaaaaaaaaaaataataaaataaataaattgagtgccttcaattaatggttcttgcatgatttacttttttgggcaatgtgtatttatttttttatttttttgaagagtgcaatgagtagtttagtcaactatattatatataatctttgatcggaaaaactaattatattatctaataaattagactaattaagttttttactcataaactttcacatgtattaaatcatgtctctgaatttttaaagtcgttaaaaatgcccttgaactattaagattgttaaatttaaaaacttttgtctaattttaataaaaaattctaacataaatgaaaattcagggtgcataatttagtacatgtcaaaataataaaattgtttagggtgcataattgagaaacattgtttagtacataaacaatcactgaaatagtaaaattaaataaaattagataaaaatacttaaatccaacaatctcaata

SEQ ID NO: 23177 - DNA, 3081 bp, Cannabis sativa
  modified_base (2169)..(2181): a, c, t, g, unknown or other
  modified_base (3042)..(3056): a, c, t, g, unknown or other
cgttccaaacgagccctaaaagttcagaaaatataatttggttcatgttaaaattcaagaaataaaaattctaattaaccaaaaaataaataaataaagatatttaagtacactagtgtacagtacacacaaagttatatacatacaaaagatcaccagagctctcaatatcatgcattaaagaaaaacccaaaaactggaaactcttttatcacttatccggttaatgctgattttttcaacagaataaaaattaaaatatgttaaattcgatattaaattatatcgataataatataataccttcaaattatatcattagcatcattaattgtttagcttttccttgttaattgagtataatacgactaattacataacatgcaaaatttttaattagacaaaaagttacataaattaactctctacaaaagaatattgtactgtaaatatatgtaaaaaaaactagcttaaaatagaatggccatgcttgacaaatatcatagtttggggctcaagctaaccctaatttgttttttttatatatataaaaaaaagataagcaacaaaaaaaaaatatatttcaatataataaaattataagaaagtcctatcacaaaagagaaaaacttctatttcaaccaattttttaaaaaaaatagtatcttatgtaattattctatatttttattcccataactctcgtgatcacaaacacagaaactataaacttaatccacaaaaagtaagttaaatatttactgcaaaatttgtaaatagatgcactaactaccacaaaatgtaaattttattttaatccagagattttaaaatcacttatttgaactgaaaagtactttaagacaaaacgatatttggcagggcttatttgatattaattaacatttaaaggtataactaaaaaaaataatatatattatataggtatatttttttaacaaaaaaaatcttaacatgtttgaatatttaatacagtagtcaatataataaaataaatttattgttaaagatatcaatttaattatttcaaaattattatatagatgttgcatgtaggccctccaacccaaaccctaggcaaattagactcgttcttccacacaaaatttaatatattataattattacttaacaaagactaaaatgattagtaacgttatataggatatggcgatgactctaatgtataggtcaagatgaatattataatatatatttattttagagcattgttattgggtaccagtggtacccagtactttctataggtgtcacccgattagcgatattctctaaaacttattttcttaagttatatataacccgctatataattacatcaatagctgcataacattaagaagggtgctagacactaatattatccaatagcaattctctttattttattgcgtatttatttgataatttattaaagtgattggattggtattcacactacacacaattccaagagtgtttattattattgttgttgattgtttaagtgggtgagaatgaataataataataatggtttggcgtcactgcccatacgtaatgcttccacctactgccatacgtgtgatcgtcacatgtgatgtgatctatggcatcttattgtactcatcacttcattcattgaatcatatatttaattatcaaaacatgtcactcttatatacaatatatactttcatacttttagggccgccacaacctttttcatttttgttttagttgcggtaaaatttttaatacttttactttataagtatttaattttttaaatttaaattttagtagtaaaattttctaaattagaaaatcattagcattttataatttccatctatttttaatgttaagtgttatgttgaattgttcacgtatatatctacgtgaacacagtgtaaacatgacactatttttattagtatacgtaaaaaaataaaaaaataaaaaaattataaattgagaataaacaatttttttctttttagtttttttttatttaaaaaaaataaaaaatatgaaaaaaattatatattttttatttctttctcgcatgttcactctatctctctatctcatttttttttcttcctcttttttcttcttcgttcagattctctctctctctctctnnnnnnnnnnnnntatatatatatatatctataatattcagatcagattcaaatgacacaaaataataataaaaagaaaaagatcaaacaaatataaaaccaaatttaaaccacacacaacagctcgtaacctccacaacagccaccgctcgagctcacctgagctccatcgcgcacggtggtcgtccaccatcaccggaaaggcatgcgaagattcacaacaagatttgggagatcttgtcgaggagatcacgtttttgtaactcattcttctcaacaagcctcggtaaatccaccgtgagggaaaagaactcctcatcatgaatatttcaatgaataagaaagcgtcagcaacttgcagattgatcaatcggaaaaatgttttgtcaagttgattggtggagcatttatgacaaaggacaagcagtttcaagatgtgtgtgatagacctgaccttcgagcataattgaatcgaagatgccctaacttatgtgagcaattaaataggaacacaccaaatctctgagaaagactaaaccaaaatgcaccacgagcatctgagcaagttaatcaaccaattaatgactcaatacaacgaagtgtcattcaattagaagacaagtttagaaggtatcaagaaaaagagtatggacaattgcccgggtataattcagacaaggaacccgaaccttttcatcctaatatactaaattcgcattttccaaagggatttaaaaatcctcatgttccgctttatgatgggaccaccgactcagtggcacacttgaatagtttcaatacaataatgtaagccaacaacataggaaataatttgcggtgcatctgttggaaatatattttaccaggaacttannnnnnnnnnnnnnnatgttgatttaacaacctaatattg

SEQ ID NO: 23178 - DNA, 3255 bp, Cannabis sativa
tttcaggcttacagcctctggaccatgctttccttatcatggatcctttttcaagttttcgcgactttgaacccattacgtttcccccactacacttctcggaggtctgcagctgtccatgctttgagcaggctgcattaggcttggggactcacgccagttctcgagttgaggctgcgccacctttggcaatgtgtcccttcgctatttttcctcctgtattggcacctgtcgaggcggttaaggagaagcctgaggtgtcagaggggagctcaactcaaacggcgacagcttattatcccgagtttgaggctactgctcagtctgagaattttgaagaggtccctatttttgccgatgcttcaccgtcggttttttctatatctgcttcttcctttcctcaagaattacctcgggtagtttcccagaatatatgccctccttcttcctccaaccgtcgagggtgggttgcaatgcggaggacatttcagcagagggaaagtttttctgtataggggcctatttgttttacatttatatatatttttagcaatttgtaagttcgcgtgggtcctttggtatgggtatttttgcaggccactactcccccagttttttgaaatagagtgaacactcttttcataaaacttttaatttttgtaaggaggcaatggtcctctgtttgtgtagctcaactccttttattaatgtccattttacttattttcatggctttttggcgagtactgttatttatggactcaaactttatacagatttttacttttagcatcgtgtgttttgtacgctttattttctgcttgtcgccttatgctttttgtggttcgtgtattctcatattgatttcctttcgtaaaaggtcttagttatgtatgcctttcgtgaaaggtcttaagtatcacagactttgcctttcgtaaaaggtcttaaaacaattatggttttgcttttcgtgaaaggtcttttagaacatctgctcttgccttctgtggaaggtctttgatcgtttatagttttgcctttcatgaaaggtcttagaaaaattatggttttgcctttcgtaaaaggtctttagaacttctgctcttgccttccgtggaaggtctttgaacgattatagtttttcccttcgtgaaaggtcttagtgttgcctttcgtaaaaggtcataattccatttgttcgcgacttaagtttttttcattctgctttttataacccatccttctttcattatttaaaggagaaaatacggctacagctacagtgaagtttggagtttctagctcataattatcatacgtagaattttttgaggtaccttgcattctagcttcttgtcatctcagctccatccatggaagccagtttgtacgctcctttccccgtcgagcataccacacggtacagaccttcccaattggtggatagcttccctcctcgggcctcttcggtattctggaaaatttttcttagaactagttcccccgagaggaagttcctgggtttaacgcttttattgtattgcctcgccaccgcggaacagtagttctgcatcagggataaagcgcattctcttctctcttcgacatcgtcggctgcttgtagtctgaggaaagtgttgtcttcgttgcttagttcggtttgcaaagtgggtacttgcatttttgttgggataacatcttccatcccgcataccagcgagaatggggtttcactcgtgctggtgcgtggcgtcgttcggttggcccataataccccaggcaattcttgggcccatcttccattagcttttttgagttgcttcttaatattatttatgatgactttatttgacgactctgcttgcccattgctctgtggatagcgtagtgtcgagaatatgagtttaattttccactgttcacagaagttcctgaacttgtggctaatgaattgggaaccattatccaccacgatctcctgtggtagtccaaacctacatactatgttttttcagacaaacccttccacttctctgtcttttatttgagcgaatgagtcggcttcgatccactttgagaagtagtcggtgagagccagcatgaattttttctgggcgggcgccgttgaaaggtgacctactatatccattccccatttcatgaacggccacgggctttggacggtggtcaactctgtcgggggggctaggatggatggggcatgcttctggcatttttcgcatttctgagagtgacctaccgaatcttcttggaccgtcggccaatagtacccatgtcattgtactctctgggttgtcactcgtcccccggaatggcttccgcactctccttcgtggacctctgttaagaccaactttcccttctgccttgttatgcatttcaagtacagcctctggtaggatcttttgtatagctggttttggagtatcgcataccttgaggccctcattacgatttttctcgcctgtttggggtccgacagcaatttgtcttcctttaagtattcaaggattggctgcctccagtcttaggatgtttctgtcaggatttcagcgcacctaacctcttcttctatcgaaatgctgggttctgggatgaagttgaatggtattgttcttgtgacgtggaggggggaagaagatcctaggccagcagggcgttggcgtgcatgtttgcttctcagggaatctgactaatctgtaaatagtcgagagttgaaattaacctttttacctcggccaggtagctggccatctttagctctttggcctccaaatcccctttaacctgctggactattagctgagagtctgactggaccaacaccctttcggcccccatctctttaaccagttttatcccatgaatcaaggcctcatattcagcatcgttgttggtggctcggaaacctaattttatggattgttccatcatttctccatcgggcgatagtagtactattcctaccccgctccccctgacattcgaggacccgtctccctttagtagccagtccctcccgatagattccttctcgcactggataggttatggagttatttcgactaggaaatctgccagcgcttgtcccttaatagcagtccgtgggaggtattgtatgtcaaactcgctcaactccaccgcccatttcatcaatctcccagatattttgggtttatgcaagacccgtttcagtgggaacgatgtcattgttggaaatttattttacca

SEQ ID NO: 23179 - DNA, 3245 bp, Cannabis sativa
tgactattcctattcaataaagatccactattcatccattattgagttaagttttctttgtcttatttcaattaagttcaagttttggttttgtgattggtttgagttttgatttgtatttcttggacattgttactattgtcacaacttattttgagggtgaggattcaccacacattgataagattaaagacactatcgcttattggccaggcacacaaaaatgttatgaaaaatttgaggaaaatgctcatcatcttggagtgacatgtactaaaaagttgtctcttgattgtgttacaagatggaattcaacatacttaatgatgaagacaattttattgtacaaaacaatgtttgagcgagtaaagcttcgtgatcggccaaagtataaatgtttgtcatcagaagatgatattagattagagctcaaaagttttgtgaaaggctgaaagtttttcatgaggtgacaaagttgttttctaaaactaagtaccctactgtcaatctgttattcctagagatgtgtaaaattaagaggaaattgaagagggaatgacattaaatgagttatttattaaggatatggcaactcaaatgatgtttaagtttcaaaagtattgggaagagattcgtgaaattatgactattgcaatggttttagatcttaatatataagtttttgttgctccaattttattttccttaactgtatgggtgataaattggttgttgaaattaaaaaggtgtgcaagctttgtaatgattaatctaatgaatacaaatataaatgtcctactttgagtgaaagcaattcacaagtagataatgcgtcatcatctttttcaacacatgatcatctatctaactatgacttatatgtttgagcttcatttggtccgatgaataaaaagtcaaaattagatctctatttagatgaccaatacccagaactgatgaatttttatatatatgcaattattaaaatataacaggaaatatcctgtgttgaacatgattgccaaagacatatttgctgtgtcgattagtactattacttcagagtcctcttcagcactgacgatagacatgtgactccacatcgagggagacttcatcctactactttggaggcattggtatgtactcaaaattggttgaggatacaaacaaggtatgtttatttatctcttattatataatatttttttaccatgtttattaattaataatactttgttatattattttgataatttttattatttttttataggcacaacaactaagttaatcactgtaaatgatcaagataatgatgtagatccgaatatgataattatttttatttttaaaatttattaattaaattatatttttattattgacacatttgttcttttgtaggaaccgtacacagcaaaccgtgatcatataaaaagtttatagttaatttcatgtatttttttaggagatttatttcatgtaatcatcatactacattaatactgacgataatattagtgatgattttaaaaattgaggagtgctaccgtcaacctcctattacaacgtcttagtcaatctccgtgtccaaaaacatatgttagattttttttttttcaatttttttcatggcgatgttcgttatgcttacaacactatccctgtaaatttttgaaaaattttgagtagtttacagtgccgaaaatacatttaaagttttttgaacacgcatgataaactagaatatcaggactctattttcagcactgtaaactatttagattttttaaaaaaaaatttacaggaatgatgctgtaactataacgaatacctctataaaaaaaattgaaaaaaaaatattcaagtatgtaatttcgagtgtggaggttgtaattagcactcttaaatgtagtattttttttttctaaagcaaaattactttttttagtgtgataagaattgatattctctttcctgtttattgactttggcaaacaaaagaaaaataaattgataatgccaagattgagaacttgttgcaatgacttatttgtgaataaaatgataatttcattaaaagtggcaacaatcaaggatgaaatgattatttgagtgtgttaagaacacaaaattaacaatttgtcttttgtcttttatgatgcattattagctcctaataaaatagatgtgaaaaaaaaattataaacttggatataaaattctttaaaagaaaaagacaaaaaaaaaataagtctaatctgatcaaactcgatctgaataagtcaagttaaatctaagacagaacagatcaatacataatacaaatgaggtcggatcatagtcaacccaatcgatttacactcctactaatgacatttctatctataggttgcttcatttattaaaaaaaaaatggcaaaaattgttttgttagcattttagtattaactataaataaacacaatgtttaagttatttagccctaaatttacaactggcaggcacttgataaagggaagaaaaagcaaggtaaaaagttgagatatttttagcttcaattttcctttttttttttttttttttttgtaaaaatagtaataacatcaaatcttcgataatatcttgaagttctatttaaaagaaaaaaaaaaagtcttcttagttttgcttaatcctgttgatctaaaattaaactctatctagcatgaatcgcatgattattttacttggtgattcccacgacaggtcaatacacttacaatacttttggttttttcttgtaacaaaaaaaaggaaactacatacatacaaaacaaagtccaaataattgaagagacaaagtacaaagggaccaagtttgacagaaaatatacatagccaagtaaagagaattttcctccataaacaaagcaatagctaagaaaatgtaactgatttatacatacatttgaccttctagaacaaagagacaaaattgaaacttcaccaccaacatatccataaaaagacaatcccgaattcaccatcttaaactagaagagaaacaaaaaaaaaagaaaaaaagatcatagcataatagaataaagaatgtttatgaaggaaaataagcataataaccatcaatatgagagagatgctattctccttgccaatgaaattattttttatctacttttctcagctgcttttgtctttggaagtgttccaaacactctgtcccatacagatgaagttatgcc

SEQ ID NO: 23180 - DNA, 3325 bp, Cannabis sativa
aatacaaaattacaacctgagacaaatgcgagtaggcttagaagaatcgagaaaagaattggaaaaagaacgtcgctgaagacactatcacacgcgccgacgcgtggggatgtgcgcaaaaacttcagtcggcgcgtgagccccacgcgcagagattctaatgaccggtctttggggtttttgagatcgtcagctaggtaagttatcaaagtaggcagtgaaaatagaaaagtactctaaaggggttttccaaaaaaagaaccccttaagaacataaaactccaactataaacgctaattttgtaacagcccaaatttcgattttcaaatttcgaatctaaaaaggctctgataccatgtaaacaatggtgaaaagaattgagtgttgtattccatagaataatatatatttatatacaaagtaaggaaaccaaatgagaaactactagatacaaataggaaactactaaatggaactctaatttttacaaataatattctaacagtatgattagggcctaaaacatgaacataggttgtggaaccaaatgttttcaagggaagatttgagagtatatgagtatgagggtaaatcttaagaagagaagaaattggagtttgaaattgcaagactcgaaaaggcattctatttattaaggaagctgctgtcaaaacagcttccccaaaaaatcttaagaacaaaagtagtaaacatgagagccctagcaacttttaacaaatgtctattttttctttcagcaatttcattttgttcgggagtactaacaaatgaatttggatggacaatgccattggaagtaagataatcacctaagattgaattaaaatattttgtaccattatcagtgtgaagacttggaaattggcatgaaactgatttttaatcatcgaatggaattttgtgaaagtggcagcggcatcaaatttctccttcaaaagaattttgtgaaactgatttatgagttcgtgggattcaaaccttagaacaaaggcctaccaacactttccaacactcttttttaacattgtcttgtaaatctcaaaaccattgaacaccataattcggccaaaccaattccaatcataagattatctttcaatagctcatgccaaaaaaatttagattcaaaactcacaaccaatcagtcaaataatctcatgccaatgacaataaaccctccaatcagaatcctgcatgatgtatctgagctcaagactaacaccattcagtatgaaagtacaactactgatccgtccaaacttccagtgctacaatagttttgtgtaatacgtttgagcaccatttgttcagctctgaaagcatgccaacaccaggtctgaattctgacatcactcattgattgatatttttagcataaagattaaaaatatcattctaagaaatgatccatatagccatcccttgcccagctactcaggtctccaacccaacagcctagctagcatcacctaatgcattgtatagccgaatgcatgtattctccacctccatatcctttagaaattaaaggtgtagtcacatagacactactcctagttcaatagaatgtaattttagaataaggaccatctgtataagcaaagagcttttagaacgattttgatatcttcatcatgggagatctatttcattgaaatgaaactatataaccaccatcaacacttaatgaagatttaagctaactgattcagtgaattaccaaagtattatgcagatataagctcagcaaatttatttctagtaccagatatcaaaaatacaacaacagagttgatacttgaaatgccatttgtttctttcaagtgtcatgtttgttattctttcaattaccatgccatttcaaaacactattttcatttaaataaactctctaaataagtaatttactaaatcaccatgagaacatgatgaacttacaatacctggtatccaagaaacttgatcaatccatgaaccaggataagtaggacgtcctgacctgtaaatagagcaaaggtcatatttgtggcagagaatacaataaaatcgtaaaaagtcaatacatttattgatcagttccttacagttcatcaatgagcaccaaaatatgagcactcagtaacatcaagaagacaagaacacaaaacatgttggaaccaaaaaaaaaaaaaaagtagaagaaattgtagcacctgcttacgctaacgacctctatgcccttagaaactgcggccttgcatatagccgaaccaacaaaaccactgcctcccaacacaacaatctactaagagcatcatggtcaatacaaaacatatgcatataaatgtagccaaaaggcctgaaattgtgacctacccgttcactcctaacatcagccacaacatctatcgtggcagagttggagtccgcgtttatacttgcttcagcataactacatctaactccaaacctgcataagctaacaatgaaacaatgtgaaaaccttcacaccaaaatcataatagaagtactagcatcaacaaaagggtttacatagtagaaaacaccgtaaaagaagctgttttattcttaaagggtaagaatatggtaggtcttatcattgtttcacgtatttccttatgggctaataacagaaaacatatgccaatacagttcaaggaaaatgataactcccattagataacttgctgaaaacccaaatgaggagcttcaaaccttactattattttctccattgcaaaaacccactacaaatttgaaattaaaacccaaaaagaaacaaagacaaaaatatgaataaataaataaaaatcataacttttctgggttgcctgctatatttgctgataattctagaaactagaccattcaattatctggtaaacaataagaaagaaagggaaaaaaaaaaacagtaaactataagaaaaagtgtatatggagtaaatgagagtgagcctgaattgtgacctgggaagttgggtgagagatatagttgagcgattatggaaaagtgagttgaagcgaatgggtaaggaaggtcttaggagaaaggaagcagatgtggaagtggcggggaagaccaaaacagacgccataattgaaccaaacgacaaccaagaatctcagatataggattggaaaggactggggtccggttgttgagattgaagtttgaagtttccggtgacccaaatgcttctgggacaggatgttataatggtggctgataaattgctagttttgggtcattataggaaaataaaaaatggccgttataatttcacaatttttttttttttt

SEQ ID NO: 23181 - DNA, 1681 bp, Cannabis sativa
gtatttttttaaatgatttggcacctattagatcacgtcgacattattaactgattatgttatttgaatccttcgatttactcattaataccctagctacggtctagctaaatataatgagtaggaatattaatcataaatacaaaaaaaattacatagcttctaataaagaagtgaaacaatgatttttttaaagttttaacaatgctcatttattaagtttacaaaaatattatttacaaggtactaaattattttaaggatggaatacaaagataaaatagtaatttgactaaattcatatgcagatcatttatagaaagttgaatgacgataatgattgtacccattaatgaataacatatttacaatgggtgcatgaccctccaaactataaaattattagcaaatttaaaatatcatctatttatctcagttaactactgatatgaactacctacgtataccatcatgtacacgtgacacatttatattagcctatttaatgtaattattaaaaaattataaaaaaatttcagaatttattttaaaattaaaaaagaataatttaaatttataaaattattcataaataaataaataatttttttaattctttattttctcctgattctctctctcatcgataattactctctctccctgagccttattcttccttgccagatctagaaagctcaaatctccttcccttcttggtagcgattgctccaacagagaccaaactctctttcgcactctccttttccctctgcaactacttagcatcttaggcccaaattaagaagaaaagaaaagcaagccctatttcaaccctagcaacttcatcttcttcttcatttgtccttagcaaagaccggccacacgaccaaccaacactagtcacacttctttttcttcttcgttcatcctcacccaaattgcacgagactagcctttcgtttctcttccgttcatccttgtccccagccgcacaagaccagcaacaacagccgcacaagaacaccagctagagagccccagtcatccgctcctcctatggcctgtccctaaccgtcctctcctccaccagcttgtcccatccccaatcttgaaaaaatagcagtaagaacctatgatttgttcgatatgatgatggtactaagatttgttcttcttttaaatttcatatctgttgtttgtttaccgagaaaagaaaatctcctaataatattttaatttttagatataatgtttgagactttcaatcttctccatacattttgttgataagtaaatacaatcaagaatgtctaaaattgaaactttgtatgaagtttatgaaagattgtttgatatagttaggaccgatcttgagttgaaatgggtcataggcaaaaaaaaaaaaaatgggccattactataaagataatgctatttataataattattaaaaaatatgtatattttttaagggtatatggcggcaaaaatccctaataattttattttacttgcaattaaccccccaaactcaaatttggacggtaaaaacccctaaaactacgatatcgttagcactttacaatttccatccaaatttgatagttaactgccatggtggattgtacacatggacatagtgtatacatgacacaattttattggtcaacgtaaataa

SEQ ID NO: 23182 - DNA, 2889 bp, Cannabis sativa
cagctaaaattgatgggatggttagagatttttggtgggattatgattaagaaaaccgtggaatctacttaaaggcttgggatcagttgtgtctccctaatttagagggagactaggtttctgaaggacattggaaataaattaggcattcatagctaaatgtggttgggcacatattaccaaggaacaatctttgtgctgtaaagtcttaaacgctaaattccttaaaggcagacccttcttacagagtttagctaggaattcaaactattgattctagaagaatgttgtgaaataaaaagaagtcctttcgaaaggagcctgtaaactcttaacatttgggatgacccgtggataactcatggtcggaatttctacccccagcctttaaatgggcaaatgaagggttgaagaaagttgctgacttactgacagacaatggcaactggaatgcaaacaagctcaattctttattcgatcgggagacaaccaccgacatcataaaagggggcaggcctgggggtcaaggtagggacaaatagatttggacgaaagaaccaaacagttagttctctactaaatctgcctatcttactcaggcgttgtcgtgtgctccccataccaatgttgctcccgacctttggaataaattttggaatgcgaaaattttggaacgtcacaaagtcctatggtggagtattctctctaatgctgtacctattagggctgctctggctaaaaggatgaatattgaggagatgggtcttgccccatgtgtgttgaaggagaggaaacaatggagcattttttctttattgcaactttgcctatcacctctagagatctcccctgggggtgatgccaatttcggactctagggcccttgtttgggattgggtcaaattcttatggggcctgaaggaaaaaggagttgaggtccaagaagtttttctgtatgcctcgattgtggttgacataatttggaaaacccaaaatgataaagttcataataatttggtatgtaacattaaacattgtattgattctatttctatctgttacgcagattttagttcttgtttgtttcctttgaaggtgatgataacgaatcctacttggtcaccccctccagatgagtgggtcaagatcaactatgacgttagagttggtagcgactcaatgtgtatggtggcgctggctagagatcataaggagtcaattttgtgggtggctagcaacattctcaacttctctaattcgctcgttggagaagttgcggcttgcttgttagccctggaatcagctattagttggagacactcttttgtgattattgagagtgattttgagacagtgatcaatacgctgaagggaacttattccgtttggggtattgataactatgcccttcattgtaacatctctcaagacttttgattagttgtaatttttcgtttattcctagctagattttataattctgcggctcataatgtggtcaagtgagcttttgcccataatataatgagtatggtcgatccgtcctccataccagataacttattctataatgaccatgaagtctaacttatcatactatattaccataaagtgtaacttattccttaatataactatgcttttattcaaaagaaaattgtttgaaaataatttgtctcataaatatgtatatacataccatactatattactctgttctatttatatagtaattacaatttaaaaacaaaaaacaaaacatataattattaatttgaataatgattttcttagaagttatgttaaataaaatttttataattaatggttaataataacattattattaagcaatcgattgcatatgtgtaatggcaaagtcagtataataaataagaactaaacaaattacattttttgttttgttttgtttttttttttttatattgttagtcaatattacacttttatttaaacaaaaacgtgcattgataaaattagacctcacggtcattacaaaaaatattgcttgggagcgaagatacacacaatcgaccatactgattgttaatgaaaatctacttgactacattatggatcataaagttataacttctctttataaaagaaaaattacaaatattaaaaaattgagaaagttgtttacaaaatttagcatagttattaatttaccatcgaatattcaggtcgttgagcgaattgataactaccctagagtcactctctaaaataatttacttccaacttttttccttagccacttccaaagccaagtagcaagcagtcgtttcaccgctaattaattataagacatcactttacaatagtgcttgacatattggtaccctatagcaattcttttcaatttagagtcgcaaaatgtgtcataatttatgtgagttgcttttatatttcgcatcaggcgtgtcgacttgttatttgactcgtgtctaatattctcaatcctaacttgtaaaaaattgtaacgtattcatattaatccactttaacctattttgctattattaaagttgaagttgtaaaaaattttaaaatattttcaatttattgaatcgctatataaatatatgtttttatataattatattattattattaatttttttatttatttttatttaaaaaactgtgttgaaagtgtcaaatttatattaagtccattgtattgtgtttgaccaatttttattttatgtcaagtgttcaatacggtcattttcgactcgcttttaacctataaaatttatattgtgtttgtgttataccatgttaaaattcattttgccacccttcaattaagcgtgtgactattatctaaaaaaaaataaattaagcgtgtgactatgagtg

SEQ ID NO: 23183 - DNA, 2400 bp, Cannabis sativa
tgtcgtaagctgaataatgccttcggaggccacggcaggtgtgatcggcggaaagtgtcccactattgccgcatgtgtggaagtctctcctgcatgactagcaatttttgggaagagattcagggagtgacagtggtccgtcccacacctcctataatggcttcggttgggttggttctatcaccagaaaaagaaacctgcatggttccaacgttgaaagatcctgtgttgttttcatttgtttggttggtagccatgatgattttctttcaaaatcgttgataatatttttcacatgcggcatcaaatgttgtcggaggaatttaagcaacactaaaatacttgcaatcaatatatgaaaggaacaagaaattgcgaacactcacttagagtagtgagtattcaacaagaagctaccaagacaacaaaacaactgaaaaataaaaagaacacaagggaatatagtagttcaatcagatcacggtctgtttagtccactgttacaaatgatttcttcttagtttatttgatttggatcactatatatataaaaagcaagtgtccttttagttttacataactgatcagttatagaaccgttttacaataaataacaatgttaaatcagaataaacataaaagaataaataaagaacagtttaatccattctaataataattggagcaacgtatgtgaccaatcgggtgcgagttgcatgttcatattctcacacgatctcgcaggctttaggtgcgttctatattcactaaacggctaatgagcctatcactgggatgtctgtgttttatctcaatcgcattgtcggacatcttgcatgttgacgacatgggacatgcgagtccttattgagtcatcgaacacgttttgtcattcaaactaatcattatgtaaggaaacgatctttacatagtcgcatgagaagaatacttattcatcgcattatgtctatatatgcgcaacttatataaattcttctcggtcctacttatcttacactacgcaaggcatagtatacgactagaccctatcaaggtcacatcatctcgcgagtttggatcaagcaaggttaactctttgagagtcattaattaatagctcatccatcccttgaggattggatccacatgtcaattttatagaagattgatctcaagtttttaggcaaaaaattcacactataacatttttgttactactaacactgttaagtgctgattaggctaaccataatgacatgtgtcaataaattattggtccatgtcattatttgtattaaagaaaatcttttgaaatgattttaaaataaaaaaaaaataaaaaatattttaaataacataaaacaattattaaaaaataatataaatgttatctctctctttctctcatccactttcttatctctctcctaaactaaatccagaagctctctttcgaagaaccatggcagacatatgtatatatattaaattgaaagtaaaaagatgaaaagaatatttacctcttaatgcctattagggtatccttgattctttctgcaagttgtatggtaatgacaaaactcacaccttgatcctccaaatcttccaccacacacaaagactaccagtaggataatagtgtatatgaagttcttgattaaatctcaacacatgagcaagaactatttcttttgtaatagagagaaaaaggtttactagcataaatatttttaggctttcaaaaaagttatgtgaaaaattctattccgaaaacttgttcagaactttcttatgcattatatttaaatatacccaataatagttttattaaattaattatttaaattcaaatctatttattaaattgttgacctcagatttggccaactgatagcgaagtcgtatttaatgttgctgatatgtacactgctgcagagacctcaaactcatggttgctcaactttgcccttccctttacctagaccattaagcagtcacagagactcagcaagaaaagtgactaaatccaaaagcaatataaaatccaagtattcacactatgtccaaatatctgcatgcaatttcacacattataactacacaaactcagtgcttcataaagcactcttaccactcgttacccacgaactgcatatgtcaccatcgttgcccgatacagagaacgataagtaaaaaacctatctgcgatttcatgagtaattactcataacagtaatgaccatttccaaccctcgatcataatcgatgctcaacaaacacatatcgggatctcgattataatcgagactataacaatcataatcgttttaccataaatggtgcataacacttttcttacctcattccaaaaatcaggcgtgcggtctgacctgagtggaa

SEQ ID NO: 23184 - DNA, 1442 bp, Cannabis sativa
tttctcaagaccaagctccacgatagaatggagggctggagacttaaaactctctccaagatggggagatcggtttatgtgaatgcggttgctcttgctttaccttcgtataccatgtccacctttcaactccctgcttcttcttgtagagagcttgattccattgtcagaagattttggtggacgggttcccccgatcataaaaatttttgggcggctatttcttggaacactctctgccagccgaaacagaaaggtggtttgggttttcgtcgtttcgaagacattaatcatgctctcctctccaaactcgcttggcagttggcgagtaaaatggacaaaccttggtgtcacattttcaaagggaaatactttcctagggagtccttttggagcatccgagagaagaacagtgatagttttgtttggcggggtattctcaacgccaggaagactattgctgaaggggcttgcactattattacctcgggggaggatattgatatttggtggcaaccttggataccttggttgagatacgaacaatttcgggaattgatggaaagtgttagagccaaggcacctagtattaaatgtgtggctgatttgatgtaccgcataaacaaatgttggaacactggctatttgcgtttcatctttgggactattgtgggagaccaaattgctaagattcaaatcaccaagagtaatgagggtgatatgctcatttggaaaaattcgactgttggtaccttttctgtaaaaggagcttactgggctgatcaagaggccagattcggggaaagaaaccccatctggaaatggatttgggattcgaaaattcatccaagagtgagcatgatgctttggcgaacctgtctaaagattctccctactgctgataagttcaactctattaatgtttgtcctgtgtgcacttcggtccctgaaaatgccattcatctgtttgttcgctgcccttttgcgactgcaatttggttttctggccctttgtcggttagagttgattcaataccaggggatagcatcaacatgtttttaagcaacctttgttcttctttgtccccttctctcagaagaaggatgcttgtatatgcgggtgttattatggattgtatttggaagcaaagaaatcatatctttcattccaaggaagctcttcagagtattgatatggttcggttggaagttgggaggagatttggcgaattggatcctgatcaagtttgtttggctcaatcgccccttggaattcccagatcggtgcaggtcccccaattatctaccaatctctgtctcctggtggatggttcctttcttgaaggaaatttcggctgtgttatggtgtcgatctcgaggtgttcgtccgagtggtggaccggtgtctcctccggcctttgcaattcggccttggaagcgga

SEQ ID NO: 23185 - DNA, 1973 bp, Cannabis sativa
taacttatttttctatttgcatataaataaccagcaaaacttacctatttgaatcacaaataaaacgacattatataataaatatctatttgaatattatataatcaaaacttatctgtttgttttacttttattttattattttattattttattatatgtaaataatattttattattttattaaatataaataaaaactcacccatgaatttctcataaaacaaaaatttagttatataggcacactttatatagaatagatatataatatatatatcaattttatattattgatgtaaactactataggtttattgcccttgagacactcttttgtatcaaataatatctcttttataacttaaatcattgtatatttcagatagtacagctgtttttttttttttgaataacctgctagcttaagaaaaagaagaaaaaaacaagagtagaataagaagcaagactttattacatattgaaaggtaaagaattgttctaaatcaactcattatctagatctaaacctctcttagcataaaagtgtgtatcacttggcacatgtaaaatattttttttcatttaataaattgtgtagtagagaaataggatatttatacttctaaataattatttgttttattaaaacaaatattgtttgttaattattctttcttttcttttattatttattaaagaaaacttacatttgaatttttggatacatagaacaatatatttcttctcaatattaaattttattgaaatggttttagtgagggatatcaactttaattttaatatgcatctttggtgttattaccaatgcaagattctaatattgtactaaatttaacataaaaaataaaaaaaaaaatattatatttagcacaacattttcagttgtatttcaatgcacaataatattttaatatgcaagttacttttaaaaaataaaatatcatttataaattaaatatttcaaaaaattattaatgacaatgttgtagttaaaaaatattaattaaagtcaattattaataattaataaaaattatgtaattaaaaaataacttttattatgcactaaatttaacataacttatagcatacaattaaaaaaaaaattaattaaattgtgctaaatatattaacacaccacttattattttttttttatcattaaaaattgtttctaattattataaaaaccgcgcgaagcgcggatacgttgcctagtcttccaataaagctgatcctacaaataaataaataattaattaaactataatttttttaaaagatgaataaaactgtgagaaaataatagctgtccagtgtccattttaacgggtttcttataaagggataaaaaaaaaaaaaaaaccaatttatgtcataataaagatagtttacaatggaaatttctcccattaaatattggaattgctgtttgagtatgtttattactttaatatgtgtgcattaatttaggatttaaaattggaattgtgattgattattggactgaaaatctaataaaaccctatggtggtcattactgttgtacatagatttttgtaaaccgtccaaattgtaacccgctcaaactaaaccgagataacccgacgaaaaatacaaactgaaaaacttgacgaaaatataacccatccaaactaataacctgaccaactcgactaagaggatttttatatatataggtgcacttttaatgggtattacccatgaattggtaaattttagtttttaagcttaatttttctatctaattagtttaatctcttatttttacattatatgggttagggttgttccatttgttggaaaaaaattaagaaaaaaaaatcggtaaaaaaaagataaaaaaaaaatgagtttgacttaaatattttgtatctaaacatatttttgatatagtataaaaggagacatcttttgatatttttttc

SEQ ID NO: 23186 - DNA, 2104 bp, Cannabis sativa
aaagaaagtaagatgaatgtgagtgtatattaaaatgtatgaagttccatcttaaaattagttaataatgagagaaattaattgacaataaaaaaaaaaataaataactcatacatcttatatatgaatacactctttaacattctctctaaagatggtgaatattttctttattactaattttggacagctcaattacaagtggcttacagctgttctttttggctttactttttgaattaggatgaaggtaagtatagttgggtctataaagttctatttcaaaataaattgacaataaaagaagtactcactcaacatcttatatatggtattaaatttctacacattatctatatactccctagcacactttgccctcaaagtatgatcatgcatcacatgggctatttcagaaaagtatttaacataaatttaattccaattaattgacaaaacaagaataattagtaacttctgtacgtagtatatttttgcctccacgtctttaaatttgtatagaaatgctcattaaaggaaagttgaccttattttacctacaactacttctcttaatataaatattccttatttatttcaaatataaatagatcaaaagagaagaaaaatgagagtggaaaatatgttttttcgaaaataaaataacaaagtttagacaatgaatgttaatgttgattcaatctctatttgttacatagattatgagtcttgtatgttttgccttgatgaaggttgttgtgtcccccaatcagcccctcccggacgattgaatcaaaatcaacagtgatgttaaaattggtgaaggttcaatgtatacggtggccttagttagggatcacttgggacaattttgtaagtagcgtcaaacatgctcaatttctttgattctctcattagagaagttgtagcatgtctgttaaatatggaaacggttgtttcgttgaagcatcaatatgtggtaataaagagtgattcggagacaattatcaagacgctaaaggaacatattctacttgaatattaataactatgtgaatcaatgtaaaatactctctaaccttttgataagttgtaatttttcttttgttttatgaacttataactttacagcctataatgtaattaagtaagcatttaccaaaggtattactggcttaattgatttgtcttctataccaaacaacattgtttataatgaccataaagttcaattgctatgttttagtttttctatctataaacgttttattttttaaaaaaaaaataaataaatgttaaatctcgacataaggtaagacattcgtaactaacaatatatatacataaaaagcataaaataggaaatagggtggaagatttttttactccatattttaaaggaatatttttttttttttttgctttttcatgatctatagttgattggcatggctgctaaaaagaagaaaacaaaagctaataagatgagggaggaaaaaaaaagttgcgtctctgtaaatggagaacatattctctagtggaattcatagtgacattcagaattattgaattggaatatcttgtatcaaaagaggagactatatgagagatattttccatatattcaatatgcatttataaatatatatatttttgctgggacaatacacagatatttgggtactgcgttttacacataaatgtactcatgtcaaatagtcggttattggagtgaaaacatcaaactgagttaaggttgtacacaattattatagactgatttggtagtggcagatcctcacctagtataaagacaaggagtaaaattcataggagttgttaaagcaaaaacaatcaaaattgagaggttcctatttggaaaaatccaaccaagatctttcaaagataacgtaccaaccactgtcggcatggcttataatggcacaagctttcatatttcacaaaaagactatgcaaaacacaaccaaacctctactttgggaaaattggtagggactactcctactgctataacatttttcatttggctcaaacccttcttgtcaagacatgactactaattatgaggtcgttgttttgattt

SEQ ID NO: 23187 - DNA, 3720 bp, Cannabis sativa
accacataaatttgacttatttatttgatgactcaacacacattttatatatacaattgtgaccccaataaattcttacatggtaaacaggttgggtcaggcccaacccgccattaaccctccccgactcaacaaggcattgcctcgccctgccctgccccgattgcctcataagcttaatcaggtctgacccgattcgattaagcttaatcgtttttttttgcacaaacactcaacaatagttttattacccaaaacaatgatgtaatagaaaattataaagtttacacatttccattactttgttcttaattcttatataattgtcaagtacataagttattcattaatgttttattattagttattacaactttacaaggtaaaattatttaataccaaataggatacaagacatgcttttgaaatttaaatacaagacatgcaagttaaaatgttaaaagagattgacgaaattccttttacatctcttcgtattttttttatgagaaacatctttttgtattttgcttgcaaaaaattagaccaaatatgttacttctatgagaattttttattttattttatcacttttatctatcttaccctagttgcttgtttttcatggattcattaagagatgtgattaagactcaaattggtatattttaggcctttaattatgcacatacaattaatacaaatcgaatatttcatagttttactaataaatttattttagttagaaatatttaatttattttaattgttgtgttattttttaaatttgagcaaagtggtaaaatgataatttggtatcaagcccaattaaaagttaaaaagcccaactacatccataatttcgaactatacacatgcataattgcatatccattaaagtggtcttcaataatcaatttcagcaagagacattccaatcaagccatggactcttgggtccactcttttcgaagcccaattaaatacttcagcttgtgagatgagttccgttcaaatttaatcacaattcaaaagatccaaactaaagtcttagcacaatattcggagcgctcatccatgaatccaatagccacgtccaaagcttgtcacactcccatgtgttcagaatttatcggcattctccactctcacacgagtcagtagcattattctcacggttttttttttaatcaatcaggaaattcattaccaacaaatacattacaagctaacaacacctccagccgaggcctgcattttaatctatacagattgttttcttctattttcctccatattcctatacctgttgttatattacaactatagaaactattctttacaatcaactttttgcatcagccagtacttttcagcacaacactcagcaaacaatcaacaaaagaatcttttttatccaacaaataaccagatgcaagtaacaacaaacaaaccagagacacttcctggtttacaattttgaaaaccatgccctgtctatttgttcggctttgcttggccagcagcacatgttctattcttcacatcctccttagtcttcctcactacctgctcgactagtatagtctcagaattccacaaaacactatttcggacctcccatatctgttaaactacagcagcaacagcagctgttatgatagcttttcaaaagagctgatttttgctctttcgatccacctaatcaacctgttcaagtttattgtttccactctctagttcagtcattccttaattttagttaagcaagtatgagagaaagaacatagaaagaataaatgtttagatgattcaatctgattactacacaaaaggcatgaatcttccccaataatactcaatctatgcagtcttctctagtttcaagtctatcctgtatagcaagccacaaactgtagctatgtctaggaacatttagtctattccattcctcatggttctaattcactttaatctgtgagggacaaagagctttgtaaccattagaaattcgataaggaatagctgcagcttgctaaatatccattacttctttgacttgatttttgacagccactagtttcttccaataccaactagcctgaggaggagcttgataactccaccaatccacccctttcatataaacacaatagatccacctaatccacaagttatcttccttattcgcaattgcccatttgtcatcgctgcaatattccattcagcaatctttttcagacctattcctccagctttctttggttgacagacaaaatcccaactataggagcaacccccacagacacatggtggcctttccacaagtaggcacgacatatagcttcaatgtctctaatagtcttcttaggtaacaccatgatttgactccaatatgagtgaatggacatgagtacggattgaacaagtacagcccttccaacaagtgataagttccttgaactccatcttttgatcctggctgtcatcttatctgctagtacaacacattctttccctgaaattcttttagcacaaatagggatacctaagtatttgaaaggtacctcttttttgctaaatcctgaactgtcaatgatacgttgaacctcatgctcactcataccgcaacaataaattgcagatttatgaggattcggttggagtccagaggaacaagaaaataacttcaggccttgtaagacatagtatatactcttgaaatctccatgacaaaacataatgacatcatcaacaaacatcagatggtacagtttcaactcagcacatctatcatgaaatttaaactctggcttagatcctatcttctatagtattcttgaaaggtactccatacctagaacaaatagcagaggagacattggatcaccctgccttagacctcttcttccttcaaagtaccatgtaaagatccattgaaaataagtgagtatcgaggagtatgcacacagaccattattagtttgataaacttctcaggaaactgaaaagcttggagaatctcttccaaataatcctagtcaagagtatcataaggtttttgaaggtctaatttgatcatacatccgagttttgaacttttccttccatagtgtcgtatcagatcctgacaaattataatattgtgtgctataaacctgtctgtaataaatcctccctgattctgagcaactaaatcaggtaagataactttaagcctggagcagataagtttagtagccactttgtataaaacattacagcaagcaatgggtctgaattcactaactgtgttaggacacttacatttgggtataagtgtaagaacagtagtgttgatctccctgagcatcttccctggttgtaggaatgaaaggactgcttcacttatgtcatgtcccagcatctcccaattgtcttggaagaagcagcttgtaaaaccatctggccccggagctttgattcctggaatatcaaacaatgccttcttgacttcctctttggaaaactcttttagtaagtattcttcttgtgaattggagaccaacgaaccaagcttcatgacttttgagttgaccttcttcctgtactccattttagaaccaagcaattggtgataaaatgaaataaaggcttcagaaatcttcttttggtcatctgttctcaccccctgatgatcttcaatagtcagaatgttattcattttcctcctctccttga

SEQ ID NO: 23188 - DNA, 4529 bp, Cannabis sativa
aagtcacaaaaagtttactttaatgtaaataagtcctcaatctcgaaaaattacagtaatagtcttcaagctcaagattctcagtaggtgcctaatttaacaactctgcttatagtttttaaaatgaccatgtgttgaatacttattcgtccacatcataaaaattatttaaataataaaaaaatgaaaaactttttttcattttctttttttttttaaaaaaaataaaataaaataaaaaacattatatgtataaaagaaataaataaataacaacttctacaattcaccacccattcctttggtggtggaggcttgctgctgactagtatcatccctttatttccaccttcttcctcaatatcccatcctacaatctcaaaaaaccaattaagcaaaaaacgcctataaagccttaaatcgatgcaccttgctccgaccctttcctgcatctattttggttcccatctccgatcgtcaaatctctgtcattaaacgacagaaaaagagagagacttagagaaccaaaaagaaaaaaaaaaaagatgtgattaaaatcaggatcttggagagtgatgaatcttttgattttttctttcatagttttcaagaaaccaaaagatatggagagagtatacggtagacaaagagagatgtgggtagcggcgtgtggtgggttttggtgggcgatagaacttattaagactcaacaagttaggttgggagaaaactagacaaagaagaaaaaaaattaaaaaagataaaaaaaaaataattaaatagtactttgtttatttttaattaaaattataatttagatcaataaaatattaagaagagaatgtttttgagagcaataaatagatcggttaaattaagtagctatgaacaaaagaatatacaccaaattcaccatctctaatgtaaatagtgaacaaaattaataaagaatgtacaccaaaatagtaccacggtcccaagatgaccccagaagtcatggatgcaaattgcaaacctaaagcataatttggactgaaacgatgtcatgtattttgatgtatattttgattttataaattattactcattattattaaagtaatttatagcttcaaatcaaatgtacttattatttgaagcatttaataaattaaagtaatttatatatatattgtcaaaaaagaataatttatattgtataagtgatcgcacgtcttaattaaatcaatataaaaaattaaatgctgctgagtagaatcgaccacacaggaatattgattctcattgcgtaaaattttgaaaaaaaataattaaaaaaaaaagggggggttagggacaactattatgacgtgtaattgcggcagctttgtttgctttctccctacctctatttgctactcctaaaataccagctgatgtaaataagtgaaaatagtaagggtaaaatagtaaaataataaaccaaaaaactaaacacatgaatgaagggccgagaaagcaacagaaaagaaagtgaagaaaagccctgattattattatcgagttctgtgtgagatctgccaaaaacccaccccaccctttctcttctctctcgtttttttcacaatattattctcaaaaattacataataaaaataaaattaaataaataaaccctaagaccgttttttatatttgggcgttgcgttggactccaaaacgtcgtcgttttccaatgcgcctcgctacctcttctccatcgatcttcttttaactttcttacatataaatatctaattttatatttattatatatatatattgacagacaggtatctttctattgatttcgtcttcgaaagaaagaaagaaaggaagagaggagaagaggaagaagatgaggatccggaagaacgcgaaggtctcccctttgctattctcttcgcacgcttcagctcccgaggttctgcagtcgcacgtgtgccagctcaaccagtctccctgggatgtgattcctttcgcccaatactctttctccaaccaggttacttctcctctcccccttcttcttcttcttcttcttcttccctcatttctctttctctacccatcgcagatctaccccaacccctcttctgcattttctttttcatcatcattattattattattattcactagggtttttcttcttattattatcattttatctttttatcgtttctcattattcttttagggttactcaaaccctaaatttcattctcttattctgtttggccaacaacggccgattaggttagtgggttttcctcattattttgttttttcggtttcatcatcattattattattattattaaatatatacagacagaaggggatgaagatagtttcaccgggaatgggagcctcggcgattctaatattggagcagtagagaggtaaatattaattataataagcataatccactcattcatattattattattctaattattgactgtcttgctattattcttttttcaaagttgttgatgagattcattttatcgagactcgactgttactgttattagttagggtttttcgtattcattaatttttgtggtgacgaaattctttaagcttctgggttgtactgcaattaatacatatatgggttttgcgaaagcagtgtgtcatcgttgatggacgtgggcgaagaccctataatgatcattaaggataataataatgatgatattatcgtcaaaaacgacaataatataatatataaacaactatcgaacgacaacgaattacatcgagcttcgtccagtagtactgtcgttggtgaagtattattattgtgccagaaaaacgacggcaaaggatggcaatgtaaaaaacgagctaaagacggttactccttttgccaccaccatttgactctccttaggtcttatgcccataacactaataatagtactaactacgatactactatcactactacttctacttctactaaggccaaatcagctgccgtcgacgccaccggagttcgccgaacgaggggacgcgccaccgccaccaagaagggtttgaataattccacaaacccatatgaattttactattattctgggtttggtcctctatggggaaggaagagaggggagagaggtgaagttagggcggccacggtggccgccgctgaggaagagaatagcgattcatcggatcatagcccaccgccaccacggccgccgtcgtcgtcgaatacgacgactttaatggataacgatgaattcgactatgattttgacgatgacgaggatgatgaagatactgccagtggagataacggtaagaaacggatgcggaagccggtcaaggctcgatcgttgaaatccctaatgtaaatagtgaaccaattttattttaagggttaacgtttaaaattttaagcttttcttttcaagtattaattaatttgtattgtaatcgtagtcgttaattaatttctcttcttatatgtatgttgttgtatttaacaaaaaatgaaataagaagagattgactgtttttgtgttatgttttttggtgggtgtttttagggtttgggaatattggataatatgtatgattttatttatttatttttggtgttaaatttccatattgtgtagtgggtggggttagagtatctctggttttgggagtaattttagggtgtgaatatctggtggaccgaagaaaattattagtctcttccgattgaaatgaaaagggtattgttgtcaattttggtcccacttggtttggagagtgacatggaaggggtaaagtgggtattacaatacactccgatattaaaaaaaaataataataaaaccaattttaaaaatttactctttaaatgtatatattttttaaatttcatttctctcattattttgcatcaatttcaataaatgttttaagtattttttagataatgtatttaaaatatatttattttaatttttttgtattaatctttaaaatatataattaatttttattttatttatgtatttttttaaaaatatgaaaaggaaaaaaataaaaaataatataaactgaaaatatatattttatagaaaaaatgaaagagtattttttttttaatttttatttctacacttcaaaatactttctttctttttttatttgtatttttacaaaaattcacatagcaatccgcatagcaaccaatcgagcaatctgaatcgcaataaatattcacatagcaacccacataaaaattactagagcaactatcgaagtaacttaaaccgtaaatttaaaaataaaagttaaaaaatagtatatacggaaattctccaaaaattaataaaatgaggtgctttgtaaattttagaggtacaaataaaatttccctatatctacactccaaaaatttatatatgcacctcaatattaaaaatttagatgacgtttggtaacacttttactttaaaatttttaatcacaaaaataagagtagaatttttgttttt

SEQ ID NO: 23189 - DNA, 1977 bp, Cannabis sativa
gtcaaggacaagcagtcatattaccagttgatcctgaaatcgagaaaacttgtagaagaaattgaaaaaaaaaataagaggctagaaaggagtatagtgggggttgaataagaagtagagatggctaataacaacaataattgaggtgccatagatgacaaggctaattgtcttaatctacctgaccgtagcttgagaggctatgtcctacccaaccgaacaggggtctagatcctgtataaggccaccttccattgaagccaataattttgaaatcaagccagccatactgtaaatggttcaattcatagtccagtttaggggctgccattagaagatcccaacatgcatcttgctaattttgaggagctatgccagacatttaagataaatggagttagtgatgatgaaatctgattaaggttgttcccaattctccttaactgatcgagccaagggttggtttgtgtccttgccacctaactctatcaacacttgggaggaattggccctgaaatttctctccaagttctttcctcctgctaaggttgccagattgagatcagaaatcaacagcttcatccaacaagacaatgagtctctttatgaatcctaagagagattcaagcacctaatcagaaagtgtcctcgtcacaaaatagagaagtggatgcaagttcataacttctacaatggatattgaccagcatcaaccgtacacttattgatgttgcctctggtggagctttcacgaagaaaagtgctaatgaggcttatgagctattagatgagatggccataaataaccaacagtggccaagcaaaataatccaacagaagagagtagtgggtttgcatgaaattgatgcaattactaagctaattgcccatgtagaagccttaactaagatggtgactactcaagtgcaaaaggctccaatgatatgtgagttgtgtggagggcctcattcttatgacaactaccaagttgatgtgaatagtttaccaatggtgcaagctcaagccattgtatttacaaacgatgatcattatccttaccttgacggacgttttcattatcacgataggtagctatcgggtgaaacacagcaaggcttcttcaaccataaatataggccaccatttcaaaagaattatcaaaaatctacccaacatccaagtaatagtggagggtctaacattcaagtagatcttttgctccaattcatgatggagactaaatcctttattaaaactttgaagaaccaagtgggacagttggctacgcaaatggcaaacagaaatcaaggttattttcctagtactactataaaaataatttaaaagaaaactgcaaggcatttattttaagaagtggaaagaattatgccgagtcgagccaagagaagtcagatgaagaaaaccaggatcaacaggcaacaacactagcacaagaagaaaagaagactactgaaggtctacaaccaaaataagcctcacctccaatcaacatttatcatcatgtgaagatcccttatcctcaaaggctccacaagaataacatggacaagcagttcatcaagtttcttgaagaattaaaaagctgcacatcaaaattccatttgcagagcccttagaacaaatgctgagctaggtcaaatttatgaaggatattctgtctaagaagagaaagatggaagattttgagacagtagctttgacggatgagtgcagtgcaatattacgaaagaagctcctcctaaactgaaagaccttgggagctttaccatactatgcactattaggagtagagaatatcaatgccttctatgatctgggggctagtatcaatcttattccattgtcaatatttaaaagactccaacttagagaagaaaagacaaccactgtaacattgcagctagctgaacgttctttggcctatctaagaggggtaattgaagatgtcattgtcaa

SEQ ID NO: 23190 - DNA, 2328 bp, Cannabis sativa
accaagtatctgacacccttagcagacttcaatctaatatccataccaaatactgttattcacttggtactttacctactgcaagtttgtcgattgtgattgattgaagtgcaagcaaaatagctttctaactttactttctcttgatcttggcattgcttcattcctgtaaaatcttggtttttgcaagtgaaatgcttaatgtgatatcctaatcctttgcatcctctgcaagggagcaactttcaatgtcattcctttcaaaaattcataaattcttttttgagcaatcctattgcttagatatttaaataactatttttgttggttatgttttgggtcctttttttcatcttatttgatataatggtttcgcggttcttttctttgttaattcttcaggttgtaatggccataaaatgccgtggagatcaacaactgggaggactttatactggaatcaacacaagacacatctcaatgacaagcataatggtatgctctctcagcttactttcagaacttttgtcagatttttacgtgtgatttttgatcgtctgtacttgtgaataacctttaggttgaggaatacacagggttgcaagtacagccacataaggctattgttggagccaatgcttttgcacatgaaagcggtatccatcaggttggtattctgaacactttgtgttacaaggacttgctactattttacagttcatactacctttgttatcaaaactaagattcttccctccttaaaaagctgaagtatccaagataaagggtcccgctaatatgagtttttaagtatttttttttctttctttcttttctgttgtttaatatttaaaaaaattggttagttgttattagtttaattaaaaggaaggagccatttttactgttgaaaggattagttttttagaaattccaacctaagtttgtcagtgaagttctagttatttttcttttatattgtagtgacatgttaagattttcagtttaagatgcaatgctgagaagctatgttctgtaggatggaatgcttaagcacaaaggtacatatgaaatcatatccccagaagatatagggcttgaacgaagcaatgaagctggtatagtccttggaaaactcaggtacaaatagtatcaatacgtatatatttatatatatatatatactgataggaaacaaaattgtatattattaaagatgatggaaatgatatcaaatgtaatataccttgtttggttaattctggtttacatacccaagcataaccatattttttcttctttatattactgttagtcaattggtggaataaaattatggacataccacaagctccattatctgtataattttcagttatatacaagtaatttaattatattacaaaaaaaatgtgcaaaaaaacataatcacacaattctgtacaattttataaatttttactaataatcatcatattcacattatataatagaaataaacataaatatttacgatttatagattgtatagaaaaataaaattatgtttatgcatccaatatagaatgtataattaaatgcgaatcagttattttgtaataaaattatataatgtatgcaaagctataaatttccctattttcaaactcatatttttgctctcgcgtgctagtttttctgtttgtgcttcttttttattaatctttcttaatcaaactcaatttcttctggtaatgtttctttttgtttttggtacagtggtcgccatgcattgaaacaacaacttgaggaggtatgatatgatctcatatctttgcagtctgcttaccttactcctacctatatgggattagtatttagtattctttttctgctcttgttatagcttggttatgagcttgaggatgagcaacttgagagtatattctggcgcttcaaatctgtggctgaacttaagaaggtaggtttaaatgggtaatgttttctgtatttattatttagtttatactgctgtaaatttcaactatgtgcacaaaagtatttctgttgtttttgctccttgctttattacatccttacttgtctcagtagtgttgtttggttgtaatgagttctggatctgaatgggaagagaacccattgtttaatgtatccataacactgctctgtgcattattttgtatttaaacttgcatggtcttattcttcttggccaatttaaaaagtgactagacttgccaccatcagctatgctattttgtgtgttttcttggatttttaattgttgcctcctattatttattcaaaatctcagaggataactgatgc

SEQ ID NO: 23191 - DNA, 1669 bp, Cannabis sativa
ctttcaagttcttctattccattcccattttccaatctgaaagtgaaaaccatggcatgaatttgataactctcttttgagtaggacaaaagataggtaagaagtctaaagagagagaaagagagttattaaaaaaaacacacactagaaggagaagaataagaagctagcttttaggaggacaattttttatttattatttgtttttttttttttttgtaaaaaagaaaaaggtaattggaaaataaagaaagaagcttttttgtggaatctggacccccaaagcatgggaaggtgtcaagggttttggtattgactttgtgtgctggttaaagagtagtcattgatagagccaagcacccaaaatagaagggactttcctactttttgtttctttagttgagccaagaaaacaccacagaatctcatcaaataaaaataaaaaataaaaaaagaaagaaagaaaacaccacataaagtttcgacctttttcttttctttttcttttccatttaaagattgtacttttattttacacatgcttggtgacaaagggtattaagctaccaattttgacatgaccatctaaaaggttaaaaaacaatagtttaaaagggtgaattaatgtacttttactcaaatttagaaatgacatgattaactaaatatttgtttagataacaaagtttttttagtttcactccacaagaaaaggaaaacattttgaaatgaaactaattacttcatagggagaaaaaatatggccgttaaaaaggactgatatttcttacaaaattaaaaaaaaaaatgagtgtagacaaacaaatttttaatttcaatcacataccttataattatatgtagagaaacgctcttaattgagacatctaaattaattatcgatgatttacgatgcttaaataagaatttaaatcttatattttttacgttgtaaataattgtttgaattaaaaattactaataaaagaaatagaatttatttaaatgtcttaaatagtttaccttattttatcaaatgaatccaattaatgactacaaatcactatatatatttgtatcataaattacaatcattaaaaactgattatgtgaataatgttactaatcacaaattcacaattctggtttataatatgatctacttgttaaaaaaatattattatgaacactaatttacttttttttggttgccaatcgtcattattataaatatactattaggtacgttatattaattataaatttctatggttgttccaaaaataaaaataaaaatttaaattatatgacatatacatgtattttgtttaggacaataataatattcattattattattccaattttttcaaccatatactgccagttagtatagttatgatatctaatttatggcacgtcagagagtactactataccacccagatacctaataatgcattttcagatatatatataaggacacgattttattttatgatgtactttcacggaatgtattctgtaatgtacggcagtcgttagataagagaagttatttgatctagtgctgagattatctaggagtaattaaggttaaaaaatagtaacataccccgacactcatctaatgtaccctgagactcatctaatgtatcacggaatacat

SEQ ID NO: 23192 - DNA, 3630 bp, Cannabis sativa
ttattattttgtgtttatgtaaatttttaattaatatataaatttatttattttgttggaaatgtttaaataaattttaaaattgaaaatttaaatcaatcaatatatatttatataaatgaggtatatgaggacataacattgtaaaatcactccaaacaactctatctcttttctctttaattttctcaatttttaatttttattcaatttataacttataaatattattaattaattaattaattaatttataaaaatattcttatacggcattcaaatttcatttatttagccaaattagtacactaaaaagatttaataaatccaacatgttcattttaagtctgactgccttagtgtggtaaataaccttcaataagaattaatgtcaagatacaaactccagtttgtaaattaaatggatgtaaaacaatacaacaaagatttttacaaaaatttgcactaagatcttgattaaccaacaaagattcaaatctaagtccccttagattcgaagacaagctctccttgcttcgattgagctgaaatcccttcaactatgaatcttaactcccttcaaatgaaatgacctccattatcacttcattactgaagcttgaacttttcaacaacggaagaacttggaagaaataaagaagaagaagaagaaaattatatcgtagcagagaaaaatctctatcaaagaatcaaatgagtgagcgttagttaggatctttaggaatcaagtatatataaccctcactctcactatatcaactttgacagctcacatgccaacacatgacagctgtccaacctgtcaaaaataaaaaataaatcagtagcatgcattggaactaccgagtgtccacataacacaaaactcataaattttccatacacaaaaatacggttcttataatctccccctagcttgaaaaattatgatgaatgaattaaccacaatgcatgaagaaaagcaacagaaactgcaacaatcaaaagcaacatacactgagtatgactacataaacaatcatgagatacacacataatttgccacacacaaagatatggttcctacattcttccccttgaaaaattatgatcaatgcaacaacaacataagaaagcatgactaatggttaatgaaaaactaacaaaaattagaaaaactagagatgttaaattgtcacataataatcaccaatacaaccaatatacaatatctccccctcattgagcataatgaaacagtcccatcatggaaactccccctaggtagatggcctgtaggtggaataacaacaggagcagtgtgttcactctgaacaacatcaataagttgctccctttggacctcactactttgtcttagtccaatccgtttttcaacaagtttgttgacgatccagggaacactcaaataaaaaggctctccctaaacactagcagatggaaatgaacctgacaaatcactagtagtgtgtgtagcagtagatacaaaaacaagcaccttagtcaaggcatgaagaacccaccatgtgacgatttgaatgcacctcagtgaatacatacttacaatcaaccaaggatattttgccaacaaccatagccatagaaaatacaaagagcataaaaagactctaacaattttagagagttaaaaccaacctctattcaagcacaaagagcaagaaaatgaattacaacatttgaagagattaaagtttctttaagaattgcagcgaaaagaatcttgattctgcgttcttgatcgattatcaagctttgattattggtaaaattaaaactaatggtgcaaaatcaaatcaactaaactttaaaaaatcaaacgattagcaatgacaagattaacaaacacaagaagaaatcagaggaaaaataagaatgaacagagtatgaacaaccataaacaatgaaaatagtaaagtaataaaatcaacaccaagatatatattggttcaagtctgataaattgatgtgatctatggctctactccagttctggaacaccaccaaattctctttattgattgagcaagaacacttacaatacagtcgagatcgattctctaatgagttctctcaaagtgtttcaaatctcacactcttacctaagaatcttctttatctacagaagattcttcatacaaaacccaaatccaatctctctcccttttctctttacctttctcactctaccgcttaatattttctctctttatcttaactcaatctgatcattctgcctgaaataataagtgttagtggtatttataggcttaggatcaagattctaaattcggcggctgcaacaagcgaggttgttaagttagttaggcaataactaacttaacaaactctcctttgagcaaggtctctgcatcagcataagtaaatgtgcttccgggaacatgcatgagagtttccagaaacacagaccaaaggtactcgctgaagaagcatacaaataggataaagccaactagagtcgactattcaggactccattccaagaggaacaactaaccatccaaaactcccttcctgaagaggactagctttcctgaagtctacacccagagtggacatgatagtcatccagaaactcccttttggatctggatgacaactaccattccacaagacttctgatccaaatggataggttagctgtcaaagaacaacattcgggaaacatataactttccaggaataacttttggagacctttttatttggaggaactattccacaatcttttttgttatgttatctctattcttatttttcttcattttttaattcattcatgatttcttcatctattattgaaaaagaagtaaaagtataaaaaataaataaatgatccgtgcacttaacttatataaggagatttacaaaaatattagaattttgggtaagttttataaaaatactgccacatgatattttttttacaaatgtactgccatggatttttttttttatttcttttatattgtgtataccccaaaatacatagggaacatccatcttcaacacctacggactgaaccaccaaagcaacagcaaaacagtcagaaaacaagtatttttccagtcaaaacgtaaatatttaaaattctaactaggaacaataacataaaaaattactaaaataattgtaaaacaacagaaaaactacaaaacaaaataaccaaataaaatcacaaaaaattactataccttaataactcttttgccagtggaaactatcataacatgatcatgagaggaaaccttcaccttggaaaatttccccttaccctaaatacattaaaaagaaaaataacttagaacaactaaaaataatcgttaaaaaatataaaaatcaagtacataatactaaacaccgaataacacatacagaacaacaaaacatatatttaacaaaatcagggagtgatgaacaaaattctaaattgatatctaagactcaatatgcacaaacaaaaaaattaaaaaactaaaactgaaaaagaaacttaagaagttgaagaaaattttgaagatgatggagatgagaagagtaagaactaatggtaaccacaattgaaaaaa

SEQ ID NO: 23193 - DNA, 3291 bp, Cannabis sativa
aaagagtttgagtcagtggaatgacattttacaaaacaaattgtgggattcaaaagtcgttgaagaagagatttttgctccattgatgttaagtttttatgacttatctcctttggaaaagtgttgttattcttattgttccctatttccaaaagactatagatttgaaagagatacattgattgacatgtggatgtcacaaggttatgttggtgattcgaaaacaggtcaagagtgtttcgacagtttagtcatgcgttcattctttgatgaatactttcaagaattcaatgcatcgggtttctttgatccaagactttattaccaaatgcatgatattgtgcatgacttcactcaatttttagcaaaaagtaagattattgttattgaatgtgacgacatcaaactaggaatgaagtctttggagcataaagtttctcatttgaatttgctaaatgtaaaatcaaattcctcagacaaagttctcattttgaaggatatcaaaagagatgttcaaaggaaattgcgtacacttgtaatttcaatagatgacattgaagtagtacttgattatgatttcattgtcaagaatctaaaaggtcttcgaacattatgtcttccagctccaggtgtgaccaatctaccccaaaatatttccactttgatacatttgagatatcttgatctttcaaacaattccaatttgaggatattgccggagtcattgtgtgatttatgtaacctacaaactttaaatctaagtaagtgctataatcttcaaagactaccagaaggaattggaaaagtggtaaagttgagatgtctttatgtggatggttgttctgagttgcaagggttaccaaaaggggttggaaaacttactagtattcaaaagctaggaatgattcccatacccaaaaataacaaagaagcatattttccatttggagatttgaagaatccaaacttctatgatcgctttcaaggattttttcgtataaaacggtgtgtgaatttagcaaatgtgggtgaagctgaaaagataagccttggaaatatgaaagagctcttggagttgagtttaaactttagagtattcgatggaagtagtgttgaagaggaagcaaatccacaaaatgaagatatgatacttgaagccctgaaaccacatccaaacttgaaacttttaacaatcagtcagtaccatggagccaaatccccaagttggatgacttcattgatcaacttgaaatatctttctcttttgggttttgataattgtgaaactttacctcctctagggaaattgccatgtttggaatcacttcaactatccatattttctagtgtgaaatatattggtattgagttttggggaattaatcatgaagaagaagactcattcccgaaattgaggaaactttggtttaattacttctcacaatggaaaaaatgggaagggagtaaaacaacagcaacagcagcaacaagtagttcatcaagctcaaaagttatgccttgtctacgttcattacgaatcacatattgtcgtagtttggaagcacttcctggctttctaagaatgacgccattggaggagttgagaattggtgactctgccatccttgaacattcttgtttaaaagaatggcttcacatccccaacatcgaaattaattacagttttgtacaaaaagatggaacatggatcaagaaggaaaatgatcaaaatatgtctgaagttggtgaacaatcgtgcaatataaaaattgggagtgcttcttctccataaaggtccaggtatgtaagtacttatcttatattgaaccaaatacgtaaatatgataataggaaatttctgtagactctcttgaaggttgctttggtagcccatatttgtttcggtggtatttaggagagctttttagtttaattttttttattattgcatacgttgtaacttcttatgatcatttataaatttttagaaagtgtcgaatagtttatagtgccgaaaataaagtttaaacataaatttagtagtcgcacatgtaataaatatgtaagacttattttcaacattgcaaactacttgaaattttttaaaaatttacaagtagtcataaataggtacaacgtatgcactcatgaaaaaaaaaaactaaaaaactctcttgaatgccgaaatatatagcaggtctatcgaaacacctatttaaggagtgcactgtagacttatcttgtaatatatacggtgggccaaagtttgtttgatgaaatttttacataaaaaatttaataaacaattttatttataaaaatacttttataagagtatctaaacttttatacctataaatattaaaaaaatttctttttaaacttttatatttgcaaaaatatcatttcatcttccctcactcgttctacacttctcactttcaatggcagtcacttccaatctcctaccgttggaaatctcgtctccaatctctatcgttgcaggtctcatctccaagtcccaccatcacagatttttttctccaagctcccacgtcgtcatcaagacattgttaccagttcctagttgtttgcaacccctcctatgtcgccatccaatttgggaaacaacgttccgggtttgtctcggtcgttcctatgtttttaaagctattacatgtggtttatttttttgtcattcaagtttttatattaaagtctgtaaatttttttcttattttgtttaaacatgaatggaagttttgaattgagtattttttaaaaatattgctgctgaggtatttgtttgccactgattatactaatttctctataaattttgtgttttttttaatcttttctaagttgagtttttgggtatatatgtatataaagataccgttgacacatgtgtttgatgaaatgccttaaaagaaagaacacatattcgttttcaatttttcttcttctttaagttaagcttttttcttcatgatagtgttttggtgttatctttattgattttgttttttataatttagtattttatttataaatttttaataactatgttgatttattgtggttttgtagtttcttattttatctttattgttatattttagttgtttataagttctttttattgttgtttgaatcatttatttttttgagctttttttagttgggaaatttgatatttaatgctaaaagattacacatggttttaaaatattcctctcactatatattttttaactatacttttaattcttttttaaccctaaaata

SEQ ID NO: 23194 - DNA, 3444 bp, Cannabis sativa
ccccctgccatcgatgccaacaattttgaaatcaacccagccatactgcagatggtccaatcttcagtccagtttgggggactgccgtcagaagacctaaacatgtacctcgcaaacttcgaagaactgtgccagacattcaaaatgaacggagttagcggtgacactatcaggctaaggttgttcccattctcactaagggaatgagccaaaagttggtttatatctttaccaaccaactctatcaacacttgggaggaattggctctgaaattcctttccaagttctttccccctgcgaagattgccaagctgagagctgaaattaacaactttacccagcatgacaacgaatctctttatgaagcctgggagagattcaaggacttattgagaaagtgaccaaaccatgggattgaaaagtagttacaagtgcacaacttcaataatggattgataaacgacacccgaacaatcatagatgctgcaactggtgaggcttttatgaggaaaagcgcaaatgaggcctttgagttacttgaagagatggccatgactaataaacaatggtcaacagaaataggtccatctaaaaaagttgtgggtatgcgtgaagttgatgctatgaccaagctgacagcccaggtggaggccttaacaaaattggtaactctcaagcaaaacaagctcaagttgtatgtgagctgtgtggagaatcttatgcaaatgacactagccatgtagatgtagacagtttgcaattggagcaagctcaagccattagaaactatcagaataattatggttttaaccaaggaggtcgtcagtagaatttccaaaagcaatatcctaatcagtaacagcaacggttttatcctcaaaagaatcaatctcagcaaagccaacagtatcaacaacaataagactctagtggagggtctaatcctaagttagacacactgctacaattcatgactgagattaagtcttccattaaggtcttggaaacccaggtggggcaattggcttctcaaaatactaacatggttcaaagtaacttgcctatcactactgaagttaacccaaaggagaactgtaaggcgattaccttgagaagtggtaagagttatgctggtccgagccaagacaagcaagaggatgaagaagaataatagccagcacctacaccagaaaagaagaagactactgatggtcttcaacaaaaagaaatatctctccctattagtattgaccatcatataaagattccctatcctcagaggttgcgcaagaataatgcggataagcagtttagtaagtttcttgaagtattcaaaaagttgtatatcaacattccctttgcataagcctttgaacaaatgtcaagatacgtcaaattcatgaaggagattttgtctaaaaaatgaaagatggaagaatttgagatggtagccctaacagaggagtgtagtgcgattcttcaaaagaaactccctcctaaactgaaggatcctgggagttttactataccctgctctattggaaagctttaaaatattcatgcattgtgtgatttacgggctagtatcaacctcatgcccttgtcggtgtttaagagacttcaactgggagaagcaaaacctaccactgttacactacaactagttgatcgttctttagcccatctaggaggagtaatcgaagatgttcttgtcaaggtggacaaatttatatttcttgctgattttatagtctttgacatggaagaagacaacaatgttcctctcatcttggggagacccttcttggcaacagggaaagcactgattgatgtccaaaagtgagagttaaagctgagagtacaaggagatgaagtcgtatttattgtattcaaggaaataacttatcctatggctagtgacaattgtttctcaattgatgtggtggacaagttggtggagttgaagaaacacattgaacaccctctcaatctgactttagtacaggaggaggtggtggaacaagacggtaaagaagcgaacgagtatgctatgtggctcgactcttatggaccgttgaatagaagatattataaagagttaggagtcatcccaataaagtcagctccatctattgaaaagcctcctgaactagagttgaaagtcttaccagatcatctgaggtacgaatatttgggggagaataagacacttcctatcattgtgtcagcttccctttcttctatagagatagataagttgttgcgggttctaaggaaacacaagagagccattgggtggacattggtagctattaaaggaattaacctctcaactgtaatgcgtagaattttaatggaggaaggagcgaagcccaccatcgatgcggaacgaagattgaatccacctatgaaggaggttgtcagaaaagaagtcttaaagtggttagatgctggggtagcatatcctatttcagatagtaaatgggtaagtccggtccaggtagttctgaagaaagaagggatgacaatagtgaagaatgagaagaataagctcattccaaccacaactgtgacgggatggagaatttgtatagattatcggaaactcaacaaagcaccgagaaaaaatcactttccccctccattcattgaccagatgctagatagggtggcaggccaagagtactaatgcttccttgatgggttctcagggtatcaccaaatagctattgcacctgaagaccaagagaagacgacattcacatgttcatatggtacttttgcttttcgacgaatgccattcaggccgtgtagtgctccaacaacattctagaggtgtatgatgaccatattttcaaatctaattaagaagtgcatcgaggtgttcatggatgatttttcagtattcggctcatatttttatcaatgtctaagaaatttggaattggtattaacaagatgtgaagattttaatttggtgctgaattgggagaaatgtcacttcatggttaaagaggggatagtgttgggtcatagaatttcaaaaagtggtattgaggttgataaagccatggtatctacaattgagaacttaccccctccagtttcagctaagggaatttgaagcttcttggggcatgccgggttctatagaagatttatcaaagatttctccaaaattgccaaacctttatctaatcttctagctaatggagtaccttttgaatttgggaaagattgtcttgaagcattccaaattctcaaggagaagttaatctcagcaccgattgtgactacactaaattgggaattaccttttgaaatcatgtgtgatgcgagtgactgcgctattggagcagtattaggacaaagggttgacaaggtatttagaactatctattatgcaagcagaaccttgaatgatgctgttgggttttatgccc

SEQ ID NO: 23195 - DNA, 4093 bp, Cannabis sativa
ctcgaataaatatgcctgtgtaaaaaatatacatatatatagattataaacttgtacttatatcaataaaataagtttgtatttaattgttaataaaacataaattttgtcacatacgatgatttataagaaaatttatatgttataccgaatctataaattaaaacatttattttatgaataattataatctaaaatagcataaataagtataagaagtattgatatatatacatattttttcaaagcaatttgaaaaataaaatgaaagaggtcatataaaattaaagcctcatttgaaaatatatttatttatatatatacatgtctaaagcacaaaatgatgagagtgatgattttaaaagaaatcttaatacaataatacacaatattatataagaatttactttgtattgtaacatatagcataacatgacaatatagttgcacttcaatgttgttgccctgaatcttgattaatgttagtgaataagtatatattgccatctcattttgttataatctatgagtttttttttttttttttcctttttgtggagtttcatcccgcttctttataaaataataattatgttctttttcggtctttcttagttgttttgtgagtcaaagccttatcatttgtgtatttatattataaattagtctagatcacttgctttaagaacgttagtagcctcatcactcagaatcaaaatttaaaacaaaaaattccatatatataaatgaagacaataaatatacctacaacatataaaataatttaaatttaataattttaaagttcgaagaagtactaataaattagtaaatttaagaaaaaaatactcaaataaaacaaaaaaaaaatgagatagtgagcatgatagataatttactttgaatgtccaaaacaaaaataccatgtatgagaatttttgatattctcttagaccaaacatcaagtaaattagaagtgaagtcatttatttgtgaaatcttatatacttatttagataatttagattgaggatattatatattgtatagtaatacaaattaatatgattataatattataattataattataataataaaatggtattaaaatgggagttataaaattgaaaagacattcataattaatatgtaacttatgtatgtgtatttttttcttggacgaaatatgaaagtctcaaaaaataagaaaaatagaaagaaaaaaaaaattataaaatgtcatataaactaatacaaaataatgttattagtgatggaaatacaaaagaatgttataattataatcataataatatgaaatgggaattatgaaaataataagacactcataattaatatgtaacttgtatatgtgtattttttttttggacaaagtatgaaagcctcaaaaataagaaaagtaaaaagaaaaaaattataaaatgccacataaatttgttggtacttttctttatttatatactaggaagcaaagccgcgcttcgcgcgattttgaaatatttaaagaaaattatatatattaacatacaaaaatatattaatttcatatttatttattaatttaatatttaaaaatatatgtaatatgaatgaagaatttttcaatttaataatttttcacttttcatataatataatattgtcagaactcattttatatttatatatatacacatgtattaaatcatcacttaatataattgttcatcaattaattattatttgtttttaatgtgccttttattttttataatctttatatagaaaatatatgcggaacaatacataccacaactatttttattttttatttttatgtcatatgattatcacaaaaaataaattaaaagacaacaacaataatgtgatagagttcataatgatttaatttaatgtttgtttttgtttcaattattttacaattcagattttagggtatagatttataatgatttataatattttagtctaaaatatatatttttttttttataacaaatatatatatatattttttattattatttttttttctttcaaaaaaaaagaaatttgttagttaaaaaaataattattttagactaaaatattctacacgtgggcacttaataaaatgatgtgacattattttaaatgatgtgccttgctatctggcatccagcatgtcagaaaacagcaaggtacttacagaacttctgaaaatgtaaccgaaagtatttttaccgtcaaaattttaacttaagtattaaactgtaactaaaagataaacttaagtatttatgccgcaaattacaaataatgttgagtattggtactaggcaccaaaatggctagcattttttttttttgggagaacaaatactattatattaaaatgggtagcacttatttcataatcgattttacttattttaatttaataaacataatagagaacccctacccgatatattatattctcactacacactaaaacgactaccgtttcattatttattctcactacacactcgaaccgctttccacttgaaaacgatcgaaatggaagaaaaatagcagagcttttcctccgaaatggatccaccacctctcccaccacttcccaccacctccgctgcctccatgcagctcaactacacggactgcttcgactcctctcctcattctcgcaatgcggatacctggacggatgagcctctgcagcctgttcccggcgccaagcttcgcctcatgtgcagctacggcggccacatcatcccccgtccccatgacaagtcgctctgctacgtcggcggcgacacccgaattttcgttgttgatcgccactcctcgttcgctgacctttgctcacgcctctcccggatcctcctcaatggccgagccttcacccttaagtaccagcttcccagtgaggaccttgactctttgatctctgttactaccgacgaagatctcgaaaacatgattgatgaatacgataggactgctacgacttctcctctgaagccctctcgtttgaggcttttcctcttctttgtcaagccagagacagtggcctcaatgggggctcttcttcacgacgccaagtctgagaactggtttgtagacgcgcttaatggctcggggcttttgcaaagagggttgtcggattcagccatggataattgtttgctgagcttagatgatggggttaggggtagtgattcttgtaatgacttggaaggtcagggagactatttgggggaaaacaacaaacaggtggtaggcaagagtaatgcacatgaagtacaatattctatgcctgattcgcccattgttgaaaaccattcctcatttggttctccttcttcttcgccttccatgtctaatttgccccctattcgggtacgggtcgaagaaaatggtgccagaggtcagaaccaaagagtcggaatggaagaacaattttccaagataagctttgcaggagctcctccacgtttcgctccgacagcccatggtatcatctccggtggtcatcaggttaatcctacgtttatttttggggaaaatatgaataaggtattgtcggaagacgaaatatcggatcacggcgatcctgttgggtttaggaaaccacctttgccactgcatcctgtgcaaccaaagatggctgccactggtggacatagtttgccttctccggattcggttgcgaggtattctctcaaattgcatgtaacctcttgcttgaaggttcttttaattatattttcaacttagcaatgtcctgtcttcgtcaaagttatttcttttaaaagtgagctattatgtgattatgttggtacctaccgttaagaaagaaagaaaccactaaaatttcttgaattttttagtggatgattcatgattggtgaaaatatagtttacttaattacgtattatgttaaaacatagataataggggcatgccatgatcataaattacattcccttattgtagaatctaatggtcccaccaattacattaaggtctgaaatgtataaacaataatttctttttttttttttttttttatttctttatttt

SEQ ID NO: 23196 - DNA, 3308 bp, Cannabis sativa
tataaattattcaatgataaatattaataatttaacattcattcatatatcaaaatgttcaactctttattaataatcagaaatgtctttatatacttttcagggcatacaccccaacaggaaaagcttatctcacgttttgagacacaaatcacggttccttttctcacttatccaccaaaagtctccaataacgctatcaattttggatgccaatcattgaaaaagttttgtagtttgcatagaataaactaggagggacagaccaatcgatttaatacgcatgacacgacccacgttagaaagggtttccactttccaaccttggagcttggatgttaagttctccaagataaagttgaaatcaacatctttctgacgggttctaaacataggaagtcccaaatatttgatgtttacacttaggttgtcatgcctagcacatattcaatacccatattttcattccttcagtcgtgtttttgctaaaaaagtagatgtcttaagctttttgattttttgcctcaaccaagaacaaaacttttcctaacaaacctaaaatttataggcttcctcaatattgactcttcccataaggacaaggtcatccacaaagaaaatgtgagataatcgagggccattcctactcaactaaattccctttattttttcacattctaactcttactgtaaaagtctagaaaggatttcggccacccaaatgaagatatatggggaaagaggatcccttggcgaatactacattttgggttgatcttttgattggccccccattaaggaaaatattgagcaaagaagtggtaatacatcgggaggcccatttgttgaacctatctgggaccctaaaactttctcagaaccttcgttataaacggaaaactcaacttgtcataaaccttcacaagatcacttttaacgacaaataacccttctttacccctcttaagcttgaaagaatagataatttcttaaactaagacattgctatcttgaatatttaaccccaagacaaaaaagcagtatgagtgggaaaaatgagtttaggaagcaaaggcttcattcggttagcaataatcttagagatcacttcataaataacattgcacagggagatagatctaagttaagataccttcttggggttctggaccttcaggatgagcaccaaattagtcgagttaatccccttgtgcgttgtacctgaactaaaaaaatcacccactgaagcacaaaagtcgtcaccaatcgtaccccaatagtgtttaaagaagatcacaaacataccatcttagagatcattttataaaaaaaatgttgtttttgttattccacgtgtaatttttcttcttttatttttgaaataaggacatgtacttctttatgattaatttaattcctttagttgagtaaaaaatgaaattcaagaccatcttatcatttgagtagccattctagggaacactcttgtgtcacagttcctcaaaatgaaaagatcttcagaagaagtctcgtggaaagctagatgtcgtcgggaaaagagttctagaagactagcttgtccactacgaaagttgttcatctttatggaaagttagatgtcacctggaagggcattcccaaaagtctaacttgtccatccaaaaggagtattcaagaacagctagtcttcttccaaaaaggatttacggattgctagttgttccctcttgaaagggagttctggatagtcgactcaagctatcacttttcctatccaggaagtctcttcagcgtatgcttcagtttgtcttttaggaagcgtatgtctcatctagaatcacttcaacttaagctgatgtggagatattgttacaaggagtttatcaagttttttaagtagtaactaacttaaaaacttagcgtttgcaacaactgactttgggatacatattccttatccataaatagcaccaacacttatcatttagaaagaagggtcacagacgagtttcaagagggtgattttaaagagagaaactgagaggtagagagagaggggtatatagaaaagagagagattggtttgggttttgtatgaagaatcttctatagatgaagaagattcttgggtaagtgtatgagagataaacactttgagagaatccaactgaatcgatctcgactgtattgtaccatgttcttgctcaatcaataaagaagattttgctggtattacaaaattggagtagagccatagatcacatcgatctatcaaacttgaaccagtatatatcttagtgttgatttattcatggctttaataatttttggtttgggtacactgttcatccttattttatctccgtttattgtatgtgaattggttaatcttgtcattaataattgctttttgtttaagttttagttaatattgttctgcacattagttataattttcccacaaatcaaagcttggttatttttgcttaatttcttgaagaaacaattaacgttgtcaatggagagattcgaattggagaaattcgacggaacgggagactttgctctacggagagaaagtttgaaagggaacctagtgcaccagaaagtctccaaagttcttggatatgagaaattgttggttgagaagaaactagacaagatagccaaaataaagaagatgacttattacacgttcatcatgtacttgtccaacaatgtaaggagaaagcttatcacaaaaaagactgcttaagggatttggaacaagcttcaagaattctacctgaagccatcaatttctagcaagattaatttctataaaggatatatgaatttagaatgatttctcgtctttctttagatgataaaattgataggtttaatgagattattgtaggattggctaacataaatcataaagttgatgaagaatgccagaccttcattttgttaagattgctttcaatttcatatcaagaagtcaaagcttccatcaagtatggtagagacgtgattacattaaaggatgttctcgtctcacttaagttgcgtttggttgaaggtaattaaatggaatagaatggaaataattttcattccattcatttgttttgttgcattttaaagtattggaatggcattccaatggaatgctctttccaccatgttggtggaatgactattccattttaaaaagaaaggataggccattctaatgtaacaagagaaaaaatttaaagtttttttatcaattttttatgcattttaaattttaatccattccatttccattcctattcttattc

SEQ ID NO: 23197 - DNA, 3043 bp, Cannabis sativa
aaaaactgtacttttatgtattaagttaacattaatttattaattgtcttttcttctaaatttaacggttacaatatacttttataactatgccaaatagataacgaaattatactaaattattatccattggaatatacttttattaacaatactaaaccaaaatatacttttataactacattaaatatgtttctcatgcatttaattttaatttttcttacgtgcacttattatttattgtaacttttatatgatcaatcacatactattagagttagttagtttgttaggttattcagttaagctgttactatttgtcagttgtgttcattttttttcttaactgtattttagctatgtataaagctcttctcttgtatcacaattcaatacaatttcttcaataaaataaagatggttcttcactttactctattttcattttcttcgtttcaaatacttgggagtgccgatctgtgctaaaagaatctcagggcaggattgcaaagtgcttactgagaagatgacctcctgaatcaagacctggagtaccaagaacctttcatttgcaggcagggtagtccttgtgaattcggtattgatgactattaactcatattggagccaaataataattttgcccaagaagatagttaatgagattgaagctatttgtagagcttttttgtggaaaggacagaatgctctaaatggttctggtctaatagctttggagtttgttggtcaagctaaattagagggtggcattggatttaagaaggtagccgaatgaaatagagcagaaatgttcaagtacgtttgggcaattgctaataaagaagacaacatgtgggttaagtgggttcatagtgtgtacatacggaatgaggattggtggggctacagggcccccacacaggggagttggtactggaacaaggtagtagatgccaagaaccaggttaaaaatatggtggatgtacaacagtttacccaatccaagtactatatatccctcgggtacaaattacttgctcctcctcagcatagagtgcattggagtaaggaagtttgagggaggtttaacactcctaaaaccagtttcatcatgtgattgctattcagggaaggttgaggacaaaagagagattgcacaggttcagaattattgatgatccaaggtgtgtgctatgcaacactctagctaaaacgtgtgagcatctcttcttctcttattctttctcacagcagggcctccaaaagattaaagaatggttagggtggaatgcatccactttgactatcacaagactcacctgatggattgaaagaagtaaaagcagcaaattaaaaagagcaagtgctctcggctgcattggcaagcttagtctaccatgtttggaagactaggaatgatcaaatattgaactccaaggttggaaatgtagacagagttgtatgtatagttaaagaaatggttaaacaaagaatatgtagtatttggcctaagaaagttgggctacaagatttggattggtttagatccttgtaagtttgtaggattttactcaaactgtgtattatataggaaatatatttgaggttccttgtttggagtgctcttaggttgtaaattgatttattggagtaatgaaaacactgctgattcatcaataaaaaaaaatggtatcagatgctataatccaagaaccataaccaccacaagcttcctctgccttcaacaatggtgcgtacgagagccaattcttctggtacctccactgaccctcacatcaatcaagtggacgatactcttcagaatcccgctcctccagcatctcaaaactcgacagaccttcctccttgagtccctattccagctgctccaaatcaccatgttcatggagatcgaccaacttatgaggatgtacgaagcccttactaccccagcatcgcagatcacccaggcctagctcttgttactctggtattgacagataggaactttcaaccatcgactcgagattttaagttttccataggttcacgtaaaaaaatatattttcttgatggtacgcttcccaaaccccctttaaatgatcctttatacagttcttggattcgttgtaatcaaatggtccaatcttggatccttcactcggtttcacccgagataaagagcgtatcatgtatcttgatactgctgtagacatgtgaactgaacttaacaataggttcaatcaaggtaatggtccacagattttcaaacttaatgaaaatttcacctttcttcatcaagatgatgactctatgaatacatattttactaaactgactgtaatttgggatgagattactcaacttcgcccaaaaataccatgcacttgcgtcgcttctgccagaaatcaagaataccataaccatgatcaggtgttacaatttctaaaaggcctcagtgactcctataatgctgtacgagatcaggtattacttcttgatcctttgttctcctctgaacaaagtgttttctatgattgttcatcaagaacgtcaaataactattggcatagaaatactaatcccattgcagctgctacttccacacccaaccctgcagcaacccctgattcaaaccctacagcaaactttacctcaaaaaataagaaaatacgtcctacctgctccaattgtaaaaaatcaggctatcttagagataaatgttactttctcattggcttttcccctggttatgtcaatagaagaaacaatgactctgctgccaaaggcaaaagcaagtctggttataaaacaacaatattttttttattcgagttgactttatatattttgtaatcaaagtatatatttttagttaaaaaaggaacagagaatacacaatatatagtacttaatagaattattattattattattatttatttactaactttgaaattatacatattattgtttagttagttgaattaatatatatataaggttattgttatgtacattatacttaattatatttttaatt

SEQ ID NO: 23198 - DNA, 3465 bp, Cannabis sativa
ttttttttttttttgagaaagaaagatatagttgttagtttgatttattgttttcttggctgcaggttcttgcgaaacaacaaggttcttggcgtgatcgtgcttgtgggcaaaggagctgagatgaacaaaattaattatgcaaggcaggtttgcattctcaccagaatttgaactttgaagtggcccccattagattctgataccatggattgaattccagaaatgacaatttgccacaggaaatctcttgtgactcttgatggaaactgcagataatgaacttttactgacagagtgaagcttcaggctaaatggtaaatttagtgtagagaactttagacactttgtggtttcttcttaatgtcaccgctgtttaagctaaagcatacctgagaatccacacttaccttggaatattcttggaaaaacggtttgattctttgttggttaatcatagacaaagtttccagtatgtgatgtgttcaatagatatagctaagcaagcttcgaaatgtagtctagtttttaccagtatagaaacattgtatttgtgatgttaatcatatgttactaaaatttaggagaaaacatatctttttctttttttttttaaataaaataaaataaatataattcaatggactgaacatttatttcatttcattataattgtctccaaagaataaataattgttcaaatttcaagatgcagagacagtcattctaaaattttcaataattttattttttttgggcaaaattgattttctactaagtcctaaaattgtatcaaattttgatatttactatgtgtattcgcaataatattagtaacaaatctactagacatagagttttaattttttttataacataataaataatattctttaattaataaagttattattgatatatatatatatattattatattgttagtttttaaaatatatattgtttgaataaattaaatatgaatttaatatatcatatgattttagaattgctttattattatatctagtcaatactatatttaaaattgttgtcattattgtatttcatctgttgttatcattagcatttgaataggttttatgcataaaaaatcaattaaataatgagttaattaaacacttttgtatataagcaaaaaatcttatttgtacataagaagacagcttatgactccatgtctaaaataaataaaacaaataaaacggcctaaactattcagcataaaatataataaattattaaaataaataagaatatttttttaaaaagaaataattatcaatattttttaaatttatttataccttaggtctttaaactatacatgttttggtaaggtagtttctaaattttattttttggcaaattggtaaccaaacttttattgaaaacataaaatcctcgctcgatgatattttatttatttatttatttatttttgtattgattttaaatagttttatattaatatatttatattatcaaattaaataaatatatattttttttaaatatgtctaaataaaagaagaaaagaacaaattaaaaagcttagataataatatatattatatttttaatatactatcgaagtaaattatattttaaaatttatttttaacttatgttttgcggtgaactcatgaaattactatcgttacggtaaaatttaaataatcaataaatatatatacagttaaaaaattattaaaattatactactccataatcaagtataaaatatagaaaaatttacataaaaaaatacaaaatgatcattttattacacttataccccccacaaggcttggacaacatttttatctttaatactgttttatttactaaaatacctcttacaaacatcatacatgactatctcacttaaagattttcctttctttctttctttctctctttttttttttttttttttcatttttcagttttgattttgaattggatatacataatcatattcagtttctccctcttaatttctcaacacaatttaaaccttgatctttccatcatctcaacttcttccccacgatttctagtctgttttgttcttcttctacaattttctatataatggcaataactccctcatcatcttctccattagtgtgctgcaaaaaaaaaaaaaaacttgttaaacatccaaaagctccaatatatgggggttgtcaaaaatcggttggaaaaaaaagaaaaaaggaaaagaaagatgaatatgattttgttgcacccttacctaaacagaggaaggattgtggtaataagaaatctaaaagcatttgatttcagatggtaaaaaggggaagaaacaagctgctcgtttgaatgaggtttgtttcacgtttttgtttagtttctgctctaactttagttctattacttttagatgttgttaatgttttttgattcatgttgtttattagtcttttttaggtttggtttgttgtctcgattgttttaggttcatttgtattgctcattagttggatttacggtttttttttgttttttaacttcagaatcagtttttgcttgttgactttcttatgggtattgttattatttgtgtatttttatattttggaatcattttttcatattttatcttctattataagctgagtctttgtgtatatatatatataaaagttcacctaccatatgtttgatgaaatgcctttaagaaagaagatatctcgaatttcattttttttcttctttaagttgagttattttcttcttaatattgttttactgtttgtaaaaaggagaagaatcaaactcctcgtttgattgaggtttgtattgcatttttttattttgccatattttaggttttatctcttttaggtatgattcctatgttttgataaatattatttcctagtttgttttaggtctattattgagtttcatctgtattttgtattagatggttttaggtttctttccatttctcaacttgagaaccatttttctctttttaatggtttgttttacttgctgttgattttaatttctatggttttgaatttatgtatgttgaatacttattgcagtgatttgttatttttattattttttatgaatttcttaggtttcgtttatgattcattaattgtttttgttgatattcatgattatatttatagattgttgccgattttaattttgatgtgaaagctctactatgagtagtggagattgcttctccacttggttaggaaaaaaagtatattttatttatgttgtagcattttagttgttgatgtgtttcaatatagttatttttaactattttgattattgttttattgcacattgattgtagtctctttgttgttgcatttgctgagttctttatacatgaaaaagatgttccactagattttgatatcggagcttatcgcacgaggcttg

SEQ ID NO: 23199 - DNA, 2748 bp, Cannabis sativa
agtggaaatttgttaattcaagagtaaactcttcattctttatgctcaaagaagctcaggttgtcatcatgatattggtcaagtgaagtcagcactttcatttcaaaattcaataagacttttacttgcaaaaacctaggtgccttgcattattttcttggtgtaaaggtctttagagataatactagaatttatttgtctcaggacaaatatatttctgaattgttacagaaggctcgaatgcaacatgtgaagcctagtgctacaccaatgacatctaggaaagttttgtctatcaatgatagcaagccactggaacaaccaacattgtatagaagtatcattggagctctgcaatatctcagtcataccctgatattttttttgttgtgaacaaacttagttaattcttaaaaagacccacatatgtgcattggagtgcagtaaaaagggtgctcaaatatcttaaaggaacaatttatcatggtttgcatatagctcatagtgatcatctccatctggtaggattttctgatgtagattgggcatgttgcctagatgatagtggctggctactgtgtctacccgagagattctctggtttcttagtcatcaaagaaacaaaatgttgtagcacgctctagtacagagtctgagtagatctctggctcaacttgcagcaaaaatctcttggttgcagggtctattgaatgaaatgaaactcaagcttccatctgttctagtgatttggtgtgacaacttaaatgccagtgctttatcatctaatcttgtgtagcatgccaggactaagcacattaaattagatgtgcaatttgtgagagacaaagtgcttgaaaaaaagttggagattaaatatgttccatcccatgatcagtttgcatattgcctaactaaaggcctcactccatcacgatttcaatttctcatcaacaagctttgtgtggttgcttcactaccctacagcttgaggggtggtgtcggggaaattggtaataagctggttgataatgcataacggttttagcaatcccaggagagattatgtttgttatttctgtaatgattagttttctgtgagacattttctgtactcgtggcactctgttattggccttgagcctctctgtctgtgcctgatatttctatttaatggaagattgtaactcatgctcattgagctgagttttctctcattaccattcttctaaaaatcaaactgtgttaggagaatcaagttagttgctatttctattaagtcgttagaagtttagctatgatagttgtacaatttgttagctgttagttcagcttgggttggttagcttagcttgtataattacttgattctattatcaataataaacaagacaattctttctgtctcaatatctttctctctttcttctctcctctgtttctgttactttttccaatcgcaaagagattcaacaactctaataactcgtaatttccaataatttagtgctcattgaatatataatgctaagttgctattgctaacacacatagcataggcacgaacactctacaaaaatagtgataggattttcttttcttttaaaaaaaaaacagaggcacatgggttcaaacacattacctgagatcttccacagctcagaaattgctaacaagaaggatacaaaagagtgcaaaacaaattttagaaaacaataaataaataaaaattgcacatgatatgtgtatattgaaaaatgacaaacagctaatgtttatttttctgaaactctgagttgtgatttccgaatgcagtataaatgaatctataaggcatactattctaccattagagtaaagtaaaagcctcacaatgcattattattcttgttattatattatacaatacaagcttaattatatatatagtccaaagattttccaaatccaaaaaccagaagataaataaatataatttaagtagttgaagatgaagacaaagttataggttaatgattcggttgtagacgaataaggtaaggacagtaaaggtagtggtatataaattgttgattgatgaaaaggcaggtccagttgttggataaacttacttatatatatataaatctagtttcgatgatatagattagatgcagactcacttggtctttggtcccctactttaagaactcaattggaacagacaccgttgtccatttaatccaatggttggccaaatctatgtctcactttcaactactctctcttaaaaatactttttcttattaatttttattattttattttggttctaaaaaatgtacctaaatactctaaaaaggatgtattataatttttttttaaaattttacacctgaattacccctatagctaggccaaattggacagagctactaaattttcattcaatgattatattaaatcaccaattaagctgttgtagatataaagaggaaagaaacacattaaactgtgaaaaaatattgttgatatttgtgagtactattaccttatctttgtccagatgtgtaattttgaggaaaaatgaaaagattttagctaaaattataattactttctaataatagaataagatttgttttcttcaaagagaagatatataagtttatttttaacaataataatacttcagttgtatttttagaatttttataggtgattggcaattaaatgtcaagtcaatatgcacatgacaatccttgcttagtt

SEQ ID NO: 23200 - DNA, 3437 bp, Cannabis sativa
cgtaatttattaattacagagttttttttcaaaatatgtggatataatgtaagttatttatgaaataaaaatatttttaggttcgacgaccctggagactcgatcagaggctcaaaatgtcacaacagttttattaagtaatattgatatgattattgagataagttgattatagaattatcgcggtattttgaggtactcaggtttgaccaaataacctaggattaaagattttttagtggctaagaaatgataaaattaatcttttattatcattattattattgttgttatcattttttaattgaataatatatatatatatatgtatatatgttgataaatataaaaataatagaaatcaaaactctcatcatttcttctccttctcttctctcgaactaaagaaaaactaagccatagacccaattttttttttatttctctctatccaaaatcaattccacaagcttttaagagcagctaggagtaagctagcttggagaggaagcttaaggtaagggtttactgtttttcttccatgaaagctctgagtttgaaggttgattttgcatactgtagttgttgtaggtttggtaacactttggtttttattctgggttggtttagaagcagttttgatgctcacttgtgtgttttgcttgctgtgggctgaggagagtcaaatttgagttttaagctcaaagcttgagctctcatggcgaattttgatttagggcatggttttgatttatgtttcgtagagaatgttatattgatgccataaaactattctgtgaagttttgaaataattgcttaaccttggagcaagttttgggactttgaaaacttgaaattttgagtccctactattgtgaaccagaattccggatgatacagggttgtcccaaccaaaattttgttttgcagttaccgagaaatgttaattttcatattttggccataacttttcactcaagtatccattttagatgttctatgtatcgtttcgaagcttgcgacgagctctacaatatggtgtatgttttagagcaaaaatataagttttattttagtgtatttatatcgtagagtttggtaggaaatcctaggttgacctttgcaaatattatgtagtgtttcaggataaacaattattggtttatcattgtcgtgatatattgttgagctcattggggatgtttctctacttgggttggccgacatgcatgaatctagatcataggtaagaaaagtatattgtactgcatagcatgtgatgttgcaatgcaactatattgttgagaattgattgatattaagattaaaacatagttattattgttatgtattgaacagattttatgattaggcaatggcaaaaaggttgtcttattagacaacgatataaagattgcttgattaggcaatgataaaaagattgtctaattagacaacaatgtacagattgcttgattaggtaatgataaaaatgttgtcttattagacagcgatgtaaagattgtctgattaggtaatgataaaaaggttatcttattaggtaacgatgtaaaatttacctgattaggcaatgtgatatatagactcacctcattaggtaatacaatatatggatgtcaggctatggcatacgtttgcctgattaagcaatgtgataaatggataccgggagaggtattcgggttgttcgtgtgagacaactgtgataagtcatgactctaaatagaaatcagtgttaggtttcttcctgtcaacaatgcttgtttaggcacaagcgacaatgacatgtgaatgccaggttgtggcacgggctcgtctaattaggcgatacaataaattagtgccaagttgaggcacgagatcatttaattaggcgatgtgatacatgtgtaccaggttttggcataggctcatctgattaggtgatgcgataatgcgatatattggtgctaggatagggcacgagctcatctgttaggtgatgcaatacatgggtgccaggttttggcacgggctcaccttattaggtgatgcagcgatgcgatatattggtgtcaggatagggcacgggctaatctgattaagcgatgcaatacatgggtgctagattttggcacaggctcacctaattaagtgatgtagtgatacgatatattggtgccaggccatggcacaggcttgcctgattaggtaataaaatgtatggttatcaaattaaatcatcgacttgcttgattatgcaatgtaatatatggttatcagattaaagcatcgactttcctaattaggcaatgtgatgtaataaagatagttactttataaggtaaccgatataatttatattattcaatgaatatgacttatattattagtataatgattttgtattgttgaatatctatatactgatgtttatttgtggtaaatgtcagtagtgagttggattttattttatgagtaatgtgtgattgtttgattctgattatttgagtataaataatgttatttgaataataaataatatgattcctgatatttctttttttgctgagttcttgtgactcatgggtactatgtggtgcaggtaataggtagagaaaattggacgaccatgagtcaggaatcttttccagcaaatgtacatatcaacttatccagcaagtgatgctgagttgtcaggaactgtatttcagatgttctgaacttttaaatatattttataataatattttaatagcatgtcttgtaatattttaattaggagatttccaatcgtaaaaaggggctatgccattattttatgatttacattaattggtaaagtttatattaaattatattttatttaaactgctagtattttgtaataccctaaggttaagaaactagattagccaccctaactagtttaattatgtattaatatggaattatattattatataatataatatgtgaaatgatactgataaattgtgttttaagatcccgttggtgtactaggggcatttttgtaattttaacccgagaagggtaaagattgtaatttaatgatatattgtgcttatgggctatattattatatagtatgtgtattctcttttgacaagtcgatgccgtatagtcacaaccaggtattttgggctgaatcgggttcggggcccgaaatatattttcgggatttagtttagcattaatatgttaattttgaaaaaatctaaaatattgtattgcatatgtgtgtttaggatgactattttgtccttgtttacatgcatgtggttctttttggctattaggggtattttggtcttttggttatttatttcattttcaacaaaatggaatttcggtaaagttgaaatgcatttttctggtttgaaccctcctctagccgacctctctctctctctct

SEQ ID NO: 23201 - DNA, 2432 bp, Cannabis sativa
ggggagtatataaactaatccaggcgtacagaccaagcatagtcatcagaaaggagatatccccaaatttcatttccacaaagccctagttcaacagatgaaagagagtgagagagagaaagctcaatcaaaagccatatccatagccatgtcaggacacatcactcaggactgggagcccgtcgttgtcaggaagaaggcacctaacgctgccgccaagaaagacgagaaagccgtcaacgccgctcgccgggccggtgctgagattgaaactctaaaaaaatgttagtatttctgttttatattcttttcattttatatattctgtttattttcatcgtacatgacatgaatgaaacagaaatgtaaaacatataatctaaaaattattatttatctgatttgttaaaggttgtacccaaacatatattttgagtcgtgattggtaattatttcgaatttactgttctgtattcgttctctgagaaattcacttagaattttgtttaatttttatacatattaatatttcttaatttctatgtttatatgaattttcggaaatttgtttgcattttcaaattggattactgaagagatcttgtatgttaccgttgttccagaaccttaagtgcataaacttaactatttttgtctgcatatatgtcgatttgatttctattaaaactctcgtgggtttgcgtttggtttgccggagattttcaccattcctatattctgacctttccccttatttgatacagctaccggaggaacaaacaaagctgcctctagtagcacatccttgaacacaaggaagctcgatgatgaaacagaaaaccttgctcgtgagttagtttgactttgctttgttctctgatttgttgaattgttcatttgtttgttttccatgctttgtatgatttagaaaacaaacaagacaatctatttttgcctgcttttgttggtttacaattaagttgatagtctttaacacctggctggtattgcagttttagatgttctggttggaatttgtatggcggtgtgaatttaaaatatttcgcttttactaatcaatttgtttattctcagtgtctctctgtgcttctcttttatgctcttagtattatattgttaaacacgtcacagttttttttttattcttctcttgcgtttataataaatttggtgcatgataattagtcatcattgatatttatctactgcaacaaggataagcacggcatgtggttttggttgaggaaatagtatgtttcattaattactgacaaaagtggaagactataaaaaagttgtttggttattctttcaaaggggaaatatatcattactttcacagttcaactagaaaatgatttctcagagcaggtactagtctgccggctcatttgtagtattcaattgtgtatgcttattattttaccttttggtaatatgatggagcttgaagaaggtaccattggctttcttaaagtgcaagtattggttttcattgaatcagcgttcctttcattgtctgcttagtaatgtgttggtttccttactatacgactaaggatgtctaacgaatcagtggttttttcatggtgttgttcaattaataaacctattccaattttactttctcattctaattcaattgctttttttttttattaaatcatgttgctatgttctttgtgtttagatgttgagttgaatgaatttgtatagctatatgctatttggctaaatgatatcgtttcgagtcatgtttgtatctgttgggttgggatttccttgcataacatgtatatcatttcaagtacagatgatcgtgtacccacggagctgaaaaaagctataatgcaagctaggatggacaagaagctcacccagtcccagctcgctcaggtagaccaccctctctccctcttattctagtaccaaaatgctactcattagtgcattatatatatgtataaatattattgatatcgtctataatttttcattttctttggcagattatcaatgagaagccccaaatcatccaggagtacgaatctggtaaagcaataccaaatcagcagatcataacaaagctagagagagctcttggtgtgaaattacggggaaagaaataaagtaatctttgaaaattaacaatggaggaaagcttcacctatgctgtgtttggttgaagttttacgcatgaatctgtaatagctaatcttccgaagacaagactttatgtgcagaaacctatgttttgcaagaatggttctctaaattttctggtgtgatgactcttagttggaaaatcttcagtctttctaatgctttcctctttccatcaagaacaagagcattatgcattgtgttggcaatatagtatatcagttgtggaccgcatatgcatgtctcac

SEQ ID NO: 23202 - DNA, 2620 bp, Cannabis sativa
ttagggttgtttaagctttaatttgatgattttaggtctgttgtgctaagagttgggtgagttgagtttaagaactcaaaaactcactcaacaatagtgaatttctaattttagtgtatttttgagttttgaatatttgttatgttaattttattgtattaaactattctagaaagttttattaggtttggagaagttttgaagtgaaaaacccgagtttgggttgttcagcaggaaagatggcctgccgtttttacagtgaactatataaacggtcgactatttttacatggcatagcccaaagaaatggtagaatggtagaccatttctggaaaatcatggtccattttggagtatttctaacagctaggttttgtgtttaatcgatagggactcatctagttttgagtttaggtcttggttcgggtttgattagattatttaccaattgttgttgtcgtgacatagggccctagattgtcgagctacattttattcaggtcaatccgcacacctaactttgtacttgaggtaagaaaagtcaattgcacggcttaatatgtcaaaataagatacggtagttaccgttgttaagaatgaattcttactttcttttgaaaccactattaagtttcttacttatcggctacttaattaagtaatgatagtgacattagagactctttggtaacgagagtttaggatgctttataaagtatcgagtttggtttgtcttataagataaatggttttttattaacatttaattacactttgaatgactgcttaagctatatgctacaatgtgtgttctgtgatattaaaatattgtgctatacgtgatgttgtgtgttacttgcttttcttggtgagtctttgtgactcacgggtgctctgtggtgcaggtaagggaaaggggaaattggtccagccatgagttagaggtctcccggtaatgtacatatcaacccgccatgttttggttctcaatagacatgatctttcttttgttgtgttttgaatatgtaacaatattttataataagttgattttgtagtatttagtaaaagtttttaactaaagggatccccgaatctagtggtattttgaaagagaagtttaagtaataatttaaataatttcactaaatattttatttaaaccacattcttcttaaactgttagtttattattatgaactaattaataaaaatacatatgtggcgtccttgcagatcagggcgttacaataatgccctatatattgagaaaacataaaaaaaatgacattacgagaaaactgcctgaaaaatggcaggccatttctttataaatggcgagccatttttttgctaaagagtctccaaacaaccccagctccagatcacttaataacatcacaatagactaattctaagtgatagaacttcaaaatatataaaaatccaaaaaccaccactatgagccaagtttgagttcttgctcaacctcaataatcaacaatcaaaatccactaaaacaagcttaaaacaacttgaaataactccataatttaacccaagtaaccctgtgttcgaatagaactaaaattactatttttgcatgcttgatcttatttaaactttacaaacttaataagaaaagtgtttagggatttactttagcttgaattactttaacaataggtaggaatcatcaagaattatggagaaccttgattctttagagccaaaagagaagagagagagaggaaaaggttgtgttttctttttcttattctaataaaaataacctaaaaatgcttatcataatcctttaatccaaaatatactcagcttaataaaaataaaagaaattatccacaattccataataagacaaagtgaacctcttggataatttccaaaattactcctaacttaccacttaaataacccttaagtttaggagtaaaatagtctaaaaccacaatctcgcctagtccctatattccacatatcaacatatgaatatcctgttaaaataatgattctagactaactcatgtgactctatcagcctttcatcacatttttcatcgttaccaagcaaaaatcataaaaatattaaatttcacatatagcataaataatacacttaaagtttaataaaatctctgaaattgagaagttataactctaatgcaaattttctaaaaatgggacccacaacatacatattcatatataatcataaaataaaagtaattaatgctaattgccctgctaatccatattctgatcatgcggtcattataccttatatgtccaacataaccaatcttattgcggaacctaatggaaggggtgtgttcgttacaagtggggcatgaccttgtaccctttggtgctctccaaccagacatcaaagcatatgcagggaagtcattaatggtccaaaaaattgcattacacattgtaaatacaatctcgctataagcatctcaagcttggacacttgtcttccacaactcactacaagaattatggtcaataccaacgccactattaccaacgcctaaaagtcctcattaaaaatgaaggtatcaataacgacatttgaatgtcgttgggaaagct

SEQ ID NO: 23203 - DNA, 3913 bp, Cannabis sativa
aagggtctcaaaatttaattttactttacgccctatataccttaggattgacactactgattctatagctatttttctttttcaaaattctttttgttacatatatgtaaccaacttattttttaattgtaaattaattttatattcattacctatgaaatatcttgagtaataacgcttagcttaataattttcagaataattaattaataaaacaacaaattatataatgaaattatattaataccgccgttagtttcactatttattagaagaaaatatttacaaataaatgaaattctcacattcctctctctcagtctttgctgacttgtctacattatcattactcaatatgtacgttatatatactgaaaaattaataacataattgattattaatattagacatcagtaataatcactaatattaattgattattaattttagacattaaaacaggcaaaacaggaggaggtaattttttttaattttacctcaattttttttttatctattttacttatagatccactttttatatatttttttacgttaatattataattattaataaataaattaagaaaatgtacatattatattatatggaaatatattaatttaaagacattaagaaaatattaaaaaaaaatagctactacattaatattcattgaacattttagtttaggtaattgagaaatgtaaattacaacctcttattcaactttcacgtttgaaatcacatatcgaaatattttttttcaaatttttttatagcggtattcgttatagttacaatattatccctgtaagtttttgaaaaattccgaatagtttaccgtaccgaaaatagagttcatgatattccagtttaccaagcgcgttcaaaaaacttcaaatgtatttttgacaccgtaaattattcgaaatttttcaaaaatttacagggatgatgttgtaagcataacgaacactcccgttaaaaaaatattccgacatgtatttttgggcgtaaaagttaactaagaagttgtaacaggaggttgaccgtaacacttcttgtttgatacttattttgacgttataaataggataagaatcagcatatgtatctaactaaattaataatagtagtctgcaacatttacatagatgatatatacagctagcatgcgactggttatcattattaaagaaattatttatatttatatgtcagttcatgagttaattacataatactctattactttttatttctcatgcatgtgcgttttatttgaactttatgaattatgttaatattaatgaccacgttatcaaaataaataaaagtggaaaagaaattccaaaggaagatttctaataatgagtacacacacaggtgggtttcgcattggaggttccatggaatgcaaacttacctcgagtagagaccagattctacattgaacagtatggtggacaaaatgatgtttggattggcaagacactctacaggttttggttatttctatatatcattattattttgtatatttaattatttaattattttcttaatcacgtggggtgaccactatggtatttttgaactctcagaatgcgaaaagttaacaatgacgaatatctagagttagcaaaacttgattacaacatttgccaagctttgcattcgattgagtggcacaatttgctaaagtacgttcaaattttgtttataagttaatttatgttggcatgtatatataatatatatagttaagtacgtattcgtaagttgcatgaaattaattactactatgtacgtggatacagatggtaccgagattgtaagttggaaaattatggagtgagcagaaggaacctcctcttggcctattttcttgctgcggccagtattttcgaaccggatagggccgatgagcggcttgcatgggctaaaacggcagcactgatgcaggccatcgaatcccatttcgatgaccagcaagcttcttcggagcttcgtatggcttttgtctctgcttttaaaaggagttgtaacatgccatcgtatttgattacaaggtaaattatctctttctgttaacttataattaacttttgtatattgttccttttagctagctaagcttacttaagattgtttttgtgaaaagtgaaatgtcatatttagtattttgttttatgaaaagattgtaacatttttatttttatacttgttattttacatcataaaaaagttcttgtttttaagagataagccttgttttattatataaatatatttttttgaaagctatttattattattattttagtgacaaaagaatgttatatatgggacggcagaagattccaaattgcaattttcggacactgttggcaatttgctttttatagattttcaaaataataagtatagttatctaaatttcttttatgccgtaccccacttttcaatactcttttggaaatagttccataattttttatgtttttttctggaccattgtaaataaaaaagaatggggctcgttgctttcctttgcgccgcacattattttaaaaataataatatcatttttagcaatttttttttttaaatgaaatcatttatgtttaggtggctttgtggttgccttacatttggatcgatctaaatgtatgtcatgtgacaagaaaattaacaagattaatcgaatataaaatgtattaattgttggtccctagattttcttaaattgatgaaagtctaattttttcttttcaaaagattgtttttaattagattgaaaaggtttcataacgtatattataaaaagacaagataatatataatacatatttttttctgattaaaaaattaattaaattgtattatatatacaaatttatatgcagggtgtcgaacataagtgatacagatcatggccttcttagaacgttgatgacgactctcagccacctctctttggacacaatgatgctgtatggtcgggacatcacccaccatttacgtcaagctgtgagtgccatctcttttttgcatcatatttaacttaagtcatctcttataattactgtagagtgtgcaaatcgtgtcctgtcgcctaattaattttcatatcagacatgtcttgttttttactagtgcctaattgttatttttatgttttttaactttaactcacaaaaacttgtgaggtatttggaggtatttgggtagacaagctaggcgtgcgccttaggttcttgaccgctcaagcctcaaaattgtgaaaaaaaaattattaatatatagataaaatatgaaataaaaaaaaaatataacaaatattatttggtttaatagtaaaaggttttactttaagtcaaaaggtcaagggatcaatctttaatctctacttttttattttttaagaaaaatgttaaagagattaatctctaatttttatttttttaaaaaaatatatttaatgtgtagctacgaaggtttaaatcttggagttcttaaaatttttttaaagctttaccattatactaaagcattagaacaactattttaataataattaaactatatatatataaggacttcaaaatttaattttaccttaggtatcatatactttaggaccagccctatttgagttgtgtcacctaaaaatttgtttagctacttttagtggctggcattgtagagaaagagagagatataagttaaggttagtatttttaagataagttagatgtacttaaaaaattaggattttttttttaaaaaatattttatgtgataagttagtgttaagtagatcgtgtcatgtttactttattttttattttgatccacttcaaatatattttttgaccataattcgtgaaaattagtatcatatt

SEQ ID NO: 23204 - DNA, 2991 bp, Cannabis sativa
  modified_base (552)..(562): a, c, t, g, unknown or other
attaagtttcatattaattggaattaaattatggaataaaaaaaagtgttaattacaattatacatttaacaacacttatctaaaaggtgttaccattctttatttatccataatcattaacaacgcttaccttaaagtgttgctattgcttatttttatttattttaaaaatataaatttgaaactataaaagttatttagcaacacttattttaaaagtgtgttaaattataaaaataaataggttagcaacactttttcattaagtgttgttgaataagtgttgctaattttaatttttgtagtagtacctgtctagtttgcctatacttatagtcattacaaaattttttattttaattatagcaaaacttatgactaaaagtgaaaaaaaattgtgactaattatatgttgtgattaaaaggtctatggctaaatatattagtcacaaaaattataatttgttataactaaatgtatttttattagtcacaatacttgttgtgattaaaattaaattagtgacaacttatatttaaatattatgttnnnnnnnnnnntaacattttgttgtgactaaaaatcatatttagtcacaaaaaattatcacaaaaaataacagtttgttgtagaagtcgggcgtgatgaattctgaaacatcttgaaaatagcaatttattttagttgtacattttaattaaggaagtctagctcaaacctggtttgaggggatgaagtgatcataaaattaagaaatagttaatgaagcctagatatggtagctagaatatatattttaaaagatgacagaatatcactattgttatagttatttaggacacatattattttattatagtcatgtatattgagtatgtggtcctgcatatttttgttgtaacatcatgtttgcatgtatatatatctcctatatatatttgtgtgtattatcaacaataataatagatgtgatacacgacgattgcatctttttcatttgttttgtaattttggaacaagtaataatacatgaagagataagatgatgatataatatatagtgtctgtgtctcctgcgttgtcgagaaattaaaatgccacaaaagatatatgtatataatatttcatgaaagcgtagttattaattttaatttgattagtcaaccatcaagatttaagatcaacattattgaacgaaactaatattagatgatcatatggttgtaactagttggaaaaatattgatatggaaatcagacagtggaaatcaatctatatgtaaatgttttctgttacaattattttataaattttgttaggattaaactccttctattggtttctatgaaatatattccttaacaatgatcttttgttttaaatattagtgaaaaaaaaaaaacaatgttgtaacaaataaatagtaagattaaaactaataatcttacgaaaagagaaaagattaatactaataaaataatcaaacttgtattatgtttaatatattatcacttttaattatatatatctaaaaactaattaatatacatatatttttttctcgatattttttcatgggtgactgtccctttctatgtgggtgcgcccataagtattcaggatatagtataacttcactgtagtttggatgagtattatcatttctcttcataatatatttaactttgatcgattattttcaatgaagtgatgatttgttaaaaataataataataattaataacgaacacttataaacatgcatggttaatttaaatcataataatgcattgatcacgaaacgttacatcgtttgtgcttttattattacaaataattaactatatataatagaactaatttgtacgtaataaaaagttggctaaccaattactataagcttacaaatatagtaattaatttcatcaaaagcataacatacaagtaattaattcatcattcatgatgagttaacagcactacagatcctcctaatctgaccagctgagccagtagtaggttcaatatttcccattttaaccatagctgaggcaaaatcagagttaaaagtggaagcagagttagtatactcagtaacaatagagtcagtttctccaccactgaaaaggatttggtctgaagctagaagacccttttggtcaaccaaattagtgaagtaattgttgtcaaatgaatttggtgtaagggtatcaagtggtgccaaatttgaatttccattgggacttgtttgagggcatccatttctaagattgcttgcaaaggctgcatcaatatcagttgcattgtatatcctctcacggaatgtaaagcattgagcttgtccaattgtatgagaacctataataaaataatataaaaattataatcacttttaatattaaatttaatttattttattgggcttaattgtattaaaaaaatgaaatttgtacaccacgtacgtttaatttttttttttttattgtggggtaatttattttttttcaaaaatacagtgtatattaagttttcacaaaagatagtatttttataaaatttcgtgtagcagtcaaaaaattgtaaaattttactcgacgaaaaatcatccaatatttttgtaaaaattcctaaaaaataaatatttataagatttttttgctataataatgaaacgataaataattaactttttaagagtgaatttgcttatgtatgtatataataaaacaataatatataaactatatatttatattcacactggtgaaattttatttattattgtacgcatttaatttaattgttataagtaaatatttgtataaatagttgatgattaccaaaataaaactataatatatatcatatttgttattggtgcaattttattttaaatttaaaaataaatataagatttctgtgtatagtgcatttaaataagtagtccaaataattattataaaaattataatattattatttgtgtaa

SEQ ID NO: 23205 - DNA, 6788 bp, Cannabis sativa
cgaaaaaggatttcagcactaaaaggttgcgacaacttcgccttcttcaacgggaattttcacttgtttatgaggtgttctgaaaccaaaacaatctctatcagttgcttcaatcctgatcgcaacaaacttgttgggcgtatcgaacttcccaaaactaacggctttccaaccaccagatctgggaccccctcccctgtactattgctggagtgagtgagggtcgtgtacggttggctagggcagcattaccaaacttcgaggataaggagcgaagctatttgtggaaggtttgggaaaacaatattaatggatcgtggagtttagtgcacagcagggcttgcagccctatagtaggggaaaacaagcggataatggatacatatgcgctctgttttcatctgtagaatggtgacgttatgttcaccatctcagaagtacatagacacgtctttcgtcacaacattagagaaggaatggtagaaaaaaatacttaaagtagtcaaaagagatgatatcgttaattttcgtcgacgaattgatcatcagataacctcaatacaagtcaccttagctgacaatggatggcttccttttcctttccaccttactcgtctcaccccgccaactccacttcctatccaccttagctgacaatggatagtcctatttgactaaatttttgtttttgcttgaagctaaaagccaaaagcaataactttttttaatgtggttggatgactctagggttgtttagaatgggttaatactagcaagagaatgataatgttttcacattactttgtttgttttgagggttcaatcttagaatagtatttctttagtaatataactatccttgaggatgataatattgataccttaaaaaaggtgggattgaattattctcttcgagtatattaattttaatatcattttttaattaataaataaatttaaataccattaatattatgatttattaacaataacatacaataaatttacggatggtgtacataaatgacatattaaaaatagataatatagtgataaaatataccaaacactcctctaaagatatagggaatgtctacagtacacccccttaaaggggtgtttcaatagatcccctatttgttttaacacttaaaaaaagtagttcaattttttttttcataatcgtgtatgttatagtaatttaggaccatttataaattttcagaaaatttcgaataatttacattgccgaaaaataaaatttatacattttatttattttacctcactctgctaaatgatcactttgctccaattgatgttgatcatatccttacaatcccactgagtttcttccaaattcatgacaacctcatataacaccatacgactactggtgcttatacggtcaagtcggggttccatttagctgactccttggctgaaattgatgaatcttccacatctaacagccgtggtaattggtggaagaatttttaggacttaagttacctcccaaaataaatttttttgcttggaaggttatccaaagcgctttgcctgttgctgccactgaacaaaaggaaagtcattgactcagcgacttgttcactgtgtaaccatgcttgggagtctataggacatgctttgttcacttgtcggtatgcaaaatcagtttagaaggcagcacaaatcacaattaactactagaaggctcatcatatgcaagatggagattatgtgattcatttatcatcgatatactcgaaacaagagtttgaaactctaatttgtattatgtgggctatttggtcagagaaaaataaagttttacatggtggagtaaggcgagatggatcctatattgtttcctatgcaactcactattatggaaacttccttgccactcgcaattgggctaaagcgcctactgccatggctgcaccaactgcaactgaacaacatcacaagccaacggagggagttccatggaggccacctgatctgaatggtatcaaacttaatgtggatgcggcgatcaaccaaatgacaaaaacactgggtattggaacgattattcgagatcataatggagttgttcttgttaccatttctaaatcggtccaaggatattttcgatcaaatgagatggaagcgaaagctctctttcatagcatcaactgggcaagtcaactacaaatccctgtaacaaacattgaaacaaatgctttaagagtctttaatgtgctatcaattacattcttagatttgtcttctttttcaaatttaatttttgatgttctttatctaaagttgttgtctcaaatgttcggagacatgctaaccaagcaacacatgggttagctaaatatactttagagttagataaagatgtctgttagatgagtgtaattcctcattttatattttttattgttgtaaatgactcttaattattcttttataataatagttgagattattctaaaaaaaataaataaaataaagtaaaatacttaaaacatattataaattggctcacctattttatcatactcttattctaatggtttcatgtgtactaggttaggaatgaaggattcctttggagtttggacagtgacgaattaaaagagtatattttattattatttgtatttgtgagacggttttgttttgccaaatgccaagccatggcttggccgagtcccaactcagaggcgatatagtagaaaccgccttttatctcaaaattccactgacacacaaacttctcgtaatctcaatttcttcacttcaatacatatccttgtttatttctgtatatgcccccatttcatttctcattaaaggacgctctttgattcatcttacaggtttgcttttcttcttcttttccccgaaaaccacaaagccattgctctatcttctttcagttttgtggtttatactctgtttatatatatatatatatgtgtgtatatgtaatcatgtttctgtatttcttcgtacaaacacgagttatagtattctgtttttctttttttttttcttttttgctttgatattgaaagtttatcatctctctataattgaacccagaaaagaatgagtctttaaagttctaaggcatacttttcaggaaatttctgaattttggagagattgcggtaaatgctgaaaatgccggctacccaattcagcggtggttctgtttctaatggaatgaccggcagagccagtaaaagccaccatattgcagaaaaattcaatcccacttcttcggtgggtataagggactccggtaaatttgttgcttatactagtaggcagaagttaggccatgtagatatagttgggggctgcaatttggccagaagacataggcaatctttcaatccgttggtgacccatcgtagaaagaatcgtttttccctggtctgtaatcagaggagttcagatagtggtgccagttcatcggaggttgatgaaagattggtttttgaagatgagagttctcttgatggtggagccaatggtgcttcgtaagactactaattgatacataatacattacatgtttttgttttgatgaaattttcaagtcttttgtattatatgcacattttctttgctacttaatggttatcttctctttatgatagtgaattggcagacgttcctagcgttgtatcacctcgtccggatgtcaagcgtgagatattgatgctttctatacctgctattgcggggcaagcacttgatcctttagcacagcttatggagactgcttacattggtagattaggtatgagtcattgatacgtttaagattcccactacctctagattgcctgtgaaattgattttgtttgatggtttttctcatcttggttttgttgttaattttttgtagtcaaattcttaatgctttcactttcaagtaggaatttataggtaatccattgactaattcttatgttctgcattgtttattgttaggctctctggagttaggttcagctggtgtttctgtgaacatctttaactacatttcaaagctatttaatattcctcttctcagtgttgccacttcttttgttgctgaagatatttcaagaaatgaaaataaatcttcttcttcaggtgaatttaatgcccttgtaatttattgtatagaaaagtattgttccgaattaaagatttcagagatcggaaatgacaattcctctattttgaactgattgccgtgcagagaagcactttctaaacgacagtagtaacggtagtagaccttttgatgaagtagcagaaagaaaacaattgccttctgtgtccacagctttactgctagctgttatgattggtacatttgaagctttagccttgtctttgggagctggcttgtttcttaatatcatgggaatatcatcagtaaggccctaaacactcagtatatcgggcagattggctaactatctggttttccttatctctgcatgattgcacatgtattagtatagtaggttctctgtatactttttgttgctgtaaaatacttgtatttgtttaattgggcaatgccattcttgtaatggtagggataattttgcttgctttttaaaggccttgtagcaatgtttcagtttacttttttcaagcacttaaatcccaatttaagaatattcttagttctaaacatcagtatgttaacaggattcacccatgcgggctcctgctcagcgttttctttcactaagggctttaggtgcccctgctgttgtagtgtctttggctcttcaaggagttttccgcgggtttaaggatacaaaaactcctgttttatgcctaggcaagtgtttttgtaacttttttcaagtgagatatgtcactattatgtcttccatttgttgtcgttgtgttcttttgcatttcttcaaagtagagtcaatcatcatgcaaatttacatggtgctgtgtatgcaggtattggaaatctattagctgtgattttatttcccatacttatacattctctccaaatgggtgcaactggtgcagcagtttccacagttgtgtctcagtatgtattctttgaatagtgttgcacgttttctgtttattgctgtgataatccctcaacataagatcttgcttgaattttcatctttcagatacgttgtcacattcttaatgctatggtttctaaataagagagcaatacttctgcctccaaagatggcatcattacaatttggaggatacataaaatctggtaaatttgtaatttttattttttaaaaaatatttaaaaataaaaatgattgttatgagattgaactcttcctcttttgtattaggtggttttcttcttggaagaactcttgctgttctaacgactatgactttgggcacatcaatggctgctcgtcaaggcccagttgcaatggctgctcatcaaatatgcatacaagtatggttggctgtttcgcttctggttgatgccctgggtgcatcggcacaggtatcatctctttctttgacttatattgctgttataatgctttgatcctaccaaagatgtgtttgctttggactactagttttggccaagttttgcggtcatggttgaaaatgggtaaaaactagactcataccggacctgtcaacattagagggatactataaattaatttgttaaaatttctctgtgcagagtcagcatattcacataatttagctcagttgatttatgactgttgtttacttataggctttgactgcaagttatctgtcaaaaggtgactataagactgtgaaggaaattgctcactatgtgctgaaggtaaggtcttttttttctgtgctaattgtctatcgagctttcttgtacctaaatacttccacagatttttgaatgttcttaccgattgagttttgacatattttagcttaactgtcttccaggtaggattaatcacaggtcttaccctatctgcaattttgggtctatcttttggttcattagccaccctgttcaccaaggatgctgaagtacttgcaattgttggtactggagtattggtatgtgtaattttgctgttaacaagtccaattgctttatgcattgacttcatactgacaatgtttaaaactgttacagtttgtcagtgctagtcaacctcttaacgcactcgcttatgtttttgatggtctccattatggtgcttcagattttgcatatgctgcccgtgccatggtatgctgaacttttgaaaatcatagaaatgtccttttttgggtctgatctgattgcatattttgttgctcattttgactacaattgatctttttgtagatggtggtgggagcaatatcatctgcatttttgctatatactcctgcagtcattggtctacctgggatttggttcgggttgactctgtttatgggtttgcgtgtggtggctggattttataggtaacattcaatatttgaacccctttttattgtttcttcttcttttttttcttgatattattaatataataaatgcataaaatttatgatgaagcatgagctatgggattttaaagttctttttaatgtgcattctactgtgaaataagaacataattaattgatcctagttcatcataagctgttgaaatatgtttgttttctctatttatggtgtgcttatgtgaacatgataaggattaaggagtttttttcagaaaatccatggtctggtatcatctattgctctattactaatgtaacacatc

SEQ ID NO: 23206 - DNA, 4247 bp, Cannabis sativa
taaatcctggtaaaatattcccaacagttccttcccatgtcttaaatttacattgtcttgcagggtgtgcccaacacattacttgttggacaagcatcttctatgtttagagatcttcctgcagtagaggctgctgtgactgtcgcccagtactctgagcaacatccaaccttgactaggactaagcaaacatatcgccaggctcccctaactgaccctcatattgttgaactcatggtaagagggagacttcgataggttgagcaggctgaacaagttgaggttggccaagctgaggagcctatggtcggtcgggctcgagattcgggacccgggacccaaactggggaccaagaacccaaactcgaatctgggacccaaactcgaacacagacccagtccctaacctggatctttgacccgaaccccgacccggacccggactcgggacccaaacctagacgcggactcgagttgagcccaggacccctgactcggaccccgatcccgaaccctaaacctaaatccggacacggacatggacctagacctcggacccagacctaaactcaagacctggacaccagacccggactttgatccaagacctagacccgagactcgagaatcggatcttcactcggacccgaacccaagacccgaccccagacttagaacgggacccaaactcggactgggacccaagatctggacccagaccctaactcaagaccaaacccgaacccacactcgagacgcaagcctggacctcaaaccccaaacccggacgccggacctggacccaggcccggacccaagactcgacccgtagttggtgttgggattgtgtgtattgaaaatatagtataactttacataatctattaatacaagtcaataccgaacatagtattgtattaaataataccaatacaatacaattcaacacaatgtgacgtatcaaacgagcccatatataatttattatgcataacaaagtgtttgtgatagaagacattgtttctcattatacccttccatcttactttctagaacaaagttgaacaacagtacccaacttttttggcctcagtccagagatccattattttaagaaccatttgaatgatgaaacaatatttttttaaaaaaaatgtattaatattgtttataatctacatgttcccagagaatgttgcgagtcaaaaactatgagaaaatagttttataagtaggtttttcattttcttcaatcttatcaacatgcttagggaaggcatcatatagaatttcttaaacatcatagagttcattgacttcattcatgatgtatgcaatgttacgtttcaaacagctacaaccaatggatatttattgagttaaaggcttatatttatttaatcattttttttctccaacgccttactagatatataatattctacactcagtagcctcttaagaagaaaaagaacattgtggaataccacctttagcaatgaaatcatctatagaataaaataatctccaacaaacagtttctaccaaaaagacccaaacacaaagcatgggaatgaaaactcgaccaatattcacaaaggccatgtatgatctaccaaaatataagttacaaaaagaacgacaaaatagataagaatagtgttgcaacaaaatctattgatgaatatgcttcttccccaagattactgtcttcagattaagattttagactccactagcagctctaaatgaacccccactaacacagttcaacaaattaaacacacttcctccactatttatgtaataaagtcgaaccttatagatatggtgatcatgatggggacgatactagattctagtttataaatgatttagacactttcagataccataaaaacagagggcatagatgataatttacattaatagatagttggtgcatatccttctaccaaaacttccatttatatctacagttctccaccgtggtgcatatcctataataaacctttgctttctaattctttggccgctgctacatacaacaaaaagaaaaaaaaaaagtgaaaaacgttagacaaacttatagaacaaaaactagtcctttacttgagaatatcctttatcaagtaaagtattgataaatataatcaatacaaatgttaagtatattaacaatcttttctctttactagcaatcaaatagctcagatggagatacgaaaaataataataataaaaatattaaaacttaaacatcacaaaagcaatgatgatggactcacaacaacattaaaaagcgtgaaaaagctcacctttagactgcgaaagaacaacaacaacatgcatagtaacattattaggaggaagctgcaaacgaagtggatataactttccattcaaagggctccgagtacacattatgatgccctcaataccagtttcttcctcaaatctacgagtcaattcttcaaccccattacccctaaaagtgatagagtaaccctccaccgattcatcgtttacttcaccatttccatcagctatatgataataaatagtcctcccatccaactttggtggcgaatccacataagaattagttgactgccaaaaaaaaaaaaaagaacttaagttacccaaatcaaactcccaataatttaagcaatgaactcataatcataatacaaacaattaagaaagaaaaagagaaggcacccagtacatgaaattaactataattacctcttgtctcgagtaattcccagatttaattgaaggtgaactcgattcagaatccaaggaatcagaatgaggaatggcatgagccgacgatctcatacgtggagactgaacctcgatctcaacaatctcaacatgccacaaaatccagtcctgagtggaggttcgatatggaatatcgtgggtcaccgagtttctccagggaggcaaacctgtattggctcggaggaagtgtccacaccgggttttgaacttgacgtggttcccctccttaatgggttcccactcaatcgacgaatcaagtccccttggaaggctctggacgactttctgaccggtcataccaagcaagaaagcatggttggatgcggtgaggtacttgttgtagttgctcttaagtcggataacggagtcggatccagttacgaactcgatagtccatcgggcgttcttggaggatccgtttcgaccttggatcaccgattcctcatcttcatcggcgagtagaaacttatcgtggtggctgcggaggcgcactgccttagcgttgtggaaaatgtcaattgcagacctgaagctaatgttgtcgattaacttaggggatgggatttgctgcttcttctgttaccacagaacaccccaatgatattaagtaagacattagtttttgacaatcaagattggattttaacatgttaatgatactatgggtgcaaacatctgaacgaatctaatttaattaaattaagaaaaattgaatatctaattacaatttgattggattggaagataaaaattagattttaattggattaaattaattattgaatgttattctcaaaaacttaattaaaaataaatctaatttaattatattttggggaatactgtttgttttttttttttaaaaaaaaaaaaaattatggtttaagtttctaaattgttgcagctctagttgtaataagaatttctataagattttttgttgaaatttaaaaataaaaaagcctcttatatttttttgtatattaaaatatattattcatattttttttttatgtataataaaaagacatatattttagttatacttttagtgaactttattcatgttaaatttataacattttgttgttttgtatatttattttcataatgtgttgttttatttgattacttaataaaatggttgttttacttatattaaactttaaaaatatattctagttatacttttaatgaactttatttcagtgtttaaatttgttaacattttaattgttttgtatatttatttttataatatcttgttctatttgattacttagtaaggttgttgttttacttatattaaactttagttgtattagatcacttgtaacaataagccactaaggctagcttagtggtgagggaggaatgggaaaaagggagaggtcatgggttcgaacccaggacctttaagttattaagctaatatatgattgtaaaaaccattacgc

SEQ ID NO: 23207 - DNA, 3074 bp, Cannabis sativa
aagatttgcaattcttttataatgattgtattaaaataatataacctcttattgtattttattatttgataaaattatcttaattatttaatctaaatattatattataaaattatataacacaaactattgtaataaaaaaaatcttattgtaatcaaatttaatccttttgatggtaaactctataatttaaattttacttaaataaataaactataaaaaaaaaatatttttcatagataacattaaccaataaactaaatccaaaagtaaacttgagttattataactaatcaagttcttgtaaaatggtaaccaatgaaatcagaaaaattatcagttctacatgcaatcaaagtgaacaggcaaccattcttaaaagaacgaccctattcgaattgagagcagaacctcattcttaaactaatgatctagctaagtaataatattactcaaccaaaaataaggttgccaattacttagctagagaacttgatttgaagccatactactatgaattgttacctatatactacatagtagttaaatcaagttattgtttaatgaaagtattcattgcaattcacacaaaaatatgtactaactctttgattttagcctcaatttgacaaattgatcacttatctctacctttacacaagatcttaaaaatagaaaactacttgatttgataatttgatgttttctcttttatcattcattgtgataaaaatttaaactaaagagcaagtaataataaaaaactgattcagcagtggtttgataataaaatgaatttaccaaaagtccaatcagtaatgcaaccataaaattaatagaaaaatcttcaatcttagctaagatcacagaacaacaaaatctatgtagttcagaaaatagggtccaacccaaaaacacaaaattcttcggaataaacccgaaactctctacttcttctcttccttttcggcctctgcagccctcttcaaccgagcaccaagatggcgtgcgtttgtacgctccaacctgagcttgttgtaagccttgaatgacttcatgtcatcggtaatcttaacaagttcaaatgctggcttctcccgagcaataggcaagaactcgccttggacttgggtagcattggctaactcctctggagctgagtctccagcctaaaaagcaaacgagtaaaagatgagataacataatcataaacatggttactgctacaacctaatgaatacgaaaaaaagactatctttaccttgaacttgcgggcacgtcttgggaagacaacaagtttggctttgtatgtcttaagcctttgaacattagattgtagaccctccaaggatctgttcctacggcggtgatccactgagattccaatggtgggagcaagcttctttggaattccagcagcctggaaagcaaaacaacaaaccctatacatcaaaaacttgtagccttagcaatccatctcagtgtcccgcttaaaatatgctgagaaactatgaacccgtattgtaaaaagattcataatttcgcaaaggaacacagcattgaatccagaccaaaccatggaaaatacattcaaatcattaagtaaaaaccaaaacaattatcatcttcttcatcctcaaaatattttgcatatagaaaatatgatcagaaacataagaacacacacagacaccactttttccatatttgcacaatttaaaattaacagaacaatgaaagccataaaacaaaataaaaaaaatttagtaattgttggtatgaaattatcataatcccaaaacaacctaccttgagttcttccagtgagaagcccctgccagcccgaaccttcatgttgtacttcaaagtttgtccatggacaactgggcgaaggggtccagcagtaggcctagggaaaatcttcacagccttcttctgacgagctgatcataataattttataataaacacaaataaatgtatcaataagacaactcaaatcgaacttcactaaaccaaaccaagtagaaaaagagtaactcaccaatccttcttcgggtcttcctagcaggttggttaaaccatgtcttgacatagttctgccaatgcttcttgaaatgtccattaggaataacattgttgtgcttcaccatggcttaccttacctacaaaaaaaaacccaccaatgaatcagaactagatcctaaaaaacttctcatttctaataaccaataaataaagttcacaatagcccatgttcataaaaacccccaatgaatcctaaaacacttctcatatctaataatcaataaatgaaattcacaaaagtccatattcaaaagaatttgattaactaaaaccaaacaaaccagaaaagttgcttctgaatccaataaacaaaaacataatttggtatattaagtaatatcaacacataattatatcatcaaatcactaaaatataactacaatagactaaaaacaaactaataatccattttccccttaaaaatcataatttttcatttcaaattttctctaatttcagatttttttggttgaatcttgttcaataaataaaaagaaattaggtatattaagtaatattaacacataaatatatcatcaaatcactgaaatataaatacaatagactaaaaataaactaataatccattttccccttaaaaatcataatttttcatttcaatttttctctaaattcagtatttagataagttcgaaccttaagcttgtaatactctataccatagatcaatataaacatagatacacaaatatatatactcaaatatacaaaaacgcacatgcatatatagatatataatcataaacaagaattagttacctttgtccggagaagagaagggattgagagtgagaatgaggcggcacagagctctgtctctgagcttagtctgtatttagggtttaaaacaaaaccaagcttttacttttagggtttctaatgtttgtgggcctaatgggctatggaggcccatataggcccaaaatagaaataaaataaaaatgggatttttttaggaatata

SEQ ID NO: 23208 - DNA, 2578 bp, Cannabis sativa
tagggctgttttgtggccaatcaattgttgtcacatcacatgtattaaaaactaactttgacacttgttggtctggattatagctcctttttaattttatttatttttgtactgtttttagtattaaagaagaaagagaaagagaaggaaggtctatggaaattgcttctttcttttcttcttcattctataaatgccagtaggtttataattttacacaattttttgtttctttgtacccaaccacaaaaacaagcaaattgatagtttacccaaaatttacaaatttctctatttgattatttttaaagctttatttcttttttgtagaattttattaatatttatttactcaacccaaatcttatgttctggaggaggcacctaaaaaaaagaataaaagaatttcttaaggagaggaagaagaatcccaacttcccaagtttgaggtcagcaatgaaaatgaatatatgcgtagggcccactgatagaaataatagtcttgagagaatttatgtggcaatagtttgaaatgacaagtggaatatttctcctgcatttggcctcgggtatcaaagaaagagactcttaattactactttctattatagtttttgagttagtcaatctctatattcgaaattacatgttaaaatatatttttttaattttttaataatagtatttgttatagttacagtatcaatgctgtaaagtttaaaaaatttcgaatagtttacaatgtcgaaaacaaaatttctaatatttcagtttaccatgcgtgttaaaaaaaatttcaaacgtattttcggcactgtaactattcgaaaaatttacagagatgacgttgtaatcataacaaacaccgccattaaaaaaaatgaaaaaatattccgacatgtattttcaagcacgaaagttaactaagaagttgtaataagaagttgatggtagtactcgtcatatgagataaggatatcagtgatgctcatcagtttttatagatgacattttacgattggttagtaagattccctaaaaactatttttttttaaattatataatactcgacacttaattgcatcaatagtagtatgacactgaagagagtgttagacacttataatatcttttaacaattttcatagaagaaatgctaaaaagtatcctttgtagctagcactcttttaaagtataatattaatataatttaatattaagttccacttatttttctttaataaaaaaggtaaatagtggtataagtacctaaaattttaagtttgtaagtgacataatctcaatgtttatttttagcgctataagtacctaattttgtaaaactgtaatttttctctaatttcatcaagacaagctctattatttgcttaaacaaaccacatataaggtcaagattcttgaccattgggtttagacagaaacatatagtatcacttacttccaaatgttcttttaataaattcaaaacggaatctgtactgacaaaaactgaaggaaaatttcagttttacaaacattaagtacttatactgttaaaactaaatattaaatttatgccgcttacaaacttaaaactttaataagtacttatgtcgctatttaccctaataaaaataataaaaaatcttttatacgctaccacttcataataatatttcgcaccttaatattccatagcaatggccggagtataaatcaggcctattatagaatcatcccaaatatatgcacaagtggagaaagaaagtctctgtgatggttttcactcactgtcagtgtcaagtttagaagtttgaatagtgattagtgcttgaattttccttggattatacatataaattcatataatgatttcacaattttgaaaattaagagtatttggggcagaaattaaagtaccttatagcagagtcgtttggtgttgaaccttaaaccctttgacatttcaaacttagaaagctcaacagacaccaaccataatgaaatctgaataaagaacattaatatatcatcaaagactacttttttttctattaaagcaacaattagtattttcaaccttattgacattttagctctgaaaacttaattacccattactctaagcagccttataatcaaaaccaagttcagaaaaatgagttttcaaagagctttagtaaagtaatgttaattagtctttttgaggtgagaaattatgagagtgaaaaaaacaagctactgtctttgtcttcatggcaggtagagggaaagtagggtaatattatgggcaagaatcagtccacgtgtcaaagatttacatgttacaagacattaaaagttgctttttgctaatcgaatcagacaatttgtcgttaccatatgtgaatgtggctttccgtgaaggaaaaaagaatcttgagaaaaaaccattttttagaccaaaaatagtgaaggctattatacatactactactattataatagaataatttgtgacatacatatttaagttaatttttagttataaataaatacttaattttaatttttagtggtaataatatttaaattata

SEQ ID NO: 23209 - DNA, 2304 bp, Cannabis sativa
ggggcagtttcttatgattaattttagaaagtaaaagaaaaataaataataaataacttatagcataatactttaatttcttataaaaactcataaaattagttatatttaaaattaaattactataattattaattaattttatatgatttgttactaagtaaagatcttttagcaattaattttgtttaacttaaataattgaaatatttgtaataaaactacttataattcaaaattattacacacatgaccttaattaattaaaaattgtaaaaatgacctctaattagagggaatattaccttaatcttattttcaatacctttcagtgtcaaatcagtgtgtgtagtcctagattggttgaagttatttattttttgaaaaaatgaaaatttaaataaaagaatagttaaaaatgtaataaaaaatataaaattaaatattagttaactatttttgctcctctttgaaattatcttcatcaatctagacattgtaaaagaaatttccaaaatagattatcaactaattgagattgttgctttttttttttttcacaaataagcataatagtatgaaaatagcaagaaaatagctaaaaacaaaagataagtctaattgtagttggtagattggagaaatgagtttgtaacagagatgtaggagattacatcgaagtaaaaaattcacatgttagattggaataaattgtaaccttaatttttgaaattgaggagttcttttaaattttcattttttttttgaaagggaggaagatgtgttgatcgttgttacaaaatgataattagatgttatttttatattttagttcgtattataactttttaactgtttttattataaatattacagttaaacagttaaaaagttataatacgaactaaaatataaaaataaaattatctataaatattaattccttaaaagaaccctgttaaatatttaaattaaaaaattaattattttaaaaaataattaatctaattttaaaaaatatttacttattaataacttgttattaaagataaaaaaaaaatataactattaagtaatcgccatatactttcataattcatatactcatctctccccttatcataacataaagtctaatatgatttgtcatatagatgaaatgtgttaatgcaaagtgaccacataaatttttgacaaatctgttgtcttcaattattttttgaagtttcaaatggggctggaatctatatatgccatcccaagtgcattatttctttttcttttgattggtttgtccaaaaatatatagaaaagaaaaaaaaaaaacaaaacaaaacaaaaggccttttgtcaatgggaatctttgtacccgctctatactaatgaatagaatcaacaattccaatcatacatatccaaaaatcacattacatataagactattgttgttttattccactgtttgtttcatgtccatattgagtaggacttgtaattaagtatatatatttacttaaatgttgctcaattttttcttaccatcatcattgttttttcaaatcaattgaatatgtgaactaaaacaattgatgaaatgcatttacttcaacaaaaagagatagtttattcattttaacaaatattacattaaaactaattaactaaacactatttagaaaatttcaatgaaatgttaacataatgatacaatgttatgttttaattatattttaagaaattttttttctaaataatatgctaagatattgtgtggaatttgacacaacaataaataattctttttaataaaatgttgttattaaaatgtgtaagtgataaaaatgactaagtattaaagtaattctacaccattaatagtaaataggagataatataaaaaatatagtaggctccaaaaaaagcattattttactaaatggaatagatagcttgagggcaacagagctcagccagagaaaagtgaggagccaaactcgagaaaataaagacgagagcttgaagagctctaagagcataagcaagaaagaaaagcacatgaagaagcaaagatgaactaatccatgtggaataatctgaacatgagaaaagtgaaggtccaactatccttcacgcctataaatagaagaccccatccttcacgcctataaccttggttatttctgaatttgaagttagctttcaactcctccatgtttctatggagaatccatggtttgtcccataactcgctgtctccatctgcaacaattatacctacaccatcaatacatattttgcgagcct

SEQ ID NO: 23210 - DNA, 1912 bp, Cannabis sativa
aaacgtattagatgtaattggtttgcttaactttccaatttaaaattttggacaaaattctctaaactattttatttgcaaattcaaggggttgttagtttgcttagttaaaaatttgactacactatgtacatatgtcattttttattagtccaaaatagttttaattatttaaatattattgtaatttattaaacaagaaaaagttcttaaaatttaaaaattaatttaaaattaaattacacaacgccatcaaatacaatgaatactttaaatcaaataatataacaagataatcgcgcactatcgaacactattcacggaacctactgtgcaaaagaaaggatagcgaaagtatggggtttcactcgtttgtatattttaatcaggcgctgctcgcaaaacaagcttggagacttcttacacaacctgactctcttcttgccaagtttttgaaatgttaatattttccccatagctctttccttgatgctaattttggacactccccttccttagcatggcaagggatacattagagtaaagaattactctcatcaggtttgcagtgaaaaataggtgaaggttgtagagttaaatgtgatgttgacccttggattccaagacactcccctttataactagttttctatttgagtccttcagatgacgtagtttcaaatcttatcactgatgatagacaatgggatgaggcgctcctcaaccaatggttctcttcgttagatgttgatcatatcttgacaatacctttgggtttctttaggtacaatgatacacttgtctggcatcactactcatctggtatctactcggttcaaacgagttatcattatgcaacgtctcttgaagatattaataacagctcaagctcgtcttcaacagatcagtggtggaagttcttttggtcactcatgttaccacaaaaaatcaaaaattttatctagcgtacttacaatgatgcgctcccctattgctactactttggtcagactaaaacggatgctacttgctctatctgcaaccaagtatgggaatctattggccatgctcttttcatttgcaagtatgcaagagcggtttggcgacacttaaatcgagttattgactagtccaattcgtccacgacacgcaagggagaatatctagttcatttgtctataatatacacatgtgctgaaatagaacacatctcttgcatcctttagttgatttggacagagagaaactgagtgatacatggacacaaagttaaaccagcaaaggacctggccatttttgcaggaaactatctgcataattttttatctgcacaagcaaagtacaactccaaaactagcgcaccagcacaaccactttcttcagatgctaaacctgtctcttggtcacctccaatgcttggaaatctcaagttaaatgttgatgcagcagttgattcaacaaaaaaagtaactggcgtggggactactattcgtgactcctttggcaatgtaaaaactgccctttcaaaaccaatcattggtaactttgtggctcacgaaatggaggcattggcgatgtttcataacttaaattgggacttcaacttcattagccaattattcaagtggaaatggatgctctatgagtctccaacgttttatgcaaactttgatctccaattttttctttctaagatttaattgtagatattgatagttttgtatcctttcttcttaatgtgaatataactcatgtcaaacgtacagttaaggctactcagaagttaacaaaatttagtttagggtggatgaaacttgcttttgattgaattgtatctctccacctataaattttgttgttgtaaataatttaccatcttaatttataacaccaaattttattctaaaaaaaa

SEQ ID NO: 23211 - DNA, 4983 bp, Cannabis sativa
  modified_base (28)..(53): a, c, t, g, unknown or other
atatgatatataatccaattcaatatannnnnnnnnnnnnnnnnnnnnnnnnncgttccaaacgagccctaatagtagtaagctgtatcttctacaagattacacttattcttcttcaatattgttatttagattactcttgtcactaacttatttatgatattcatcttccatacctgtacacttatttgtcttttttcgcaggtgcacgggccaggtgcagatatagacacgctctgcgttggacctagacatgcaacaagagaagtgtgttctacgttcctcttttataatgcagctcaattaattttacttctttaacttttttaacttgagcataaaattgcacctatcaattggatgcaggaagatttctttggtgaactacatagaatgttagctgagatgcctgaagttacagagttgcacccagtgcctgatgctcacgttccagttatgaggttcaagtttggtggggtttccatagatttactctatgctaaactgtcgctctgggttattcctgaagtaagtattgattttattcttgaagatggttctcttcatcctaatctgtatctgttttttttttttttttttaaaagaaacaataccattattgatgttgaaaaaggtgagaacgtcaaattagggaataaaaatgaaagagaaactccagccaaaataagtgatttttccattgaaaaatttcatgggaagaggaaaattcttgaattccttttccatagatgtccaaagggattctaaaattttggctttgatttgccatagaagccacattgatcccccctccccccatctcttaaaatttgactatttaccgttaatcatgtttgattttgatcgcacgtcaaaaaaaaaaaaaaagatttgactatttgtgttaaaatgccgtttgtttatgtttatggttgtctggtgaaattatgggaaatgtagttgaatttgatcactcagttcttgttcactaataaataaaaaaaaaaatcttatagctacttcacattttgcaagagatagttttaactaggaaaaattgatgatgtcaagtttcgatggtgccatatagtcttttgcggattgggtattgcctattatctgtgtatgatactttattttgcaacaggatctagatatatcacaggactcaatactgcagaatgcagatgagcagacagttcgcagtctgaatggttgtagggtcactgaccagattctgcgattagttccaaatattcaggtttgtttatagcctttttaggttggatgtgtgtgttgatgcgtctacaatcatgttacaatgtttcattcttgtttcttttttgtgtgtgcagaattttcgcacaactctgagatgcatgagattatgggcaaagtgtcgtggtgtttattcaaacgtatgcttgggattttctattatgctagatttcagattgcggatagtggttgtcattattttttttactaattagagtttatatctttaatcatgcccaggttgcaggatttcttggtggcataaattgggctttgcttgttgctcggatttgtcaattatatcctaatgcattgcctaacatgttagtatcccgattcttcagagtgtatactcaatggcggtggcccaacccagttatgctttgcatcattgaagaaggatctctcgggcttcaagtttgggatcctagaagatatcataaagatagatttcatctaatgccaataattactccagcttatccttcaatgaattccagctacaacgtctcgtcgagtactttacgaattatgtcagaagaatttcagagggggagcgatatctgtgaggtatgataaaatttagtaattacgtgttccttcccttggtaaacatgtattagttgataactttgaatgttgatctgtatgattttcttctccatgcaatgagatgaaagaaactattttggtatatttttttaatgatgattagtggtttagcttaattgtttcttgtttgcagtatcatgattgtattattaggtttttcctttcacattatggatttgcattaattatttttgaaggaagttatctttcttttgctattagtttttccttttttcactttattggctatcacccatttatatttgtgtggcccctaccacttgcctatacagcaggtgaggtgaagctgttacttttgggagactcaaatatattgttctggatgttctccgtaggatcttttttgttgaacttaaagtttttattaaaatttaaatatagttcatagcttttaccttttcaaaactaaatttagtgttcttgtatttctacttgaaggctatggagtcgaacaaggcagactgggataccctttttgaaacatttccctttttcgaagcatataaaaactatctacaaatagacatcaatgctgaaaatgctgatgatttcagacaatggaaaggttgggttgaatctcgtctacgtcagctaacattgaaggtgagaaagctacctatgctatatatgttccgtttctgctattttctaatgatcaggggtctattttgttcatgtttctaaattcagattgagaggcacactttcaatatgctccagtgtcacccccaccctggtgatttttcagacaaatccaaaccttttcattgtagctactttatgggcttgcaaagaaaacaaggaggtttggcaaatgaaggtggaacctttgatatcaggttaactgttgaagagtttaaacaggcagtgaatgtgtatactttgtggaagcctggaatggagatccgtgtatgccatgtaaaaaggaaaaacatacctaattttgtgttccctggtggagttcgtccaccccgcccgtctaagttaacttgggatatgaggcgtgctttggaacttaaggcgtctggacacgcacaaccagataagtcagatgaaagtaaaacggttttagatggagcagaaggtcgcaagagaaggcatcctgatgataatgttgaaaacaacataagaaatataaagtctgcggccccctgctgtggggaagatcttgacacacgctctcctgttggcactgtcagttcatctataaaatgcgacaacgtccacccgaacaagttcattgaatcacaaactgaaatatctgagaaaaatctagaagacaattgtaaaaagatagaaaacctggcaaacattcaaaatcagaatggtgacagtgaagtatcatcatcaagcagtccgcgaaccaaaacttcaccgaaagctgtcgctcatgcatcaagttctactgtagcagagaagatggatattgaagaagtcatgccaggttcgtatgctccacatcaagcagtgttagaagagcttgaagatgatttcgaacatagaaataaagtgaaatgcgagatgaaaggcaatgaagtggagtcttctatgcaaaatgagccaggtgttccagtagcctcgatatgtcgaactggtccctttaatggttcatactctaatggtggcgtagaagagcttgaggttaaatctgttacttttatttgcttatttcttgcatctgttatactattatcttgttatcttactctgtttgaaacttggattttagaaggaaaaaacaaattaatttcaaggaattcaaagattatgaattaatgtctaacaattttctttttttttttttagttaaatctatacaatatcagatatcagatgtgtatatacatatgtagtggcattatatgaaaattggctgtgtatatatttatgtgcatcagatgcttgtttttagtgttgaagaaaaaaaaaaaacaaatttatatgcttaatgtttgacaagttttaaaaaaacaaatttaaatcggaaagatcgttttcttctgtttgtaggtaaggggatttagaagttagcaaagatttaaaattttctcaacccaacagatacatacaaaaaggaaaaagttggtatgtactgtgaaataattctgacttgttttctattttctgtttgatcttttgaagcctgctgaacttgtggcaccaccagtttcaaacggatgctctgcttctataccacagcggaagccaatcataaggtatggaagtaatgaaatggaaatgaagtaatttttattttatttatttatttatttgattgcatttttaaattattgaaatatcattttaatagaatgttttttctactgtttgttttgaaagaatgaatatttcattttgaagaccattcaattttttatttatttattattttttatacattttaaatttaatttaattctaatactattctcatttttatttgtatgttttcattttttcccactaaagccacattaaacttaggaaaattgatctaaaatctaattattacaaaatggaataagactagattcggtgtgccgttttgatatgatataattaattatcttgtgttttttctcctttttttcacttttgcaggttgagtttcacttctttgcctggcaaaagctcgtgaagaagagactgacttcttatcttaatgtataataagaaattcacgtaccaagttttttaatattattattctcatttctagtacatttttcttcttttacaaaaaccatctatttttctagtaataattattagccaagagatttccattagaggaaaactaccttttatgtgctggagggaggtatctggactgtattgtttgtttgttttttttaagtaatgaaatataatttttaaatgttaaaaaaaatataaagttactagatggcattaaaatgttaaatatataattttagggttcaagggtaaaaaaacattttctcctaaaataaatttattttgtttttttaaatattatagttaaagtaaaacattataataatgggctatttacaaaaatatgagaaaataaagataagttttgatatatat

SEQ ID NO: 23212 - DNA, 1181 bp, Cannabis sativa
gtgaatgaatccagcgcgaagcgtagtcgtaaatgatccaatctggtttggaggattgtaggaagtcggctagagccggctcgagcgagtcgaaggcttgtttgagtagagattgggcggcgaatggtacttcggcggctgactcggcgttgaggggtagatttggtattttacgtgggaaagtgagggtaacgaggttgaggagtgaggaaaggtgtgggggtattttgggaattttggttaggtttcttggtgtggagacgaaccaaactttgtgacccttttgggctaaagacttggagaggtggaagaaggggattaggtggcccatggctaaccatgggaatacaaccacctgaagattttctttaaccttttctttttcttccatgaaaattgcagcaatggaaaatgaaaaatggagaaattaatatgagaaaaaaaagtagttagttaattaattaattaactaattatgaatggttttgatgatataaaatattgtggcggctttgttgaccaaaaatattcttttgtgcatgcataatatatgctacaatccaaaagaaacattttgttgcaatttattatcatcactaaaacatgttagtggggtataaatttttacaaaatattaaattttggttaatatttacaaaaatattattataatttttttaaaaaaaaaaaaataatgtatttttataaaataacagtagaacacaaaacagaataactaaaaataacagtggaactaaaacaaccgtactaaaacaactgtagaacaatgtacacagtatttttgaaaaaaatttcaccccacagtagtaaaaaaattaaaaatttcagtatgtggtgtaattatcctaaaaaaattagtctaatttttattattattatgtatgtcttagttatttaagatattatataaaattttaaaaaaaaattaaaaaaattaatgcataaaataaaaagttcaaacaatctgatgacttttttattttgaacacacatgaataaattattttaacattgatttctatatttttttaaaattttatacaagtgtaaaataaattttaaaaattaaattaattttttttttaacatccaaataaaaaaaaaaatacaacaatacatcccttttagatgagtgaaattacctataagtttaattatat

SEQ ID NO: 23213 - DNA, 5574 bp, Cannabis sativa
tattttaaataaaaattattagttaaaattacttgtatgtgtcaagtttgtgtgtgcatttatcattaaccaatttttttcttttaaaaccaaagtaaaaaaacaaaaaacaactgccaaacacggccttaaatgttggataatgacaaggcaacgcagatctaggattattattgaaaatagggtcaatttacaaaattttgttttttaaaacactctttagttacttttcccattaagctttggtaactggttacccgaattctctttaataccgtttttaaattccgaaaacaaaaaacgctataaattcaaatccaaacaacacgcttttccttctctcatttctttctttctttcaaacacaaaagccttttctctctctaaactctcaggtcggcgaaatcgtcaccgcccgtggatctttcttgctctgcttctgcgaggtcgtttcacggcgaatctgtgcagatccaggggtgatctgagtctgaaggttgtaatcggcggcgttgatcttggttgtgattgagaaatggagaatcttatctctttggtgaataaaatccagagagcttgtactgctcttggtgaccatggggaagctaatgcattgcctactctatgggacgccttgcctgcgatcgctgttgttggtggtcaggtcagttaccgatcgctttctctttgattgcttatctattgttagatattctgctttgttttacggtggaattgatttaggtcgtttcaattttttggattgaaagaagctcctttatggtgtattaatcgatttaacttgattgctttatatttaatacaattccatacttgattagtgtactaattgagatgtttgaggtgatctattttgacaaggttaggaaaatttaatgtatgctttgactcactagtcaaaactgagtagaaatctaataatgatatttggttttagctaaatttgttgatgactaagattttgtaatggaggaattaggcagttataccgaaatttattgtttgctttacaaaatttagtgataacaatatcagttctcaccaataataattgcttctttgttgttaaacagagttccgggaagtcttcagtgttggagagtgttgttggcaaggactttttacctcgtggatctggtaatttataggattttcattgaaacaattttgttcagttgagcactgaaaattgttcttcttgaacattatgggaattatgctatgcaaaatatgtgcaggaattgttactcggcgtcctcttgtgttgcagcttcataaaattgccgaaggcagcagagaatatgcggagtttctccaccttccgagaaaaagatttactgatttcggtaaactttattatttcattatcatactatcagccctgaacatagaggaactgattagtgtaatataacatatttgatggtgcttctccttgattaggggtggattgagtgagagctagatacatttagttattgattttacttactttacatgaaaggcttgccatatctgtctagttgttgtgaggaactgattactgtgaagtaaaatacttgtctgtccttccctatgcactgatacattgccttggttagggataggtgaggatctagagagatgcatatagttatgaaatgtttctttatttgacattgattgtcatatttgtgtagctgctgtgaggaaggagattagtgatgagacagatagagaaactggccgcagcaaacaaatctctagcgttccaattcatctcagcatattttctcctaatggtaagaaagggaatgtatttgtctcttcttttttttcctttttttaagaatagcattattgaaagtgcacttttgttcgtacttattttgacacattttacttttgcttgctgatggcagttgtcaacttgacacttatcgatcttcccgggcttacaaaagtggcagttggtaagtattgacatctcttgatttgggcatttggcaacacgtacatctttcgagacattgggaaattttcttttaccttaaatcttataaatgatgtggaaaatttcttttaacttgtgaagagaaaagattgttgcgtttcaatattaaaaaagacaagtacatgaactaattgagtatttttctgctgctactattctgggaatctgttatgtaaacatagactttaattttttttattttgtttcctttttctgcaataaataaatgcaatatagtaaaaacagatgtgtgacaaagtattttatttaatgaggcagatggtcagtcagagaatattgtgcaagacattgagaatatggttcgtgcctacattgaaaaggtaatataatattgcagaagcattatttactttcattttaccatctttcctatttggctgattcagttcttgataaaactataatcaaactatgacttcattattaattttggttcttactagtcttccatgtttctagtttctctatgtattttttgatggatgttgcagataaattatcttactcttttgcattattttgttcaccacccttgcagcctaattgcattattttagcagtctcacctgccaatcaagatcttgcaacatcagatgcaattaagatatctcgtgaagtagatcctacaggtaacattatatgaatttttaagcatcaaaagctggtgcacttagagcatattttgtgctatatttatatatttttattaatgatttttaacttgtttatttttttcccatgtccttaggggagaggacattaggtgtcttgacaaagattgatcttatggacaagggtactgacgcagttgaggtaaggtaactttattatagaagatagatagaaattgacatttcctttacagcttaagatatttcgttaactttttgtgtccaatttttttctcttcttttgtttatccatttctcaataatctgtggctgttattttgttgcaaagattttagtcttattgtatatattttctgaaccatttatgatcatgcattggatttgaagtaatattacagattacagttaatattgcattttttctcaaactgtctttaacgcatggattcaccttggacttctgttttcatatttaagaacctgaaattactgtaaaaattgctattgtctatggtttctagatgtcagatatgattgaaattgtatgtgatatgtgtagctactagctactcagtgacatgctgatttgttatttttaaaagcattttcgttatgtcttctgagtcatttcccttttgctctgcttagattttggaggggaagtcttataggcttaagtttccgtgggttggagttgtcaatcgttcacaacaagatattaataagaatgttgacatgattgctgctcgacgtcgggagcgtgagtactttgctactacaccagaatataagcaccttgctcacagaatgggatctgagcatctagcaaagatgctttctaaggtaagcacagggtcatcatctactattcatttctttgggattaaaaatgactaaggtgatcgtatatatgctatatttactgtttgaatggtgttaatatttcagcatttggaaacagttatcaagtccaaaattcctggcatccagtcccttatagctaagacagtttctgatcttgaaaccgaactgtctcgtcttggaaagcctattgctgctgatgccggagttagttttgttcattgtcttttatttttggatcttacacaacattatacaagaagtagtaactctaactgcttgcgtttttacctgcagggaaagctatactcaatcatggaaatttgtagaatttttgatcagatatacaaggagcatcttgatggagtgtatgtgtcacacttaatggtcctaaattgggccttttgcttcgatgtagtttacattaattacaagttttttgttcttctactgacaaaattgcattggttttatacctgtaatgtttgctcacaggcgtcccggtggtgataagatctacaacgtatttgacaaccagcttcctgctgccctaaaaagactgcaatttgataagcagctcgcgatggaaaatataaggaagctcataactgaggcagatggttatcagcctcatttgatagctccagagcaaggataccgtcgactcattgaatctactttaattaccatcagaggtcctgcagaggcagctgttgatgcggtatgtatttttaagtcattaagattaaataaactcttttgacctttcctgtaacttctttctgtcgtatattaatttatagctttagctttgtgaaaaaacggagttgattacttgtagtatgatagattcgagaatgtaggcttttaagtgcccagaaactttctttatgtgaaccccaaggggtgctggaaagtgccagtagatgttccaagtttgaatcctcaaactggaaaatggccattgggaggtctctcggtcaaagtgccaagccaaaagaaaaaattatgtgccagacttttcaatatgtcttgtgaaattactaagaaatgaataatgaagaattttttgtcattttctactccaggtccattccctattgaaagacctcattcacaaggctatcaatgagactctggtatgtgtggccttgactaaatttattgctttcattcatatatatatattgatatagatacatactgtgtgtagttcttggcttttcagataacaaaactgacattatcgtgtcgtttgaaattgtgcaacctgcctaataaatgtttgtttttgactttggaatttacaggagttaaggcaatatcctggtcttagagtagaggtgacaaatgcagcgattgagtctctcgagagaatgagggacgagagcaagaaagccacgcttcagcttgttgatatggaaagtagttacttgaccgttgacttcttccgtaaacttcctcaagacgttgaaaagggtggcaacccatcacattccatcttcgacagatacaacgattcatatctaaggcgaattggtaaatttttcaactcaaattccgctaaaataaaatatctcttgtcctctcttactgatcataacttacccttcacataaacaggaacaactgttttggcatacgtcaatatggtctgctcaagtcttcgtaactccattccgaaatccattgtctattgtcaagtccgagaagcaaagcgaagcttactcgaccatttcttcgcagacttgggaaaattggaggtaagctttagaataactcactttctttcttatacctaatcaggtgcgggtctaacttgaatgtgtttttacagcaaaagcgattgtcgtcattgttgaacgaggatccagctgtgatggagcgacgagcggccctcgccaagagactggagttatacaggagtgctcaagctgaaattgattcagttgcttggtccaaatagaaagatgatgatgatatgattaagaggctttgatttataatatcattcattccccaggttatatatatgtgtacatatat
